United States Patent Application Publication US 2019/0348154 A1 - sequence listing, part 113

SEQ ID NO: 426665 - DNA, 447 bp, Serratia marcescens
atggacagcctcattaccttcgaaaaattgacggcgcaacacctgccttacctgtatgagatccgcttttccgttgaggaaaacctgctgcatccgcatcagatccagtatctgcagcgcaaacaggcgctggaggacatcaaccagggcggcggctggatctgcaagcatggcgacgactatgccggcgttggcttcgggctattcatccctgaaccgctgatcggcggcctgttcgtgaagccggaataccagtcgaaggggatcggctccgccttgctggcacggatcactcactggatgtttgaacacggcgccgaagcgatccacttaaccaccgatcccggctccaaagccgaaggcttttatcaacatcacggctgggccgtggtcgggcaggatgaattcggccaggtcgaactggtgaaacgccaagagggtgactga

SEQ ID NO: 426666 - DNA, 4224 bp, Serratia marcescens
gtgaaagacttattgaagtttctgaaagcgcaaactaagaccgaagagtttgatgcgatcaagattgctctggcctcgccagacatgatccgttcgtggtcgttcggtgaagttaagaagccggaaaccattaactaccgtacgttcaaaccagagcgtgacggccttttctgcgcccgtatcttcgggccggtaaaagattacgagtgcctgtgcggtaagtacaagcgcttgaaacaccgcggcgtgatctgtgagaagtgcggcgttgaagtgacccagaccaaagtgcgtcgtgagcgcatgggccacatcgagctggcttcgccgaccgcgcacatctggttcctgaaatcgctgccatcccgcatcggtttgctgctggatatgccgctgcgtgacatcgaacgcgtactgtacttcgaatcctatgtggtggtcgaaggcggtatgaccaacctcgagcgccgtcagatcctgaccgaagagcagtatctggacgcgctggaagagttcggtgacgaattcgacgccaagatgggtgcggaagctattcaggccctgttgaaaaacatggatctggaagccgagtgcgagcaactgcgtgaagagctgaacgaaaccaactccgaaaccaagcgcaagaagctgaccaagcgtatcaagctgctggaagcgttcgtgcagtccggtaacaaaccggagtggatgatcctgaccgtgctgccggtactgccgccggatctgcgtcctctggttccgctggatggcggtcgtttcgcgacctcggatctgaacgatctgtatcgccgcgtgatcaaccgtaacaaccgtctgaaacgcctgctggatctggctgcgccggacatcatcgtgcgcaacgaaaagcgtatgctgcaagaagcggtagacgccctgctggataacggccgtcgcggtcgtgccatcactggttccaacaaacgtcctctgaaatctttggccgacatgatcaaaggtaagcagggtcgtttccgtcagaacctgctcggtaaacgcgttgactactccggccgttccgtaatcaccgtaggtccatacctgcgtctgcatcagtgcggtctgcctaaaaagatggcgctggagctgttcaaaccgttcatctacggcaagttggagctgcgtggcctggccaccaccatcaaagccgccaagaaaatggttgagcgtgaagaagccgtcgtttgggatatcctggacgaagtgatccgcgaacacccggtactgctgaaccgtgcaccaaccctgcaccgtttgggtatccaggcgtttgaaccggttctgatcgaaggtaaagcgatccagctgcacccgctggtttgtgcggcctataacgccgacttcgatggtgaccagatggccgttcacgtaccgctgacgctggaagcccagctggaagcgcgtgcgctgatgatgtccaccaacaacatcctgtcccctgcgaacggcgagccaatcatcgttccttctcaggacgttgtactgggtctgtactacatgacccgcgactgtgttaacgccaagggcgaaggcatggtgctgaacggttccaaagaagctgagcgtgtttaccgcgccggcctggcgtctctgcatgcgcgcgttaaagtgcgtatcaccgaagacgtcaaaaacgccgaaggcgaatggacttctcagaccagcatcatcgacaccaccatcggccgcgccatcctgtggatgatcgtaccgaaaggtctgccgtacgcgatcgttaaccagcctttgggcaagaaagcgatctccaagatgctgaacacctgttaccgcatcctgggcctgaagccgaccgttatctttgctgaccagatcatgtacaccggttttgcttacgcagcccgttccggcgcttccgtaggtatcgacgacatggttatcccggccaagaaagcggagatcatcgaagaagcggaaaccgaagttgccgagatccaggagcagttccagtctggtctggttaccgccggcgaacgctacaacaaagtgatcgatatctgggctgcagcgaacgaacgcgttgcgaaagcgatgatggaaaacctgtcggtagaagacgtggttaaccgtgacggcgaagtggaacagcaagtttccttcaacagcatctttatgatggccgactccggtgcgcgtggttccgccgctcagattcgtcagctggccggtatgcgtggtctgatggcgaagccggacggctccatcatcgaaacgccaatcaccgcgaacttccgtgaaggtctgaacgtactccagtacttcatctccacccacggtgctcgtaaaggtctggcggataccgcactgaaaaccgcgaactccggttatctgacccgtcgtctggttgacgtggcgcaggatctggttgtgaccgaagacgactgtggcacccacgacggcatcctgatgactccggttatcgaaggtggcgacgtgaaagagccgctgcgtgaacgcgttctgggccgtgtgacggcagaagacgtcctcaagccgggtacggcggacattctggtgccacgcaacaccctgctgaacgagaaggcgtgtgacctgttggaagagaactctgtcgacagcgttaaagtccgttccgtggtgagctgtgaaaccgactttggtgtgtgcgcaaactgctatggtcgcgacctggcacgtggccacatcatcaacaaaggtgaagccatcggcgttatcgcggcacagtccatcggtgagccgggtacacagctgacgatgcgtacgttccacatcggtggtgcggcatctcgtgcggctgctgaatccagcatccaggtgaaaaacaagggtagcatcaagctgagcaacgcgaagttcgttatgaacgctgcgggcaagctggtgatcacctcgcgtaacaccgaactgaaactgatcgacgaattcggccgtaccaaagaaagctacaaggtgccttacggtgccgtgatgggcaaaggcgacggtgaagaagttaacggcggcgaaaccgtcgctaactgggatccgcacaccatgccggtcatcagtgaagtcagcggcttcattcgcttcgcggacatggtcgacggccagaccattactcgccagaccgacgaactgaccggtttgtcctctctggtagttctggacagcgcagagcgtaccggtagcggtaaagacctgcgtccggcactgaaaatcgttgacgctcagggcgaagacgtattgatcccaggcaccgatatgcctgctcaatacttcctcccgggcaaagcgatcgttcagctggaagacggcattcagatcggtgcgggtgataccctggcgcgtattcctcaggaatccggcggtaccaaggatattaccggtggtctgccgcgcgttgccgacctgttcgaagcacgtcgtccgaaagagccggcaatcctggctgaaatcagcgggattatctcgttcggtaaagagaccaaaggcaaacgtcgcctggtgatctctccgctggacggcagcgacgcttacgaagagatgattccgaaatggcgtcagcttaacgtgttcgaaggcgaagtggtggaacgtggcgacgtcgtatccgacggcccagagtctccgcacgacattctgcgtctgcgtggcgtgcatgcggttacccgctacatcaccaacgaagtgcaggaagtttaccgtctgcaaggcgttaagattaacgataagcacatcgaagttatcgttcgtcagatgctgcgtaaaggcactatcgttagcgctggtggctccgagttcctggaaggcgagcaggctgaagtgtctcgcgtcaagattgccaaccgtcagctggaagctgaaggtaagatcccggcaaccttctcgcgcgatctgctgggtatcaccaaggcttccttggcgaccgagtccttcatctccgccgcatcgttccaggaaacgacgcgcgttctgaccgaagctgccgtagccggcaagcgtgatgaactgcgtggcctgaaagagaacgtcatcgtgggccgtctgatcccagccggtaccggttacgcttatcatcaggatcgcatgcgtcgccgtgctcagggtgaagcgccggttgttccgcaagtcagcgcggaagaagcgacggctaacctggccgagctgctcaacgcaggcctaggcggcagcgacgacgagtaa

SEQ ID NO: 426667 - DNA, 4029 bp, Serratia marcescens
atggtttactcctataccgagaaaaaacgtattcgtaaggattttggtaaacgtccacaagtgctggacataccatatctcctttctatccagcttgactcgttccagaagtttatcgagcaagatccagaagggcagtacggccttgaagccgcattccgttctgttttccctatccagagctacagtggcaattcggagctgcaatacgttagctaccgtcttggtgagccggtcttcgacgtcaaagagtgccagatccgtggtgtgacgttctctgcaccgctgcgcgtaaaactgcgcctggttatctatgagcgcgaagcgcctgaaggtacggtcaaagacatcaaggaacaagaagtctacatgggcgaaattccgctcatgaccgaaaacggcacctttgtgatcaacggtactgagagggttatcgtatctcagttgcaccgtagtcctggcgtattcttcgacagcgataagggtaaaacccactcctcgggtaaagtgctgtacaacgcacgcatcatcccttaccgcggttcatggttggacttcgagttcgatccgaaggacaacctgttcgtgcgtattgaccgtcgccgcaaactgcctgcgaccatcattctgcgcgcgctgaactacaccactgaacagatcctcgacctgttctttgacaagatcgtcttcgaaatccgtgacaacaagctgcagatggagctggtgccagagcgcctgcgtggtgagaccgcttcgttcgacatcgaagccaacggcaagatctacgtagagaaaggccgtcgcatcaccgctcgtcatatccgtcagctggaaaaagacgacattcagagcattgaagtaccggtagagtacatcgcgggcaaagtggtcgcgaaagactatatcgataccaataccggcgaactgatctgcgcagccaacatggagctgtcgctggatctgctggccaagctgagccagtccggccacaagcgcatcgaaacgctgttcaccaacgatctggatcacggcgcgtacatctctgaaacgctgcgcgtcgatccgaccaccgatcgtctgagctcgttggtagaaatctaccgcatgatgcgccctggtgagccgccaacgcgcgaagctgccgaaagcctgttcgagaacctgttcttctccgaagaccgctacgatctgtccgcggttggccgtatgaagttcaaccgttctctgctgcgcgacgagatcgaaggttcgggcatcctgagcaaagacgacatcatcgaagtgatgaagaagctcatcgatatccgtaacggcaagggcgaagtggacgatatcgaccacttgggcaaccgtcgtatccgttccgtcggcgagatggccgagaaccagttccgcgtaggtctggtgcgtgttgagcgtgcggtgaaggagcgtctgtctctgggcgatctggataccctgatgcctcaggacatgatcaacgccaagccgatttcggcggcggtgaaagagttcttcggctccagccagctgtcccagttcatggaccagaacaacccgctgtccgagatcacgcacaagcgccgtatctccgcactgggcccgggcggtctgacccgtgagcgcgccggctttgaagttcgagacgtacacccgacccactacggccgcgtgtgcccaatcgaaacgccggaaggtccaaacatcggtctgatcaactccctgtccgtgtacgcacagactaacgagtatggcttcctggaaaccccgtaccgccgcgtgcgtgacggcgtggtgaccgatgaaatcaactacctgtctgctattgaagaaggcaacttcgttatcgcccaggcgaactccaacctggatgaagaaggccgcttcgtagaagacctggtcacctgccgcagcaaaggcgaatcaagcctgttcagccgcgaccaggttgactacatggacgtatccacccagcaggttgtttccgttggtgcttcactgattccattcctggaacacgatgacgccaaccgtgcattgatgggtgcgaacatgcaacgtcaggccgtacctaccctgcgtgctgacaagccgctggttggtaccggtatggaacgcgccgtagcggttgactccggcgtaaccgccgttgccaaacgcggcggtgtgatccagtacgtggatgcttcccgtatcgttatcaaagttaacgaagacgagatgtacccgggcgaagcaggtatcgatatttacaacctgaccaagtacacccgttctaaccagaacacctgcatcaaccagatgccgtgtgtgaatctgggtgagccaatcgagcgcggcgacgtgctggcggatggcccatcgacagacctgggcgaactggcactgggccagaacatgcgcgtagcgttcatgccttggaacggctacaacttcgaagactccatcttggtctccgagcgcgtggtgcaggaagatcgcttcaccaccatccacatccaggaactggcgtgcgtgtctcgcgacaccaagctggggcctgaagagatcactgccgacatccctaacgtgggtgaagctgcgctctccaagctggatgaatccggtatcgtgtatatcggtgctgaagtgaccggcggtgacattctggtcggtaaggtaacgcctaaaggcgaaacccagctgacgccggaagagaaactgctgcgtgcgatcttcggtgagaaagcgtctgacgttaaagactcttctctgcgtgtaccgaacggcgtttccggtacggttatcgacgtgcaggtcttcacccgcgatggcgtggaaaaagacaagcgcgcgttggaaatcgaagagatgcagctgaagcaggcgaagaaagacctgactgaagaactgcagatcctggaagccggcctgtttgcgcgtatccacgcggtgctggttgccggtggcatcgaagccgacaagctgagcaagctgccgcgcgatcgctggctggaactgggcctgaccgacgaagagaagcaaaaccagctggagcagctggctgagcagtacgacgaactgaaatccgacttcgagaagaagctggaagccaagcgtcgtaagatcactcagggcgacgatctggcgccgggcgtgctgaaaatcgtcaaggtttatctggccgttaaacgtcagatccaaccgggtgacaagatggcgggccgccacggtaacaagggtgttatctccaagatcaacccgatcgaagatatgccttacgatgaaaacggcacgccggtagacatcgtactgaacccgctgggcgtaccatcacgtatgaacatcggtcagatcctggaaacccacctgggtatggctgcgaaaggcatcggtgagaagatcaaccagatgctgaagcagcagcaggaagtggccaagctgcgtgagttcatccagaaggcctacgatctgggcgacgacgtttgccagaaagttgacctgaacaccttcagcgacgacgaagtgctgcgtctggcagagaacctgaaaaaaggtatgccgatcgcaacgccggtgtttgacggtgcgaaagagactgaaatcaagcaactgctggaaatgggcggtatcccgacctccggtcagatcacgctgttcgatggccgtaccggtgagcaattcgagcgccaggttactgtcggctatatgtacatgctgaaactgaaccacttggttgacgataaaatgcacgcccgttcaaccggttcttacagcttggtgactcagcaacctctgggtggtaaagcgcagttcggtggtcaacgcttcggtgagatggaagtgtgggcactggaagcatacggcgcggcttataccctgcaggaaatgctcaccgttaagtcggatgacgttaacggccgtaccaagatgtacaaaaacatcgtggatggcgaccaccggatggagccaggcatgccggaatccttcaacgtactgttgaaagaaatccgctcgctcggcatcaacatcgaactggaagacgagtaa

SEQ ID NO: 426668 - DNA, 498 bp, Serratia marcescens
atggcattaaatcttcaagacaaacaagcgattgttgctgaagtcagcgaagtagccaaaggcgcgctgtctgcggttgttgcggattcccgcggcgttaccgtagataaaatgactgaactgcgtaaagcaggtcgtgaagctggcgtttacatgcgtgttgttcgcaacaccctgatgcgtcgcgtagttgaaggcactccattcgaatgcctgaaagacacgtttgtcggtccaaccttgattgcattctctcacgaacacccgggcgctgctgctcgtctgttcaaagagttcgcgaaagcgaatgcaaaattcgaggttaaagctgcggcctttgaaggtgagctgatcccagcggcgcaaatcgaccgcctggcgacgctgccaacttacgaagaagcgatcgcacgcctgatggcaaccatgaaagaagccgctgccggcaaactggttcgcactctggctgcagtacgcgatcagaaagaagcggcgtaa

SEQ ID NO: 426669 - DNA, 705 bp, Serratia marcescens
atggctaagctgaccaagcgcatgcgcgtgatccgtgacaaagttgatgctactaaacagtatgacatcgctgaagctgttgctctgctgaaagagctggccaccgctaaattcgtagaaagcgttgacgttgccgttaacctcggcatcgacgctcgtaaatctgaccaaaacgttcgtggcgctaccgttctgccacacggcaccggtcgttccgttcgcgttgccgtatttgcccaaggcgctaacgctgaagcagcaaaagctgctggcgcagagctggtaggtatggacgatctggctgaccagatcaagaaaggcgaaatgaacttcgacgttgttattgcttccccggatgcaatgcgcgttgtaggtcaactgggccagatcctgggtccacgcggcctgatgccaaacccgaaagtgggtaccgttactccgaacgttgctgaagcagtgaaaaacgctaaagcaggtcaggttcgctaccgtaacgacaaaaacggcatcatccataccactatcggtaaggttgatttcgacgcagacaaactgaaagaaaacctggaagccctgctggttgcgctgaaaaaagcaaaaccttctcaggcgaaaggcatgtacatcaagaaagttagcctctccaccaccatgggtgctggcgttgctatcgatcagagcggtctgtctgctgcagcgaactaa

SEQ ID NO: 426670 - DNA, 429 bp, Serratia marcescens
atggctaagaaagtacaagcctacgtcaagctgcaagttgcagctggtatggcgaacccgagcccaccagtgggtccagctctgggtcagcagggcgttaacatcatggaattctgtaaggcattcaacgctaagactgacagcgttgaaaaaggtctgccgattccggttgttatcaccgtttattctgatcgctccttcactttcgttaccaaaaccccgccagcagcagttctgctgaaaaaagcggctggtatcaagtctggttccggtaagccgaacaaagacaaagtaggtaaagtgactcgtgctcaggtacgtgaaatcgcagaaaccaaagctgcggacatgactggttctgacgttgaagcgatgactcgctccatcgaaggtaccgctcgttccatgggcctggtagtggaggattaa

SEQ ID NO: 426671 - DNA, 546 bp, Serratia marcescens
atgtctgaagctccaaaaaaacgttggtacgtcgttcaggcgttttccggttttgaaggtcgcgtagcacaatcgctgcgtgaacacatcaaactgcacgatatggaagagttgttcggcgaagtgatggtgcctacggaagaagtggttgaaatccgtggcggccaacgtcgcaagagcgagcgtaaattcttccctggctacgtgctggtgcagatggtgatgaatgacgccagctggcacttggtgcgcagcgtaccgcgcgtcatggggttcatcggcggtacgtctgaccgtcctgcgccgatcagcgataaagaagttgatgcgatcatgaaccgcctgcagcaggttggtgacaagccgcgtccgaaaacgctgttcgaaccgggcgagctggtgcgcgtcaacgacggcccgtttgccgatttcaacggcgtggtcgaggaagtcgattacgagaagagccgcctgaaagtttccgtttccatctttggccgtgcaacgccggtggaactggacttcagccaggttgagaaaggctga

SEQ ID NO: 426672 - DNA, 384 bp, Serratia marcescens
atgagtgcgaataccgaggctcaagggagcggacgcggcctggaagcggcaaagtggctgatcgtcgccgttctgttggttgtggctattgtcggtaactattactaccgtgatttaagcctgccattgcgcgcgctggcagttgtgctgatcatcgccgttgcaggtgcagtggctctgatgaccaccaaaggcaaagccaccgttgcgtttgcccgcgaagcgcgtaccgaagtacgtaaagtgatttggccaactcgtcaggaaacgctacacaccacgttgatcgttgccgcggtaaccgccgtgatgtcactgattctgtgggggctggatggtattctggtccgtctggtgtcgtttattactggcctgaggttctaa

SEQ ID NO: 426673 - DNA, 195 bp, Serratia marcescens
atgtatgtatgtctgtgtaatgcggtgactgacaaagcgatccgtaatgcggtgcgtcagcacaatccccataccatgaagcagctgcgtgaacttgtgccgattggtaccgattgtggaaagtgcattcgtcaggcaagacagattatggtggaggaacgcggaactatcatcccaatgcatgaagttgcctaa

SEQ ID NO: 426674 - DNA, 480 bp, Serratia marcescens
atgaaaggcgataaaaagatcattgctcacctcaacaagctgctcggtaacgagctggttgccatcaatcaatatttcctgcacgcccgcatgttcaagaattgggggttaatgcgcctcaacgacaaggagtaccacgagtcgatcgacgaaatgaaacatgccgatcgctacatcgagcgtatcctgttcctggaagggatcccgaacctgcaagatctcggcaagctgaacatcggcgaagacattgaagagatgctgcgttccgatttggcgctggagctggcgggtgccaaaaacctgcgcgaaggtatcgcctatgccgactcgatccacgattacgtcagccgcgatttaatgatcgacatcctggccgatgaagaagagcatatcgactggctggaaaccgagctggatctgatcgctcgcctcggtattcaaaactatgcccaggcccaggttctagagcgcaaagagtaa

SEQ ID NO: 426675 - DNA, 312 bp, Serratia marcescens
atgcagaaccaaagaatccgtatccgcctgaaagcgtttgatcatcgtctgatcgatcaatcaaccgcggaaatcgtcgagactgcaaagcgcactggtgcgcaagtccgtggtccgatcccgctgccaactcgcaaagagcgctttaccgttctgatttctccgcacgtcaacaaagacgcgcgcgatcagtacgagattcgcactcacaagcgtctggttgacatcgttgagccaaccgagaaaaccgttgatgctctgatgcgtctggatctggctgccggtgtagacgtgcagatcagcctgggttaa

SEQ ID NO: 426676 - DNA, 630 bp, Serratia marcescens
atgattggtttagtcggtaaaaaagtgggtatgacccgtatcttcactgaagatggcgtttctatcccagtaaccgtaattgaaattgaagcgaaccgcgtgactcaggttaaaagcctggacaccgacggttaccgtgccgttcaggttaccaccggtagcaaaaaagctaaccgtgtaaccaagccggaagcgggccatttcgctaaagctggcgttgaagctggccgtggtctgtgggaattccgcctggaagaaggtcaagaattcgctgcaggtcaggaaattagcgtagaaatcttcgctgacgttaaaaaagtcgatgttaccggtacttctaaaggtaaaggttttgctggcactgttaagcgctggaacttccgtacccaagacgctacccacggtaactccttgtctcaccgcgttccgggttctatcggtcagaaccagactccgggcaaagtgttcaaaggcaagaaaatggctggccacctgggtgatgagcgcgtaaccgttcagagcctggacgtagtacgtgttgacgctgagcgcaacctgctgctggttaagggtgctgtaccgggcgcaaccggtggcaacctgatcgttaaaccagctgtgaaggcgtaa

SEQ ID NO: 426677 - DNA, 606 bp, Serratia marcescens
atggaattagtattgaaagacgcgcaaagcgcgctgactgtttccgaaactaccttcggtcgtgatttcaacgaagcgctggtacaccaggttgttgttgcttatgcagcaggtgcccgtcaaggtacccgtgctcagaagacccgtgctgaagtaactggttccggcaaaaagccatggcgtcagaaaggcaccggccgtgcgcgttcaggttctgtaaagagcccgatctggcgttcaggcggcgtgacctttgctgctaagccacaggaccacagtcagaaagtaaacaaaaagatgtaccgcggcgcgctgaaaagcatcctgtccgaactggtacgtcaagatcgtctgatcgttgtcgagaagttctctgtagaagcgcctaaaactaagctgctggcacagaaactgaaagatatggctctggaagacgtgctgatcgtgaccggtgaactggatgagaatctgttcctggcagctcgcaacctgtacaaggttgacgtgcgcgatgtagcaggtatcgatccggttagcctgatcgccttcgacaaagtggttatgactgctgatgctgtgaagcaagttgaggagatgctggcatga

SEQ ID NO: 426678 - DNA, 303 bp, Serratia marcescens
atgatccgtgaagaacgtttgctgaaagtgctgcgtgcaccgcacgtatctgaaaaagcatccgctgcgatggaaaaaagcaacaccatcgttctcaaagttgccaaagacgcgaccaaagcagaaattaaagctgcagtgcagaaactgtttgaagtcgaagtcgaagacgtgaacaccctggtagttaaagggaaagtgaagcgtcacggtcagcgtgttggtcgtcgtagcgactggaaaaaagcttacgtcaccctgaaagaaggccagaatctggacttcatcggcggcgcagagtaa

SEQ ID NO: 426679 - DNA, 825 bp, Serratia marcescens
atggcaattgttaaatgtaaacctacatctccgggtcgtcgccacgttgttaaagtggttaaccctgagctgcacaagggtaaaccttatgccccgctgctggaaaaactgagcaaaagcggtggtcgtaacaacaatggccgtatcaccacccgtcatatcggtggtggccacaagcaacattatcgtctggttgacttcaagcgcaacaaagacggtatccctgctgtggttgagcgtctggagtacgatccgaaccgttccgcgaacatcgcgctggttctgtacaaagacggcgaacgccgttacatcctggcgccgaaaggcctgaaagctggtgaccagattcaatctggcgttgatgctgcaatcaaagcgggtaacaccctgccgatgcgcaacattccagttggttcaacggttcacaacgtagaaatgaaaccaggtaaaggcggccagatggctcgctccgctggtgcctacgttcagatcgttgctcgtgatggttcctacgtaactctgcgtctgcgctccggcgaaatgcgtaaagttccagctgattgccgcgccaccctgggtgaagtcggtaacgctgaacacatgcttcgcgttctgggtaaagcaggtgctgcacgttggcgtggtgttcgtcctaccgttcgcggtacggcgatgaacccggtagatcacccgcacggtggtggtgaaggtcgtaactttggtaagcacccggtaactccgtggggcgttcagaccaaaggtaagaagacccgtagcaacaagcgtactgataagttcatcgtacgtcgccgtagcaaaaaataa

SEQ ID NO: 426680 - DNA, 279 bp, Serratia marcescens
atgccacgttctctcaagaaaggtccttttattgacctgcacttgctgaagaaggtagagaaagcggtggaaagcggtgacaagaagcctttgcgcacttggtcccgtcgttcaacgatctttcctaacatgatcggtttgaccatcgctgtccataatggtcgtcagcacgtaccagtgttcgtttccgatgaaatggtcggtcacaaactgggtgaattcgcgccgactcgtacttatcgcggccatgcggctgataaaaaagctaaaaagcgctaa

SEQ ID NO: 426681 - DNA, 333 bp, Serratia marcescens
atggaaactatcgctaaacatcgccacgctcgttcttctgctcagaaggttcgccttgttgctgacctgattcgcggtaagaaagtgtcgcaagctctggaaactctgacctacaccaacaagaaagctgctggtctggttaagaaagtgctggagtctgccattgctaacgcagaacacaacgatggcgctgacatcgatgatctgaaagttacgaaaatcttcgtagacgaaggcccaagcatgaagcgcattatgccgcgtgcaaaaggtcgtgcagatcgcatcctgaagcgcaccagccacattactgtggttgtgtccgatcgctga

SEQ ID NO: 426682 - DNA, 699 bp, Serratia marcescens
atgggtcagaaagtacatcctaatggtattcgcctgggtattgtcaaaccttggaactctacttggtatgcgaataccaaagaattcgctgacaacctggacagcgactttaaagttcgtcaattcctgactaaggaactgtcgaaagcttccgtttctcgcatcgttatcgagcgtcctgcgaagagcatccgtgtgaccattcacactgctcgcccaggcatcgttatcggcaagaaaggtgaagacgtcgaaaaactgcgcaaggtcgtagcggacatcgctggcgttcctgcacagatcaacatcgccgaagtccgtaaaccggaactcgacgctaaattggttgctgacagcatcacttctcagctggaacgtcgcgtgatgttccgtcgtgctatgaagcgtgcagtacagaacgcaatgcgtcttggcgctaaaggtatcaaagttgaagtaagcggccgtcttggcggcgctgaaatcgcacgtaccgaatggtaccgcgaaggtcgtgttccattgcacactctgcgtgcggacatcgactacaacacatctgaagcgcacaccacttatggtgtaatcggcgttaaggtatggatcttcaaaggtgagatcctgggtggtatggctgcagttgaacaaccggaaccggctgctcaacctaaaaagcagcagcgtaaaggccgcaagtaa

SEQ ID NO: 426683 - DNA, 411 bp, Serratia marcescens
atgttacaaccaaagcgtacaaaattccgtaaggtgcacaagggccgcaaccgtggtctggcgcaaggtacggatgttagcttcggcactttcggtctgaaagctgttggccgtggccgtctgactgctcgtcaaatcgaagcagctcgtcgtgcaatgactcgtgcagttaagcgtcaaggcaagatctggatccgtgtattcccggacaaaccgatcaccgagaagccgctggaagtgcgtatgggtaaaggtaagggtaacgtggagtattgggttgccctgatccagcctggtaaggtcctgtacgaaatggacggcgtgccagaagaggttgcccgcgaggcattcaaactggcagcagcgaaactgccgatcaaaaccacctttgtaactaagacggtgatgtaa

SEQ ID NO: 426684 - DNA, 192 bp, Serratia marcescens
atgaaagcacaagagctgcgtgaaaaaagcgttgaagagctgaatgccgagctgctcaacctgctgcgtgagcaattcaacttgcgcatgcaggcggccagtggccagctgcaacaaactcacctgttgaaacaagtgcgtcgtgacgtcgcacgcgttaagactttactgactcaaaaggcgggtgtgtaa

SEQ ID NO: 426685 - DNA, 255 bp, Serratia marcescens
atgactgaagttatccgtaccctgcagggtcgtgttgttagcgataaaatggagaaatccatcgttgttgctatcgaacgtactgtgaagcacccgatctacgggaaattcatcaaacgtacgaccaagctgcacgtacatgacgagaacaacgaatgtggtaccggcgacgtggtggaaatccgcgaatgccgcccactgtccaagaccaagtcctggacgctggttcgcgttgtagagaaagcgattctgtaa

SEQ ID NO: 426686 - DNA, 372 bp, Serratia marcescens
atgatccaagaacagactatgctgaacgtcgccgacaactccggtgcacgtcgcgtaatgtgtatcaaggttctaggtggctcgcaccgtcgctacgcaggcgtcggcgacatcatcaaaattaccatcaaggaagcaattcctcgcggtaaggtgaagaaaggcgatgttctgaaggcggtagtggtgcgcaccaagaagggtgtacgtcgcccggacggttctgtcattcgcttcgatggcaatgcatgcgttattttgaacaataacagcgagcagccaatcggtacgcgtatttttgggccggtaactcgtgaactgcgtaatgagaagttcatgaaaattatctctctggcaccagaagtactctaa

SEQ ID NO: 426687 - DNA, 315 bp, Serratia marcescens
atggcagcgaagatccgtcgtgatgacgaagttatcgtgattaccgggaaagacaaaggtaagcgcggtaaagtaaaaaatgtcctgtctgctggcaaggtcattgttgaaggcatcaacctggttaagaaacaccagaagccggttccggctctgaaccaaccaggcggcattgttgaaaaagaagctgcaattcaggtttctaacattgctatcttcaacgcggctaccggcaaggctgaccgtgtaggctttagattcgaagacggcaaaaaagtccgtttcttcaaatctaacagcgaaactatcaagtaa

SEQ ID NO: 426688 - DNA, 540 bp, Serratia marcescens
atggcgaaactgcatgattactacaaagacgaggtagtcaaacaactgatgtctcagtttgattacaactctgtcatgcaagtccctcgggtcgagaagatcaccctgaacatgggtgttggtgaagcgattgctgacaagaaactgctggataacgccgcagcggacctgacagctatctccggtcaaaaaccgttgatcaccaaagcccgcaaatctgttgcaggcttcaaaatccgtcagggctatccgatcggctgtaaagtaactctgcgtggcgaacgcatgtgggagttccttgagcgcctgatctccattgctgttccacgtatccgtgacttccgtggcctgtccgccaagtcattcgatggccgtggcaactacagcatgggcgtgcgtgagcaaatcatcttcccagaaatcgactacgacaaagtcgatcgcgttcgtggtttggatattaccattaccactactgcgaaatctgatgatgaaggccgcgcgctgctggctgcttttaacttcccgttccgcaagtaa

SEQ ID NO: 426689 - DNA, 393 bp, Serratia marcescens
atgagcatgcaagatccgatcgcggatatgctgacccgtatccgtaacggtcaagccgcgaacaaagttgcggtcaccatgccttcctccaagctgaaagtggcaattgccaacgtgctgaaggaagaaggttttattgaagatttcaaaatcgaaggcgacgccaagcctgttctggaactggtactgaagtacttccagggcaaagctgtggtagaaagcattcaacgtatcagccgtccaggtctgcgcatctacaagaaaaaagatgagctgccaaaagttatggccggtttgggtatcgctgttgtttctacctctaaaggtgttatgaccgatcgtgcagctcgccaggctggtcttggtggcgagattatctgctacgtagcttaa

SEQ ID NO: 426690 - DNA, 534 bp, Serratia marcescens
atgtctcgtgttgcaaaagcacccgtcgtcattcctgccggcgtagaggtaaaactcaacggtcaggttatttcgattaagggtaaaaacggcgagttgactcgtactatccacgacgccgttgaagtgaagcaagaagctaacgcactgactttcgctccgcgcgaaggttttgctaacgcatgggctcaagcgggtaccacgcgcgctctgctgaacgcaatggttgttggtgttaccgaaggcttcaccaaaaagcttcaactggtaggtgttggttatcgtgctgccgttaaaggcaacgtggtgaatttggccctgggcttctctcaccctatcgatcaccagctgccggcaggtatcactgctgaatgcccaagccaaactgaaatcgtgctgaaaggcgctgataagcaggtaattggccaggtagcagcagatctgcgtgcttaccgtcgtcctgagccttacaaaggcaaaggtgttcgttacgccgacgaagtcgtgcgtaccaaagaggctaagaagaagtaa

SEQ ID NO: 426691 - DNA, 501 bp, Serratia marcescens
atggctcacatcgaaaaacaagctggcgaactgcaggaaaagctgatcgcggtaaaccgcgtatctaaaaccgtaaaaggtggccgtattttcagctttaccgcactgactgtagttggtgatggtaacggtcgcgttggttttggctacggcaaagcacgcgaagttccagcagcgatccagaaagcgatggaaaaagcccgtcgcaacatgatgaacgtcgcgctgaacagcggcaccctgcagcaccctgttaagggcgctcacacgggttctcgcgtgttcatgcagcctgctcatgaaggtaccggtatcatcgcgggcggtgcaatgcgcgccgttctcgaagttgctggggtgcacaacgtattggctaaagcttatggttccaccaacccgatcaacgtggttcgtgcaactatcgacgctctggcgaatatgaagtctcctgaaatggtcgctgctaagcgtggtaaatccgttgccgacattctggggtaa

SEQ ID NO: 426692 - DNA, 273 bp, Serratia marcescens
atgcctctgtaccgtcgtctgccgaaattcggcttcacttcacgcaaagcgatgatcacggcagaagttcgtctgtctgaactggctctggttgaaggcgatgttatcgacctgaacgcgctgaaagccgctaacgtagttggtgtccagatcgaattcgcgaaagttgtactttctggcgaagtcgctcgtccggtaaccctgcgtggtctgcgtgtcaccaaaggcgctcgtgctgctatcgaggctgctggcggtaaaattgaggaataa

SEQ ID NO: 426693 - DNA, 1332 bp, Serratia marcescens
atggctaagcaaccaggattagattttcaaagtgctaaaggcgggctcggcgagctgaagcgcagacttttgtttgtcatcggcgcgctgattgtcttccgcatcggctctttcattccgattcctggtatcgatgccactgtgcttgccaaattgcttgagcagcagagaggcactatcattgaaatgtttaacatgttctctggtggtgccctcagccgtgcttctatctttgctctggggatcatgccgtatatctcggcgtcgatcattatccagctgctgacggtggttcatccagcgttggcggaaatcaagaaagaaggggaggctggccgtcgcaagattagccagtacacccgttacggtacgctggtattggccatattccagtcgatcggtattgctaccggtctgccgaatatgcctggtatgcagggcctggtgttaaatccaggctttgcattctactttactgcggttgtgagcctggtaaccgggacaatgttcctgatgtggctgggtgagcagattactgaacgcggtatcggcaacggtatctcgatcattatcttcgcgggtattgtagcggggctcccgccggcagtggctcatactatcgagcaagcgcggcaaggcgacctgcacttcctcctgctgctgttggttgcagtattggtgtttgcagtaaccttcttcgttgttttcatcgagcgtggtcaacgtcgtatcgtcgttaactatgcgaagcgtcaacaaggtcgtcgtgtttatgcagcacagagcacacatttaccgttgaaagtgaacatggcgggtgttatcccggcgattttcgcttccagcattattctgttcccggccacgattgcatcatggtttgggggcggtaccggttggaactggctgactacgatttcgctgtatttgcagccagggcaaccgctttatgtgttactctatgcgtctgcaatcatcttcttctgtttcttctacacggcgttggtcttcaacccgcgtgagacagcagataacctgaagaagtccggtgccttcgtaccaggaattcgtccgggagagcaaacggcgaagtatatcgataaagtaatgacgcgtttaaccctggtgggcgcgatgtacattactttcatctgcctgatcccggagttcatgcgtgatgcaatgaaagtaccattctactttggtggtacctcgctactgatcgtggttgtcgtcatcatggactttatggctcaagtgcaaactctgatgatgtcaagtcagtacgagtctgcattgaagaaagcaaatctgaaaggctataaccgctag

SEQ ID NO: 426694 - DNA, 357 bp, Serratia marcescens
gtggcccgtatagcaggcattaacattcctgatcataaacataccgttatcgccttaacgtcgatcttcggtatcggtaaaacccgttcacaggctatctgtgcatccacgggtattgctgaaaatgttaagatcagtgagctgtctgaagagcaaatcgaaaagcttcgtgatgcagttgccaaatacaccgttgagggtgatttgcgtcgtgaaattaccctgagcatcaagcgtcttatggaccttggttgctatcgtggtttgcgtcatcgtcgtggtctgccggtacgcggtcagcgcaccaagaccaacgctcgtacccgtaagggtccgcgcaagccgatcaagaaataa

SEQ ID NO: 426695 - DNA, 621 bp, Serratia marcescens
atggcaagatatttgggtcctaagctcaagctgagccgtcgtgagggcacagacctgttccttaagtctggcgttcgcgcgatcgattccaagtgtaaaattgaacaagcacctggtcagcacggtgcgcgtaaaccgcgtctgtctgattacggtgttcagttgcgtgagaagcagaaagttcgccgtatgtacggcattctggagcgtcaattccgtaactattacaaagaagcaacccgcctgaagggcaacaccggtgaaaacctgttgcagctgctggaaggtcgtctggacaacgttgtttaccgtatgggcttcggcgctactcgtgcagagtcacgtcagctggttagccacaaagcagttatggtaaacggtcgcgttgttaacatcgcttcttatcaggtatctccgaatgacgtagtcagcatccgcgagaaagctaaaaagcagtctcgtgttaaagcttctctggagctggctgagcagcgtgaaaagccgacttggctggaagttgatgctgctaagatggaaggcgtgttcaagcgtatgcctgaacgtaccgatctgtctgcggacattaacgaacacctgatcgtcgagctttactccaagtaa

SEQ ID NO: 426696 - DNA, 990 bp, Serratia marcescens
atgcagggttctgtgacagagtttctaaaaccgcgcctggtagatatcgagcaagtcagttcgacgcacgccaaggtgacccttgagcctttagagcgtggctttggccatactcttggcaacgcactgcgccgtattctgctttcatctatgccgggttgcgcggtgaccgaggttgagattgatggtgtactgcatgagtacagcaccaaagaaggcgtacaggaagatatcctggagatcctgctcaacctgaaagggctggcggtgagagttcaaggcaaagatgaagttattcttaccctgaataaatctggcattggccctgtgaccgctgccgacatcacccatgatggtgatgtcgaaatcgtcaagcctcagcacgtgatctgccacctgactgatgagaacgcggctatcagcatgcgtatcaaagttcagcgcggtcgcggttatgtgccggcttctgcccgaattcattcggaagaagatgagcgcccaatcggtcgtctgttggttgacgcctgctacagccctgtagagcgtatcgcctacaatgttgaagctgcgcgtgtagaacagcgtactgacttggataagctggtcatcgagatggagaccaatggcacgatcgatcctgaagaggcgatccgccgtgcggccaccattctggctgaacaacttgaagctttcgttgacctgcgtgatgtacgtcagccggaagttaaagaagagaaaccggaattcgatccgatcttgctgcgccctgttgacgatctggaattgactgtccgctctgctaactgcctcaaggcagaagctatccactacatcggtgatctggtacagcgtaccgaggttgagttgctgaaaacgccaaacctgggtaaaaaatctcttaccgagattaaagacgtgctggcctcacgtggtctgtctctgggcatgcgcctggaaaactggccgccggcaagcattgctgacgagtaa

SEQ ID NO: 426697 - DNA, 390 bp, Serratia marcescens
atgcgccatcgtaagagtggtcgtcaactgaaccgtaacagcagccatcgccaggctatgttccgtaacatggccggctctttggttcgtcatgagatcatcaagacgaccctgccaaaagcaaaagagctgcgtcgcgttgttgagccgctgattactcttgccaagaccgacagcgtagctaatcgtcgtctggcattcgcccgtactcgtgataacgagatcgtggcaaaactgtttaacgagctgggcccgcgtttcgcgagccgtgccggtggttacactcgcattctgaagtgtggcttccgcgcaggcgacaacgcgccgatggcatacatcgagctggttgatcgtgctgagtctcaagcagaagtagcaactgcagagtaa

SEQ ID NO: 426698 - DNA, 375 bp, Serratia marcescens
atggggctgctcgatcaatgggcggaacgccatatccttgatgcccaagataaaggcgagttcgacaatctgcccggccagggtcaaccgttggcgctggaagatgacagcgcggtgccggctgaactgcgcgccggttaccgtttgctgaaaaatgccggttacctgccgccggagctggaagatcgcaaagaggcgttgaccgttgctcgtttgctgcaagggattaacagtgagcatcaggactatgtcgaactcagcaaacgcatggcgctgctggagcaccggttgcgtcaggctgggatgagtacggatttcttgcatggtgaatatcagcgtgcattggacggtaaattcacccgggaggagaagtaa

SEQ ID NO: 426699 - DNA, 432 bp, Serratia marcescens
atgttcaagataggtcagttggccaagcttgccgaagtgacgccggataccgtgcgttactatgaaaagcagggcatgatggatcacaatgtccgcaccgaaggtggttatcggctctacaccgagcaggatctgcagcggctgcgcttcattcgctatgccaagcagctgggatttactctggaaacgatcgctgagctgctgtcgatccgcgtcgatcctgaacatcatacctgccaggagtcgaagtcgatcgtcgatgcgcgcctgagcgaagtggaaagtaagttggcggagctgactcgcatgcgcgaatcgctgaagcggttgagtgatgcctgctgcggcactgcccataccagcaattattgttctattctggaagccttggaacagggcgccagcgatgaaaaaggcaaaaaaggttgctga

SEQ ID NO: 426700 - DNA, 207 bp, Serratia marcescens
atgacgaaatatcgtcacactaaaggtcagattcaagataacgccattgaggcgctgctgcatgatccgctattccgtcaacgagtagaaaagaatgtgaaaggcaaaggcagctatcggcgtaaagaaaaacacaacaaaggcggtaactgggaggccagtggtgaactatcaagcgataatttaccactggccttctggttttaa

SEQ ID NO: 426701 - DNA, 417 bp, Serratia marcescens
atgagtatgttgaaagagtttcgcgaatttgccatgcgtggcaacgtggtcgatctggccgtcggtgtgattatcggtgccgcattcggcaagattgtttcgtccttcgtggccgatatcatcatgccaccactggggttactgatcggcggcgtcgactttaaacaattccatctggtattacgtgaagctcagggcgccgtaccggcggtggtaatgaactacggttcattcattcaaaccgtattcgacttcgtgattgtcgccttcgccatcttcctggcaattaaattgatgaacaaaatgcgccgcaagcaggaagaagcgccggcagcgccgccagcacctaccgcagaagagaaactgctgacggaaatccgtgacctgctgagccagcaacagcagccaaaactgtaa

SEQ ID NO: 426702 - DNA, 1377 bp, Serratia marcescens
atgaaaataattattcttggtgccggtcaggttggcgggacgctggcggaaaacctggtgggtgaaaacaacgatatcaccgtcgtcgataccgattccggccggctgcgtcagctgcaggataaattcgatctgcgggtggttcaggggcacggctctcatcctcgggtgctgcgcgaagccggcgcagaagacgctgacatgctggtcgccgtcaccaactccgacgaaaccaacatggttgcctgccagatcgcctattctctgttcaatacccccaaccgcatcgcccgtatccgcgcgccggaatatatccgcgagtcggagaaactgttcctgccggaagcggtgccgatcgaccatctgatttcaccggagcagctggtcatcgactatatctacaagctgattgaataccccggcgcgctgcaggtggtcaacttcgccgaaggcaaggtcagcatcgctgcggttaaagcctattacggcggcccgctggtcggcaatgcactctcttcgatgcgcgaacacatgccgcatatcgacacccgcgtcgccgctattttccgccaggacagaccaatacgtccgcaaggctcgaccattatcgaagccggtgatgaagtcttcttcgtcgccgcatcacagcacatccgcgcggtgatgagcgaactgcagcggctggaaaaaccctataagcgcatcatgatcgtcggcggcggcaacgtcggtgccggcctggccgccaagctggaaaaagactacaacgtcaaactgatcgagcggaaccagcaacgcgccgccgaactggccgagcagctgcacgataccatcgtgttctacggcgatgcctccgaccaggagctgctggccgaagagcacgtcgaacaggtggatgtcttcatcgccatcaccaacgacgatgaggccaacatcatgtccgccatgctggccaagcgcatgggcgccaagaaggtgatggtcttgatccagcgccgcgcctatgtcgatctggtgcagggcagcgtgatcgatatcgccatttcgccgcagcaggcgaccatctccgccctgttggggcacgtgcgcaaagcggatatcgtcagcgtctcgtcgctgcgccgcggcgtggcggaagcgatcgaagcgattgcccacggcgatgaaagcacgtccaaagtggtcggccgcatcgtcgaagacatcaagctgccaccgggcaccaccatcggcgcgatcgtacgtggtgacgacgtgatcatcgccaacggcaacagcaaaatcgagcagggcgatcacgtcatcatgtttattaccgacaagaaattcgtgccggacgttgaacgcctgttccaaccgagcccgttcttcttgtag

SEQ ID NO: 426703 - DNA, 1290 bp, Serratia marcescens
atgaaaaataattacaatctccgcagcatcgctgccaaagccatcggccaggtgctggatcaagggcagtcgctcagcactgtcctgccggcgctgcaaaccgccatcagcgataaggaccgcgggttgctgcaggaactgtgcttcggcacattgcgcgtgctgccgcagctcgaatggtgcattcaacaattgatggccaagccgctgaccggcaaacagcgtacgctgcactatctgctgatggtcggcctgtatcagctgctgtatacccgtatcccgccgcacgccgtattggccgaaaccgtggaaggcgcggtggcgctgaaacgcccacagttgaaaggcctgattaacggcgtcttgcggcaattccaacgccagcaggaagagctgctgcagcgcgccgccaacaatgacagccgctatctgcacccgagctggttgctgaaacgcattcaacaagcctatcccgccaactgggaacagatcgtcgacgccaataaccagaagccaccaatgtggctgcgcgtcaaccgcctgcatcacacccgcgaagcttatctgcagttgctgaccgacgcaggcatcgccgcggagcctcattcagactatgccgacgcggtgcgtttgctggcaccttgcgccgtgaccgatctgcctgggttcgccgacggctgggtcaccgtgcaagatgcctcagcccagggctgtgtcgatctattggatccgcaagacggtgaacagatcctcgatttgtgcgccgcgcctggcggcaaaaccacgcatattctggaagcggcgccgaaagcgcacgtcatggcggtcgatatcgacgaacagcgcctggcgcgggtgaaggaaaacctgcagcgcctgcgtttgcacgcagaggttaagctgggcgatggccgcaccccgcagcaatggtgcggtgacaagcagttcgaccggatcctgctggacgcgccttgttccgccaccggcgtgatccgccgtcaccccgacatcaaatggctgcgtcgcgatcgcgacatcgccgaactcgccgcgctgcaggccgacatcctggaagccgtctggccccatctgaaatcgggcggcgtgatggtttacgctacctgctctatcctgccggatgaaaacagcagccagatcgccgcgttcttgcagcgccacgccgatgccaagctggttgaaaccggcgatgcgcagcggccggggcggcagaatatcccgcatcccgaggacggcgatggcttcttttacgctaagctgattaaaatgtaa

SEQ ID NO: 426704 - DNA, 945 bp, Serratia marcescens
gtgtctgactctttacggattattttcgccggaacaccagacttcgcagcgcgtcatcttgacgcgctgttgtcatctgagcaccagattgtcggcgtttttacccagcccgaccgcccggcaggccgcggcaacaagctgacgccaagcccggtaaaagtgctggctgagcaacaccaactgccggtatttcagcccaaatcgctgcgccccgaagagaaccagcgcctggtggccgatcttaacgccgacgtgatggtggtggttgcctacgggctgatcctgccgcaggcggtgctggatatgccgcgtctcggttgcatcaacgtacatggctcgctgctgcctcgctggcgcggtgcggcgccgatccagcgctcgctctgggccggcgacagcgaaaccggcgtgaccatcatgcagatggacgtcggtctcgataccggcgacatgatgcacaagattgcctgcccgattgagagcagcgataccagcgccagtctctacgacaagctggcgcagctcggcccgcagggcatgctgacgacgctgcgccaaatggccgacggcagcgccacccgcgaagtgcaagacgacgcgctggtcacctacgccgagaagctgagcaaagaagaagctcgcctggactggacgctgtccgccgaacaactggagcgctgcatccgcgccttcaacccttggccgatcagctacttcaccatcgacgatcaaccggtgaaagtctggcaagccagcgtactggcgcaaagcgccaatgcggagccgggcaccgttgtccatgccgacaagcacggcattcaggtggcgaccgccgacggcatcctcaatctgatccaactgcagcccgccggcaagaaaccgatgtcggcgcaggacctgttaaattcacgccgtgaatggtttaccccgggtaaccggctgtaa

SEQ ID NO: 426705 - DNA, 510 bp, Serratia marcescens
atgtcagtcttgcaggtattacatttcccagacgagcgtctgcgcaaaatcgcagcgccggtaaaagaagtcaatgcagatatccagcgcatcgtggatgatatgtttgaaaccatgtacgcagaggaaggcattggcttggctgcgactcaggtggatatccatcagcgcattatcgtgatcgacgtctccgagaatcgcgatcagcgcctggtgctgatcaacccggagctgctggaaaagagcggcgaaaccggcatcgaggaaggctgtctttccattcccgagcagcgtgcgttggtaccacgtgccgcgcaggtgaagatccgcgcgctggatcgcgaaggcaaacctttcgaactggaagcggacgatctgctggcgatctgcatccagcacgagatggatcacctgatgggtaaactgttcgtcgattacctgtcgccgctcaagcgtcagcgcattcgtcagaaactggaaaaaatggccaagcttcaagcccgcgcctaa

SEQ ID NO: 426706 - DNA, 1122 bp, Serratia marcescens
atgcggccggaagagatcgctttacggatgcgaggggtaacggggctgcagaccgtcgtggccagccggatcgtgcggcagctatcgcaaatggggcgcgagcctcgcagcgcgttgcgtgaactggggttgaacgagcggcagcgggcgcagttcaaccaagcggatcccgcttatctggcggccagcctgcgttggctggaactgccggcgcaccgtatgctgaactatggggcggccggctatccggaacgcctggcccagatcgacgatgcgccgctgtttttgctgatcgagggcgatcctcaagcgttgctgcgtccgcagctcgccatggttggcagccggcagttcagccactacggcgagcgttgggccaatcatttcgccgcggaattggcgcgttgcggtttcaccatcaccagcggtttggcgatcggcatcgacggcatttgccatcgcgcagcgctggcggccggcggttgcacggtagcggtattgggcagcgggttggccaatgtttatccacgccggcaccgcaggctcgcggagcagattgtcgagcagggcggcgcggtgatttcggatcatttggtcaccgatttgcctctggccgaccattttccgcgccgcaaccgtattatcagcgggctgagccagggcgttctggtcatagaagcctcgttgcgcagcggtaccctggtgacggcccgctatgcgctggagcaggggcgtgaggtattcgccttgccggggccgttagggaacccgatgagcgaaggcacgcactggctaattcagcagggcgcgcatctggttaccgggccgaaagatatcgcagaattgctgggaagcggccttcaatggctgccactgaacgaaaatacaactatttgtgcgtcgcaggctgaagttgaattgccatttgccgatgtgttggctaacgtaggagatgaggtgacacctgttgacgtcgtcgctgaacgtgccggccaacctgtgccagtggtggtaatcaagttactcgaactggagttagcagggtggatcgcagctgtacccggcggctatgtccgaataaggagggcaagccatgttcgacgtactcatgtacttgtttga

SEQ ID NO: 426707 - DNA, 474 bp, Serratia marcescens
atgttcgacgtactcatgtacttgtttgaaacttatatccacaatgaaccagagatgcgcgtcgatcaggatcaactgaccgatgatctcgcccaggcggggtttcatcgggatgatatctacaacgcgttgaattggcttgagaagctggctgacctgcaagaaggccaaaatgcgccttactttatggatgccgatccgctggcaatgcggatctacaccgaagaggaaagcgcgcgtttggacgccggctgccgtggttttctcctgttcctggaacagattcaggtattgaacctcgaaacccgtgaaatggttatcgaccgcgttatggctttggataatgcggaattcgatctcgaagatctgaaatgggtcgtgttgatggtgctgtttaatattcccggatatgaaagcgcctatcagcaaatggaagaactgttgtttgaagtgaacgaaggttatctgcattga

SEQ ID NO: 426708 - DNA, 546 bp, Serratia marcescens
atgacaaaaaacgcgatttttgccgccaggcaaaatgaaccctgtccggaatgcggggccgagctggtgatccgtagcggtcgccacggccccttcctcggctgttcccagtaccctgaatgccaatatattcggccgctgaaagcgcaggccgacgggcatgtcgtcaaggtgctggatgggcagcagtgcccgaagtgtcaggcgacgttggtgctgcgccaggggcgctatggcatgtttatcggttgcagcgattatccgcagtgcgatcacactgaagtgatcgataagcctgatgaaaccgccattacctgtccgcagtgcggtcagggcaagctgttgcagcgtaaatcgcgctacggcaaggtttttcattcctgcgatcgttatccggaatgccaattcgccctcaatgttaaacccgtcgccggtgaatgtgcctattgccattacccgctgctgatggaaaaacgtacggcaaaaggccccgtcctgtgctgtgccagcaagctgtgcggaaaacccgtggcgactacagaataa

SEQ ID NO: 426709 - DNA, 570 bp, Serratia marcescens
atgaactcagaattaagcccgaaccttttatctatcatcgatgctttgcatcaacagcaggtgattgcctatcccaccgaagcggtattcggcctagggtgcgatcccgacagcgaacaggcggtcaatgctttgctggcattgaaacagcggccgtgggaaaaggggctgattctgatcgccgccgactatacgcagcttaagccctatatcgacgacagcgcgctcagcgaacagcagcgcgtgacgatgttcgccagctggcctgggccggtaacctgggtgttgcctgcccggccggagacgccgcgcttgctgaccgggcgtttcagctcgctggcggtgcgcgttagcgatcacccgttggtgcagcaactgtgccggcagtacggcaagccgctggtatcgaccagtgccaatctcagtgggcaggagccgtgccgcagtgcggatgaagtcgcgcggcaattcggcactgctttcccggtattggccggcgaggtgggtggccgtcttaatccttccgaaatcagagatgctctgaccggcgaacagatccgtcagggctag

SEQ ID NO: 426710 - DNA, 819 bp, Serratia marcescens
atggagaagtttgcggtatttggcaaccctattggtcacagcaagtcgccgcgaattcatgcgctgttcgctgcccagactggcattgagcatccttatggagcggtgttggcgccgttggacggttttgaaaccagcctgcaggcgtttatccacgccggagggctgggggcgaacgtcacggtgcctttcaaagagcgcgcttatgaggccgcttccgagctgagcgagcgcgcagcgatggccggcgcggtcaataccctgaaggtattgccgaatggcggtctgctgggggacaacaccgacggcatcggtttgctgaccgatctgcagcgtcagcaattgattcggccgcaggatcgcatcttgctggtgggggccggcggcgcggcgcgcggcgtgatcctgccgctgctgtctttcggctgccggctcacgatcaccaaccgcaccttcagccgcgccgaggagttggccgacgctttccggcatctgggagagatctcggcggcgccgatggatcaactgaatcagcaagcgttcgatctggtgatcaacgcgacggcgtccggcatcagcggggagatcccggcgttgcccgcgggcgtagtcaacgcgcaaacccgttgctatgacatgttctatcagcagggcgtcacgccgttcctggcctgggcgcagcagcaaggggcaacggaatatgccgatgggctgggcatgctggtggggcaggcggcgcatgctttcctgctttggcacggagtgatgccagagatcgagccggtattgcgccagctgcgcagcgaactggcgacataa

SEQ ID NO: 426711 - DNA, 543 bp, Serratia marcescens
atgtccgatgcagtacgttcttatcttcaatacacccccaaactcggtcagcgtgtcttgatcgatccttccagcgtcgtgatcggcgacgtcgatctggcggatgacgtcagtatctggccgctggtcgctatccgcggtgacgtcaatgcggtaaagatcggcgcgcgcagcaatattcaggacggcagcgtactgcatgtgactcaccgttccgaacacaacccagacggttatcccctgctgattggggaagacgtgaccgtgggccataaagccatgctgcacggctgcgccatcggcaaccgggtgctggtcggtatgggatcgatcctgttggacggtgtagtagtagaagacgacgtaatgattggcgccggcagtttggtggcgccgggcaaacggctggccagcggctatctttatatggggagcccggcacgccaggttcggccgttgaccgccgccgagttggaaggattgctttattcttctaacaactatgtgcgttggaaagatgaatatctgtcggaagacatctga

SEQ ID NO: 426712 - DNA, 1038 bp, Serratia marcescens
atgtctactgaaagcgcgtctttaaaaaaccacaatacgtttgcgctcccggtcaacgcagcgcacctgatcatggccgatagaattgagctgatgctcaaagtgtggcaacaaacgcgcaagcgtcaggagccgctgctgattctcggtgaaggtagcaacgtgctgttcctggaggatttttctggcacggtaatggtcaatcagttgaaaggtatcgatgttcgggaagataacgatgcctggtatctccacgtcagctccggtgaaaactggcatgacctggtgcaatatacgctgcaggccgggatctgcggcctggaaaacctggcgttgattcctggattggccggctccgcccctatccagaacatcggcgcctacggcgtcgaattgaaagacgtctgcgagtatgtcgatctgctggacttctctaccggtgctatcgatcgcattccggctgccgagtgtggtttcggttaccgggaaagcattttcaaacaccgtttccaaaccgggcatgtcattgtcgggctgggcctgcgtctcaacaaacaatggcaacccaaattgagctacggcgatctggccaggctggatcccgccacggtgacgccgcttcaggtatttgaatccgtatgcgccatgcgccgcagcaagctgcccgatccgcgtgaaaccggtaatgccggcagcttcttcaagaatccgctggtgaacgcagagaaagccgcagaactcatcgccaaatatcccggcatgccgcactatccacagcaggatggccaggtgaagctggccgccggatggcttatcgatcaatgcgaactgaaaggatatcgtatcggcggcgctgcggtacaccgtcagcaggcgctggtgctggtgaacatcgacaacgcccacagccaggatgtggtggcgctggcgcgccacgtacgcaagacagtggccgataaatttggcgtctggctggagcctgaggtgcgttttattggcgcgaccggtgagctgaatgccgtggcggtgctgtcatga

SEQ ID NO: 426713 - DNA, 963 bp, Serratia marcescens
atgaaagataccaaggttccgttaaaactgatcgcgctgctggccgacggtgaatttcattccggggaacacctgggtgagtcactgggcatgagccgtgcggcgatcaataagcatattcagaccattcgcgaatgggggctggatgtctttaccgtgcccggcaaaggctacagcctgcctggcgccatccagctgttggaagccgagcgcatcctcagcctgctggaagacaagcgtgtaagcgtgttgccggtggtcgattccaccaaccaatacttgctggaccgcattgccgaattgcactctggtgacgcctgtgtcgctgaataccagcaggcagggagagggcgccgcgggcggcagtggatctcgccattcggcgctaatttatacctgtcgatgttctggcgactggagcaggggccggctgcggccatggggcttagcctggtgatcgggatggtgatggcggaagttctgcagcgtctcggtgcggccgatgtgcgcgtgaagtggcctaacgatctctatctgaacgatcgtaaattggcggggatcctggtcgaactgacggggaaaaccggcgatgcggctcaactggtcatcggtgccggcatcaacctggcgatgcgtgataccaatgccagcgccattactcaaggatggattaacctacaggaagcgggaattcagatcgatcgcaatgagctggctgcaaccttgcttaatgaactgcgtcagtcgttgaaacagtttgagatagacggactggcgccctttatcggtcgctggcgtaccctggataactttatcgacaggccggtcaagctgcttatcggcgagcggcagattgtgggtatcgcccgaggaatcgattcgcagggcgcgctgctgctggaacaagacggggagatcaagcccttcatcggtggagagatatcgctgcgcagcgcagaatag

SEQ ID NO: 426714 - DNA, 951 bp, Serratia marcescens
atgataaaaagagatcaatctttagcaacgccttacctacagttcgatcgtacccaatgggcggcgttgcgagattcggtgccgctgacgttgtcggaagaagagatcgttaaactgaaagggattaacgaagatctctcgttggaagaagttgcgcagatttatctgccgctgtcacggctgttgaacttctatatcagttccaacctgcgccgacaggcggtgctggagcaattcctcggcaccgacgggcaaaagattccctatgtcatcggcatcgccggcagcgtagccgttggtaagagcacgaccgctcgtctgttgcaagcgttgctgagccgctggcctgaacatcgcagcgtggagctgatcacgaccgacggcttcttgcatcctaataaggtgctgaacgagcgcggtctgatgaagaaaaaaggcttcccgcagtcttacgatatgcatagcctggtgaaattcgtgtcggaagtgaaatccggcgccaaacgcgtcaccgctccggtttattctcatttgatctatgacgttgtgcccgaaggtaataaagtcatcgagcaaccggatattttgatcctggaagggcttaacgtattgcaaagcggcatggattatcctcacgatccgcatcgcgtattcgtttccgattttgtcgacttctctatatatgtcgatgccccggagacgctattgcaaagctggtatatcaatcgcttcctgaaattccgtcaaggcgcattttccaatcccgattcttatttccatcactattcaaaattgccggaaccggaagcgattaatatcgccacgcaattatggaatgaaattaacgggttgaatttgcagcagaatatattgcctacacgcgaacgcgccagcctgatcatgaccaaaagcgctaaccacgccgttgaaagcgtgcgtttaagaaagtaa

SEQ ID NO: 426715 - DNA, 549 bp, Serratia marcescens
atgaaaatagtgcctatcaacgccgctacgctgccgatttaccgggatgaattggcccgcctgttgaccgatgccgtcacgcacggcgcttctgtcggttacgacaccttaatccctcacgaagacgccgagagctacttccacagtctgcgaccggccctggctaaaggtgaactgctgctgtggattgcccgcgacgagcgcggcgtcgttggcaccgtgcaactcgaactctgtcagaagccgaacggccgtaatcgtgcggaggtggtgaagctgttggtgcatagccgcgctcgtcgcaacggcgtaggtcaggcgctgatgaagacgctggagcactcggcgctgcagcagcaacgcgggctattgtacctggatacgcaggccggttcggcagcagaagcgctttatcgcagcctgggttatcgctgtttgggcgagctgccggattatgcggcggggcccgatgggcattaccatccgaccgttatttattacaaacgcctgttcaccgtgaaccaaccttcgcgcgccatcgccagttaa

SEQ ID NO: 426716 - DNA, 237 bp, Serratia marcescens
atgtcctgtacgttggccacgccgcccggcacctgcgccaccaccgcgtcgatctccggctggctcagcgtcgccagcggcaacatctccggcgtaatggaggccccgcccggtaaaatccggttttccggtatgtcgacctcaccttgcgcgctcatcgcctgcgccagcgccgacagcgtcggcgttgagaacagcgtctgcacgttcgctccccaaccggcgcgccgcagctga

SEQ ID NO: 426717 - DNA, 567 bp, Serratia marcescens
gtgcgccttgcagcagtggcatcatctgattggcgatcactccacgctggccttcatggagcaagagatcggcgagatcctcgccggccgtggggcacagttgggcgtcgcccagccgttccgcaatgcggtggcgcaggcgcgcctggctctcaacgaggcggagcacgaaagcttcttccgcgacatgctggcggatatcagcgagccggtgctgccgttcggcctgagcgacgtgcacggcgaagggcggcaaatcgcctgccgctaccaggcgctctcttcggcgctaaacctgcggttgcggcaacaggcgcggcggctgggcgtcagcctggccagcctgtgccacctggcctgggcgcaggtgctggcgagcgtcagcgggcgagacgcggtcgtgttcggcaccgtattgctggggcgtctgcagggcggcgaaggcgcggaacgggcattggggttgtttatcaacacgttgccgctgcgtctggacatcgatcggcgaggcgtggagacggcggcaagagaggcgcacgtgcggctgagcgggctgctggcgcatga

SEQ ID NO: 426718 - DNA, 1464 bp, Serratia marcescens
atgctgccgcagcgcgcccgccagcgtctcttccgccacgtccgcggccggcaccacccacgccaccagccgtttgtcgtcgcccaccgcccgcgcatccaccaccgcttcgcgcaccgccgggtgcgtcgccagcgccgcctctatctcgccgcattcgatgcggaagccgcggatttttacctgctgatcgttgcgccccaggtactcgatgtcgccgttcgccagataacgcgccacgtcgccggtgcggtacatccgcccgcccggcgcgaacggatcgctcaagaagcgctccgccgtcagttcaggccggttcaggtagccccgcgccacctgcaccccgccgatatacagctcgcccaccgcccccagcggcaccggctgcccgcgctcgtccaacaggtagatacgcgtgttggcgatcggccgcccgatcggcaccgacacccgctccacctcccgcgaacagtgccaggcggtcacgtccaccgccgcctccgtcggcccatacaggttatgcaactccgcctgcggcagccggcggtaaaactccgccaccagcgccgccggcagcgcttccccgctgcacatcacccgcaccacctgcccgcagcgcgtcgccgcctgcccgtccgccaggaagctttgcagcatcgacggcacgaagtgcagcgtggtgacgccatactgttcgatggcgcggctcaggtagtccggatccttgtgcccttccggcttcgccatcaccaggcgcgcgccgaccatcaacggccagaagaactcccacaccgagacgtcgaagccgaacggcgttttttgcagcaccgtgtccgccgccgtcaggccgtaggcctcctgcatccacaccagccggttgaccaccccgcggtgctcattcatcgcgcccttcggtttaccggtcgagcccgaggtgtaaatcacgtacgccaggtgcgacgcctgcgcgcgccgttccgggttctcggcgctcagcgtatccggcagcgccgcctccagcgccagctgcggcgtcgcaggctcgcccagcgccgcccggccggcggcatccgccagcagcagcaccgggtcggcatcctgcaggatgtactgcaggcgttcacccggataggccggatcgagcggcacataggcgccgccggccttgaggataccgaacagcgccgtcaccatgttcaggccgcgttcggcgcacaccgccacccggctgtccgggccgacgccgcgcgctatcagcgcgtgcgccagccggttggcgcgggcgttcagctgggcgtagctcaggctttccgtgccgctcaccagcgcggtggcgtgcggcgtgcgacgcacctgctgctcgaacagcgccgccagcgtctgatccagcgggtagtcacgctcggtgcggttccagccatgcagcagcagttcgcgttccgcctccggcaccaccgccagtga

SEQ ID NO: 426719 - DNA, 1950 bp, Serratia marcescens
atggacgccgtacaaaaagccaattccggccacccgggtgcccctatgggcatggcggacatcgccgaagtcctgtggcgtgactacctcaaccacaacccgactaacccgcactgggctgaccgcgaccgtttcgtgctctccaacggccacggctccatgttgatttacagcctcctgcacctcaccggctacgacctgccgatgcgcgagctggaaaacttccgtcagctgcattccaaaaccccagggcacccggagtacggctacaccccgggcgttgagaccaccaccggcccgctgggccagggcatcgccaacgccgtcggcttcgccatcgccgaacgcaccctggccgcgcagttcaaccgcccgggccacgacatcgttgaccaccacacctacgccttcatgggcgacggctgcatgatggaaggcatctcgcacgaagtctgctctctggccggtaccctcaagctcggcaagctgaccgctttctacgatgacaacggcatctccatcgacggccacgtcgacggctggttcaccgacgacaccgccctgcgcttcgaagcctacggctggcacgtggtgcgcaacgtcgacggccacaacccggacgccatcaaggccgcgattgaagaagcccgcaaggtgaccgacaagccgtcgctgctgatgtgcaagaccgttatcggcttcggttcgccgaacaaggccggcacccatgacgtgcacggcgccgcgctgggcgccgccgaagtggccgccacccgcgaagcgctgggctggaaatacgccgcctttgaaatcccgcaggacatctacgcccagtgggacgccaaggaagccggtcaggccaaagaagcggcctggaacgacaaattcgccgcctacgccagggccttcccggagctggccgccgagttcaagcgccgcatgaacggcgagctgccggccgactggaaagccgacgccaaggcgttcgtggaaaaactgcaggccaacccggccaacatcgccagccgcaaggcgtcgcagaacgcgctggaagcgttcggcaaggtgctgccggagttcctgggcggctccgccgacctggcgccgagcaacctgaccatgtggtcaggctcgaaagcgctgaacgttgacccggcgggcaactacattcattacggcgtgcgcgagttcggcatgaccgccatcaccaacggcatcgcgctgcacggcggcttcctgccgtactcggcgactttcctgatgttcgtggaatacgcccgcaacgcggtgcgcatggcggcgctgatgaagctgcgcaacgtgttcgtctacacccacgactccatcggtctgggcgaagacggcccgacccaccagccggtggagcagctggcgagcctgcgcgtgaccccgaacatgagcacctggcgcccgtgtgaccaggtggaatcggcagtggcgtggcagtacggcatcgagcgcaacgacggcccgaccacgctggtgttctcgcgccagaacctgacccagcagccgcgcagcgcagagcagctggcgaacgtgtaccgcggcggctacgtgctgaaagactgtgcgggcacgccggacgtcatcctgattgccaccggctccgaagtgggcatcacggtggaagcggcggacaagctgaccgcggcgggccgcaaggtgcgcgtggtgtcgatgccgtcgacggacgcgttcgacaagcaggatgcggcgtaccgcgagtcggtgctgccggcggcggtaacggcgcgcgtggcggtggaagcgggtatcgcggactactggtacaagtacgtggggctgaacggcgccatcgtgggcatgaccaccttcggtgagtcggcgccggcggagcagctgttcgccgagttcggcttcaccgtggacaacgtagtggccaaggcgcaggcgctgctgaagtaa

SEQ ID NO: 426720 - DNA, 1062 bp, Serratia marcescens
gtggccagagatgttgttggagtagacttccagttcgcagctgatgtcgtcacactttctggcgtgcagcgtgccggcatccacctcggcgcccaggcccggaatattggcgacaaactgggtcgggccgtaggccacgcccgtcggatccgggatgcggaactccgccggaatatcctcgacggtatagaacatgcccgggccgttaatggctttgcccaggttgatcatcccccagccgtagagcgcgtcgatgcccggcgcgcccatgtcggtggcggtagttttcagcacgtcggcaatctgcgccgaactcatgtacgggaaacgctgcagcaacaccgccaccgcgccggtgacgtgcggcgtcgccatcgaggtgccgtttttattgccgtagtccgacaccaggttggccggatcggaaccgttggccacggtgctgtagattttgctgcccggcgacgagacgcagaagctggcggtatagccgcagcgggaagagaagctgctgatggtgtaaggcacgctgttggtcgatgccgcatcctgcgccacgctggcgaccgacagccagtttggcgcgatgtccggcacgaagtaggccagcccgctgatcacatccggctggttgtagttgccgtcgttgccggcggcgaacagcaccagaatatttttgcgcgcggcgtcgatggcgccctgatagcctgcgccggccaggctgccgagcaacggtttgacctgatcgaattgttcctgcgcatccttcagctcaaagtgcagcgcgttaggatcgcggccgccgtcggacagaaagtcgggaatactgacgccccagctgttgttgatcacccgcacgccgttgttgatcatcgcctgccagccggcattggtgacggcgccgtccaggccgaggaattcaccataggccgggccgtcgttgtcgttatcgacgctgatcacctgcgaatcgaaagccacgccgtgcatgccgacgccgtcgcggttggcggcgctgatgcccgcaacgtgcaccccatgattgctcagcatgccctgtga

SEQ ID NO: 426721 - DNA, 630 bp, Serratia marcescens
atgcaggccgcgcgttttgccgatcagggtgaaattagccggttccttcagcgtcaggctggcgggatcgggcggcggcagcgtggcggccagcgcggcgaattcgccgaagcccgcttcgcgtccgctggcggcatggcgaatcttgcccgcctgcacggtaatttcctgcgccgaggttttccagctctgcgcggcggcctgcaccagcagcgcacgcgccatggcgcccatgcggcgcatttgctcataggcattggccaccgagctggaaccgccggtgccctggaatccgaagctcaggtttttgtagatatgggtgtccaccggcgcggcgacgacccgcacctgcgcccagtcggcatcgagctcttcggcaaccagcgtcgccatgccggtatagaccccctggcccacttcagtgtgtttactgatgacggtgacgacgccgtcggcgccgatctgaacgaaggcgttggcatcaaacgctgccgtgccggaggcggccggggcattcgaccgcgccagcgcgccggtggacggcagataggcgccgatcaccaacgccccggcgccgacgataaaccgccgccgcgaaagcggaacttgggatatgctcattgctcatga

SEQ ID NO: 426722 - DNA, 2100 bp, Serratia marcescens
atgagtaagcccacgttcaaacagcggatcagccagctggatctgcggctgcgccaccgggttccgatggtgcaccagaccgagtcgtcagaatgcgggctggcctgcctggcgatgatctgcggttactatggtaaaaacgtcgacctgatcgcgctgcgtcggcagttcagcctgtcgacccgcggcgccacgctgaccgggttaaccggtatagccgaacagctgggcctggccactcgccctctatcacttgatattgacgagctcagcgcgctgaaactcccctgtattttgcactgggagttcaaccatttcgtggtgctggtcagtatcaaggggcaccgcgcggtgctgcatgatccggcgcgcgggcgccgggccatcagcctgacggaactgtcgcacagttttaccggcgtggcgcttgaggcctggcccggcagcgccttcaccgccgacagcgtccgccaccgcattcacctgcgcacgctgattggcagcgtacacggtcttaagggggcgctcggcaaaatcttttgcctgtctctggtgttcgaaaccatcaacctggtgatgcccatcggcacgcagctggtgatggatcatgctattcccgccggcgatcgcgggttactgacgctcatttgcgttggtctgatgctgttcatcctgctgcgggcagctgtcggcatggtgcgcgcctggtccgggctggtcatgtcgacgttcatcaacgtgcagtggcaatccgggttgtttacccacctgttgcgcctgccgctgggctactttgaacgacgcaagctgggtgacattcagtcgcgcttcggctcgctggatacgctgcgcagcaccttcaccacgagcattgtcggcgccatcatggacggcatcatggtgatcggcgtgctggtgatgatggtgctgtatggcggctggttgacctgggtggtgattgcgttcaccgcgctctacgtgctgatgcggctgctgacctacggctattatcgccaactgtccgaagaagcgctggtcagggaggcccgcgccggctcgtattttatggagacgttgtacggtatcgccaccgtcaagatgcagggcatggcggaacgtcgcattgcccattggctcaaccttgaaatcgacaccatcaataccggtatccgggtcacccgtatggacatgctgtttggcgggatcaacaccttcattgccgcctgcgatcaggtcgttattctttggcttggagccagcctggtgatcgataaccagatgaccctcggcatgttcgtggcgttcggcgcctttcgcgggcagttttccgaccgcatcgggtcgctgacggaatttttgctgcagctgcgcatgatgagcctgcataacgagcgcatcgccgatatcgccttgcacccacgagaaaaccgtaaaccggaccttccttacgcggcgggcctgcaacctttgggattgacgacccatgccctgagctatcgttacgacagccagtcaccggcggtcttcgatgccttggacatcagtgttgcgccgggcgagagcgtggccatcgtgggcccgtcgggcgccggcaagaccacgctgatgaaggtgctgtgcgggctgtttcccccggactcagggcgggttgaggtgaacggcgtcgatatccggcagcttggcatcaacaactaccacaagatgatcgcctgtgtgatgcaggacgacaaactgttctccggctcgatccgggaaaatatctgcgggttcgcggacgaggtggacgacgcctggatggaagcctgtgcccgtgccagctatctgcacgacgtgctcatgtgtatgccgatggggtatgaaaccccgatcggcgagctgggggaaggattgtccggcgggcagaagcaacgcctgttcattgcccgggcgatttacaagaagccggcgattttgttcctggatgaggccaccagtgcgctggataaggagagcgaagctgtggtgaatcaggccatcaagagactcaatatcacgaaggtgatcattgcccaccgtgaaacgaccattgcgtcggcagatcgggtcatccattttggataa

SEQ ID NO: 426723 - DNA, 1278 bp, Serratia marcescens
atgagccatcaggcattgggtattgatttatcaaaggtagaaaggttatccgttccaaatatcctgcattttgtatggattggtgacttaaatgaagtaaatacgcattatatcgacatatggaaaaaaacaaacaaagataagcagatattcttttggtatgaccaagactcttcactgtgccatttgctaaacaatgccatacgcgatttcgtcagcgtcaaaaaaattaaaaataaagacaaggctgaattaaaaataaaaaatcatgccttcaaatatatatatccaaaaataaaggcaggtttttcttttgatgagctcgttattgaattcttaaccaagcatgaaatcccttatcagaggccgccaaaagcgattgaagactcatggtttggcaacagaggttttataaaaaagcctataactgagctttttttcaacgatttcgatgattttatgaagtattattactatgagattatactaaggcataacattgccagtgcaagtgacattgtcaggcttttaattatctatcagtatggcggcacttatatagatgttgatacgctcccatatattgacaatatatatcataaattaaacaaatatataagaaaaaagggcattgtcgagagtgactcctttctattgtttaaaaccgtatgttttttaaaaaagacaaattcagaaggggtgctgcctgaagtcgtgatcggctgcgatgaaaatgagttaggggtagatgctgttggatttgaagaaatcaaaaggcttatcgaactggatctcactgatttttctctggatatgatattgccattgggtgagacatacgttcataaaaatttattggcgctaggatcactcagaagatttaaaggtgtttattttaataacttcatatcctctcaccaaaaatccaaggcggtaaggatcattcttagagtaatgaaaaaaagataccgctttttagaaaaaaataattgcatatttgactgttatattgatgatgggtcaaggtgttatctgaccaggatcttaccatggaggaatgagttaacaacaaggaactattgcgttacctcggtcttaactgggccgggtttaattgttgaggttttattggggttggcttataaggcctttaatattggatatctgatagagccctccagcattgcggaatatatgcaaaatcctgattttggaattgcattgtttcaacacaccatagatacccctgatggcgcctattccacgtggcgcaaataa

SEQ ID NO: 426724 - DNA, 261 bp, Serratia marcescens
atgagagagcttacacttaatgaagtgaactttatcgcggcagctggggatttcagctatgcagagttgggcggtgcagtcgctgccggcgcggttggtggagcgatgaccggcgccatggctggcggcgtcggtgccggcccaggcgctgttgccggtgccgttatcggtggtgccgcctataccgctggcaaaatggtggaatccatgttgggtggcaataaacaaacatcgacgaacaatcctgccgacagtaactaa

SEQ ID NO: 426725 - DNA, 525 bp, Serratia marcescens; identical to SEQ ID NO: 424085

SEQ ID NO: 426726 - DNA, 957 bp, Serratia marcescens
atgagcaacgccattacccccgagcagcgccaggcgctgaagatggccgcacactggtatgccctgctgtgcgatgagcacgtcaccgaccgccagcgcctacagtggcaagcctggcaccagcagcacgccgatcaccgctgggcctggcagcgcgtcgaagcgctgcagagccagctgcagggcgtgccgggcaagttcagctaccgcgcgctcgatcgcgccggccgccagtcggcaatcgatcgccgcaccctgctgaagagcctgctgctgttgcttggcgtaggtggcggcggtttcctttaccaatcgccgttcggccgggagctgcgcgccgactaccgcaccgccaccggcgaaatcaaacccattgtgttaagcgacggcacccaactggtgctgaacaccgccagtgcggtggacgtgcattacgacgatcgtcaacggttgatccgtttgcacgccggagaaatcagcctgattaccgggcgcgacccccggccgctgtgggtgcaaagcccgcagggggcgatgcgcgcgctcggcacccgctttttggtgcgcgagatcggcggcgagacgcgcctgacggtgctggagcatgcggtcgaagcgcagctggcgcaggatccgcagcaaacgcgccgggtggacgccggggaacagatcggcttcagcgcctcggccttcagcgacaagcaaccggctgcggcggaggacggctggctgcgcggcgtgctgagcgtcagccaatggcggctggaccaggtgatcgccgaactggcgcgctaccgacgtggccacctgagctgcgatccggccgtcgccggcctgcgcgtcagcggcagtttcccgctcaacgataccgatcgcgccctcgccctgctcagccagacgctgccggtgcgcctgcaaagctttacccgctattggctgcaaatcgttcccgcctga

SEQ ID NO: 426727 - DNA, 2352 bp, Serratia marcescens
atgaacaacgcttggggaaagggagcgccggcttcgctttggggaaaacgcgccacgccgctggccgtggccattggcctggcattcgccgcaccgctgacggcgagcgccgccagcgccgccgcagcctatcatattccggccggtgagttggacggcgcgctgaacgctttcgccgcgcgcgccggcatcgcgctctcgatggacggcacgctgaccgccggtaaacgttcgccgggcctgagcggcagctacggcgtcgatgacggcctgaacgccttgctggcgggcagcggcctgcaggctatagcgctcggcaacaacggttacacgctggccaaactgcctcagccgcagaaggaagaagacatcaccgtggtcggtgactggctggcggaaggccgccaggtagacgtgttcgaacatcccggcgcgcgcgacgtggtgcgccgcgaagaattcgccaaaaccggcaccaccaccgtgcgcgaagcgttgaatcgcgtgccgggcgtggtggcgccggagaacaacggcaccggcagccatgacatggcgctgaacttcggcattcgcggcctcaacccgcgcctcgccagccgctccaccgtactgatggacggcatcccggtgcccttcgcgccttacggccagccgcagctgtcgctggcgccggtctcgctcggcaatatggacgcgatcgacgtggtgcgcggcggcggcgcggtgcgctacgggccgcagagcgtcggcggcgtcgtcaacttcgtcacccgcgccatcccgaaaaccttcggcatggaagccggtatgcaggggcagctcagcccgacttcgcgccaggatcacccgaaaggcaccggcaacctgatgatcggcggcaccgccgacaacggcttcggcgcggcgctgctctactccggcacccgcggcagcgactggcgcgaacacagcgcgaccaagattgacgacgtgatgctgaaaagccgttacgccccgaacgaggtgcacaccttcaacagcctgctgcaatactacgaaggcgaggcggacatgccgggcggcctgagccgggcggactacaacgccaacccgttccagtcgacgcgcccgtacgacaagttctggggccgccgccagctggcgaacttcggctatcagtatcagccggatcaacagcacaagttcgacgtgcagagcttctacacctacaccctgcgcagcggctatctggatcagggcaaaaatctgacgctgtcaccgcgcgaatactgggtgcgcggcgtggaaccgcgctacagccagagcttccgctggggagactcggcgcatgaggtcggcgtcggctaccgctacgtcagcgaatccacccacgagctgcgctacaccagcaaggccagcaccggccggctgccgtccagcgccagcccgtacgatcgcgatacccagtccggcaccgaggcgcacgccttctatatcgacgatcgcatcgacatcggcgactggaccatcacgccaggcatgcgctacgagtacatcaagtcgtatcagaacaactacatcaagaacaaccgcctcgacgtcagctataacgcgccgctgccggcgttgaacgtgatgtatcaccttaacgaatactggaacctgtacgccaacaccgaaggctccttcggcaccgtgcagtacagccagatgggcaaagcggtcgacagcggcaagattgaaccggagaaggcgcgcacctgggagctgggcacccgctacgccggcgatgcgctgaccggcgagatcgggctgttcctgatcaacttcaacaaccagtacgactccaaccaggtgaccgacagcgtgaccgcgcgcggcaaaactcgccacgccgggctggagggcagcctgcgttacgatctgtcgcagctgacgccgaaactggacgatctgaccgcctacgccagctacgcctacgtcaacgccactatccgcgaagacggcggctacaagggcaaccaggtgccgttctcaccgaaacataaaggcacgctggggctggactacacgccgggcaactgggcgtttaacctcaacggcgagttccaatccagccagttcgccgataacgccaacaccgtggcggaaagcgccgacggcagcaccggccgcattcccggctatatgctgtggggcgtgcgcgccgcctatgattttggcccggaaatggccggcctgaatctgggcgtcggcgtgaaaaacctgttcaaccacgagtatttcacccgtgcctatgacgataataacaaaggtctgtacatcggccagccgcgtacgatctatctgcaaggctcggtgaagttctga

SEQ ID NO: 426728 - DNA, 522 bp, Serratia marcescens
atgaatcataatgacctttctcagtgccgcgtggacaccgaccgtttgttgattgccccctttaccgcagcagacgccgacgatgtttaccaggcgatcacccccactctgacgcgctttatggcctttgagccggaggcgtcgccggaagatttcgccaacgtctggcaaggctggctgccgctgatgcgcgaaggcgaagaagtgatcttcgtcgcccgtcggcgcgaagaccggcagtttgttggcgtcggcggcgcgcacaacctgcgcagccgcaccccggagctgggcatctgggtgaaagagagcctgcacggccagggctacgggcgcgaaatcgtgcagggcatcgcgcgctgggtcagcgagcgctttcagcctcagcaccttatctacccggtggccgagcaaaataccgccagccgccgcctcgccgagtcgctgggcggcgtgctggccggcaagcgtgaaaacatcaagtatgacgccgtggtctaccacctgccgcctcagcattga

SEQ ID NO: 426729 - DNA, 327 bp, Serratia marcescens
atgttaaaaaccacgctgttgtttttcgccaccgccctggctgaaattatcggctgtttcttgccttatctctggctcaaaaagcagggcagcgcctggctattgctgccggcggcagtgagcctgatgctgtttgtctggctgttgacgctgcatccggcggccagcgggcgggtctatgcggcctacggcggcgtgtatgtggcgacggcgctgctgtggctgcgggtggtggacggggtgaagctgtctgcgctggactgggtgggcgcgggggtggcgctggcgggcatgttgatcattgtttcaggctggcgcgcagcctga

SEQ ID NO: 426730 - DNA, 822 bp, Serratia marcescens
atggctgatagcaaagacagtcaatatgtctccgactggtggcaccagagcgtcaacgtggtgggcagctaccacacccgcttcgggccgcagctgaataacgacgtgtatctcgaatacgaagccttcgccaagaaagactggttcgatttctacggttacgttgacgtgccgaagttcttcggcgtgggcaataccccggatcgcggcatctgggacaaaggttccccgctgtttatggagattgaaccgcgcttctccatcgacaagctgaccggcaccgatctgagcttcggtccgttcaaagagtggtacttcgccaacaactacatctatgatctgggccacaacgccgacggccgtcagaacacctggtacatgggtctgggcaccgatatcgacaccggcctgccgatgagcctgtcgatgaacatctatgccaaataccagtgggaaaactaccaggccgccaacgagaacagctgggacggttaccgcttcaaggtgaaatacttcgtgccgctgacccaggtgtggggcggcaacctgagctacatcggcttcaccaacttcgacttcggttccgatctgggcaaggacagccattgggttgacggcaccggcaaacaggtgcgcaccagcaactcgatcgcctccagccatattttggcgctgaactacgatcattggcactattctttcgtggcgcgttacttccataacggcggccagtggcaggatggcgcggatatcggcaccccgcagggcccgatcaagtctaccggctggggttattacctcgtggtcggctataacttctga

SEQ ID NO: 426731 - DNA, 2493 bp, Serratia marcescens
atgaagctgaataaaaaagtcctctcgctgctgaccgcctcttcattcttgttgccggatacggcctgggcggtgacgttcgatacgtcgctgttggccggcgaatcgcgcgattccgatctctcgcgtttttacctcaataatgacatgcctgccggccggcaggagattgatgtgtatgtcaaccatgactggaaagggcgctatgcgctgctgtttggcacccaacgcgacgatattcaaatcgactacaaggatgcgcagcggctgggcatcgatctgagtcagttgccgacgcctcaggcgccccagacgacgctgtcgatcgccacgctggtgcagggcggccggttcgatatggacgtcagcgcgctgagcctgcggctgacggtgccgcaggcgcgggtcaaccgatcggaggcgggatacgtggatccggccttctggaatcgcggcatctccgcattgacgctggcctacaacgcgacgtactaccacgccgaggcgcgcggcgacggcaatcgcagcaacaacgacgatttttataccgggctggaatccgggatcaatctggccggttggcaatttcgcgacagcagcagctttcgccacggcagcgggcgggggagccactggcagaacaacacgcgctatctgcagcgcggcttcgccgacatcaaatccaacctgaccgccggcgatttttattcgccgggggatctgttcgactcggtgcgcatccgcggggtggcgctggcgtcggacatcagcatgcgccccaactcgcagcagggcttttcaccgatcgtgcggggcgtggcgcaaaccaacgccctggtgaaagtggtgcagaacggcaacgtgatctaccaggaaaacgtgccgccgggcgcctttaccctcgacagcattcagccgaccggctcggcgggcgatctgtgggtaacggtcaaagaggcggatgggcgtgaacagtcgttcagcgtgccgttttccgccgtacccaacatgttgaaacagggcgtcagccaatacagcgtgctggccggcaaggtgaacgaaagcaataccgattacgatcccggctttgtgcagggcaccctgcagtacggtttcaacaacctggtaaccggctatgccggcagcattttgagcgacgactatcaggcctggctgctcggcagcggctggaacctgccgataggggcggtgtccatcgacctgacgcatgccgatacccgcctgaaaaaccgccgtgaaagcgggcagagcttccgtatcgcctacagtaaatttctcgatgccaccgcgaccaacttcacgctggcggcctaccgttactccacccgcggttactacagctttaccgacgccatttactctaatgacggttaccgccagctggaacggcagtttgaacgctggcgcgacgaggagggtttgtccgaactggatatgaacacctgggatgcgctacggtccgcccggccgaaaaatacctttacgcttaacctgaaccagcgtcttaacgaagggtggggcacgctgttcttctccggctcccagcgcgattactggacggccaacgcgaaaagccgcgaataccagctggggtactccaacaatctggggcgcgtcagctactccgtttccgccagccgggtgcgcaacagccagcgtgaggaagagacgcgttattacctgtcgttcagcctgccgctgtcggtgttcgacaacaacgcctacctcagcaccggcctgtcggcgacggactctcactatcagcaaagcacggtcagcctgagcggcaacgcgctggagtccaaccgtctgagctactcgctgaacggcagcaatcgcagcggcggcgacaacatggccggcgtcaatgcggcctaccgcacccgtgtctcgacgcttggcgtctcctacagcgaaggcaacgattatcgccagagcggcctcagcgcgcgcggcagcctggtggcgatcccctggcatgtgctggcgtcgaacgaaatcggcaacaccatgacggtggtcgaggcgccgcaggccgaagggctgatggtcaacggcgacgaaagcatcgtgaccaacgcccagggcctggcgctggtgccctatgccacgccataccggcaaaactcggtcacgctgtcggataccggccacagcagcggggcggaaatcagcggcaacgtcgccaaccacgtgccttactacggcgcggtcagctacctgaaattcgaaaccgatcaacgtcagccattccagctgcgggcgcagcgcgccgatggcgcaccgctgccgttcggcgccgaagtgctggatgaaaacggccggtcgataggctttgtcggccaggccagcgtgctgtacctgcgcgtcgaacagccgccaacggcgttgacggtgcaactgcgcgacggccgttgccgcatcgccaaaccgactctggcgctcgacgcgtcgcccggcgtttgccgctaa

SEQ ID NO: 426732 - DNA, 132 bp, Serratia marcescens
atgcattctgttcgtcgaagaaataaaaatccccctgaattatttatgtttcccacccagaaccttgacctgaccgacgtttcactaaatactagccgcgacctggaagcctataccattataaaaacctga

SEQ ID NO: 426733 - DNA, 483 bp, Serratia marcescens
atggccgcattgctcaaccccaaaatgctgactatcggatttttggcagtgattctcttcattgtcctgtttcgcgttttaacccccgccgcgcctgtgcatatgaattgccaggccgatacgatcactaaaaaacgattagcttcaggcgatgacctggaattaaaagtgacgggcagtttattcatctatgacgaacatcatgccatgatcgtgcagcgtggggacatcaccgtgagaggcaaaacctacagcctggataggaaaataaactttgatataaagaggttagatgacgggttttacatgaccacccaccgagaaatcagcaaaacgcccgacgacaacgcgccggatgagctgacccaggaaatccccatgatctctctcggcattaagaacggcgttttttcgatgcgtaaagctcggcaggatgcgtacatcgttcatggcgtgcttttcccggtaacgctatgccgttaa

SEQ ID NO: 426734 - DNA, 627 bp, Serratia marcescens
atgattacccgtcatcgtatagccggtttactgttgtccaccttgctgctgtccagcggcctggccgccgccgctcaaacgccgggcaaggttatcgcgccgctgcgcggcaccatcagccaggtggccgacggcaatctgcagctgaccgatcgcaagggtgagacgctcagcgtcaagctgaacgatcagaccaaagtgctcagcgtttccaaggccacgctggacgacatcaaaccggacagctttatcggcaccgccgccgtgccgcagccggacggcacgctcaaagcgctggaggtgcacgtgttcgccgccagcctgcgcggcaccggcgaagggcactcggcctgggaatccgccgacggcaaagtagacaccatgaccaacggcaccgtcggcaaactggtgaaatccaacggccgcaccctgaccgtcacctacggcaaccagcagaaaaccgtcgtcgtgccggaagacgtgccaatcgtgacgctggatccgggcgatttgagcctgctgaaaccgggcgtgcacatcgtgctgttctccgccgccaacgataagggcgagcgcgtcgccacccgcatatccgccggcaaagacggcaccgtgccgccgatgtaa

SEQ ID NO: 426735 - DNA, 528 bp, Serratia marcescens
atggagattgatgtgagggagtcacacacagggatagcagacacatacaggtatcagattactgtaagaaaaagtgatggtaaaacggccatctatcatttggatttcaagaaaattgggcaaaacatgcaccattggtttgccccagtgtatgtggacactactctcctcgataatgctttctctctggagttttatgatgttaaggcgctgagcgacgcaagcaagcaccagcgctcagctttcgatacctataccgcaatgcattacacccttctccaacgcgaacgtttattcgtcgttggcatcggggaaacccttctcaagtttgcttatcagtatcatgccaggatcatcttcagtgcaccgttaaggccagcattagctaaaatttatgatttcctgttgaaaaaacacgctgaaaaagggcattattcatacaaaatagagtttataaaggacggcctctatgtcatcgaaatcccgcataacccccataacaccccatacttaccagcagcacgttaa

SEQ ID NO: 426736 - DNA, 159 bp, Serratia marcescens
atgctcgcgatgccgcagcccgccaagtggcggttagtgcggctggatttatggcgtgaaccgccgcaggcacagccgcacaacggccagctgttccgcgtcggccatctgtccgccccctttgaccacactgcgccgcgggttgacagccaaacttga

SEQ ID NO: 426737 - DNA, 258 bp, Serratia marcescens
atggaagagatctatttttacggattggcgcactttggcttacaggtggccgaagattatctgcgccacctgcatcaggctttcgataaccttagccacccccaactcggcagaaacatcgatgcaatcggccccggcctatgggtattgcccgtcgccaaccacctgatttattttcgtcagcacaggcgagaggtgaatatcatcagagtgctgcatcactcccacgatccgctcagccgatcctttttcagctga

SEQ ID NO: 426738 - DNA, 699 bp, Serratia marcescens
atgctgcaggtagaagaattgaatcagtattacggcggcagccacattctgcgcggcctgtcgttcgaggcgcgcattggcgaggtgacctgcctgctggggcgcaacggcgtgggcaagaccacgctgctgaaatgcctgatgggattggttccggcgcgcagcggcagcgtgcgttggcagggcgaaatcatcaccggtaaaaagccgcatcagcgggtgcgggcgggcatcgcctatgtgccgcaggggcgggagattttcccgcgcctgacggtcgaggaaaatctgctgatggggctggcgcgcttttccggcgccgccgcgcgcacggtgccggatccgatctatgaactgtttccggtgctgcggcaaatgaaggatcggcgcggcggcgatctctccggcgggcagcagcagcagctggcgatcggccgggcgctggcctgccggccgcagctgctgatcctcgacgagccgacggaagggatccagccttcggtgatcaaggagatcggcgcggtgatcaaacagctggcgacgcgcggcgatatggcgatcctgctggtggaacagttctatgactttgccgccgacctggcggacagctatctggtgatgtcgcgcggcagcatcgtgcagcgcggcgccggcagcaatatggaacaggacggcgtacgtgggctggtggcgatttga

SEQ ID NO: 426739 - DNA, 1026 bp, Serratia marcescens; identical to SEQ ID NO: 422124

SEQ ID NO: 426740 - DNA, 669 bp, Serratia marcescens
atgattgaatccctgttcccccacctgcgtctggaccaactgtgggacgccacctgggaaacgctgtacatgaccggcatcgccggtttggccacgctggtgctgggcatcgtgctcggcgtgctgctgtttttaacctcgaaaggccagctgtggcagaaccgggcggtctactcgctgatctccgtgttggtcaacgtcttccgctccattccgttcatcattctgatcgtgctgctgatcccgttcaccaaatcgctgatcggcaccattctcggcgcggatgcggccctgccggcgctgatcgtcggcgcggcgccgttctacgcccggctggtggagatcgcgctgcgcgaggtcgacaaaggggtgatcgaagcggcgcgctcgatgggcgccaaaaaccgtaccctgattttccgcgtattgctgccggagagctcgccggcgctggtttccggcatcaccgtcaccctgatcgcgctggtgagctacaccgcgatggccggggtgatcggcgccggcggcctgggcaacctggcctatctggaagggtttcaacgcaaccacagtgatgtgacgctggtggcgacgctgacgattctgctgatcgttttcgtcattcagttcatcggcgacaccctgacaagaacgctcgataaacgttaa

SEQ ID NO: 426741 - DNA, 3633 bp, Serratia marcescens
atgagtgatgatagctataaatttcaaaagttaacgccgttcagcgatgttgagctgggtgtatataaaaatgcgatagattttgtttttgccaatgacgatctaaaaaatgttgcgatatcagggcaatatagtgcaggaaaaagtagtcttgtcgaatcctataagaaaagtcattcgaatataaagtttgttcatatctcacttgctcatttcagagcgatagaggaagctgaaactaatgaactaggtaaagatataaatgaaaccgcgttagaaggtaaaattcttaaccagttaattcaccaaattaatgctgatgatattccccagacgcattttaaagtaaagaaaaaaataaaaacgaacagtattgtgataaataccatcttcacggtgttatttatcgccacggtactacatatcactctatttaataagtgggggaagtttgtttcacttttatctgatggtgatttaaagacactacttacattatcaactaaatacgatacacttttaattagtgggtttatatgtactatcttatcttgtgttttcatttacaagttaataaaaacccaaaagaatcgtaatgttcttaagaaaataaatttacagggaaatgaaatagagatttttgaagaaagtaaagagtcttattttgatagatatttaaatgaagtattgtacctattcgagaacgttgatgctgatgccattgtttttgaagatatggaccgttttaatagtaataacatctttgaacgtcttcatgaggtgaatagactggttaatattcaacgggacatagcagggcacaataaatcgacgttacgttttatttacttgcttcgtgatgatatctttatttctaaggatagaaccaagttctttgactatattatcccagttatccctgttgttgatagttctaattcttacgatcagtttatctcacattttgatggtggtggtattctcaagttgttcaatgaaaggtttctgcaaggaatttcgctatatattgatgatatgagaatattgaagaatatctataatgaatttcaaatttattataataaattgaatacgacagaacttgactgtaataaaatgttggctattattgcctataaaaatattttcccgcgagattttagtgagttgcaaattaatcagggaatggtttttgccatatttaatggaaaagaatccattgtaagtgatgaaataaggcgattagaacaaaaaattaatagcaaagagaatgatattaattccataaaaaatgaaatacttaactctgttgaagaggtgaatgttttatataatcatgaaataagtgcttacaaacacagtgctcattactatagggatgaaattgctgatgttgagcgtagacgggaatctagaaaagaaaatgttgaaaataatataaataacagaatagatgtaattaatgaggagttattaagactaagaaatgatttggtttgtgttaaaaataaaaaaatcaaggagattatcacaagagaaaatattgatgagatatttaaaatcacctataccaatgaaattggtgagatacgggaatttaatgagataaaaagcagtgaatattttaatttgcttaaataccttattcgcgatggctatattgacgaaacctacaacgactatatgacctatttttatgaaaatagcctgagtcgggttgataagatgtttttacgcagcattaccgatcaaaaaggcaaagagtttacgtatcaactcaataatcccaagttggttgttgctcgccttagagaagtggattttgaacaggaagaggcgcttaattttgatttattagcttacttgcttcaaacgccagttcatatgagtttaatcaaacgcttatttaaacagcttagagggaacaaaagcattgagtttattcgcgactactttgaggcggagagagctcagtctggctttattaatcgattaaatacgctgtggcctgagtttttttcttatgcccttaaagaaagtaagctttctgctgattgggttaaacgctactcgataggcacattttattattctgccagtaacgatattaagtctattaacattgatgattgtctgactgattacctctctgattcggcggattatttagaaataacagaaccgaaggttgataagttaattagtggcttcatgctgcttaacgtctcttttgtcagtattaattttgaaaacgctaataaaacgctctttgattcggtttatcagaattcactttatgatattaattttgccaacctgaccttaatgctgagtaaggtttatcagcttaatagtgaagatgatatacgtcataagaactatacgctagtgatgtcacagccggattcttccttggctagttatgttaataatcatattagtgactatctggacatggtattatctagttgtaatggttcaattacggatgatgaagttattgtcttatctgttctcaataatgaggagatatcggatgagcaaaaagatcagtatataaattctttgcaaactatcgtgacatctctgagtgaggttgagagcaaatccttatggtcatctttgttggataaagatagggcaatttgctctgagggaaatattgtctcttactttgaacatgttgatggactggatgactcacttatcgaatttatcaatagaactgatgccgagcttgattttaaaaaaattgacattgaagatgagcaaaaaagtaaattatttagatcgattattgtctgtaatgatttatcaaacaataaatatgatgaattaatttgctcgctaaatcggatttataatacctcctttggtattgctaatattgctggtgataaatttaaaatattagtgaataaaaacattattcgcatgagccttagttcacttggtttcatacgagataattatcctgaacaaaatccccattacattaagaaaaacatccaaacctacgttgagttaatgacagctgagagttttgtcttagatgaagctatatcgatactttcttgggaagttgatgatgatttgaaaattaaattgctcgaatttattaatgtgccgttggctatctatgataaaaaatatcctcatgtcgttaatgattatattttagaaaataattttaaaccagacgaattcttaagtttgacgtcatcttataaaacttggggaacctctactcagtcactcattctgagtcgagcaatacaggatatatcgacattgatagcaaaccctgatgatgttgatgagcttttactaaaagacctgtttgtcgctggggacctaaatatgcagaataagatagcattgctaatcgctttgttgccgggtaaggatttgagtaaggcgatctgcaaagagtatcttgatctgcttggtttatcggagttcagtaaaattttggggcgaggcaagcctaaaattgaggttgatgaaactaatcaaaggttattaacagcattaaaagataaccacttcttctctgattttggggtggatgatgaaaaccccccttattacaaaatagtaaggcggagttcgatgtttggctcaaatacatag

SEQ ID NO: 426742 - DNA, 825 bp, Serratia marcescens
atgcgtaattcacaacaccggttcaccaatgacggcaacgcgatgcctgccatcggattcggcgtctggcagtcgcgaggagatgaattgatcggcgccgttcaatgcgcgcttgatgcgggctatcgcctcgtcgatacggccgcaatctatggcaacgaatctgaagtgggcagcgcaataaaaactgcgggcgtgtgccgggaagatatattcatcaccaccaagctatggaacgaccggcatgacgacgttgagaacgccttcaacgaaagcctgaccaagctcggttgcgactatgtcgatctgtatttgattcactggccggtatccgggcaaaacctgttcgtttccgcctgggatgccatgataaaactccgcgacagcgggcgagtcaaaaatatcggggtaagcaacttttccatcgagcaaatacgccgcctggaggctgaaaccggcgtcctgcccgcagtcaatcaactgcaaatccacccttttaatcagcaacgagagttggttgattggctgcgcactcaggggatcatcacgcaggcctggagcccgcttggccacggcaaccaaaacatattaacccaccccgtcatcttgaaaattgccgaacagcagcataaaacccctgcccagatcgtattacgctggctgtatgaaaaccaaatcattgcgctgccgaaatccagtacgccgcaaagaatacgggaaaatattgatatctttgactttaacctgtccacatccgaactgtcggcgataaacgcactggatcgcggcctcaacgtcggcaacgatcccgacgccttcaggtag

SEQ ID NO: 426743 - DNA, 453 bp, Serratia marcescens
atgttttatttcagtgaccggttaatcacgcctatcatttacagtgagcgcagtatgaacgcattatattttgatctggaagaaaggaaaaaacactttcctgacaccgccgactctctgatcgtcgatatgtaccttgatgatacgccgcagggcagcgtccgcctgtttcgcgtttatgccgaggttcccgcacactaccaccaacaatgtgatgaaatcttgatcgtcgtggaaggcgcgctggagtttcaggccggcaacgatgtcaaaagagttttagccgaaaaccaaatggtgatatttaaacgaaacaccgttcacagcatcaatccttttaacggcaagcccgtatattttttatctatcgatacacctcgtcgggaagcctctgacgtgcactttattaatcctgctcacgaacatttaaaattcatcagccatattgggtaa

SEQ ID NO: 426744 - DNA, 912 bp, Serratia marcescens
atggccacgctcagccgcacagaactcgccgaacttaatgtgttctccatcatttgccgcaagaaaagtttccggttggcggccgtggagctcggcgtcagcacatcggctctcagccacgccatgcgttcgcttgaagagcgcctcggcgtaaagctgttgaacagaaccaaccgctcggtcgttcccacaccggcaggcgtggccctggtaaccgaactcgatcgcggattcgactacatcaaatccgccctctcgacattggaaccgtatcgcgatgaacccatcggccaccttcgcctgaacattccgcatgatgcgctcgatttgctcatcgcccccgtcatggaaagctacgcccaaacacatcccaaaatagcgctggaagtggccgtcaataaccatcaagtagacatcatcaaagaaggcttcgacgccggcatccggtatggcgagatcatccccaaagacatgattgccgttcctctgaccggcagtctgaaatgggtcgtcgtcgccgctccggcctatctggcaaaatatggcgcgccaggctcaccgtcggagttgaaagatcacagttgcatcaacatgcgattgggagatggcgcggtatatcaatgggaattgggcaacgatgaggcgttttgccggttgccggtgaatgggcaatatattttcagtgaaacctcaatgattatcaaagcggcgctcgccgggctggggttggcctactgtctggaaatgcaaatcgatgaacacttgcgcactggcgaattgcaatgcgtcatgccccattggtcgcatctcagcgccccctttatgatgtactaccccagccgccgccagctgcaaccaggattgcggcctttgattgagctgataaaagcgcggcatcgctcccctggttga

SEQ ID NO: 426745 - DNA, 414 bp, Serratia marcescens
atgcaccccctctcgatgcagttgcccggcttttacgtcgccggccagacaatcagaaccaccaatcaggacgaaacccggcccgaaacggctaaaatttctgcgctgtggtcagactttttcaccacctcgcccgccatgccggtctacggggtctactccaactacgcctccgacgccggcgggccgtttgacgtcaccgccggcagtgcggcagagagcggtttgtacatccaacccggccgctatctggtgttccaggcccggggcgcgatgccggcggcggtcatcgaaggctggcaagccatctgggcctacttcgagcaacacccggaaatcgaacgccgcttcctgactgacttcgaagcctataccggccccgacgcggtcgatatccatatcggctgccgctaa

SEQ ID NO: 426746 - DNA, 435 bp, Serratia marcescens
atgattatgctgagcaattcaaggttgtatgctttttcaccaggtgaacccctgacgttaccgctgtttgccgatcgcgtggcctgcggctttccttccccggcgcaggactatgtcgagagcaggctggatatcggcaagctgctggtgcggcaccccaacgccacctacttcgtgcgcgccagcggcgagtcgatgatcgacggcaatatccaggatggcgatctgctgatcgtcgacagcgccctgacgccggagcacggcaatatcgtgatcgccgcggtggacggcgaattcaccgtcaaaaagctgcagtgccaccccgacgtgcggctgttgccgatgaatcccgcctatgcgccgatcgtgttcgacgacgaggcgcagctggagatcttcggcgtggtgacctttatcgtctacgcggcgcggtaa

SEQ ID NO: 426747 - DNA, 267 bp, Serratia marcescens
atgaagatacaatttcagctgagtgatttatttatctccggcattgccctcttgatcatgagcaccattttaaacacgttgggcttttcatggggtttgtttgttctgccgcctggcgtcgataggtttgtcatcatcctgtttactttgttcgggtcattaaaactggccgagtatatctgcaaacccatacggtggctgctcaatgcaagccgcaagcctcaaatcaaaaacaacaaccctaaaaatagcgcgaagtcgcgttaa

SEQ ID NO: 426748 - DNA, 870 bp, Serratia marcescens
atgagccaatatctctctgaacacgaaccgcaaagcgagccagccgtcggttaccgccgtggccggcgcctgactacgctgacgctgggcacggcgctggtggcgattctgatcgtcaccgcgctgctggctccgtggctggcgcctttcgatcccaatctgcagcatatcgagctgcggttattgccgccttccgccgtacattggctgggcaccgacggttttggccgcgacttgctctcccgagtgatttacggcgcgcggccgacgctgattctggtgtcgctgattctggtgttgaccattcccatcggcctgctggtcggcattggcgccggttacctcggcggctgggtagagcgcattttgatgcgcctgaccgacatttttctgtcgctgccgagcctggtgatcgcgctggcgttcgtggcggtcatggggccggggctgatgaacggcgcgctagcactggcattgaccagctggccggcctttgcccgccaggcgcgggccgaaaccctggcgctgcgccgcagcgattacctggcggcggcgcgcatgcagggcatcaacgggctgcggctgatggtcggccacattttgcctttatgcctgccgagcgcggtggtgcgcgcagcgctcagcctgggcggcatcatcctgtccgccgccggtctggggttcctcggcatgggcgtcgcgccgccgaccgccgaatggggctcgatggtggccgaaggcagtaaagtgattttcgaccaatggtgggtcgccgccgcgccgggcggggcgatcctgttcgccagcctggcgtttaacctgctgggcgatggcctgcgcgacaaaatggatcctcgtcatgggcactga

SEQ ID NO: 426749 - DNA, 1512 bp, Serratia marcescens
atgaaagacgaaattcaggcaggactcatcaaaatcaaaaaacgactctggcgccgccgccgggcggcctggctggccgggccgctggtgtggctggccggcgcggcgcccgtgtgcgccgaatccccgccggcgccggacgccgttatttcttccgaacggcaagccgcggatccggccgagagtttgccggagctgggcggtgcgcccgacgatgccgcgcgcgagaagcagtgggccgagatggccaagcagtttggcgaaaaagatctgaataacgtttcccgtcagcagatgcgcagccgcgccgaggattacctgctcggccaggcggccgacacgctgcagcaacaggcgcaggagctgttgtcgccgctgggcaccgcccggctatcgctgaagatgaccggtgagggggactttaccggcagcaacgggcagttattcagcccgctgtacgacgtcgacggattgctgacctacagccagatcggctggctgcagcaaagcgccggggcgctcggcaattttgcgctggggcagcgctggatcgtcggcgactggctgctgggttacaacacggcgctcgacagcgatttcgcccggcagcgcaatcgcggcagcgtcggcgcggaagcctggggagactacctgcgtttctccaccaactattactacccgctgtcggcgctggcgcaacagcccggcgatggcgtgtttttcagccgtccggcgcgcggttacgacatcacgacgcaaggctatctgccgttttatcgccagatcggcggttcgctcagctatgagcagtatctgggcgataatgtcgatctgtttggcagcggcaaaaaacaaaacgatccgcgcgcgatgcagctggggctcaattacacgccggtgccgctggtgacgatgaaggcgctgcataagattggcgcgggcgggcagagccaggatcaggtcgaactggcgctgagctatcggctcggggtaccgctggcgaagcagatttcgccggagtatgtggcgcaggccaagtcgctgcgcggcagccgctatgatcccatcgaacgcaagaacgtgccggtgctggaattccgccagcgcaaaacgctgcaggtgttcctggccacgccgccgtggagcctgcaggcaggggaaaccgtgccgctggtgctggaaatcaaggcgttgaacggcatcgctcacgtcagttggcagggggatacgcaggcgctgagcctgacgccgccgcacaacgccaacgatccgcagggctggacggcgatcgtgccgccgtgggacgacgcgccgggcgccgccaacagctaccggctgtcggtcacgctggaggacgaaaagcagcagcgcgtgacctccaactggatagagctgaaagtggcgccgccgctgacggcgaccgccggtgatgatgcgagcctgctgccgatcaaaaccctgacgccgccgccgatcccggcgcaaaccgggccgctgtacggcggcgattaa

SEQ ID NO: 426750 - DNA, 651 bp, Serratia marcescens
atgacgacagaaaccgccgccacaatcttactgatagacgaccacccgatgctgcgcaacggcgtaaaacagctgattggcatggacgcccgcctgcaggtcatcgccgaagccagcaacggtgagcaaggcgtcacgctggcggagcagcacgacccggacctgatcctgctcgacctgaacatgcccggcatcaacgggctggaaacgctggatcgcctgcgccagaccgacctgtcggggcgcgtcgtggtgttcagcgtgtccaaccatgaagacgacgtcgtcagcgcgctcaaacgcggcgccgacggctatctgttgaaagacatggagccggaggatctgctgaaggcgctgcatcaggcggcggccgggcagatggtgctgagcgaaacgctgacgccgatcctcgccgccagcctgcgggaaaaccgccccagcgccgatcgcgatattcagcaattgacgccgcgcgagcgggatatcctgaagctgatcgcccaggggctgccgaacaagctgatcgcccgccgcctgaccatcaccgagagcaccgtcaaggtgcacgtcaaacacctgctgaaaaagatgaagctaaaatcccgcgtcgaggccgcggtgtgggtgctgcagggtaaaaacggttaa

SEQ ID NO: 426751 - DNA, 1785 bp, Serratia marcescens
atgaaacgcctgttggccccgctttcgatcgtgaatcaggtcgccctgctgatgttgctgtcgggcattctgggcgtggccggcatggggatttccgcctggatgtcgcaaagcattcagggcaatgcgcacgccatcaacaaggccggctcactgcgtatgcaaagctaccgtctgctggcgcaggtgccgctggatgaacggcatgaagcgttgattcgcgaactggagcgcgacgaaaacagccccgatctgcagcgttcggtggagcaggaagggttgacgcaacctttcgacgccttgcgcgactactggcaacagaccctgcaaccacgcctgcgcagcgcgcagcgcccggccgacgccgcgccgcaggtggcgcacttcgtgcagctgctggataagctggtgtcggatatcgacaggcaaaccgagcgccgcctgctgatggtgacgctggtgcaggccggcttcatcgcgctgaccctgctgctgctgatcggcaccacctgctacctgcgccgccggttgctgcatccgtggcgacagctggtggaaatggcgctggcggtgggccgcggcgattttagccgccgcttcgcgcagcgcggccatcaggatgaaatggcgtcgctcggcggcgcgttgaacaccatgtccgacgaactgtcggccacctacagcgggctggagcagcgcgtggccgagaagaccgcggacctgcagcaaaagaatcaggtgctgagcttcctttatcgcgccagccgtctgctgcacgccagcgagccgctgtgcagccgcctgacgccgctgctcaaccagctgcaaaccctgacgccgctgcgcgccattcaggtgcgactgtatgaaaacgacagccgggaaccgctgctgcagctgagcggcaaccagccgctgcggccggagcattgccataacccggtgtgcagcgcctgcctgaacgacagcgaccgccagcatcccgacaatccgtcgctgagctggagcctgagcgacaagctcggcgactacggcgtgatcgtggcacagcatgcgccgcaacagccgctgaacgatgagcaccgccagctgatcaacaccctggtggagcagctgaccagcgtgctggccatcgagcgtcaggtcgaccatcagcagcagctgatgctgatggaagaacgggcggcgatcgcccgcgagctgcacgactccatcgcccaatcgctttcctgcctgaaaatgcaaatcgcctgcctgcagatgcagggcgaaacgctctcgtcggccagccaggcgctggtgcagcagatgcgcgaagagctgaacggcgcctatcgccagctgcgcgagctgctgaccaccttccgcctgcaactgaccgaaccgggcctgctggcggcgctgcaatcgacagtggcggagttcaatcccaaactgggtctgaccatcagcctcgattaccaactggggccacgcacggtgccggcttaccaggccattcacctgctgcagatcgcccgcgaggcgctcagcaacatccttaagcatgccgccgccagcgaggtaagcattcaggtcatcaacaagcggggcgaagtgaccctgagcgtatgcgacaacggacgcggcctgccggccgagacgtctcgccccgaccattacggcttgatcatcatgcgcgatcgcgccaagagcctgcatggccgctgcaatattttaccgcgcagcggcggcggcaccgaggtgcgggtcagcttcacgccggataaccacgccatcgactaa

SEQ ID NO: 426752 - DNA, 720 bp, Serratia marcescens; identical to SEQ ID NO: 423641

SEQ ID NO: 426753 - DNA, 1056 bp, Serratia marcescens
atggcccggaatcgaaaccacgcgcggcgcgacctgccaccaaacctatacgcccgtaacggtggatattattgctatcgcgatccaagaaccggtaaagaatatggccttggccgcgtaaagcgtgatgcgataaaccaggctattgaggccaatctgcagttgatggattcagcggtaagactggttgatcggataaatggaaaatcatgtattacctttcatgcctggcttttgagatacgatgaaatcgtggctagccgtggcctgaaagcgaaaacccttgaagattatcgcaacagaattaaggccatagagcgaggctttgccgacatagagatcgacgcgatcaccacaaaggacattgccgatttcgtcaacgaatacgttaagcagggcaagaatatgcgtgctaaatcattgcgcgcatctctcgttgatattttcaaagaggcgatcgccgacgggcacattcaaacaaaccccgttgatgctacgcgcaaccctaaagcagaggttcagcgtgaacggcttactcttgacgattatctgcgaatccgcgccgccgcaaattcccaggctgaatgggtcgggttaagcatggatttggcattggttaccggccagcgtgtaagcgatatcagcagcctaaaatggtctgatattcatgatggtcgcgtttggatcacgcagcagaaaacgaacgcaaggctggccatccccgttgatctcgagctggtttccgccggattgaaacttgatgcagtgctatcccggtgcgaggtcgcgtttggtgaatgcgaaaccgttctggccagccacttacggagcgccctttctccaagcacgatctcgatggggtttaccagagcacgcaaagactccggcctttcatggactaggccgccctctttccatgagttgcggagcctttccgcaagactatactcgaaggaaaagaagggtgattttgcccagcgattactggggcacaagacggcggaaatgacggcaaaatatcaggatgatcggggaaataattgggttaatgtctaa

SEQ ID NO: 426754 - DNA, 267 bp, Serratia marcescens
atgtccaacaaattgaccctgggggagtggaataagcggctcccgcgtccgcgcagccatgaaaccgttcgccgctggatccgcgccgggaaaatctacccggccccggtactggatggccgggaatacctttttgatgaacgggcggtaaaaattgaccttaagacacaacgcccgccaatgaatacgctactgacgagaattaaaaatggcccggaatcgaaaccacgcgcggcgcgacctgccaccaaacctatacgcccgtaa

SEQ ID NO: 426755 - DNA, 201 bp, Serratia marcescens
atgcaaccatggcaaccaggcgcccgcctactctctgatttcgacatcaagatcggccggctgtctgccagcgtcagaaaagcgacgctgagcgatgacgatatcacccgggcgtgtcgtgtgaccgacgacgtaatcgcccaattgctgaaaccgaggaaagaccatgtccaacaaattgaccctgggggagtggaataa

SEQ ID NO: 426756 - DNA, 177 bp, Serratia marcescens
atgctgagaatgtacctggccaaaggcgatgcggtgcacgtgaccttccccgacggcaccaccggaatcattgaggccgagagccgcggtgagctggctttccatttcccgcagtctgtacgcctgacgcgcgagaaagaggcctttaaaaaaccgattacgccaaatcagaaataa

SEQ ID NO: 426757 - DNA, 501 bp, Serratia marcescens
atgagcattaacgccattgcattagcagctgattacgccaagtttcaggagctgatcgaaacctccgacgatctgacgccggagatgatcgccgacacgctggagggtatcgagggggcgctcggcgacaaactggacgctgcttttatccacgttcgtaatatcgaggggcaagcagacacgctggcggcggaaatcaaacgcctgaccgaccgaaaaaaatcattcgagaaccgctccaagtcgatccgtaaatatgtgctggcgtgcctgctggccagcggccagggctccattaaaaccacagcaaatacgttcacggcgcgcaaaggctctgccaacgtggtggtcgacaatgccgacctgctaccggatgaactggtgactgtgcaaacggtggtagcgccggacaagaaagccatcaaagaggcgatcgaaaacggcgtggaggtcaaaggcgcgcatatcgaaattggcgaaccaacgctgcaggtacggtaa

SEQ ID NO: 426758 - DNA, 2157 bp, Serratia marcescens
atgcctatctacatttcactttttgagcctaagaaaaaggctcaggttaacggcgccgtgccgctggtgatcgcgttggaagcgccaaacaagcgcgcggccgaaagcatcgccaccggcaaactgtatgaagcctacccggagggcggcgacaacttcttcaatccgaaaactgtcgaagaccaaaccggccaccctcgcccggctgtcggtcagtttgatgaaaagtttgccgctgagaacgtgttcgacggcaacgcgtggacgccaaaagagccagagccggaattgccggccgggcctatcgacctgatggcgcaacctgccaacgttcggatcgccgccgttgtgatgtacggtgatgctgagatcgataatagccagttatcgctggttgtggatttgctcaatgacgaggaaacgccagatgataccggcatgcgtgcggtgatcgacgggctagtatcggttcccgctgtcggtgccatgtaccccgcatccgtctataaattggtttcagcgctgttccaaaatactactgccatgccgaccgaagaagccaccaccgcattcgcgcaggactgggtcgacaagcctgacgatcgcgaaaacctcacgcagaacagcaccagcaccagcaccagcaccagcaccagcaccagcaccgacaatgccggcggcgcggccgactacaacaccctgagcatgcacacagcgttatcgatcatgggcgttaatcctgcagaggcaaaagcggccgacgtgaagaacgccaaagagattatcgccaaccgcgataacgcctggcgcgcgtgggacaaaacgctgcgtgtgatagtcggcattctcaacgtcgaaaccgacgtgcgccacggcatcatttccgacggcctgaaaaacctcaagctgatcagcgacgatgcagaacgcctgcacttcgtgaaatcgcgcctcgctggtcacactgcatgcccagagctggattcctacggcaaaaacccaccaccggtatcagtggaaaatctcggcggcggccgcttctctatcgaaggtctgatcggcagcggtgagcagcagcatgcggatccagacacggcgcaatctgccgcctcaaatcagggtgaaaaaacggaagtagcgcagcagcaagttaccgaagccgcggcggcgcaggccaagcagcaactggatcagatgggctatggcgtttacgccaacgcaccagcggagaaatccccgcagctgcagcaggcagaagaaaacgccgctctgccatcaccaccttttaaactagatgatttccagcagcgcgccgcgcaggttgagctggttatcgctgagcaatcggcagaggatggcgacaacctcggtatttggaaccgcgtttataagaccgacgccaagtttaccaaggcattcagcaataacggcggcgggacatcgataaacggcacctacatggtgatgcaggccaccaaagtattcgggccgcagggcattaactggggcgtagaaatcatcgaggagcgtttcgataacggcgctccaatcatgcgatcggtgaagcagcaggacgggagctttattcaagagatcattccgaacggcgccggcggttatctgtgtgaggtaaaccacaccgtgaaaatccgcctgtggtacaagcacagcggtaagactggcgaggtgatcgcttatggctgcacgccatacgtttacaagagcaaaaacgggccactcagcgacggtgaagcaccgaaaaagtctctcaccgacgccactaaaaaagccctgtcacaactcggcttctccgccgacgtgttcctcggcctgtacgacgatctgacctaccgccaagagaacgatgcagagttcgcgctcaagaacgccagcgagaaagccgagggtgtaacccgcatgcgcgaagaactggacgagcatctggcgaaagtcgccgagaccctcaagggtgcggttacagccaatgaggcgaccaaggttcacggttctgtcgcccgtgagattgaagcccatcgcaaggccgccgacggcaaaggcgataaagagtttgcccaatacctggccggccgcctgcgccgcctgaccgcactgaaagatgaacgcatcgccgcattgaccgaggagaaagcatcatga

SEQ ID NO: 426759 - DNA, 279 bp, Serratia marcescens
atggatatcgaaacccacaatctgggcgcagagctggcgctgtggcaacgccatgatgaaaccgggcagcgcgaccaattcgaagccgcagcgacgcacggttattccgacgaggcgatcgaggttttcacccacatcgacggcaccgccgcagacacccgcgaccgcctgctgatggccgtaatgatggcgacgccggacaccatacagcagcgccagcgtgagctttacagctggtattgcgacaacgtgaaagccgtatcgcgcaagaagttttaa

SEQ ID NO: 426760 - DNA, 315 bp, Serratia marcescens
atgaaagcactacagatacccgtcacgctgtttatccatgcaacaaccttcccactgaccgaaggattcgcggttgccaccgctgatatgacgtcattccgtggttatgttctgctggaaacccgccaaatccacatcgacgttaaccagcctgagccgatcgacatcatcgggaaacaggttgaggtgttgcagctggaaaaagcccgtctggccgacgccacttacaaacgcattgccgagatcgacgatcaggtgcagcagctgctttgcattgagcactgccctatcgaagccgacgaactgccgtactga

SEQ ID NO: 426761 - DNA, 453 bp, Serratia marcescens
gtggaaaacatcgaaaaactgaaaaacgagatcgtgagctgggcggcagagcaggggcaggaacacgttgctatcgagatcacccgtgcatggttccagctcggcgccgacggcgatcgggttcgcctgtatccaatcgaggatgaaaccggtgccgcccactggcgggcgatcaacaccaaccggcaggcgatatttcgccacatgcgcagcgagtcgaaggccgcgcgtgagaaggtgcaggagctggccgacgctatgctcgccgcgctgccggcagaacggcgcgcccggctggccggcccgactcagcagtatttgctttcggtggccatccgtgaatttgccgccgcgattatcgcaatcctgctaggtgcctgtgacacgccgcagcgcattgccggcgcacttgtcgcactgcaggaaacccagcgcctgaccagcgccgcgtaa

SEQ ID NO: 426762 - DNA, 219 bp, Serratia marcescens
atgcaagccaaccacatcacataccggaacggctggcgcctgaatggcatgcccgccgacgccgcagatatcagaccgatatttgaagatcgccaggctgccgcgcatgccgtctgggaacaatacgagcagggcaaggccgcgctgcgtgaagaaaacttatcgccggagcagtaccaggacgcgtgccgccagcttgcagactcgctggggatctga

SEQ ID NO: 426763 - DNA, 291 bp, Serratia marcescens
atggattatcaaaaaatcctcgaaacctatcatgccaagctgccggaaatgccatcggttcaaatcctgacagacgcacgcaagcgcacgctgcgcagcttctggaagaaatttaaattcacggaaacccgctgggagctgtacctgcagtttatcgccgataactgccggtggatgctggaagaccgaccgaacggccgcggtggccaatggcgccgcaaaaacttcgactacctgatcaccgagcgatgctatgtcgccgtgaaagagggccgcgccgatgatcgataa

SEQ ID NO: 426764 - DNA, 1416 bp, Serratia marcescens
atgatcgataacctgccggccgcaccgtacaacatcgacctggagcaggccattctcggcagcctgatgcacaacactgagcacgacagggcggcggctgtgttcggcctgctgaaaccggaatctttctacctggcggcgcaccggataattttcaccgagctgcgtgcgttggtgaacgccagccgaccgacagacctgatcacgttgagcgattcgctcgagagcaagggcgtacttgagcaggtaggcggattcgcgtacctggcagaaaccggcaggaataccagcgtcccggcgatggtcagctatgcgcatgccgtgcgagagaaagccgttctccgttacgctctggagaagctttacgcctgcgttgagctggtcggcgccaacaacggcatggacgcggcgaacaagctggccagcgtgcagcagatgattaccgccgtatccgaccatgcgaaaaccggcaaacgcggcggcctgcgcgtggcgggggaagtgatcggcgaatgggtggatgaaatggatcgccgcttccaagacccggacagcgccgccggcctgacgctggggatcgagagcctcgaccggctgatgtacccgaaacaggtgctgcgtggcgcgctggttgtggttggcgcccgcccgaagatgggcaaaaccgcgctgtacaacaaaatcagcgcgcactttgcgttgaaccaccgactaccgacgctcgtttttagcctggaaatgaccgaccgggggatcatcgagcgaatggtcgcacaggaagcccgcgtgaagtccgaaattttctatgtcggcgctcacgacgacaacgatatggcgcgcgccatggccaaagccgccgagctggctgagtcgaacctaatgatcgacagcacgccgggcgtgacgctggcgcacatcgtggcggagtgccgcaaagtgaagcgccagcgcggcacggtggggctggttgcgatcgactacctgaccctgatgaaagccgaggaagccgagcgccgagatattgcgtatggcgatatcaccactggtctgaaaaatctggccaaagaattggattgcccggtgctgctgctgacccagctgaaccgcaaacttgaagatcgcgccgacaagcgcccggtgccgagcgacagtaaggacaccggccagatcgagcaggattgcgacgtgtggatcggcctgtaccgcgacgccgtatacaccaaaggcgccgacccgcagctgatggaagtgattttgcgcctgaaccgcgagggcgctactggcaccgcgtatgcgctgctggaaaacggatatatccgagacataaccgacgaggaggccgcgcgccgggcgcaaaccgggcaaacgagagagcggcgttacgccgacaagaacgaagcgacaaagagtttttaa

SEQ ID NO: 426765 - DNA, 423 bp, Serratia marcescens
atgagcactatcaacgaaatgatccgcgataagcggtttgtgatggatgacggctgcgaccacgcgccggcgattctcgaccgcatcaaccaggcagcccgcgcccgttcccgcgcgccgtactgcccacctccgaaactccagcgcgtcgcccggccggcagctgagtctggcccgatcgtcaaaatcggtgaccgtatcagctacggacgccgggtgatgaccggtatctacgagctgcagcgcctgggacgctctcccgaaagcatcgcgctgatgctccgcatgcctctcgatcgggttttgcacatcctgaagcctataacggccgtacgccgcgagatacagaaaagcgtggcaagtgggttacctccacgtgaaaaagacgtcatgcgccgtctggcggctgaatcgagggcataa

SEQ ID NO: 426766 - DNA, 252 bp, Serratia marcescens
atggccgggcaatcggattatcttccagccggcctgccattcaatcgaggccagtggccgcaggaataccgcgatttagagcagtacgacctgcgcgccagcggcctgatccgtgacttgtacgcacggaagatcacccgcacaaaggtgctggtggcgattaaagaggcgccggagaaataccgggaacatttcagaacacgcctgaattactggcgcaaaagaagagtagggtgtgagataattacgtaa

SEQ ID NO: 426767 - DNA, 1500 bp, Serratia marcescens
atgcctattactaaccaaaaactccactcagcaacctttaaaaaattaaagaatcttactaacaccgaagaaattaattttgacaatacactaatgactgcaattatggggccaaatggctgcggtaagtcaactataattcatgcgttagcttgctctttcaaaccattggaacaacctggattaaacagagataactataaatttagcactcatttctttttatctacttcagactacaactggagtgggagtgcctttacgctaaaaatttcatatagaaatgaaagagccgttcacaatagggttggtgttgaatatgcaaaggtagaccgatggacaccaatttatgatcgacgtccagaaagacatgttgagtacataggaatatcttcctgtgcccctaggatagaaaacgaatcaagcattagcattgtgctatttgagagagaagaaacagatgtcgatttaaaaaactggatagtcgcaaaggctggttttgttttcaacaaagcgtacactgattactccaagagactcaaaacaagaaagcaatatataggtgttagatctggagatattgaatattcttctttggcaatgggtgcgggagagcaaagagtattcttcatgctagaaaaattatatttatctcctaaaggcacactctttttggttgatgaaattgatcttttgttacatactgatgctctcaaccgattattagacgtgatctatgaacgtgcattaagcaaagatatacaggtgattttcacaagccaccgcgagtccatattagattatcgcaaagatcgtttatctataattcatttatatcagtcgcaaaatagaaccctttattttgataggacaacgccggctgcaatccagagattaactgggcaagttcctagagatatatctgtttatgtcgaagatgatctttcaaaattcatcatagagaaaattgcaagtgagtttgggataagaagatatttgaaggttagtttgtatggctgcgcatctaattctttcactatcgcagcggccttaattatgcaaaataaaaacattgaaaacacattaatagtgctggatggggatgaatacccaaacattgaagaaaaacaaaggcagattaaatcaaagctaagtggaactgaagttgataatccacaaaaaagagaaagcgcgttgggtataatccgtcaatacaatctgcaagaaaatgaaaaacccgagcaaagaataagcaaattgatattatctctaaatgaaaatgaccatgagacctctgaaattcaaaatacagtaaggggtatagttaatcctagagatactcatgattttgttgatcaggcaatagagcaactaggatacggcagggagcctggtttaacaaaaattattgacaaagctgctattgcagatgattggcctgagtttacagcacaaataagagaatggatggaagatatagcgccacgatttagagagtaa

SEQ ID NO: 426768 - DNA, 597 bp, Serratia marcescens
atggcgcagtattcgtttgtaaaatccgcaggaaatttgttagtgccggcaaccccggacgcgatcgaattcctgaaaaccaaagtgaagatcggcgccgtcctgtatgccgatttcagccaggctcgcaacccggcatttcaccgaaagtatttctccctgctgaatctcggcttccagtattgggaaccgatcggcggcgccatatcgccgaccgacaaagagctggtcacaggttacgtgaaattcctcgcgtattacgccgggaacgaaagcacgttgcaggcagccgccgacgagtatctgcaggatgtggcagaaaagcgcgctgggaatatcagcgccgcaaaatcgttcgaggcattccgtgcctgggtaacgatccaatctggccactacaccgcataccagatgccggatggcagcgagcgcaaagaaccccgcagcgtatctttcgcgaaaatggacgatatcgagttcgcccagctctacaaagccacaatcgacgtgctctggaatttcatcctgttccgctcgttccccaatcagcaggctgcagaaaacgccgcctcccaactgctcagctacgcggcatag

SEQ ID NO: 426769 - DNA, 297 bp, Serratia marcescens
atgcctctcgtcgcaacattccgcaccgactggtttcgtgtgattaccgatatcaaccgcacccgtatggcaacgcagagcatcgccgaggaattgggcgtgtcgaaatctgccgttctcggctggaaatcgggatctgaaccgcgtcatggcgacggtgaggcgctgatcgctctctggtgccaggcgacgggctcagaccgtagcaacctgccgaccgtgctttaccggcaatggtggacgtttaagcgcccggtaattggtcgggaatccgaccgcaagcagggcagacaatga

SEQ ID NO: 426770 - DNA, 480 bp, Serratia marcescens
atggctcgaccacgtaaaaaccccgaggtgcctggacaggaaaaccaacagccgaaagaaaacgccactgacgcggtgctgttgaattctgttgtgcggcaacccgcaaacacgcctgaacagctgaacgacgccaccgctggcgccacggtgattaccgcaggtgatgataaatcggcgattgtgcagcagcgcgtcgcaaagctgctcgacggcgcagcactggaagagcgcaacgtgattctttccgggctaaacgagcagggcgccgccgttatcgctcgatttgaggcgctggagttccttgacgctgacgatcgcagcctgaccgacaaccttgaattcatcactctggtgaagaaggccaccgacgtggctaccggcggcgctggcccgatggtgacgaacgaagagggcaagaagcagccggcacctggaaaacctgttttaaccgaacacggctggcacgtaccaggctaa

SEQ ID NO: 426771 - DNA, 219 bp, Serratia marcescens
atgtgtggatcgacaccgaaagttgttcagagcgacccgcaggccgaggcagacgcggcagccgacgctgcggctaaagccacaaacgccgacgcggcaagccgtaagaagcgcaaaaagggctcgtcattgctggccagtggcgcacagggcgcggccgattccggcgactcgctgctcgcaagcggtgcgcagggcaaaccaacgctgggagcgtga

SEQ ID NO: 426772 - DNA, 1623 bp, Serratia marcescens
atggacgacaccgccgcaaggctgattaaacgcgtgaacacgctcaaagccacccggcagatgcatgaaagcgtctggcgggagtgctacgactacacgtacccgctgcgcggcgctggcttttcgtctgaggtgctggacgctcagagcgctaagcacaaggtggccaagctgttggacggcacggcgaccgatagttcgcgcatgctggcgtctgcgctcatgtccggcatgacgccggcaaacgcgcagtggctgaacctcgacagcgaatccctgcctgacgatgccaaggcgtggctttctacctgcgcaacgctggtgtgggaaaacatccacgcggccaacttcgacgccgagggctacgaggcaaatctcgatgtggtgtgcgctggctggtttgtgctgtacgtcgatgaagaccgggacgagggcggctattcattccagcaatggccactggcgcagtgctacgttgcatcgacccgcaaggatggcattgtcgatacgattttccgctgctaccagctgaccgccgagcaggcgatcgccgagtttggccaagatgctgtaagcgagaagatccgcgacgccgccaagaaaaagccagacgacaaatttgattttctgcacgcgatttttccgcgcacgaattacatggttaatgcgcgcctggctaaaaacctgcgcttcgcgtcgtacaacatcgatgtgaccgcaaaaaaagtggtgcgcgaatccggctatcacgaattcccgtgctgcgtgccgcgctggatgaaaatccctggcggttcgtacggcatcggcccggtttatgacgcgctgccggactgcaaggagctgaacgaaaccaaacgtatggagaaggccgcgcaagacctggcgatctccggcatgtggatcgccgaggatgacggcgtgcttaaccctcgcaccgtcaaggtggggccgcgccgcatcatcgtggccaacagcgttgacagcatgaaaccactgctgaccggctcagacttcaacgtcgcattcacagctgaggaacgtctgcaggcgtcaatccgcaagatcatgatggccgaccagctgcagccgcaggacggcccggccatgacggccaccgaggtgcatgtgcgcgtcgcactaatccgccaacttcttgggccggtatacggacgattccaggcggaatacctgcaaccgctggtagagcgctgtttcggtatcgcgttccgcgctggcgtgttccctgagccgccggagagcatgaacgccgccaacttcaacgtgcgttatatctcgccgctggcgcgagcgcagaagctagaggacgtcacggcgattgagcgttacgcccagaacgttatgcagctggtgcaggtttacccggacattatcgacaacatggacagcgacgaagcgagccgcgttgttggcgaggcgctcggcgtgccggccaaggttatgcgctcgtcggcggacgtgtccacgctgcgcgaccagcgcgccaaggtgcagcaacaacaacagcaacaggctctgctgatgcaggctggccagcaggctgcaggcgctgcgggacagagtgctggtgaagcaattggccaacaactggcggggggatga

SEQ ID NO: 426773 - DNA, 234 bp, Serratia marcescens
atgggcatcaagaaagtttcaccactggattacaagcggctgtttgaagagacggccggcggcgccgaggtgctggacgaattaacccggcgcttcggtggatcaatttttgtgaagggcggcccagagggcgaccgccaaacctgttttaaggccgggcaacgcgatgtgctcgatttcattttgcgccagcttaatctggcagacggagtaaacgacgatgtggaagcttaa

SEQ ID NO: 426774 - DNA, 825 bp, Serratia marcescens
atgtggaagcttaaacactttttcatgaatgcagctggcgaaggtggggaaggtggcggcactggtgacggcggcagcccaggcaccggcgatggcggcagcacttctttgctgagcaccggagcacagaatcaaccgggcggcgatgattgggtgcctgaaaaattccgcgtcatgggtgatgacgggaaactcaatatcgaaggatccgcgcgcaagctggccgagtcctacacgcacctggaaaaacagcgcggcaccagcgcggccccgaaaaccgtagatgagtatgctcctaccgttgaggttgagggcttcaagtgggacgagttcaaggccgaccctgagatgcagggattcctcaaggcggcgcacgccaagggcatcactaacgatcagatgggctttatcctcggcgagtacatgaaccgcgctccggcgctggtgggcggtgctgcagagctggatcaagaggcggcggctaccgagctacgcggcacgtggaaaaccgatgcggaattccagaaaaatatcgggctggcgcaccgcgcgtttatgtcgctggctgatccaaccgaccagggcaagatggacgagatcggcaacaacccgatggtaatccgcatgctggcgaaaatcggtgcggaaatgggtgaggatacccctgtaggcaatggccaaatcaatctcgaagatcagcagagcatccgcgacctgatgaagtccgaggcttacaccaacccgaaacatgctgactatgagcgcgttacagctcgggttcgtgatttttatcgaaaggtctatggcgataacaacgtggcgtaa

SEQ ID NO: 426775 - DNA, 882 bp, Serratia marcescens
gtgaatgaattagccgaagctgtaaagaaaacactagtggataggctcaataccccattgtttgggtttatcgccatatcttgggttatgtttaactgggataatattttatttgttatttttagcaagctaactatagagcaacgtataagtggcttacgagcaatggagtttttttattgtaagacggttattttacctgcggtaactggctttattttaagcattgcttttccctacctgcaagttcttatatctatttttcaaatggctgcccagaaaattaatgacaaaataactctaggtcgagagaggttagagtgtgaagcggtaatgcatctggcagctgtaagagccaaagctaataactctgttaaaatagcaacagctcatgaggataagttattggcgatggccgaggatgaggcttcgaaaattagatttaacactaacaatctggaagttaagtttaattctttaaatgacgatattgttaataaagaaaatgaactcggcaatcttaagtcatatatagagcaaaatgagcttgatattggtgttatggagaaaaaaatacaaaaactagaagagagacatggtgagttcgaacatgtgattaattacttcaatgaatataaagcagaggccaataagctagcctcaaccataattagccttaaagatactctgactaaggctggtgctataaagggagttgttgaggaaaatggaaggcgaaaatttccattgaagccttttgagtttaaaaatggggttaatgaggattacttgctcaatgaattaggtgtttcgctaggggttatatattcatcaataggcaagcttcagtcagttggtaaaaatactcgttttgatagttag

SEQ ID NO: 426776 - DNA, 912 bp, Serratia marcescens
atggcttttgatccgaacaagaacatgatcaccgccgcctttgtgcagcagttccatgattctttcgaaatcgcatcgcagcagaaggagtcgcgcctgcaggctgccgtacacgatcgcgggatgattaccggcgcgtcgttcaccatcaacgatatgggcaccatcgaaatgaacccaatcaccgagcgctttggcgatacggtttgggatctgcctgaagcgggtacccgtaacgcgctgatggcggattacggcgtgttcgtgccggtagaaaaacgcgacctgcgaaaactgatcgccgacccgcaggggccatatctgcagctgacgctggcggcggcaaaccgcaagaaagatgacgtgatttatcgcgcgttgctggataccgtcctgcgcaaaacctcgaacactggcgcctacgctcctgtggcgctgccggcgtctcagaagattgtggccggcggtaccggcatgaccaaggccaagctgatcgccgccaaggccatgttccgccgcaacgagtgtgacgaacagaacggcgaagagctgttcatcacgtacaacgccgacatgctgacgcagatcctgagcgacaccaccctgaccagcgccgactttatggcggtgaaaatgctgcaggaaggtgcggtgtccggcaactggttgggcttcaagtggttggcatacgaaaaactggactcggccagcgctggcgatcctgctgtcaccaccaagaccgccgccgcctggtgcaagtccgcggtgcatttcggtaccggtgcagagtacaacaccgatatcggcccgcgccgtgacaagaacaacaccattcagatttctgtcgatgcgtcctatggcgccggccgcgcagccgaaaacaaggttgtcgcgatcgacttcatcgcttaa

SEQ ID NO: 426777 - DNA, 570 bp, Serratia marcescens
atggctaacaacttcgcgatcagcatctgttcaaatgcactgcttgcccttggtgcgcacccaatcaatagttttgacgagaacaacgagcacgcccgcctttgctcaaatatttatcccaccgttcgtaacgacctgctgcgaaaacatccgtggaattgcgcagtaaagcgcgttgtgctctcaccgagcagcaccgcaccggcgttcggtttttcgtttcagttcccgttaccgggtgacctgctgcgcatcctttcggtgggtgaagcctgggacgatatcccgtatcgaatcgaggggaagaagctgctggctaaccagagcgtgatcaggctgcgctacatcttccgcaacgaggatgaatcaacctgggacgccgcgctggtgaatcttgccgaagccactatggcggcaaagcttgcctacgctgtcacggcctcagccagtctgcgcgatagcctgacgcaagaggctgcgtatttgctgcgccaagccaaagccattgatggccaggaagatccgccggaagagctgggcggctatcccacatacgaatcgaggttctga

SEQ ID NO: 426778 - DNA, 1989 bp, Serratia marcescens
gtgcgcgctaacctgataaaaaccaatttcacggcaggcgagatttcaccgcgcctgatgggccgcgttgatatttctcggtacgccaacggcgccaagcagatcgagaacgcggtttgcgtggtgcagggtggggttatgcgtcgccccggcacccgctatgcagcagcggccaaatatggcgaccgtaacgcacggttgatcccctacgttttcaaccgctctcaggcgtacgtgctggagtttggcgacggctacatgcggattttccaaaacggcgcgcagctggtgaacgacgataataccccgtatgaaatcgccagcccgtacagctccgccatgctgccggccgtgaattacgttcagggtgccgacaccatgtttttggtgcaccagggcgtgaaacctcaccgactgcagcggcgcgggcaacttgattgggtgctcgagccttgcccgtttattgttgagccgttcgacgaaatccgcgacacgccggaaaagtggtgcaagccgtcggtcaaagagttcgttggttcagaaatcacgctgacactgagcgacgacgagccgccagaggatggagacggcgatcttactggcaatggctgggtggcggaggatgttggctcatacgtccgcattaacagcgggctggtgctgattaaaagcgtgaccagcgcgcaaaaagccgtgggcgttatccgcacagacctcaccgccacacaggcagcgtcgccgggtgcatggacgcgcgaggatacggtatggacggacgaatttggctaccccggcgccgtgacgctgtaccaacagcgcctcgttctggccggatcgatacggtacccgcaaactatctggttcagcgaaaccagcgtttatttgtcgtttgagctgggtaccgacgacgacaaggcgatcagctttacgctgtcttccgaccagctcaatccgattgtgcacctggcgcagatgaacacgcttatcgctctgacgtacggcggcgagttcacgatcaccgccggcaacggtgcagcgatcaccccgacgaatatttcggtgaaaaaccctagcccatacggctgcaatgggatccgcccggtgcgcgtgggtaccgaaatcatgtttgtacagcgcgctggccgaaaactttacgccgtggcctatgacccggacagctttgtttcgtattcagccaacgatatgacggtgctggcggaacacatcaccgccggcggggtgaccgatatggcgtaccagcagcaacctgatgcctttatctggctggtgcgcaccgatggcgtgatggtgacgatggcaatcgaccgagcgcaggaggttatcgcctggtcacggcagatcaccgccggcggatttgagtccgtggcatctattccgtcagacagtaacgatgtggtctatgcgctggtgcgccgggagatcggcggccagcaggttcgttacgtcgaggtgttcgactccacgctgtataccgacgccgctgtaaccggcagcagcgaggccggtgcaacgacgtggtcagggttaaatcatctcgaggggcagaccgtcgatattgttgctgacggctcagtgatgcctgttcaggtggtttccagcggtcagattaccctgacaagaaaagtctaccgcgtggaaattggtctgcacttcgagtcaacgattcaaacgctcacgccagaggtgggtaccaccgagggcaccacgcagagcgccaagaagcgcaccagcgaggtgacaatgcgatttcttgaaaccacgggcgccgagtgcaacgggacgatcatcccgttccgcaccttcggccccgccattctcgataagccggcgcccttgttcaccggcgatcactactttggaaaattgggctgggagaaaggcgaggacacgttgcttatccagcagcgccagccgctgccgttccacctcctggccatcattaccactttcaccagcaacgggggctga

SEQ ID NO: 426779 - DNA, 450 bp, Serratia marcescens
atgatccgcaacgcaacagctggggatatcccggcactgattgaacttggcgcccgcatgtatctggaatcgcgctacgcggaaacctctccattcgacgagcagaagtgcgccgagctggcgcagcacctgatcgccgctcatggcgggtgcgtgctggttgccgagcgagatggccaggtgatcggctggctggccggcggcatcaccgagcaatggttttcgcgcaaactggcggcgttcgagtacgggctgtttatcgcgccggagcaccgcggcggatctgctggcccgcgcctggctaaaacctttatcgcgtgggctgctgaccatggcgccgccgttatcaatatgggcatcaccaccggcgtgcatgaagaacgcaccggggcgatgtatgaacgtcttggcctgtcgcgcactggcctgttgtattcaaaggagatttga

SEQ ID NO: 426780 - DNA, 528 bp, Serratia marcescens
atgtgcacaggtgtggaaatagccctggtcgcatcatcggtgctggctgccggcggcgctgctgcaagcggtatccagcagcagaaaatggcgaactaccaggcggatcaagcaaattccgacgccgaggccgcacgcgcgtcagcacgcgtacaggccgacagaatcagaaaggcagggcgtgagcaggccgcgcaggcaaacgcggcgctggcggcgtctggtgtcgaaactggcgagggtacggcactgcgtatcacgtccggcattactggcgacgcagagcaggacgcctacacgacgatcctgaacggcatgaacaccggcgcgcggtataacgcgcaagcgcaggctgaccgactcagcggccgcaatgcggcgacgtccggctatatcaacgcgggcagctcgctgctgtctgctgccggcgccggttattcgggctggaaaaaggccaatccaacaaccacgacgaataccggcaccgcggcgtcgaataacatgttctcgaatctgggggggcgctga

SEQ ID NO: 426781 - DNA, 2526 bp, Serratia marcescens
atgcggataccaaccggaaattttggcaatgtggtgccggaggcccagcgtacgcgcattgacgttgggaacgttggtgctcctgcaaatgcattgcagcacctggcgactgtcgggatcggtgttgccgaagatcagcagcgccgaattgcccaggaaaaccagagccagctgcaggcgctgacgttgcagcttgatgatttcagtaacgggctggttaacgatcctgaccatggcttactggcacaacagggaaccaatgcggaaggtgcgaccaaaaactacaccagccagtacgaggactttgcgaacaaacttgcagctgatttaccgcaggaaatgcgcgagcagttccagcagcaggcaattgcaaagcgcattcagctcgagcgcacaggattaacccatgaactgagccagcgccgccaggtggagcagggtaattttgagtcgaccatagcgaacagttccacgcgtgcccagagctattggggtgacaacgttaattatcagttagaggttggtagtgcgcagcagcagatcgctgagtatggtaaggctcacggttggacgccggaacaagtaactgaacaacaaaataattacgttaaatcaacagcatataaaacaatggaaaacttggttgcgtcggatgccgacacggccgctaggctgatgggcgagccttctgacgtgggcggcgcggtgcgctacagcggtggcggcgcttctgatccggtagggcttcgcaataataaccccggcaatctggttaaaactgccaatacctgggacggggaagtaaaaggcgatggtcgttttgcgtcgttcgccacaccggagcacgggctgcgcgcgctatgtaaaaatctgctggcctacaacaaacgcggttacaccacggttgagcaaattatcgggcggtgggcgccaccaaacgaaaacgacactgcagcctacacggcggcggtatccaaggcgctcggcgtgccggctgacaaacgtcttgatctgaccgatatcaacacgcttaccgcgctgtgcgccagcatcaccaaacacgaaaatggcagcaatccctattcgcaagagcagatcaccaccggcgctatggcggcgttgggtatgaccgccttgcctcagccagaaggtggaaatttgcgtgcggctggtgcagcaacagcggttactcagctcgacccggtacagctggcgcgactgcgtagcatggcgcaagggcagttaagccaacagcagcgtgaatatcgtgccgggctggaaagtgagctgaaagacttcaacgccgtagcctaccagggcaagagctatccacgcgagtttagcgagggcgagtttgtccgcgcttatggatatgacgccggacaaaaagagtacgccagctatctcgacacacgccaacttagccgcgacatctcggttgttcaacagctatccccgggcggtcagcaggcgctgcttaatgcgcgcgagccggtacccggcgaagggttcgccgaatcgtctaagcgatacgaaaccttgcaaaaagccgtggcgtacgtgaacaaggtacgtgaagcagatcccatcctttatgccgccggccagcagcaggttaacccgctggatatgcaatcccctgaggcgttcggcagcagcctgacaaaccgcgccagcgccaccccggagatcgcccggcactacggaacgccgttaaccgtattttcaaagacagaagcatcgcagattggcgagatgctgcgtacagcgccggcgtcgcagtcagttgcctacctggatgcgatgcgccaggggttagggacaggcgcgcagtattcagcagcgctgcagcaggttagcagttacgccccatccgctgctgttgcgggcgcgattatgggtaagagcggtaatgtgatcggtaagtccggatggatctcagactccatggtaaaccccgatgatgcggcaaaaacaatcatcgaaggggagaatgctcgggctgggatcaccaccaaagtgaatggggtggagaacaaaacgaaaggaatcgagataccgaaagattccgatctgcgcccggatttcgttgatgcagtcgggaatgcctttgccggagatgcggccggcgcgtcacaggcctatgaggtggcaaaggactactacgccgggctgatggccaagaaaggtgatgtttctggcgagtatgatcgtgacgcatggactcaggcaatcaacgtggccaccggtggcgtttacgattacaacgggcaaggagaggttttgctgccgtggggaatgtcagaggggcaatttgattctgcggttaacaccgcatggaaatctcagattgtcgatgctggcataaaagcgccacctggccagtatggtttgcagagctttggagacagccaatacctgataaagctgggggccggctacctactcggaaaggacggtaatccggtcgtgctccgcatcaacgctgagcgcgttcgcctaggaaatggggggataccgcagtga

SEQ ID NO: 426782 - DNA, 1470 bp, Serratia marcescens
gtgagttatttcggatttaaccaggcgcagcagaatagggaactggcgacggcagcagaaaacccaatcggctcagcccgctctgatgctgatttttttgatggcgcattcactgcccctttcaaggggctttacgccggggttacacaggccgaccaagttgcatgggcaggcgtagatgccgttgtgtcgccgatctcgcgggctgttaatgatgcgtttggggtgaacgacacctctgaaagtttcatcaagaatcagcgaaagttggctgaacaacaggtgcgggcgttaacgcctgatgccggaaccaccggtaccgccgggcaggtgcttttctctctggcggaggtgggtgggcaggcggcggctggcacgttgttgggtgggttgcctggcgctgcggcaacagttgggggcctgcagggcttttccgattacgagaagtctcgcgctgacggtgtggattatggcaccgctgtagaaaaagcgctggtaactggcgggacagcggcgattggcgctgttctccctatgtctctcggccttcgtgctggtggtgcagtagctgaaggtgttggcgccgctctaacttccggcggtacagctgcaggtgctgctgccggtgcagctgcgcgggtggtgcctgacctgctttattccgcaggtaccaacgtcgcgatgggcatggcacagcggggtttgtcagcggagatcctacgacgcggtggctatgaggatatggcccgccagtacgatgttttcgataaccaggcgttggcggtcgacgccgtgctcggcatagctttcggcgggcttggtcgatttatcaatagccggggtgaacgcgtggcagtgcgtagcgcagagccggcagagatcgacgcggcgctgacttcaagctctcacctcaattatgaggttactgcatcgcctggcgttcctgtcagcgtcctatcacgtactgcccatgcccgcgccatggataaagccatgacggatgcgcttgctggccacccggttgacgtcggttcattgatggatggcgccgagtttattcagcgccgtccgcgcgtcgatctggcgtcgcaagaggtacgtaaggcgatgggattacctgatgccataattcgcgatactgacgcggttcgtttcgacgatatggccggcgccaattacctcgccacaccgaaacccagaacgcgagagcagatccagcaagatgaaattgcgggcgctgagcgcgccattcgcggggatgattcccgcgcagcggaggccgacacactggaggcgcagcgcgccatttccgacaacccggatctgcaggttcacgtcgtaaacccagatgacagtacaacgatggtaagggcagccgatctgatggctgaggccgatcgcgatgtggccaatgcccaacatgatgcaaatttatttgatgtggccgtgagctgcttcctgaggagataa

SEQ ID NO: 426783 - DNA, 2475 bp, Serratia marcescens
atgagagacgagtgcattcaggcgatcacttctgcatcacagcgaccactcaccgccgcagaaataaaagggattgaagatcgcatcgtgaaaaatatgcgcaacctcgcgcgtaacgatccagcctcatggcgcaatcttagcgaagcggaacgcatgcagcgcgctgggcagatggcggccgaagaattgcagcgagaggcctcactgaaaaagcggcgtgtagccttaaccattgccgcgcgccagcgccttgataactacatcaacagctaccagggcaaggatggaaagctagaggcgctaaaccgcactatagcttttcatgcggacggcaaggctaattttctctccgttgagtcgagaaccaaggcgacccgcgattatgctctgagccagttggaggaacttttcgaagctatcgatccacgtttcttccagctgttcgaagacaatcaaggtgtgcgcgatctggtctacgagatgcgcgggcaggaaactggaaatcagcgggctaaaaaaggcgcccaagcgtggcgccgtgtcgcagaactgctgcgccagcgcttcaacgatgccggcggcgatgtgggattcctggaggattgggggctgccgcagcatcattccatggagaaggtgggtaaggcgtcacaggatgaatgggtgggctttgttgttgggaaactcgaccgcaataaatatgtgaaagaaaacggcgagatgatgaatgatgcggagcttgctgcgttcctgggcgacgcctacaaaacgatcgctactggaggtatgaacaagctgggcgacagtgggctgcggatctccggcgctcgggcaaatcgcgggagtgctgaaaggcagattcattttcgtgatgccgaaacctacctcgaataccagcagcgctttggcgaaaaatcgatgtgggacattttggtaaatcacattgatggcgtgagcaaggatatcgcgctggtggaaacctacgggcccaaccccgatcacgtattccggtctctgctggatcagctgaccagcgagacagcaaaggcaaacccgcagcggtcagggcgtattaatcgcctgcgtaacagtaccgagagcctttacaattttgttgctggaaaaacgcaacccatcgcgaacccacatatcgcgcgctggtcggataacgtccgaaactggcttgttgcaacgcggctcggttcggcgctgatctcttcactttctgataacggcactatgtaccttaccgccaaagtgaacaatctgcccatggcgcagctgttgcgtaaccagttggcagccatgaatccggcgaacaaagaagagctacggcttgcgcgcggcgccggcctatcgatggaaacgctgatcggcagcgtgaaccgctgggcgaccgacaacatgggcccatcggcgtcacgctggacggccaacgcggttatgcgcgccagcggcctgtctgcctggtcggatgcccataaacgcgcctatggcgtcaccatgatgggcggcgtgggtaacctggtgcgtcagcatggaagccttgggaaaattgctgctgatgatggccggatcctcaagagtaaagggattacagaacacgactggagcatttggcgcctggcagaacaagaggattgggggaacggtaatacaaccatgctcaccccggaaagcatcatgcgtattccgagtgaaaaactcgaggcatttggtaacccggagcgcgtgaagttcgaggcgatgcgcaagcttctcgccacggtttccgaagaggtagacatggcggtgatctcgcccggcgcgcgtgaccgaatgatcgctggcgctggtatgcaaagaggggagtggaaaggagaattggtgagaagctttttcttgttcaaatcattcccaatctcggtgatgatgcgccattggtcgcgcgcgatgggaatgccatcagccggcggccaggctgcatacctcgcgacgtttctggccagcacaacgatcttgggtgcaatgtctcagcaaatcagcgacatgatcgcaggtaaaaatccccgcgaagcttttggcgaaaaggcaccccaattttggtttaacgcgctgcttaaaggcggcgggctcgggctgtacggagattttctttttgcagaccatacgcggtacggctcaggagcattagcctcaatgctcgggcctgtcgctggattggttgatgatgcggtgaagttggtgcagggtgtcccgctcaacgccgtagagggtaaaccagaacaaactggcggcgatctggtgaaatttgcgaaggggcttatcccaggtcaaaacctgtggtacacaaaagctgttttagatcatatgatatttaaccagttgcaagaatatttctcccccggctatttacgcagaatggaaaaacgttcgcgcaaagaatttaatcaaacatactggtggcggccgcaagatagactgccgaaatag

SEQ ID NO: 426784 - DNA, 342 bp, Serratia marcescens
atgcacaacgattacaaaacccgccttaccgcgctgagcgacaagttaaccgacgtcgtgctcgaggaagccgatccggatacctggccgggcgccgacaaaccactcgacaaacacacgaagcaggagcgaggcgatcgctactggtgcaagaagaacgcggcggcgtcgctcacgcttttggtgaaggtacattcgctgatcggcatgcacacgcgcggcggaacaccgaaagacggcgacgagccggacgacgaggcgtttcgccttgggcagcaggtatccgctgctgagcgcacggcgcaggaagttctcgaccgtatccagcagcggaaaaaatga

SEQ ID NO: 426785 - DNA, 1611 bp, Serratia marcescens
atgatttcgttcgtcgcctttttcatcatgtgggcggagcggatggggtgggatgttcccgactgccattaccgcgcctgccattggctcgagcaccgcggcgatctggcggtgctacgctgtttccgtggcttcggtaaatccaccattctggcggtgtataacgcctggcgttattaccaggatcgccagtaccggatcctgcaccaatcagaggccgacggcacggcgtacaagaccagccgcgacacgcagaacgtgctgcgcaatcacccgctgacgcgcggcatgctgccggacgggcagggaaccgttgagcaatggtgggttaacggatctctggatatgcgtaatggcagcatgtacgcaaaaggcatcctgtcgaacgtcacatcggcccgcgctgacgagtgccaaaacgatgacgtcgaagtcccgcgaaacatacagacgccggaggcgcgcgagaaactgcgctaccggctcggcgaacaaactcacatccttgtgcccggcggccgcaagctgttcatcggtacgccgcacacccacgacagcctatacgatgaggtcgaagccatgggcgccgactgcctgacgatcaagcttttcgagaaagagcaccgtatagatgaaaaacaggcgacggcgcgcagctacgcgctgccattcaggccggaatacgtttttgtcggcatccacatcggcgcgcgtttgctagccgagggcgtcgactatcagctgacggctaccgggatcaccttcgctgagccgccgggaatgacggtggactgctacgccgaatgtgcatggccagaacggtttacgccggccgagatggagaagcgccggcaggaaacgcgcacggtaaacgaatgggatagccagtaccagttgcacagcaaaccgatcggcgaatcccgcctcgaccctgaacgcatccgcgagtacaacgtgcagccggaaatccggtacgcgaaccgcaccgcgtcgatgtggcttggcagccagcagattgtcggcgctgtcgcctggtgggacgtggccaccggcaaagcgaaatcggacgccagcgccttttcgctggtgctgaccgacgcacgcgggcacctgtactggcatgtgtgccaggaactgatcggcgatctggccgagttcgacgagcgcgacaaaatcaccggcggccaggtggtacagatccgcgaactggtgatccggtaccagataccgcaggtggtggtcgaggtaaacgggcccggcagtttcgccggcaagctgctccgccaggcgctgaaaggtaccggctgcggcgtccgtgaggagttcaccataaccaacaagcaaaaacgcatcctcgatgcgtttgaggcgcctctgtcgtcccgtttcctgtgggcgcatagcgacgtgctagacgggccggcctacgatcaaatgcgagatttcaacccggcggtaaccaaccagccggacgactttatcgattctggggcgggggctatcagcgagacgccggtgcgcatcggaaaattggtcgggaaaccgaccgctcaggggcgggaagattggcagccatcagatggcgatcacgaggtcgccgtggactactaa

SEQ ID NO: 426786 - DNA, 2577 bp, Serratia marcescens
atggcggttccaatccaaaccccttacaacatctacaccgccaacggcgtaactacgatattcccgtatgagtttttaattcttgatgcaggtgatttaacagtctccataaatggcgaacccgttacttcgggctttagcattaccggcgttggcacaacgaacggcggcgatgtgattttcctgacgccgccagctgctggcgtaaccgtgatgaatcttcgcgaaatcccggctacgcgtctgcaaaactatcagaacaacggtgatctgcttgcagccaccgtcaacaacgattttgatcggctgtggttggcaatccagcaatcatacctgtatctcggtttgtgcctgcagcgccctctgctcggcggcccattcaacgcccacggctaccgaatcgaaaatttagcagatcctataaatcagcaagacgctgcgacaaaaaattatgtgctggtaaaaattgctgagtcagacgccgccggggcggatgccttggcgcgtgaacgcgccgagcgtatcgcttctgatatcgacatccgtactgaaaccggtgtcgctttagggaaaactgtcaggttcccgtacgcgcagccaatcttgacgggagatacggcaaacaaggttttcgttactgactcgcaggggtgggtaaagctggtcgatcttgacgacgcgacgcgcaccgacttggccgccgatcttgcttcacgcggcaatccaggtggcgccggtatgatagggcacaagggcacaacgcttgccgagatcctcaatctgatttcgtcggttaccgttgagcctatcactgacgcggggatgtactgcgcctggccacaaggtaaagtcttcagccataaaaacagggcgtattgcttatacaacgtcggtgacacccacagcaacgcctcgttgagcgtataccagcaaatttctgaggatggcacagcctggtcgcggccggcgccgaggctctcaaactctgacgcaacaacttggccgcaaggtgtatcggcatggggtgcaggatctgacggcgtaaatatttggatggctgctcgcttccgtcgcgtttcagacgaatcacaaagcaagtgtgttctctacaaaagcaccaatgatggctcggcctatacggcggtacttgatcctgtcccactgtatgactccaccggtaaagcacctgtactcatgcattcatttgctgtgcttcccaacggcaacattgctttcgggtatcacttctacgacggcgaagtagggatcgttcagttcaacccaaataacctagccgaaatgacgaagtccgtcattttcaccgctgccgaaatgaacaacacgccaatgctcgttgaaccaaccttccaggtctatggctcgcgcgtggttgggtttcttcgtacccaaagcaatgcaacgcgctcggcagtcatgtggtacagcgatgacagttgccagacgtttcagatacgtgagatcgacggcgtgccaaaccaatcgccggtgtcgatcacgtcatataacggcaggtcctatgttttctactgcggtagatatcgggacggcaatacaaacagcgcgcgaacaaacagcccggtgttaaccatgcgcgttggaaacgatgatgacgcactaaatctgctctgggaaaacttcgtcgaaattcccatcgcagcagtgccaagcatttacaacgatgttggtgcatcagccacaggtgttcaggatgtttgcgtgcgcggcaccaagctagttgtgtgcctctctatgaacgttggcagcaacgttgaccagtctgacgtttgttctgtgaccatcgatcttggtgagcctcgacagaacaaattcttcctcagcgaaggggagtttaaaaagcctcgcgcaactgactacccatctaactatcgcttcggcagcgtaaatattgtcggcctgggcaatacctccgcgacactgcgaatgaatggacaggtcattgttcaagatctaacggatgcagtgagatttggctcgactgttgccggcggcagtaaatcacatgtgtggaataacggccctgcgccagcctacatcgatgttgcggcaagcagcactaacgtgagcatttcagcctactcgggatatgcgcggttgcgagctggccgcagcccggagggttatgcctctattcaactcgaccgagatacgaaagcggtcacaatcagcaacccaaataacgtcggcggtttcggcttaacaccagaaggctatatcgcactttcatgcaactggcagcacccgatggttctcgacggcggatccggcggaaaaatttacctctgggtctccggcacaaacaacatcatgaagcacagcatgacgccgcctacgtctgataacgatggcgaatttttggtgccgaacaaaacaaccactgttgcagggttggggactggtacggataccgcgcgctatgcatacgcaacgaacgggcgtaaggctggcgaggcaggtggtgcggggacaggcgtaccagtttattgggacggttcagtttggcgcgtgtattacgacaactcgatcgtagcggcttaa

SEQ ID NO: 426787 - DNA, 234 bp, Serratia marcescens
atgaaaatggataagttaacgacaggtctttcttacggcgcctctggtggtggcgccgcattctggtttactcggctgctggatggctattcacctgagcagtgggcagcaataggcgttcttggcggtctgtttttcgcctttctcacctggctgatgaacctttatttcaagattcgcgaggatcgccgccgcgaaagaatggggagaattgccgatgagcaagctgaataa

SEQ ID NO: 426788 - DNA, 516 bp, Serratia marcescens
atgagcaagctgaataagactggcgccgccggcgcaatctgttctgtcgctgtgattattggcctagtgctatcgaacggcgaggtaaaaaccagccgcgccggcctggaattgatcggcaatgctgagggttgccgccgcgacccgtacaaatgccccgctgatgtgtggacggatggcatcggcaacacgcacggcgttaaacaaggcgtgcgcaagacagatcagcagatcgccgccgactggcaaaagaacatcctggcggctgagcggtgtgttacaagctatgccgccggcgacaagctgcagcagggtgccttcgacgcggcggtgagcatcacgtttaatgccggttgcgcgacgatgcagaaatcgacgatgttcaggctgttccgtcagggtgaaactgtggccgcctgcgagcagttcccgcgctgggtatatgccggcggcgtaaagctaaacggcctggtgatccgccgtgacaaggagcgcgcgctatgtctggcaaaataa

SEQ ID NO: 426789 - DNA, 375 bp, Serratia marcescens
atgtctggcaaaataacatctgcggtggtgatcctgctggcgctggcggctgttgtcggcgctggcgcctggctggcagggcgacactaccagcctactattgaccgtctcaaccaggcgctgacgcaatgtcgcgataccggcaggcagcaggcggcgatgattgataaccagaacgccggcattgaggcgctgcggcgcgccgatgctgaacgagaagccaaggcaaaggcagcgcaggaaaaagcccgcagtgaggcgcagggagattatgagagagcaaacgaggttatggcagagcgaaccacaggcgatgtgtgcacggcggcgtctgctgcgtttgacgcagagctgcgccgggagcgtgccaaatga

SEQ ID NO: 426790 - DNA, 258 bp, Serratia marcescens
atgaaaaagctgatcgtggtttctgttctggcactggccagctgctcaagcactccgccagcgccgtcatatgtcgaggttaaagttccgatctcggtgccgtgcaaaactgcagacgttgcgcgcccggcgttcgctgttgaccagttgccgattggtgcacctatcgacatgcagatgcgggcattgcgcgctgaacgccatcagcgcatcggctatgagcttgagctgctggcggcgaacgaagcctgcaaataa

SEQ ID NO: 426791 - DNA, 396 bp, Serratia marcescens
atgggaatgccaaaatttgccagcccggcagcagactacgttgagcgccgcttgagcctcgatgagatctgcatttcaaaaccaagtgccacttatctgctacgcgccgccggccaggcgctggcggtcggtattcatgctgacgcgttgctcgttgtcgattcgtcggcgacgccggtgcacggcagcattatcgtagccgccgaggagggggcccacgtgctgcgccggcttcgcctttacccgaaccgagcgctcgaatttctggacggctcgggccgggaaactgaactcggcaacgaggattcggaagaagggatcgaggtgttcggcgtggtgatgtactgcgtgaacgatatgcggtcgtgcgagtgggatgatctgcctgtcatatga

SEQ ID NO: 426792 - DNA, 765 bp, Serratia marcescens
atggaaaaagaaccagtgaagatttcaaaactcaaaacgctagcaattatcgcttccgcaatggtttgtgcgcaaagtgctcaggcgggaacctggtcactcggcgccggcgcgctggttagcccggacgcgtatcgcggttatcaggatcgcgtatatccggtgcccgtcatcgactatgaaggtgacgacttctacttccgtactctgaccgccggttactacctgtggaaagatcaagaaaaccagctgagcatcatgggttactacacgccatggggctaccgccctggcgacagcgatgacgatcgcatgaagcgtctcgacaaacgccgcggcacgctgatggccggcctggcttattcgcaccacgcggagtggggcaccctccgcaccaccttcaccggcgacacgttgaactacagcaacgggctggtgggcgacgtggcttatctgtacaagtttgatctggacgcgctgacgctggtcccgggcgtaggcgtgatgtggaacagcaaaaaccagaacaaatattactacggcgttagcgccaatgaatcgcgccgcagcggactggacagctacaccccaggcgatagctgggcgccgtaccttgagctgagcgccaattaccagatcaacaaaagctggaacgccttcttcctcggccgctatgtgaagttgtcagatgaagtgaaagacagcccgatggtggataaatcctacaccggtttgttgatgacgggtgtgagctacaccttctaa

SEQ ID NO: 426793 - DNA, 10902 bp, Serratia marcescens
atgaacaaacattgctatcgccttatcttcagccgcacccacggggagttgcgggtggtgtccgaactggcccgcagctgcagcagcgagccggggcagcgcatcggttcaggaataacgggtggaagtcgtctgtgggtcaccgtgcgtcggtcagtgtggctgcttgggctgttgatgttcgccggccccgtcatggcagacggcattgtcgcggacggcggtgccaatccttcccagcggccggaggtcatcactacccagaatggcttgccgcaggtcaacatcaccgcccccaaccaggctggggtttcacataatcagtatcagcagttcgacgtcgacgccaaaggcgccatcctcaacaactcggcggtgatgaccgcgacccagatggccgggatgatccagggtaaccctaatctcaatcccaattccgcgccggctcgcgtcatcctcaacgaagtcaacagcaacaatcccagccagctgcgcggttttatggaagtggccggtggcaaggcgcaggtgattgtggccaaccccgccggcattgtctgcaacggctgcggcaccatcaacgctgggcgcatgacgctgaccaccggcaaaccgcaactgaacgccgatggcagcgtggcgggctaccaggtcgagcgcggcgtggtgcgcatcgagggcggtgggctcaacggcgatacccgtcatgataccgagtacgtcgacattctggcgcgcgcggtggaggtcaacgccggcgtctgggctaaagaaggtgtgacgctggtggccggtcgtaaccgcgtgagcgcggacggtaaaaccgccgcgccgctttcggacgacggcagtgccaggcctgagcttgccatcgacatggggcagatgggcggcatgtacagcggcagtatccgcatgatcggcaccgaagccggcgtcggcgtgcgtaaccagggcggacaggtccgggcgggcaaaacgctcaccgtgagcagcgaaggcaagctcagttggcgctctgatgcgccggatgcggccacccatgccggcggcgatattcagctggcggcaaaaggcgatatcgagacgcacgggaaagtgtatagcggtggccaattggccgtgcagagtcgcgagggaatgttgacgcagtccggtacgctggcggcggccgggaatgtgcacctgaacgccgcgcgcggcatccaaagcagcggccacctgctggcgggcagtaatgtcgaaagcgcactggtccatgatgccaatctgcagcttgatagccagggcgatatccgcgccagtggcagtctgctcggtaaaaagaacgttaacgcgtccgggcgccgggtggatatcagcggcgcgcaggttgcggctggccgcaccgcgctggcggcccgcgagggcggcgtggccttgcgccagtccaccgtagacagcggtgagctggccgtgagcacgaagggaaatgtggatgcgcagcaggccagggtcaaggccgggcgctgggcggtcgatgctgacagcctgttcaaccaacaggctacctggtctcagaccggtgacggtgagagccgtttcaccctggcaggcgcgctggataacagtgacggcaccatcgagacgcagagcctccggctttcggccggtcagttagtcaatcagcgcggccgcctggtggcgttgggggaaacggcgcagcactggcgagtgggtggcctgctcgacaatggcggtggcacgatgggcagcaacggagctcttcgcctcgacgccggccgcctcgataaccagcgcggtacgataaaaacccaggcggggttcacgctccatgctgatggcgcggtgaataatgccgggggcaatctgctggcggggaacggcctggcgcttgaggcaggtagcgctctgaataaccagtccggcaccctgagcggcgatgacgtgcgtctggcggtacaacggctggataacgcgcaggggcaggtcattggccagggaaatctcgaaatgacggccggccgcctggataaccaacgcggcctgatgggcgccggcaaggcgctgaatgtgcacgccggcgactgggacaatcgtggcggcacggcgcaaggcgaaacggccgtcacggcaacggcgagcaatctcaacaacgacggcggtaagctgctttcaggtcatgcatcaaccctgcagacctcgggcaacgccaccaaccgcggcggcgaaatcagtgccacggtgctgacggtgcagtctgaccgtctcgacaacacgcagggcaaggtgattggccgacaacggcttaacctgcatgcccgtcaggggctggacaacacgcaggggctgctgggcgccggtgagatgctgacggtgagcagtgagggcgagctgagcaatcatcacggtagggtgcaggggaatgggcaaaccacggtgtcagcgcgagacatccacaacgaggccggcaagctgctgggcgggcaaaggctctctctcactgcgtcgggcgtgcttggcaaccgcgagggggaaatcagcggcgagtcgctcacgctaacggcgcagcgcctcgataacgctcagggcaaggtgatcgccaggcaggatgcgaacctgacggcgaagcaagggttgagcaacgccgccggctggcttgaaggcggcagcacactcgccgtcagcaccgatggcgactgggacaatcagggcggtaccgcacaaggtggccggcaggtcaccgccagcgcgcagtcgctcgacaataccggcgggcggctgcagtccggcggaggcctgacgctggatgctacaggcaatatcctcaatcgttccggcaaactgaccgcgcagcaggcccttgccgttaacggcggagcagccagcctgttcgataatgacggcggctccctgcagagcggcggcgatctgtctctgcagggaggccagttgaccaaccgcgccgcaggggtggtgctgggcggccaggcgctttctctgaatctggcggggggctgggataaccaaaacggcaccttgaccggcaatggccgcacgcaggtgcgcgccgccagtctgctcaatgctcagggcgccatcaacgcgctggatagcctgaacatgcagttcaccggcaaactggataaccgccaggggcgagttttcagtcaatcgtctcaggtgttgcaggcacaggatatcgtcaacacgcagggctggatgggcagtcagggcggctggcaggcgatcagcggcggttttgacaatacggaaggcagtgtgcagagcttgcagggagcacaacttgcggcgaactggttgggcaacgctaaaggtgtgctgcagtcggcacacgacttggcgctgcgcatcaagcaggatatcgataatcgcaacggcaaggtttcggcgcaggggcagcttgctgttacgggtaccaaagacggcgaacacgccggcggcatcaataacgctggcggtcagtggctggccggcgaggggctgactatcgccgcccgcgcactcgacaatgcgcagggcgggctgctctacagccagaaacaacaacgccttgcgctgagtgatgcgctgaataaccgcgatgggaaagtgcaaagtggcgaggcgcttcaacttgacgcacaaacgctgaacaatgccggtgggacgatagacggccagcaacgcgtggcgctgcgcattcttggtttgctggaaaataccggcggtgcagtgcgcagcaatggcgggcaagaggtgtcggccgccggtatcaataatacacgcggcgtattcagcagccgcggcggcatcacggtggcatcaaagcaactggacaataccggtggtacgctcatcagtcagggggcgggcacctaccgactcgaccggcttaacaatcagcatggcaaggtgcacagcggcgacgcgctcacgcttgagggggcgcaggtcaacaaccggggtgggcaattggtgtcaacccacgggctggcgctcaaggccgggacgctcgataacagcggtcagggcacgctcagcagccaggcggaactggatgtgcaggccgagcgcctgaacaatcgcgatggcgggttgatactgggcaccacgcgcaccgatatcacctctcgtgatatcgacaataccgcaggccgcctgcagagtagcggccagatgaccctctcgggggtaacgcagctggacaaccgccaggggcggatcctggccaacggcaacctcaatatcaatactgaccggtcacggaccgactcgccgctggcgctgctcaaccagggcgggcgcgtggagagcgccgggcaacttaccttgcatgcgcgtaccttggataatcagaacggtaccctgctggggctgcaggcgctgacgctgtccgcgcagcaggactacacccatcaggccggcgaaacgatcagcagtaacggtacggtgacgttctccctgagcggcgcctttaccaacctggcggattggttgctgcccggcaagctggcgctcaatgcggccagcatcaccaatccggcggcgctggtgggcaaaacgctgcagctgacgaccggagccttgcaaaacaccgggcgccttgaggcagacagcatgacgctgaacgtcgataccctggacaacgccgcggcgctgatgggcgacgacatcaccgtgaacgggcgcattatcgacaaccacggtgcgcctgcggtgatggcggcgacccacagcctgacggtgcaggccggtgagcggctgaccaaccgggagggcgcgctgatttacagcgccgaccgtctgcacctgcacagcgatgacctgattgaaaaccgggccagctttatcgaagcggacggtgacgccacagtggaagcgcgtcgcctgaacaacctgcgcgaagggctggtgattgagcgtaacgccgagaagagcgactacaaatggcaccgctacaactactactggcgctcctacggttcaaaggtcaatcccgataaaagcaccctggcgccgaccacccaacagctgaccttccaggatgatgcggcggcgcaaaccaaccgctacggcacactgctggccattgatgcggcgggcaagcgcgcacaggtgcgggtcaaggacaataagggccaactgaccgacctgtgggtcaactacctggcgctcaagccgaatgccgatggcagctatgcgatgacgttctatgaaacgcgtgggggcaatcagctggcgagcatcccgacgccttatcaaaacggcttccattgggagcacgactggacgcaggtgatgacctgggatcccgaaaagcatgtcgatatcgacagcgcgccgttcatcaccgattacaacaacttccgcgaacgtaccgagagcggcacggtgacgcgcgacaagctggtgagtgaggggatcggcgcgcgtattctggcgggcggcaacatggtgctgcgcatcacgggagcgttgctcaatgacgccagcgtcattaccgccaacggcaatctgacgcaggacggcggcggcagcgtggacaaccgcggttactcggttaatgagcggcgccaggcggctatcgttgaccattatgacaaggacacgcatcactggtaccccacgttcaaccgggacgaaaccacggcgctggcgaccgttgacggggtgatcaccggcaatggcacggtcaccatcaacggagcccgcatcaccaacaccacggtcaatcaggcgcaaatcagtcaacttgatgcggcgttaaaggcggtggatgccgaacgcgccgagcttgagcgcaatccgctggccttcacggtagagggcgctgcccgacctgacggcgatacgacgctggcgccgggcgagcaaatgacaagaccgggcgccacgccgtcctcgccgctggggcgtccactgctgccgtctgagctggcgctgacgcagttacagcacctgggcaatgtggccaccgccatccccaataacggcttgtttagtcagcatacggcgaccggcagcccgttcctggtggtgaccgatgaacgctttacccgccgcgacaactttatcagcagcgactatatgctagaacgcgtagggtatgaccccgcgcaggcccataagcgcctgggcgacggcttttacgagcagcgtctggtgcgcgagcaggtgctggcgctgaccggcaaaccgtccgtcaagggctgggatgcgatggagcagtatcagcaactgatgaacaacggcagtaaagtcgcccaggacttccatctggtgccgggcgtggccctgacgccggagcaaattgcagcgttgcaacaggatatcgtctggctggtgagcgagacggtgcaaacggaaggcggcccgcaaacggtgtgggtgccgaaggtgtatctggcacagactacgctgcgcctgaccggcgatggcgcgctaattggcggcggcgacctgcaactctcggcaaacagcatcaccaatgccggcaacctgtttgccgaaaaagccctgacggttgacgccgggcagttcctgcatcagggcggcgacgtcagggcaggcagcattgacgtgcaggcagacagtctggccatgagcactaacctgcaggacgcgctgcgccaggcgaccatgagcgccggcgacattcgcctgcgcggcaccgatatcacgctcaccggagcgaaactggatgcgaccgatacgctcagcctgagcgcgcgtaacgatctgaccatcaccgccgcgaaaagcagccataccgccgatcttgaggttatctccggttcaatgggtaaccgcacccgcggcggcacggaagcggcaggctcccggatggcgcacgtcagcggcgaatggcagcaggctctggggagtcagcttaacgctggcggcaacctctcgctcaatgccgggcgagacgtcacgttcacgggcagccaggccagcgccgccggcagcacccgcgtgcaggccggcggcgatatcaacatcagggccgaaagcaccaccaataccacgcacctggacgccaacagccgtacttcatcagtcagcaacgaccgccaggaagagcgcctgacagtaagcgcactcggcggagaccagggcgtcaccctggtggtgggcaaccgcctgttggccgaaggcgcgcagattgacagtaaagaggggcgtattggcgtcagcgcgcgggacgtgaccattaaagacgcgcgcagccgcacgcaagatctggacagcgaaaacaagcgcgaaggcaaaaccaagagccatcgcgaagagcaaaccgagcgcgaaatcagcaccggcagcaccttcagcgggcgcgagggtgtgaccgtgatcgggcgtgaaggcgacgtcacggttaccggcagcaccctgcacagcgaccagggcgccatcgccctgcaggcgaagcaggatgtgaccctcaataccgccactgaacgcgagtcggccctcagtgaagagcggtcacagaaaaaaggtttcctgaaaaaaagcagcagccacagcgtggcgcatgacgccaccacacgcgagaaaggcagcctgctcagcggcaacagcgtcagcgtcagcgccggcaacgatctgacggtcaccggctcggccattgccgccgaccaggacgtgaacctgcaggcaggccgtaacgtcgacatcggcgcggccaccgagagcgacacgcattaccggctggaagagaagaaaaaaagcggcctgctgggcagcggcggcatcggcttcaccattggcaaacagtcgagcaaacacgaaatcgacgagaaaggccggacccaaagccaaagcgtcagcaccgtcggcagcagccagggcagcgtcaacatcacggcgggcaaccaactgcacatcggcggcgccgacctggtggcgggcaaagatctggctcttaccggcgacagcgtgactatcgatcccggcgttgatgcgcgcacgcgtaaagagacttacgagcagaagcagagcggcctaagcgttgcgctgtcgggcaccgtgggcggcgcgctcaacaccgccgtcagctcggcgcagcaggcgcgaaaagaaggcgatgggcgcctgaacgcgctgcaaaacaccaaggcggcactgtccggcgtgcaggctgcacaggcctgggagcgggataatgcgctgaccgcctcggcggaggcgaaaaacgccgctgccggcttgcagccgggagacgaaggtgcggcgcagggcgccaccaatacggtgggtatcagcgcctcctacggcagccagtcgtcgaagagcgaaacccgcaccgacagccaccagtcgcagggcagcacgctcaccgccgggcaaaacctgtcgataacggcgagcggcaagaaccacaacgcgcaaagtggcgatatcgtcgtcaccggcagccaactgaaagcgggcaaagacctgtcgctcgatgcggcgcgggacattaccctgcagtcggcgcagaacagcgaaagcaccgtcggcaagaacagcagcaaaggcggcaacgtcggtgtcggcatcggcgcaggctcgggcgggtacggcatcagcgtctcggccggcgtcaatgccggcaaggggcatgagaacggcaacggcctgacgcatgccgaaaccaccctggatgcgggcagtaatctcaaggtgaccagcggccgcgacacccggctgaccggcgcgcaggccagcggagaaaaggttaccgtcgacgtgggccgtgacctgacgctggaaagccagcaggacagcgaccgctatgatgccaggcagacccagatgagcggcgggatcagcgtgccgatcggcgccggcagcggctcggcgaattttagcgccagcaaggacaaactgcacagcaacttcgactcggtaaaagagcagaccgggctgtttgccggcaagggcgggtatgacgtcaaggtcaaagaacacacccagctcgacggcgctgtgattgcaagccaagctgacaaggagaaaaaccgcctcgataccggcacgctgggctggacggacatccacaaccaggcggactacagcgcaacgcacagcggcggcagcttcagcaccggcgggccggtgggcaaggatctgctgaccaacacggccggcggcatgctgtcgggcgccaaccacagcgggcacgccgagggcacgacaaaggccggggtcagcgaaggtacgctgatagttcgcgacaccggcaaacagcagcaggatgtggcgcagcttaaccgggataccgagcatgccaacgacggcagcatcagcccgatattcaacaaggagaaggagcaaaaccggctcaaacaggcgcagcttatcggcgagattggcggccaggcgatggacgtcatccgcacgcagggggatatcgccgggctgaaggcacagaaagacccggcggcgctggcgcaggccagggaacagcttgagaagagcggcaaaccgacgaacgatgcggcggtgatgcagcgggcatacgacaacgcgatgcggcaatacggcaccggcagcgacctgcagaaggcggcgcaggcggtaacgggggcgctgacggcgctggcgggcaataacctggcgggcgcgctggcgagcggcgcctcgccgtatctggcgacggaaatcaagaaactgaccaccaatccgctgaccggtgaagtcgacgttgctgccaacacaatggcgcacgctgtactgggggcggtgacggcgcagttgaacaaccagtcggccgcggcagggggactgggcgcgggcggcggtgaactggcggcgcgctacattgccggccagctgttcccgggcaaaacgaaagagcagctgagcgaaagcgagaagcagcaggtgagcgcgctgagccaactggctgcggggcttgcaggcgggctggcgacgggggatactgcgggagcggtgaccggcgggcaggctgggaagaatgcggtggagaataactatctgagcaatcaacagcgctcagatagagataaagagtttgatgcttgtaaaggcaatgtgtcctgtcaattgcaagtgggtgccaaatgggatgctatcagtctggggcaagataccgcttacagtgcaggcatgttagttggtgttcctcaagggctctacgactctgtcgagagtttatcgaaatccatcagtgatcctgctgcggcttatgatgcaatcaagcaactgatatcgagcgatgacatctttagcacaatgtcggatgccgttaagcaaaactacattgatcgcatcaacttgatggagtcggagtaccagaaagctggcgcaagtggtgcgtataacgcgggtgttgaagccggtaaactagtgtctgatctgattggtgctgttgcaggtggcgttggtgttgcaaaagtggggacagctctcacagagaaaattgcagcaaaagtggttggcaaaattgactcaccaaatcttaaaacaccatctggtaactctaatagttcaagtgctattactgatgttgaggcaggcgggtattcttactatgaccaattcaagaatgctaatgggggatgggattggcctaagaatttgggatttgaaggtgaacctgtcaaaactacaatcccagtaggtactcgtttggatagatatggagagcccaatggttctttccttgcaccgaaagggacaccttacgaacaacgggcccttgcacctggcgctaaagctgaaaaatattatgagtatgaggtaataaaacctttgcctgcaatacagggagaaattgctcctgcttttggtcagccaggtggaggtgtccaaatattacccaacatgcaagagcgagtgaatgttgactggctggtgaaaaatggatatctacgggagataaagtaa

SEQ ID NO: 426794 - DNA, 1188 bp, Serratia marcescens
atgcataaggatttggacgtttccatatcaacagggcggtttaggaaaataagaggatggaacaggaggcgcaattattacctcaaaagagtaaggctgagtattaaaatctatattgcaaagcttatctgggataaacgtagaaaaagtgtgtttgatgtcaaatcggtcaaaaccgtattgctcctgcgtaatgaagggacgatcggtgacgtggtgatttcgacgccactggtgaaatgtctttatgaatcagggttcacagttgatattttgcttacaaaatcaagcagcgcggtgatgaaacacaacgcctatattagaaatatctatgaggcaggagatagcaataatgaagtgtttttgaaaaggttcgctcatacggttgataaatcaacgattaagatgttaaacgagaatgattatgaccttgtggtcgatctttgtctgtttgatattccggtacataggatgatgctttttagtgatataaacgcaaaatttgttcttggctttaataaatggagttgcattaaccactacagtaaatctatttcatttgaaaatggtaaggaacatgtgacgaaagccattgctttagttgcccatgccgtagggggcaatcttaaaaatcgccgtgactatgacctgcatatccccgatgatataaattttgaagtaagagagtatttaagtggttggaaagataaaattaagattgttattaattccttcactggaagtccagagagaaatctatccaaagagcaggttgctcggctcgttgatatgcttaataaaaaatcaaaaaatataaagttaattattctcgatcatcgcagggaattggatgtgtctctgccggatagtgctgttataaatccatttgattcactgcatcatgtcatggcattgattcgagaggttgatatgattatatcgccagatacgtcgatcgtacatatttctgcagcgtggaataaagcgttgatttgtgtctacaaaaacgtaacggataataatgatttgtgggggcccgggtatgaaaatgcgaggcagattattgttaacagcagaaaaatagcggatgtggataatgtcccagagctcatattgcacgagattggtcaacgagacttgtttggtgggcaagagagaacaccgcagcggcagtccgttgtacggtga

SEQ ID NO: 426795 - DNA, 2067 bp, Serratia marcescens
atgaaaaacatcaggtccggacttatctggctgctggtggcgttggtcggcgccttcgccttcgccatgctggcgctcagccgcggcgaacacgtcaacgccgtctggctggtggtcgccgccgtcgcctgctacagcatcgcctaccgcttctacagccggttcattgccgacaaggtctttgaactggacgaccgccgtctgaccccggccgaacgccgcaacgacggcctggactatgtgcccaccaacaaatgggtgctgttcggccaccacttcgccgccatcgccggcgccgggccgctggtggggccgattctggccgcgcagatgggcttcctgccggggaccatctggatcctggtcggcgtcatgctggccggcgcggtgcaggatttcctgatgctgttcatttccacgcgccgcgacgggcgttcgctgggggaaatggccaagcaagagttgggcgccttcgccggggtgatcaccatgctcggcgcgctgggggtgatgatcatcatcctgtcggcgctggcgctggtggtggtaaaagcgctggccgacagcccgtgggggctgttcaccatcgccgccaccatcccgatcgcgctgttcatgggcatctacatgcgttttatccggccgggcaagatcgctgaaatttcggtgatcggcttcgtgctgatgctgctggcgatcatttacggcggcaacgtggcgcaagatccctactgggggccgttcttcacgctgcacggcaccaccctgacctgggtgctggtgatctacggcttcgtcgcttcggtgctgccggtgtggctgctgctggcgccgcgcgactacctttccacctttatgaaaatcggcgtcatcatcggcctggccatcggcatcgtcttcgccatgccggagatgaaaatgccggcggtttcgcgcttcatcgacggcagcggcccggtgttcgccggcgccctattcccgttcctgttcatcaccatcgcctgcggcgccatttccggcttccacgcgctggtctccagcggcactacgcccaagctggtggagcgcgaaagccacatccgctttatcggttacggcgccatgctgatggagtctttcgtcgccatcatggcgctgatctgcgcctcggtgctggatccgggcgtttacttcgccatgaactcgccggcggcgctgatcggcaccacggtggaaaatgcttcgcaggtcatcaacagctggggctttatcgtcacgccggaaacgctggcgctgatcgccaaagaggtgggtgagaactccatcctgtcgcgcgccggcggcgccccgaccttcgccgtgggcatggcacacatcatcagcgaggtgttcaacagccgggcgatgatggccttctggtaccacttcgccattctgttcgaagcgctgttcattctgaccgccgtcgacgccggcacccgcgcctgccgctttatggtgcaggatctggtgggcgtggcggtgccgcagctggccaacaaccgttcgtggttcggcaacctggcgggcaccacggtggcggtggccggctggggcttcttcgtgtatcagggcgtggtcgatccgcttggcggcatcaataccctgtggccgctgttcggcatcggcaaccagatgctggcgtcaatggcgctgatcctcggcaccgtagtgctgttcaaaatgaaaaaacagcgctacgcctgggtcaccattctgccgaccgcctggctgttcgtcacctccatgaccgccggctggcagaagatcttccatgagaaaccgagcatcggcttcctggcgcaggcgaagaaattttccaccggcatcgagcaaggcacgatcattgcgccggccaaatcgcttaaagacatggaaaccatcgtattcagcaaccaaatcaacgccgcgctgtgcgggttctttatgctggtggcggtgaccatgctgatcgccgccttcttcgcgatccgccgggcgttgcgctccgaacagccgacgacgcatgaggtgagcgccgcgctgcgggaggagaccggccgcggctga

SEQ ID NO: 426796 - DNA, 1008 bp, Serratia marcescens
atgaacgagcagccagagaatttgttgggcgaggcaaacgcctttgtcgacgtattggagcaagtctcccaggtggcaaagctgaacaaaccggtgctggtgatcggcgagcgcggtaccggcaaggagctgatcgcccaccgcctgcactacctttccaaccgctggcaagggccgttcatctcgctcaactgcgcggcgctgaatgaaaacctgctggattccgaactgttcggccacgaggccggcgcctttaccggcgcccaaaagcgccatctggggcgcttcgagcgcgccgacggcggcacgctgtttctcgatgagctggcgaccgcgccgatgctggtgcaggagaagctgctgcgggtgatcgaatacggccagttggagcgcgtgggcggcagccagccgctgcgggtggatgtgcgcctggtgtgcgccaccaacgacgatctgccggcgctggcggcggcgggcaaattccgcgccgatcttctggatcggctggcgttcgacgtggtgcagctgccgccgctgcgccaacggcggcccgatatcatgctgttggccgagcatttcgccattcaaatgtgccgcgagctggcgctgccgctgtttcccggctttaccgagcatgccaggcgaacgttgctcgagtatggctggccgggcaacgtgcgtgaactgaaaaacgtggtcgagcgctcggtttatcgccacggtgacagcgacagcccgcttgacgaaatcatcatcaacccgtttgcgccgcgtgaggcggcgccggtcgcgcccgcccctgaaggcgccggcgcgttaccggcgctgccgctggatttgaaaaactggcagctggagcaggagaaggtattgatcgaagcggcgctgcagcaggggcgtttcaatcagcgcaaggcggcgcagttgctggggctcacctatcatcagctgcgcggcatgctgaaaaaacatgcgctgctgcaaaacggcgaagcggacgatgaataa

SEQ ID NO: 426797 - DNA, 1620 bp, Serratia marcescens
gtgaaatattcatttaatggcaagattttggctggtttaatcctcctggcttttaacgcggcgaacgctcaggcggccgaggtgccggcgggtgctaaactggcggaggtgcaagagctggtgcgcgccaacgggtatgagccggcgacgctggatccgaacctggccgagagcaatgtggagttctacatctttaacgatctgttcgaagggttgctgcgtgtcggtaaagacggcgaagcggtcccggcgctggcgcagaagtgggagcatcagggcaacgtctggactttccatctgcggccgcaggccaaatggtcgaacggcgatccggtgaccgccgacgatttcgtctacagctggcggcgcctcaccgatccgaaaaccgcctcgccgtacggcagctatctggcttcggcctacgtgctgaatgccgcggcgatcaacgccggcagcaagccgccgagcgagctgggcgtcagggcgctggacgcgcacaccctgcaggtgacgctgtcggagcccaattcctacctgctcaagcagctggtgcattttccggtcttgccggttaaccgcaaggtggtggagcggtacggcaagaactggactcaaccggcgcattttgtcggcaacggcgcattccgcctcagccagtgggtggtgaacgaaaaggtggtggtggaacgtaatccgcagtattgggacaacgccaacaccgtgctcaacaaggtgacgttcttgccgatacagggtttcccggaagtggcgcgttttcgcgccggtgaggttgagttggggtataccacgccgccggagctgtatcagcagttgaaaaaaacgctcggcgagcaacagctggtgacctatccgctgctctccaccagttacttcgccttcaacaatcgccaggcgccatttaacgacctgcgggtgcgccaggcgctgaatctggcgctcgacaaagagattatcgccggcaaggtgctgggatacggccaacagccggcctggacctttaccccaacgggggcgggtggctatagcctgcagcccggcgctgcggccggctggacgccggaacagcggcacgcccaggcgaagcagttgctggcgcaggccggtttcaacgccgagaatccgctgcgctttaccgtgctgtacagcaacgacgccaccatcaagaagatcgtcatcgccgccgccgccatgtggaaaaagaaccttggggtagaagcccgcttgcaaagccaggagcgtaaagtgacgctggataatatcaaccgcgggcagtacggcgtggcctttacccgctggctggcggactataacgatccgtctacttttctgaacgtgttccgttccgacagcagcgagaacagcgccaaataccataacccggactatgaccgcattctgcaccaggcgacggcggcgcagacgccgcagcaggtgcagcgctacttccagcaggccgaggtggtgctggccgccgatacgccggtggcgccggtgtactacgaggccaacgccacgctcattaaaccttacgtgaaggggatcgactttacccgccagggcgccttgtacgataaaaacgtctaccttctcgagcactga

SEQ ID NO: 426798 - DNA, 3105 bp, Serratia marcescens
atgctagcgcattttttcgtctttcgaccggtatttgcggccgtgctggccatctgcattatggcggcgggcgcactggcgctctggacattgccggttgagcaatatcccgacatcgccccacccggcgtcacggtgaccgccaattaccccggcgcttcggccaaaacggtagaggacagcgtaactcagattatcgaacagcaaattaaagggatcgatggcctgttgtatttctcatcaaccagcagttcggcgggtcaggctcgcatcagccttagcttcgaacaacaaaccgacccggacattgctcaggttcaagtgcaaaatgcggtcaatcaggcaacgtcgcgattgccgcaagaagtgcagcagcaagggatctcggtgacaaaatcgcagggcgatagcctaatggtagtcgccctgtacgacacgcaaggccgcatggacagcgttgatatcaatgattttctggtcagttcgctgcaagatccgctgagccgggtggatggcgtcggggagacgacggtatttggcgctcaatatgcgatgcgcgtttggctcaatccgatcaagttgagcggttatggcctgatgccatctgacgtgcaagccgcgatagaagcgcaaaatgcccaagtcaccagcggtgagatcggcgcattgcctacgatggatggccaggcgttgaacgcgaccgtgaccacgcaatcgcggctggaaacgccggagcagtttgagaatattattctgcgcaccaataccgacggttcggcggtgtatttgcgcgatgttgcgcgcgtggagatcggtgcggaaaactatcaaaaccaaacgcgtctcaacgggtacccagcggccggcatatcgattcaactggcttccggcgccaatgcgctggaggttgctgaacgggtgcgggctgaagtggagcgcatggcgccgcagtttccgccggggctgcaggtggcttatccgcgtgacagcacgccgttcgtactggtgtccattgaaggcgtcgtgcaaaccttgttggaagcgatcgcgctagtgattgtggtgatgtatctgtttttgcaaaattggcgcgccacattgatccccgccattacggtacccgtagtgctgctcggcactttcggcattttggcgctgttgggttacagcgtaaacaccttgacgctgttcgccatggtgctcgcgatcggcctgttggtggatgacgcgatagtggtggttgagaacgttgagcgcgtgatggaggaagcgcaattgccgccgcgcgaggcgacgttgcattcgatgcgggagatcaatggtgcgctgatcggcatcgcgctggtactttcggcggtatttgttccgatggcatttttcggcggttcaaccggcataatctaccgacagttttccatcacgctcgtcgccgctatggtgctgtcggtgttggtggcgttgaccttgacgccggcattgtgcgccggtttgctaaaaccgtcggtgcagcggccgcgcagccgtttttttcgcggctttaaccgcctggtggaatacggacagcggcgttatgggttgggattgaaccatgtgatggtgcgcaaagggcgtttttgcatgttggcgctgctgctggtcggtttcatgacctggcaatatctgcggatgcctaccggttttctcccagtcgaggatcagggctcggtaatggtccagttttctctgccgccaggcgccccgatggccagaacgcaacagactgctgacgctatcgccgaatatttcatgaccgccgaacgggacaacctgaatgtgatcttcatggttgtcgggcgcaataacgccggcagtggtcagaatgtcggcatggcgtttgccgaacttaaacattggtcgctgcgcagcggtaatgagaataacgcgctggcgattattagccgcgccaatcgccatttcaaaagctatcgcgacgcgcagatcaatgtgttgtcgccgccggcggtgcgcggattggggcagtccagtggatttgaactgtggttacaggatcaaaacggcgttgggcatgacgcactgcaagctgcgcagaggcaagtgatcgccgccgctgccgaagatccgttgttaacggcggtgcgcatcaatggcctcgaagataaagcacaattgcaggtcgatatcgatcagcaaaaggccagcgcacaagggctgcagcaggctgacatcaccaacacgctttctgccgcctgggggggcgcttatattaacgattttatcgatcgcggccgcgtaaagcgggtctacatgcagggggacgcggcctggcgatcggcgccggatgatatcgataattggttcgtacgtggtgaaagcggcagcatggcgtcctttgccagcttcgcgactacgcgttggctctcagggccacaaatgctgcagcgctttaacgggctgtcggccacgcagttacaggggacggcagccgagggcgaaagctccggcaccgcgatggcgcgtatgcagagcattatcggcggtgtagacggctaccgccttgagtggagcgggctctcatatcaggagcaattggccgccgggcaaacattgctggtgtatctggcttcggtgttgttcattttcctctgcctggccgcgctgtacgagagttggtctatcccattgtccgtgatgttgatcattcccctcgggattatcggagccgttgtcgccgcgcgccttgcggggtatgaaaacgatatttacttccaggtgggaatgttgacgacgattggcctgtcggcgaaaaacgctatcctgatcgtcgagtttgttgaaacacggctcaaagcgggatccgctttgttgcaggcgaccctggaaggggcgcgactgcgtctgcggcccatcgtgatgacctcattggcgtttgtcgcgggtgtgatccccctggcgctttctgtcggtgccggggccgccagccggcgcgaaatcgggattgcggtgatcggcggcatgatttctggcacactgctgacattattgttcgtaccgttgttttttgttctgaccaaacaagggttggcacgacttaaggcgcgaaaatga

SEQ ID NO: 426799 - DNA, 1299 bp, Serratia marcescens
atgagtaagatgaaaaagatcgccgggtggggcggggttacggtgctcgccgtggtggtggccggcgttgtcgccagttggcaaccggaaatcgcgccgctcgccgccgatgcgacgaacagttttagcgaggcgcagattgcgcgcggcaaaacgctggccgatctcggcgattgcgcggtgtgccacacccgttcgggcggtgagcgcaacgccggcgggttggcgatggcgatccccttcggcaccatttacaccaccaacatcacgccggacgtggaaaccggcatcggtagctggagctacgcggcgtttgaacgcgccatgcgccacggcgtcgatcgccaggggcgctacctttatccggcgtttccttataccgcctttacccgcacgagtgacgacgatctgcaggcgctgtacgcctacctgatgtcgcagccgccggtcaattaccggccgccgtccaccgatctgcactttccgttcaatatccgccagggcatcttcgcctggaacctgctgttcctgacgccgggcgcgatgcaggaagacccggcccaaagcgccgcctggaaccgcggcgcttatctggccgaagggctggggcactgcagcgcctgccactcgccgcgcaacatgctgttcggcgaaaaaaccggtagcgaccacctggcaggcggcgtggcggaaggctggacggcgccggcgttgaccggccgctcgcccacgccgctcgattggacgcagcaggatctggtcgattttatgcgtaccggctactcggccaaccacggtgtggccgccggcccgatggcgccggtgatcgaagaagggttatcccgcttgccgcaggccgatctgcaggcgatcgccgtctatctgcgcagctatcatcctgaaacgccggcgggcgcgacggcggccacgttgaacgctaaggcggagcggcaggtcgagcccctgagctcgcaaggcgcgcggctgttttccggcgcctgcatggcttgtcatgcgcaggaaaagggcgcgcagatggcgggggtgcggccttctctggcgctgaacaccaacctgttcgccgaggcaccggacaacgccattcgcgtggtgttggatggcatacagcggccggcgaacgccgaactgggctatatgccgggcttccgccataacctggatgacgcgcagatcgccatcctgctcaactatctgcggcagcactacgccggtcaggcgccgtggcccgatctgaccgcgcaggtcagccgtttgcgcgccgaaaccgcgcagaaatag

SEQ ID NO: 426800 - DNA, 1131 bp, Serratia marcescens
atgtcaactcgtcgcgtgtttattaaacagctttccgccgttgccggggtcggtttgacggcctcgttaggcattccgttacgcagtcacgcagaagctacgcttaatccggcctggcggatgcccgacgaaggggaaccgcagcagcgggcgtttctcgccttcggcgcgcagcgggccatctggggcgaattcacggcggatgtgcaggcggcgcaggggcgtatcgcccgcgccatcgccgagtttcagccggtgacggtattttgccgcggcaatgaacggctattggccgaggccacctgcggcagtcacaacgtcagctatgtcgtcaccgagctggatgacatctgggtgcgcgacttcggcgccaatttcgtcgtcaacggcgccggcgaactcggggcggtggatttcaacttcaacggctggggcaataaacagcggcatgccagggatgcgcgcctggcggcgtttgccgccaaccgctacggtgccgcccaactgcgccgcagcgcactgacaggcgaaggcggcggtatcgaagtagacgggcacggcaccggcatcatgaccgaaagcagctgggtgaatgcgaaccgtaatccgggctggagccgggaccgggtggagcaggagctgaaagcgatgctcggcctgcgcaaaattatctggctgccgggcattaaaggtcgggacatcaccgacgcccacgtcgatttttacgcccgcttcgtgcggccgggcgtggtggtggccaacctggacaccgatccggcctcttatgaccatgcggttacccagcaacatctggcgatcctcaaagccgcgaccgacgccgacggccgccggctgcaggtgcatacgctttcgccgccgctggcgccgcgcgacagccgattcagccgcaacaacccggattttgcggcgggctacatcaactatttcgtcatcaacggcgcggtgatcgccccggagtttggcgatccgcaggcggatcgggcggcgcttacgctgctgacggcgctctatccgcagcgcaaggtgatgcagctggagatcgacgccatcgccgccggcggcggcggcattcactgcgtgaccagccaactgccaaggcacggtcggtaa

SEQ ID NO: 426801 - DNA, 681 bp, Serratia marcescens
atgaccgattcaccctcgaccattcccacctggtatcgcgatccgcgcgcggaagaggccatggccgatggccatgcgcccatctggcgccatcttatcggcctggtgccggaaaacgaactgtccggcgtgaaggtgctggatttcggctgcaatcagggcggttttctgcgcctgctgtaccagctccgcccatttcagcaggggcttggcgttgatatcgctcgccggtccgtcgatgaagccaaccggctgaaagggcatctgccggtggtttatcaaaccgatacgcggctgaacggctgggacgaccatttcgatatcgccttcagtcatgaagtcatctatctgatcgacgatattgcccagcatgctgccgatatactgcgggtgctgaagccgggcggcgtttactatgcggtgaccggttgccacaccggcaacccgctgtggccgcagtggcgtgaacgggtggctgcagatacccataccgtggtgcaggatcggtcgctggccgactatgcgcgcattttctccgccgcggggttccaggtctctgcccgcaggctgggcttttccggcttcgtgccctatgagccggacgggtggatgccggatatcgcagcggcaatcgactactattggcacaccaaaacggtgttcaggctggttaaaccctaa

SEQ ID NO: 426802 - DNA, 1443 bp, Serratia marcescens
gtgttgcaacgagtcatgatgttaactttaccgctgctgctgaccggctgtctgtcgctggatccgcactaccagcgcccggcggcgccggtgcccgccaacctgccgcagggcgaggccggcggcaaccgggcgctgagctacccggacgtcgcctggcgcgactatgtccaggacgcccggctgcgccaggtggtggcgctggggctgaacagcagccgcgatctgcgcgaggcgatcgccaatatcgcgtcggcgcgcgccctgtacggcgagcagcgctcggcgctgttcccgacaatcaatgccaccgccgacggcagccgcgggcgggcactgaccggcagcggcaacgccaccgcgctgagccaaagctacgaagccgcggccggcgtcagcgcattcgagttggatctgttcggcaaaaacgccagcctgtcgcgcgcggcgttcgaaacctatctggcgaactcggaggcggcgaaaagcactcgcctgacgctgatcgccgatatcgtcaccgactgggtggcggtggcggccgagcgcagcaatctggcggtggcgcagcagacgatggcgagcgccaaacggtcgctggacgtcacgcgcaacaatcaacagcacgggattgcgtcgctggttgacgtggcgtcggcggaaaccgtctatcagcaggcgcgatcggacgccgccagctacgctaccagcgccgcgcaggcgaaaaacgcgctggatttggcggtggggcaaagcgtgccggaaagcctgctgccgagcggcatcgaggcgctcggcgggatcatgcgcgatctgccggccggcgtctcttcgcaagtgttgctgaagcggccggacgtgctgcaggccgagcataacctgaaatccgccaacgccaatatcggctcggcgcgggcggcgttcttcccgtcgatcagcctgaccgccaacggcggggtgggcagcggtgaactctcctcgttgttcagccacggagccggcgtctggtcgttcgcaccgagcatcagcctgccgatcttcagcggcggctataacacggctcagttgaattatacccaggcgcagaaagacctgtatgtcgccacctatgagaaagcggtgcagacggcatttcaggaaaccgccgacgcgctggcgcgcaaggccacgctgcaggagcagctggcggcgcagaccggctatgtggcggcggcgcagcaatattatcgtctggccgagctgcgttaccgccagggcattgacagctacctgacgctgctggacgcgcagcgcacgctgtacacggcgcagcaggcgctgatcgccgcgcagcagaccgcgtatgacaatcaggccaccctgtataaagtgttgggcggcggcgttgccgccgagcggcagggggacggcgtcatcgccgacaagacgacgctcagccgctaa

SEQ ID NO: 426803 - DNA, 219 bp, Serratia marcescens
atgaagatcagaacggtaaccccgcaagacgctgaagccctgacgcagttattgaatgacgtgatcggcgccggcggcacgacggcgatagaaacgcccctcacccccgccgaattcagcgaatggttcatcagcggcagcaatgcgctgagctgccaggtcgcggaggtggatgggctaaggtggagtacagcctgtccgaacgcgggcgttcgctga

SEQ ID NO: 426804 - DNA, 2073 bp, Serratia marcescens
atgtttaaaccgacttataaaaagaacgccgtcacccgcgccattaccaccaccatgccgctgtttctgctggccggccacgcggcgcaggcgcatcaacaccctgccggcgcacaggttaatgatggcgacgtgatcaccgtcaccgcgccgctctactccccgctgaccatcgtcacctcgccgaaaaccccacgccagccggtgccggccagcgacggttcggactacctgaaaaccatccccggcttttcgcagatccgcaacggcggcaccaacggcgacccggtgttccgcggcatgttcggctctcggttgaagatcctcaccgacggttcggaaatgctgggcgcctgcccagcgcggatggatgcaccgacctcttacatctcgccggaaagcttcgatctgttgaccattaccaaggggccgcagacggtgctgtgggggccgggatcgtcggcgggcacggtgcgcttcgagcgtgaacgcccgcgcttcgacaagccgggtatcaagggcaacgccagcgtgctgaccggctccaacggccgctgggacgagaacatcgacgccagcctcggcgccgaacaaggctacctgcgggtgatggccaacaaatcccgttccaacgactatcaggacggcacgaatacgcgcgtgccatcgcgctgggacaagtggaacggcgatctggcgctcggctggacgccggacgccgacacgctgctggaagtaactatgggccgcggcaacggcgaagcgcgctatgccggccgcagcatggatggttcgcagttcaaacgcgaaagcctgggcatgcgggtggagaaatctaacatcggcgacgtgctggataagctggaagcgcaggtctactacaactacgccaaccacgtgatggacaacgtcaccctgcgctcgccgggcagcggtggcatggctgggcacggggggcatggcggcatgagcatggggataggcggccacggcgggcacatgatgtcctccggcatgacgatgcagctcgatcgccgcaccgtcggcggccgcgtgatgggcacctggcagtggcaggacgtgaagcttgaaagcggcctggacacccaaaccaacacccaccgcagcatgaaccacggcagctgggaaaaagacgcccagttcaacagctacggcgccttcagtgaactgacctggtccaccagcgaacaggataaactgatcggcggcgcgcgcctcgaccgcaccctggtggagaatttccgcagcgccagcgctgggaaacgttcggacaccctgccgagcggctttatgcgcctggagcatacgctggccgacctgccgctgatgctgtatgccggcgtcggttataccgagcgcttcccggattactgggagctgttctcgccgaagcttggcccgaacggcagcaaggatccgttctccagcgtcaagagcgagaaaaccacgcagctcgacatcggcgctcagtacaacggcaaacgcttcaacggctgggtttccgcttatgtgggccgcgtcgatgatttcatcctgttcaaatacgatccgcacaacgcgcgcctcagccaggccgataacgtcaacgccaacatcatgggcggcgaaatgggcatgggttatcagctgagcgagcactggaaaaccgacgccagcctggcctactcctggggcaaaaatagcagcgacggccggccgctgccgcagatcccgccgcgggaggcacgcttggggctgacctatgagtacggcgactggagcggcaccggcctgtggcgtctggtcagcagccaacaccgcgtggcgatcaacgaaggcaacgtggtgggcaaagactttgccgaaagcgccggcttcggcgtgctctccgccaacgccgcctacaaggtgaataaaaacgtcaagctgagcgccggtctggataacatcctgaacaagacctacagcgaacaccttaacctggcgggcaacagcgccttcgggtactcggccaacagcgcggtgaatgaaccgggccgcaccctgtgggccaaggttaacgtcaccttctaa

SEQ ID NO: 426805 - DNA, 609 bp, Serratia marcescens
atgacggaaaaactggcgagcaccattatcccgctttatgacgaacatgccgccgcctgggaacgcctcagacccaccacgctgtttgaacggccgtggctcgatcgctttttgcatctcaccccggccaatgcgcggctgctggatctcggctgcggcaatggcgcgccgatcgccgcctattttatcgaacaggggtatcgggtcaccggcgtcgacggtgctcaggcgatgatcgcgcgctgccggcagcgtttcccgcagcaggaatggcgacaaatggatatgcgccagctggatttggcgacgaagttcgacggcctgctggcctgggacagcttctttcatctggcgcgcgacgatcagcgccggatgtttccgctgttcagacgacatgccgggccgcacgccgcactgatgttcaccagcggcccagccgacggcgtggcgatcggcagcttcgaaggccagccgctgtttcacgccagcctggcgccggaggagtatagacgtttattgcaggagaacggcttccgcgtggtcgaccatgtggtggaagatcccgcctgcgggggaagaacggtctggttggcgcagggtggtgagtga

SEQ ID NO: 426806 - DNA, 1302 bp, Serratia marcescens
atgaagctatcatcgatcgcgattgcgctttcggccgtgctggcgctggccggctgcgataacagcgccgtcattacaccggaacaacaaatggggccggatccgacgttgccggcggcgcaagacttcctgatgccgccgatgcaggtgccaaagggcgtcggctggcagcaaaatcagatgccgaaagtggccgaaggcttgaaaatcgataaggtggcggacggtttgctgcacccgcgccagctgcttaccctgcccaacggcgatgttttggtggtggaagccaacgggccgggcaccgaagcggtgagcacgcccaagcagctgatcgccggtttggtgaagggccagtccggtaaaggcggcaaagggggcaaccggattaccctgctgcgcccaaccgccgatggcagctgggaaaagcatgtcttcctcgaagggctcgattcgccgttcggcgtccagctgattggcaacaccctgtatgtggccaacaccggcaacatcatgcagtacgcctatcagccgggcgaaacgcgcatcagcgatgcgggtaaagagctggccgacctgccggacaccatcaaccatcattggaccaaggccctgctggccagcccggacggtaaaaagctgtatgtcggcgtcggttcaaacagcaacatcaccgaaaacggcctggccgtagagtaccgccgcgccgccgtgctggaagtggacaccgcctccggtgccagccgcatcttcgccagcggcctgcgcaatccgaccgggctgcagtgggaaccgcacagcggcaagctatgggccatcgtcaacgagcgtgacgagatcggcgccgatctggtgccggactacctgacctcggtgcaggacggcggcttctacggctggccttacagctatttcggccagcacgtcgatcggcgggtgcagccggcgcggccggatctggtggcgaaagccatcaagccggactacgccctcagctcccacgtcgcgccgctggggctgctgttctacacggcgaacgctctgccggccgagtatcgcggcggcgccttcgtcagcgaacacggcagctgggatcgctcgccgctgaacggctaccgggtcagctacgtggcgtttgagcaaggcaagccggtcggcaaactcaaagcggtggtcaccggctttgtctccgacgacgagaaggaactctatggcgcaccggtaggattggcggtcgacaagaccggcgccctgctgattgctgatgacgtcggcaacaccgtttggcgcgtcagcgctaaataa

SEQ ID NO: 426807 - DNA, 1023 bp, Serratia marcescens
atgatgaaacaccacaaagccaccgccagcgacgtcgccgaaaaggccggcgtctctaaatggacggtatcgcgcgcctttacgcccggcgcctcgatctcggacagcgcgcgtgaaagcgtgctggcggcggcggccgagctgggctatcggccaaatctgctggcgcgcagcctgtcgcaaaaacgcacgcacatcattggcgtggccatcgacgagatgaagaacccgcattcaatgatgatgctcgatatggtgaccaaacagctgcaaacccgcggttatatggcgctgctgctgaacatcaccgccggggaaaactaccgggcggtgatggcgatggccgatcagctgcaggtcgacggcattttgttcctggcgacggtgttaaccaaggagtgggcagcgatcgcgcaagatctgcatcagataccgctggtgcaggtatgccgcaatacggaaagcgaacacattgatgtggtcaatatcgacggctaccgcgccggcgaagagatcgccgcgctgctgatagagcaaggccaccggcgctttggttacatgaaggggccggacacgcaaagcagccatttgctgcgcatggaaggctaccgcgacaaactgatggccgccggctttcagttggatcgagtgctcaccgccggccactacgatcgccaacgcggtttccagctgatgagcgaatacctgcaggcaacgccggaaagcgagcgggttgaggcgctgttctgcgagaacgacgtgttggcgctaggggcgctcgaagcgctcaggcaaacggcgccgtcgtccgcgatggccgtggtaggtttcgatgatatcgacgaggccggctcagccaactgggcgctgaccagctacagccaacgcatcgaccggctggtcgaagaggccttgaatcgcctgatcgacaatcgcgccacggcagacggcgcctggcggcaaggggaattgcgggttcggcggtcgcatgtgaagcaagacgaaattcagatcgctgattga

SEQ ID NO: 426808 - DNA, 1176 bp, Serratia marcescens
atgttaaatggtgaaagaagcatccctcgcccgctgcgttgggcgatgatcggcggcggccgcctcagccaggtgggctacaagcaccgttccggcgcactgcgcgacaacaccgcctatcggctggttgccggcgcttttgatatcgacgcggcacgcggacgcgagtttggcgttaatctcggcgtgcccgccgaacgctgctatgacagctatcaacagttgctggcgcaagaagccaaccgcgaagatggcgttgaggtggtgaccatcgccacccccaacggcacccactatgaaattacgcgcgccgcgctgaatgccggcctgcatgtcatctgcgaaaagccgctgttcttcaccacggcggaggcgagagaaattaaggcgctggcggcggagaaaggcctgatcgtcggcgtaacctacggcttctccggccatccgctgctgatgcagatgcgcgtcatgatcgcgaacggcgacatcggcgaaatacgcatggtcgaattgcaatacacccacggcttcaatgccaacgaaagcgcagacaagttcgaggcgcaaaagtggcgcgtcgatccgaaaatcgccggcccctcttttgtgctgggtgacatctccacccacaccttctacatctcgcagttggtgatgcccgatatgaagattgcctccctgctgtgcgatcgccagagttttattccttcccgcgccccgctggaagacaacgccatggtgctgatgcactacgaaaacggcgccgtcggccgcatgtgggcctccgccgtcaatgcgggcgcgatggacagccaaagcatccgcgtggtgggctcgctcgccagcctgcagtggagcgacgctgcgcccggcgaattgcgctatgagatccaggggcgacccaaccagatcctgcaccacggcatgccctatctggacgacagcgccctggccgaagagcggctcggcgcgctgcataccgaaggcctggccgaatcctgggccaatatctacctcaagttcgccatcgccatcagcgccagccagcgcggcgatcggcagacgctggccacgctgatctacccggatatcgacgctgggctggaaggtgtgcgctggattgaaaactgcgttcgttccgccgacaacggcgccacctgggttaattaccaataa

SEQ ID NO: 426809 - DNA, 954 bp, Serratia marcescens
atggacccgctgtcagacgtgttgtcgctgctgcaaccccaaaaccagttttacgccggtttcgacgccgccggggactggtcgttcgagtttccccctcatgaaggcatcaaattcacggcggtgatgcgcggcgcctgctggggcatgaccgacgatctgacgcagccgatccatttccgcgaaggggactgctttttgctgaacagtcggcggcgcttcagggtcgcgtccgatccggcgttgccgccgcagggaggggagcagatcatggccgaggcgacgcgcgacggcatcgccgtgcataacggcggtggtgaggtctttttgatcagcgggcgtttcggtttttccggccagcatgcggcgctgctgtttgatgcgctgccgccgatcatcaacatccccaaagcctcgagccaggcgggcgttttgcgctggacgctcgaacagtggacgaacgagttgcgtcacccgcagctcggcggtgcgctgatgtcgacccacctggcgcacttgatgctggtgcaggtgtttcgccagttcctcgaaacggcccatgggctgccgaaaggttggtttctggcgctgaccgaccgccagatcagcctggctatcgccgccatgcacgccgagccggcgcgcaactggacgctggaagagctggcccgcatcgccggcatttcccgcaccgtattcgctcaacgtttcaaagggctggttggcagcaccgccatggaatacctctcgcgttggcgtatgctgcaggcggcagatcgtctgcgggccggtaaagaaaacgtcgcgtcgatcgcctactcgttgggatacggctcggaaagcgcgttcagcaccgccttcaaacgggtgatggcgcagtcgccgtcgcagtatcggcggcaaacgccggccggggcgagtgaaccggagggaaagggggcgcagcggccgtga

SEQ ID NO: 426810 - DNA, 1023 bp, Serratia marcescens
ttgagccgttgttccaaattgcgcccgacagcgggcggctatgcttcatcgccacaatggcgcgatcggcgctttaacaatcagcggccgccggcgccgggtgacctgcccgagtccaccctgcgcgtgtggtgggacgtatttttcaacaagcccaaaggcacggtgccggcgacgccggtgccgattcagcgcctgtcgcgcgccgagcttgaggcggcacccgatcgtagcctgtaccgtctggggcattccacggtgttgctcaagctgcgcggccaatggtggctgaccgatccggtgttctccgagcgggcatcgccgctgccgttcgccgggccaaaacgctttcacgcgccgccgatcgcgatcgaggagctgccgccgatccgcgccgtgatcctctcgcacgatcattacgaccatctggaccaggccgccattcgggcgctggacggcaaggtgggccagttcgtcgcaccgctcggcgtgggcgatcgcctggcggcctggggcgtggcgccggacaaaatccgccagttcgactggtggcaaggcacggaaatcgacggcctgcggctgacggctaccccggcccagcacttttcgggccggagcctgaccgacggcaaccgcacgctgtggtgttcctgggtgattgaagacgatgagctgcgggtgttcttcagcggcgacagcggctatttcaccggttttgccgagattggccgccgttttggcccctttgacctgacgctgatggaaaccggcgcctacgacaaacgctggccctatgtgcatatgcaccctcagcaaaccgtgcaggcgcaccgggatttgctcggccgctggctgctgccgatccataacggcaccttcgatctggcgatgcacgcctggcaagacccgttcgaccaggtactgcgccatgccgctccctctagcgtgcaggtcgcgacgccgatgatcggcgaacgtgtcgatatcgttcggccgcaccccggcagccgttggtggcgctaa

SEQ ID NO: 426811 - DNA, 867 bp, Serratia marcescens
atgaacaatgaccataaagtgtggctgatcaccggcgcctcgtcgggcctgggcaaagccctggccgaagcggccatcgccaacggcgatcgggtggtggtgaccgcccgccgtctcgaccgcctgcgggcgctggctaagggccaggaggatcgcgtgctgcctttggcggtggacgtcacggatgccgccgcgcgcgataaggcggtcgccgataccctggcgcggttcggccgcatcgacgtgctggccaacctggccgggcgcggtgtagccggcgcctgcgaagagttcagcctcgaacagctgcgcgagcagatggagctgaatttctttgcggcggcggagatgacccgcgccgtgctgccgcagatgcggcgccagggcagcgggaacgtgatcaccgtaagcagcatcgccggtctggtggcaatgaacgccgccggcccctattgcgcggcgaaatttgccctcgaaggctggacggagtcgctggccatcgaggccaggccgctggggatccacgtgaccctggtcgagcccggcgccttccgcaccgaatttgccggcgacgtgaacatgcggccgacgcagcgcatcgaggcctaccgcccgtcgattgcaccgtttgaaacctacctggcgcagtccgccggccgacagatgggcgatcccgccaaagcggcgcagcgcatgctggagttggtcactctcacggccccgccggtgcgcctgatgctggggcgcgacgcttacgccatgtgggacaccaccctcgccaaacgccagcaggagcttaacgcctggcgcgaacggggtgaagacaccgcctttgatggcgcagaactcactgaaattcaactgtaa

SEQ ID NO: 426812 - DNA, 861 bp, Serratia marcescens
atgaacaaaacctggtttattacaggcgcatcttccggcttcggccaggctttggctgaagccgtgctggccaagggcgacaacgtggtgctcaccgcccgccgcctggcgccgctgcaggcgatcgccgccggccacggcgaacgcgcgctggctctgcagctggacgtgaccgatcctgcggcgcgcgccgccgccctgaagaagaccgtcgaaaccttcggccgcctcgacgtactggccaacatcgccggcgccggttcttacggggcgctggaagagttcacttccgaacagatccgcgcccagatggagctgaacttcttcgcggccgccgagctgtcgcgtgaagtgctgccgcagatgcgcgctcaacggtccggccatattctcaatctgaccagcatcgccggcctggtggccttccccggcagcggcctgtacaacgccaccaagttcgcgttggaagggtttaccgaagcgctgcaccacgaggtcaagccgctggggatccacgtcacgctgatcgagccgggcgccttccgtaccggtttcgccagcagcgccgccatgaaggccgaacgcgaaatcgctgcctatgcgccactggatgccggcatggtggagtattaccgcacgcagaacggcaaacagatgggcgatccggttaagggcgctcgcgtgatcgtcgatatggtggccagcgccaccccgccggtgcgtttgatgctcggtaaggacgcgtatcagctgtgggacagcgcggtagcctcccgcagccgcgatctggcgccttggcgtgaacgcggtgaagatacggccttccccggcgctgcgatgaaccccgttcaggcgctgtaa

SEQ ID NO: 426813 - DNA, 465 bp, Serratia marcescens
atgtcatcgaaagaaaaatccctctatgccctcaccaacgccctgcaaccggttcgccgggtgtggaaacaggctgcgacgctggcgatcgccaaatccggcatctccatgtcgttggctaccgtcgtggttctggtgcatcgcaatccgcagggcatcaatcagcgcgacctggcggaagaagtcggcgtcaatcccggtgcgctggtgcgtctgttggatcaggccgccgcgttaggcttcctcgagcggcaggagtcggccggcgatcgtcggtttaaaaccctgcgcattctgcccgccggcgccgaattggccaaaaaggtcgaaaccgcggccgataagctgcgagtcgagctgatgcacgacgtgccgttggaagatattgaaaccgccacgcgcattctgcgcctgtttgaagagcgcgcaggccactatctgcaacaggccggcaatgagccatga

SEQ ID NO: 426814 - DNA, 1938 bp, Serratia marcescens
atgaaaatcggtaaaccgcagctgctgtatgccgcgaaactgtttatttccgccatgctggccttcgcgctggcggaaagcatcggcctgcaaaatccctattgggcgatggtgacctgctgcgtgctgagcaatccggtcagcggcgccgtacgcgcccgcgccacctaccgtttttgcggcacgctgttcgccggcgtgctgacgctgggcctttcggcctggcttagcaacacgccggtgctgttgatcgtcgccgctgggctgtcatcgtcactgatgctgggcctctcctatctcgatcgcacgccacgcgcttactttttccagctgggcgccatcaccatgatgctggtcgccatcgcctacatcaatcacccggacacgatgttcactatggtcgtcacgcgggtgacagagatctgcctgggtattttggcggtgacgctggtagacagcgtgctattcccatcgtcgctggcgccggtgttgcgcacgcggctgaaaggctggctggctgacctggcgcgttggcaggaggacagcctcgacggcaagggcagcgacgcccaggccgacgcggaccgtatccgtttgctgggcgacatcgcctcgttcaatcagatgatgaccacccttggctatgacagttcggtcgataagcccacccgtcaggcggcgatttcgatacagcaacgcgtactgcaaatcgtgccgctgctctcggccatcggcagcagcatcgccgcactgccggtcggcctgcgcacccgcctgcagccgtggctgaatgaggtccggcggcaggccgttgaacccgcaccgcacgctgcgccctcggtaagcttgttgccgcctgcgtcgtcgctgtcgccgtgggaaacgctgatcgtcgacgagctggctgaacaggttgagcagtggttaacgctgtgggccgaggtacagcagttgaacgcattcctggacggcgagccgctgcccgcggcgctgcaggcgcagatgatgcgcagccgcgtcttctcgccgccgccggatatcggcatggcggtgcgcatgttcgccggaattttgacgacctacgccctgctgtgcggtctctggtatttcaccggctgggaacagggcgccaatatggtgctgatggggatcgtggccatcgccttcttcggcgccggcgacaatcccggcgccaccatcgccacttttggccgcttcgccgctatcgctatggccctcggcgccctgctcagctatgtgctgctgccgctggccggggattacggcagtttcctgatcgtgatgggactgtttttgctgccgctcggcgtgtgggcggcgagcaacccgctggcgacgttggcgatcgccctgtcgctcagcaacgtcaactttcaggggcactatgcgccgaacaatatggggctgtatctggaaagcacttccggcacgctgatcggcgtctatttcgcattcctgtgcgccgcgctgttccgccgctggggcaccgatcaggtggtggcgcggctgatgcggcaggatgcgcaagagatgctgcgcctcaatcgccacgtcacggagcgcgacttacagcgctatcaggcccgcgcgttggatcgcatcaccgcgctgggtagccgcctggccgccgttggacaagccgatcgcagcccacagctgttgatgcgcttaaaaaccgctatcgacctgattcgtctgcagcaggccggcgggctcacccctggcgcttcgccgaacgccggtctgccggcggcgttccgccaactttctctgcacgccgaagcaccctctgcgctgctgggccagatcgacgccggtctgcaacaggcctggcggcagaacgatcggcgcgcgctgcggccgcttacccggctgcggctgctgcacttccccacggctttgcactggaatccctga

SEQ ID NO: 426815 - DNA, 213 bp, Serratia marcescens
atgatcggtgaaatcaacattgacggcgtgttcatctcgcccttgctgctgtgcctggtgtgcgcgttcttctcgcgcatggcgctttcctggacgctcaacgcggtaggcgtctatcgctgggtcgcgcagcgcccgctgttcgacaccgccctgtttcttattctggccgggctgtttttccacggcctgaaatggcttaccaccccctga

SEQ ID NO: 426816 - DNA, 876 bp, Serratia marcescens
atgtttcgtgaacgtacccttgttctgctgcgccccgcgctgaccctgattgccgttttgatcgcggcaggcgtgctgtggcagctttatctctattacacctatgccccgcaaacgcgcgacggcaagatccgcgccgacgtggtgccgctggccacggatgtttccggcaaggtggacgccgtgcacattcacgacaaccagctggtgcataaagggcagctgctgctcagcctggacaaagtacggctgcgcaatgcgctggatcaggccgaggccgccgttgaacgcgccaacgtccagttggcgtcatcccagcgcgaaaaccggcgctatcaggcgctgcagtcggctatttcacagcaggaacgcgacaatcgccgcgatgcccaatcgctggcaaaggccaatctggatcaggccctggcggatcgggcgctggcgcgcatcaacctgcagcgcgccgatctctatgcgccggtggatggcgtgatcaccaacttctccctgcgccccggcgcttacgcgaccgccggtcagccgatcatggcgttggtggattccaacagtttctacatcgccggatacttcgaagagaccaagctgggccgcatccagaacggtgacaaggtggtgatccgcatcatgggggaaaggcagccgctgtatggccacgtcgacgggctttccgccggcatcaacgacagcgagcgcaccaccgccgccggcaatctgctcgccaacgtcaacccgacattcagctggatccgtctggcgcagcgcatcccggtgcgcatcgcgatcgacaccattccccacggcgtcgagctgatcgccggccgcacggcgacggtcagtttaagcgaaactcattaa

SEQ ID NO: 426817 - DNA, 921 bp, Serratia marcescens
atgttttcttccgaacgtcttaaagggatcggtctgtttgtttgcgtggccgatatgggcagctttacgctggcggcggaacgcctgaacctgaccgcttctgccgtcagcaaagggatcgcccggctggaaagccgattacagacgaagctgttccagcgcaccacgcggcggctggcgctgaccgacgccggcacccaattttatcgcacctgtaccggcgtgttggccgagctggaagaggccgaactggcgatgcaggcggaaagcgccgagccgcgcggcagggtgcgcatcgatcttcccgcttcctttggccgtttgcatgcgctgccggtgatcttgcgatgtattgaggatcacccattgctggtgccgcatatcacgtttacggaccgcttcgccgatccggtcagtgaaggcatcgatatcctggtgcgtatcggcggttcggatgtgtggccaaatacgctggggcatcactaccttggtaagcagcggcatatcttctgcgccgcgcccggctacctgaagcgacagggtgaacccaccaccgccgctgaattggcgcatcatcactgcgtgctgtatcaggaaaacgacggcatgcagacgccctggcatttctccggaagcggtgcccagccggtagagcgaagaacgctgacgccgcgggtggccattggcgatgcggaggggcaactgacggcggtgctggcggggcacggcatcgctcagttaccgacctggctggtcaaacggcagctagaggagggggcgttggccgaggtgttgccgcatctggcgaccgacggcctgccgatcaacgtggtctggctgaaaagccgccgggctcagccgaaggtcagcgccttgcttcaggcgctgatcgccggtttgacgccggagggacaggcttaa

SEQ ID NO: 426818 - DNA, 888 bp, Serratia marcescens
atgaagaacaagaagccccagatcctgatcaccggcgccaccggccagataggcggtgcgaccctgcgtcttttacaatcccaggcagagatcgagccggttgccgccgtgcgctctcccgccaaggcggcgcccttcgaaaaactgggtatccgcaccgtccagctcgattttgatcgggaagagacgctggcaccggcgctggccggcatcgagcgcgtatttctggccactggctacacggtggacatgctgcggcaaagcaaggtgtttctcgatcgcgcgcgccaggccggcgtgcggcatgtcgtgcacctcggcgcctgcggccgtgacgacaccaccgtcgcgcattgggcctggcaccagctcatcgagcgttacatcgagtggtcgggattttctttcacccacctgcggccggagtgctttatgcagaacctgctcaactacgacggcgtaccggcggtgaaaaacggcgtgatccggcaatataccggcgatgcgccgttcagctgggtggacggcgacgatgtagcgcaggcggcggcgctggcgctgctacaccccgagcggcacggcggccaaacctaccgcatgggctatgacgttaaatcctacggcgagatcgctgccatgatgacggaagagctggggcagccgttccgctatgaatcacaagatccgcaggtttttctggatgagatgcgcgcgacgggtgccgaaatggcctacatgagctgcgtctacgacaattttcgccgcatggcggctcgcgatatcccaggcgtcgatgaggttttcgataatttcccgcagatcgcgggcagagagccgatgcggctaagggcgtttatccgcaagcaccgtgacaagctggcctactga

SEQ ID NO: 426819 - DNA, 1536 bp, Serratia marcescens
gtgataaaaattgtcgtgtatctgattctcgccgtgacgatcgccattattgcggcaagagtcctctttcgtttgccggatatttcccagcgtctgccgcaggcggcgttgccggcggatcctgccgcccagttaccggcgcgggccgccgaactgatggcggcgcatcctggcctgagcggcgtggtgccgctggccagcgggcacgatgcgttcgccagccgcctggcgttggcgcggatggcggaaaggtcgatcgacgcccagtactacatctggcataacgacacctccgggcagatcctgctgaaaaccctgtatgacgccgcacaacgcggcgtgcgcgtgcggctgctgctggacgataacggcgtcgccatggacgagaccctggcggcgctgaacgcccaggaaaacgtcgagatccgcctgttcaacccatcaaccgtgcgcacgccgaagttggccggctacgcctttgactttatgcgcatgaatcggcgcatgcataacaagtcttacatcgtcgacggcgccgtggcgatcatcggcggccgcaacattggcgacgagtatttccaggtcggcgacgaaaactatttcctcgatctcgacgtgctgagcgtcggcagcgtagtggcagaaacggccgaggtgttcgatcgctactggaacagcgcgtcggtgttcggcgttgagcaaattatccggggcaaaggtaatctttctgccttcctgacgcaggccaccgcgaccgaaagcagcgaacgggcccgcaaattggcggtgcagctggaaaccagcgcggtgcgctttcgcgatggcgccgtccagccggaattcacccaggtagagctggtggccgacgatccggcgaaagggctgggcaaggcgtcgcgcgatcggttgatggtgacgcagctcggcaagatcatcggcggcgtcggccggcaactggatctggtttccgcctatttcgtgccggggcgggaaggggcgagcttctttgaatcgcttgccaaacaggggaagtccatacgcgtgctgaccaacgcgatgaacaccaccgacgtgctggtggtgcatgccggctacgccaaataccggcgtgagctgctgcaggcgggcgtcgaactgttcgagctgaagctgcgcgccggtcaaccgaccgggcgcaaggaactcaagccgctggggctgtccggcgcggcgctgcacgcgaaaaccttcgccatcgatgataagcgggtgtttatcggttcgttcaatttcgatccgcgctcggcgcacctgaactgcgaaatgggcttcttgatcgacagcccgacgctggcggccgacactcgccaactgtttgatggcccgctcgagtacgccgcctaccgcccggtattgacgcccgagggcaaaatggtgtggaaagaagccttcgaagacggccacaccgaggtgcatcagcaagagcccggcgccggctgggtaaaacgcattattctcaccgtggccggctggctgccgatcgagtggatgctgtaa

SEQ ID NO: 426820 - DNA, 168 bp, Serratia marcescens
atgatcctccatatagtgacgctgtcgcaagccacaccaggggccttatgcgaagaaactcactatttacaccaaaatttcatcgttctgcgtaaaacgcaggcgttgcgcatgcgctgcgcaatggcggctcgttgcgggggcgacgtggccgaaagtgatggatag

SEQ ID NO: 426821 - DNA, 1017 bp, Serratia marcescens
gtgtacgatctggcggataacctgctgggcgagcgcagcccgcagagcgacatcgacgcgcacctgccgctggcgccgattgtcgataaccgcctgacgcactggcaaaaactgttttaccgttacgacgcttggggcaacctgatcagccggcgcaacggcctgtatgaacagcactaccgctacgacgccgacaatcggctggtgcaggcgcagggcgagtttgacgcgcagtgtcattacgatgcgctgggccgccgcagccgcaaggcggttcgctacaagggcaaaaccgaacagacgacccgtttcctgtggcagggctaccggttgctgcaggagcagcgcgacgacggcagccgccgcagctggagctacgatccggccagcccgtggagcccgctggcggcgctggagcaggcgggtgacagccactcggcagatatttactggtatcacaccgatctgaacagcgcgccgctggaagtgaccgacgcagcgggcaacctgtgctggtccgggcaatacgacatttgttttcccgatccgaaatcaagattgtccagcttttttatttggaatgaaggtgatggtaagttcctatcctactcactgccaaaagggaaaatgccaagcgcttcgagtagcgatatttttaatttgcatgactattttcctgccagtctcggaattccaattttttcaaaaagagctaaggctgtatttgaacgcaaggtttcgtctgagatgttattctatgaatgtgcggtagaaaacgtaactgaaacgatgtttctgtgtaaagtgaataattatttttcaattattgatgaggaagcctcgacgttcagagaacttgaagatggaagcaagctcattgatgtgcctgcttacaagtgtgacagggagttctttattgctagggatagcatctattgtgaaagaataattgtctctcagcagtttgttgacctatgtaatgaagaacagctaaacataggctttgagcgttgctaa

SEQ ID NO: 426822 - DNA, 339 bp, Serratia marcescens
gtgagcaaggaattaaagcttgatgttatgaataacaaaaatgacttgattgaagggactttttgctactcgctttttgagcggtcgttctttgatgaaaagctattaagtgacttaataaataattcagaggcgtatttaaaagaaaacgaatatgataaggatattttaaatttgctatcatggattatcaatggtgttgatcagtgttttacatcccataatgataagaatgactattattcaattgaaaactattctgtgaatttggagaaaaaatggtgggaagtgtggcgacctgaaattaatgaaatagtgaatggtgataaaggttgttag

SEQ ID NO: 426823 - DNA, 240 bp, Serratia marcescens
atggataaaaatagtttaagttcggaatataaaatcaactttggggtggctaatgagtttagaaagtcgttagttgagcagattgagagaatacttttagaaagtgacgtaacgcttggggtccccattgaaagccgggtaaaagatcatgattctttattggaaaagttagaaagaaaagaaatcaccataaagaagattgctgatttagatgatctggttggtttgagagttaagtag

SEQ ID NO: 426824 - DNA, 4227 bp, Serratia marcescens
atgaccgaagcggctcgcgtcggcgataccatcgggcattcccatgccctggccggcatgattgccggcacgattgtcggcggcctgatcgccgccgcaggcgcggtggcggcgggtgcgctgttcgtcgccggcctggcggcttcctgtatcggcgtcggcgtgctgctcatcggcgccagtctggcggtggggtatctcaccggggaggcggccaccgcggcgcgcgacggcattgccgacgccggtgccggtagcctgacccccaaaggcaatatcgtcaccggctcccccaacgtcttcatcaacggcaaacccgccgcgctcgccaccaacagccaggtggcctgcagcgacgacggcccgagcatgcagatggcgcagggctccgacaaggtcagcatcaacggccagcccgcctcgcgcgtgggggacaaaaccaactgcgacgcgcaggtgatggaaggttcgcccaacgtgtttatcggcggcggcaccgtcaccaccttgccgatcaagcccgaagtgccggattggctgtacaaggtctctgacctgacgctgctgttcgccggcctggtgggcggcgtgggcggcgccgccggcaagctgggggcgctgggcaaactgctgggcaagctgcccggcatcaacaaactggcgcgcatcgcctgccgcgccggcaccctgatgaccgccaccgccgccgtcggcattatcgccaggccggtggatatcgtcagcggccagaaattcctcgacggcgaagacgatctcgatttcgtgctgccttcgcgcctgccggtcgcctggcagcgctattggcgcagcggcaaccccggcgacggcgtactgggccgcggctggaacctgttctgggagagcagcctgcagccgtatcaggacggcctggtgtggcgcgcgccttccggcgacttcgtcgctttccccagggtgccgcgcggccacaaaacctactgcgaagccgaaaaatgctggctgatgcacaacgacgacggcagctggcagctgtttgacgtcggcgaacagattttccattacccgccgctggcgggcgaccagccgagccggctcagcatgatcaccgacgccatcggcaacgccacctcgctgttttacgacgacgaagggttgctgagcgaactggtggacagcgccgggcagcgcctgatgtgccgctatgcgcagggccgcctgcgcgaagtggcgctgcaaaccgctgaaggcgaacggacgctggcgcgctacggctacgatgagcagggccaactgacgacggtgagcaaccgcgccggtgaggtaacgcgccgcttcggctggcgcgacggcctgatgatcagccaccaggacgccgccgggctgctgaacgaataccaatggcaagagatcgacggcgtgccgcgcgtgacggcctaccgcaacagcgccggagaatcgctggagttcggttatgacttcgccggcgggcgccgcagcgcggtgcgcggcgacggcaaacgggcggagtggcggctggatgacgacgacaacgtggcgcagtacaccgacttcgaccagcgccgctacggttttatctaccaacgcggcgaactgtgcagcgtgctgctgcccggcggcgcgcagcgccagagcgaatgggatccttacggccgcctgctgtcggagaccgatccgctcggccgcgtcactcgctatcaatattcgcgcaacagcggccggctgttcgccgtcgcgtacccggacggcagcagcgaagcgcagcactgggatacgctggggcgcccgacgcgctatgtcgatgcgctgggcaatgccacgctgtaccgctatccggatgacgaagagagcctgccggccggcgtgatcgacgcgctgggcggggaagtgaagctggagtgggacgcccgcggccagctgacgcgctacaccgactgttccggcagcgtgacagcttatacctacgatgcgctggggcaactgacggcgcagaccgatgccgaaggccaccagacgcgctacctatgggataacggcgggcgcctgcacaccctgatccacccggacggcggcgaagagcgctttaactggaatgcgcacggccagctggccgaacatcaggacgcgctgggcagcctgacccgctggcagtacaacgccctggggctgccggtcagcatcaccgatcgcatcaaccgcacccggcgctatcactacagcccgcagggctggctgacgcggctggagaacggcaacggcggcgaataccgcttcagctacgatgcggtgggccgcgtgctggccgaagagcgcccggacgacacccgccactattatcgctacggcgcggccgggctgctggaggagcaccgcgaggtcggcctgccgggcagcgcgggtgagctgacgcagcgcgaacagcgcttccgtttcgacgaggcggggcagttggtctggcgcggcaacgccagcgcggaatggcattaccgcttcgacgccatggggcggctgcgcgagctgaaccgcctgccgacggtgagcggcgcggcgctgggcatcgagccggacagcgtgcagatgcgctatgacgccgccgggcggctgctcggcgagcagggcgtgaacggcgagctgcaataccagtgggatgcgctggccaacctgcaggcgctgacgctgccgcagggcgatcgcctgcagtggctgtattacggctccggccacgccagcgccatcaaattcaaccagcaggtggtgagcgagttcacccgcgatcgcctgcaccgggaaaccggccgcagccagggcgcgctgcagcagcagcggcgttacgacgccatgggccgccgcagctggcagagcagcgccttcggccacgacaaactgacccggccggaagacggcgtgctgtggcgcgcttatcgctataccggccgcggcgagctggccggagtgagcgacgcgctgcgcggcgaagtgcactacggttacgacgccgaaggccgcctgctgcaacaccgcgagcccaatcagggcaaaccgggcgcacggctggtgtacgatctggcggataacctgctgggcgagcgcagcccacagagcgacatcgacgcgcacctgccgctggcgccgatcgccgataaccggctgacgcactggcaaaaactgttttaccgttacgacgcctggggcaacctgatcagccggcgcaacggcctgtacgaacagcactaccgctacgacgccgacaatcggctggtacaggcgcacggccgcggcccgcagggcgagttcgaggcgcagtatcattacgatgcgctgggccgccgcagccgcaaggcggtgcgctacaagggcaaaaccgaacagacgacccgttttctgtggcagggttaccggttgctgcaggagcagcgcgacgacggcagccgccgcagctggagctacgatccggccagcccgtggagcccactggcggcgctggagcaggcgggcgacagccgctcggcggatatttactggtatcacaccgatctgaacagcgcaccgctggaagtgaccgacgcggcgggtaacctgtgctggtccgggcaatacgacaccttcggcaagttgcagggccagacggtggccggcgcggcgaagcggcagggcgcgcaataccagcagccgctgcgctacgccgggcaatatcaggacgacgaaagcggcctgcactacaacctgttccgctactacgaacccgaggtggggcgtttcaccacgcaggatccgatagggctgcgcggcgggttgaacctttatcagtatgcgccgaacccgctgatgtgggtggatccgttggggttgagtacgtgtggtgctgaaaaaaataaaaaaaccacatatattggcaccagtagaagagatgcttttagacaagctaagcgtgatgcaaaaatcagtaataaccaacatccaaaaatagatcgggttgacttattggatggtaaaggtaataagatacttgatgctaatggagcacctatacaggtcaggcaatatcactatacaaatagagacggggttcctattgtaatccaagagcatagtcttggtcatacaaaggcaactgcattacatggggcagaaccacattttaatgtgaggcctatcgacaatttaaatacagggagtgttcccgggacgcatggccactacaatttttaa

SEQ ID NO: 426825 - DNA, 435 bp, Serratia marcescens
atgagccatacacgttacgaaaccgatgttgtcgcctgggcaaatgaacaggcagctcttttgcgctccgggaaattgtctgagatcgatattgaaaagatcgccgaggagattgaggacgtgggaaagagcgagcaaagggaacttgctagccggatgacggtgctgattgcacaattgcttaaatggaaatatcagccggccaggcgcggaaccagttgggagagaacgattaaagcgcagcgcaaagaggtgctttacagcttgaaagagtctcccagcctaaaaggcaaactgggcgatgctgattggctggatgtcgtctggtcgaaggccgttgcgctcgccacggccgaaatcgggctggatgtgtatccggaaaacggcatctgggaaactcagcagattctgtctcagacgttttacccggattaa

SEQ ID NO: 426826 - DNA, 1206 bp, Serratia marcescens
atgccactaaatgcacgacagattgatactgcaaaacccaaagaaaaagaatacaagctcactgacggtggcggcctgtatctgctggtaaagcctaacggtgcgaagtactggcgcttgaagtatcgttttttggggaaagagaaaaagctctctatcggtgtttatcctgatatctctctggccgacgctcgcctgaagcgtgaggaggctcggaagagcatcgctttaggcggtgatcccggagaagagaagaaagctgaaaagttagctaaaaaaaccaatgccgaaaatacctttaaagctattgctctggaatggcatggctacaagcggcccaactggtcgaaaggttatgctgacgatctgatggaggcgttcgagaacgatatcttccccgatattggtaagcgccctattgctgagatcaagcctcttgaagtgctcagtacgctgcgtaaactcgaaaagcgaggtgtgctcgataagctgcgtaaaatccgccaggcctgcaatcaggtgttccgctatgccattgtcaccggcagagccgaaacgaacccagcttcagaattggcgagcgcgctgactgcgcctaaatctacccattacccccatctgctagctgatgaactccctgatttcttacaagcccttgctgcgtattctggtagcccgatcacccgactggctactcgaattctgatgttgaccggtgttcgtaccgtcgaactccgccaggctgaatggaaagagtttgatttcgataagcgtgtttgggaggtcccagtcgagaggatgaagatgcgtcgcccgcatctggttccgctatccgatcaagttgtggcatcactccgtgaaattcagacggtgacgggccgttacaacctggtgttccctggccgtaacgacatcaccaagccaatgagcgaagcgagtatcaatcaggtacttaaaaggattggtttccacggaaaggcgacggggcacggttttcggcacacgatgagtactatcctgcatgaacagggctataacacggcttggatcgagttacaacttgcgcatgtagataagaacaccattcgtggcacgtacaaccatgcgcagtatttggagcagcgtagggagatgttgcagtggtatggggattacttggataaattagggcaggataccaatgacgtcatggtaaaaactgggtga

SEQ ID NO: 426827 - DNA, 1041 bp, Serratia marcescens
atgtctgcattaacccccgccagtgaagtcatgctgcgccacagtgatgaatttatcgaacgccgcgtgctgtttgccggcgacctgcaggacagcctgccggcccaattcgaggccgcggacgtgcgcgtccacactcagcaataccatcactggcagttactgaaccggacgatgggcgataacgtgcagttcggtttgaccgtcgatcccgctttcgtcgccgactgcgacacgctggtttactactggccgaagagtaagcaggaagcgcaattccagctgtgcaacatcctggcgctgctgccggtgggcgtagacgtgttcgtggtcggtgaaaaccgcagcggcgtgcgcagcgccgagccaacgctggaaggccacgttgcgctggtgaaaatcgacagcgcgcgccgctgcggcctgtatcacggccgcctggacgcacagaccgagttcggcctggacgactggtgggacagctatcagctgcacgatctggaagtgaaaacgctgccgggcgtgttcagccgcgacggcctggacgtcggcagctcgctgctgctgtcgacgctggaaaaacacatgaaaggcaaggtgctggacatcggctgcggcgccggcgtgatggcctcggtgatggccaagctgtcgccgaaggtgaaacttaccctcagcgacgtcaacgccgccgcggtggaatccagccgcgcgacgctggccgccaacggcatcgaaggcgaagtgatcgtcagcaacgtttactccgacatcaccggccgtttcgacatgatcatctccaacccgccgttccacgacgggctgcagaccagcctgaccgccgccgaaaccctgatccgcggcgcggtgaaacacctgccgatcggcggccggctgcgcatcgtcgccaacgccttcctgccgtacccggacattctggacgccaccttcggcagccacgaagtgctggcgcagaacggccgcttcaaggtgtatcaggccaccgtcggccgcccgccgcgcgcgccgaagaagaaataa

SEQ ID NO: 426828 - DNA, 1527 bp, Serratia marcescens
atgagtgaaccacggattatcgccaaagcgatgaaagacggaaaaccggagcaggatctggtgattttgccggcgttggccaaccgccacgggctgatcaccggggcaaccggcaccggcaagacggtgacgctgcaaaaaatggccgaacagttctcgcgcattggcgtgccggtgttcctggcggacgtgaagggcgatctgtccggcatcggcgccgagggcgtgccttccgagaaactgcaggcgcgcctggcggcgatcggcgtcagcgactggcagccgcaggcctgcaccattatcccgtgggatatttacggtgaaaaggggcacccgatccgcgccacgatttccgatctcgggccgctgctgctggggcgcctgttggatctgaacgaggtgcaaagcggcgtgctgcagctggtgttcaagatcgccgatgacaacgcgctgctgttgctggacatgaaggatttgcgcaccatgctgcagttcgtcggcgacaacgccaaacaattccagactcagtacggcaatatctctgccgcgtcgatcggcgctattcagcgcgggttgctgacgctggaagagcagggcgctgaccagttcttcggcgagccgatgctcgacatcaacgatctgatgaaaaccgacgccaacggccacggcgtgatcaacctgctggcggcggacaagctgatcaatcagccgaagctgtattcggtgttcctgctgtggctgctggctgagctgttcgagcacctgccggaagtgggcgaccctgaacagccgaagctggtgttcttcttcgatgaggcgcacctgctgttcaacgacgcgccggcggcgctgctgaccaagatcgaacaggtggtgcgcctgatccgctccaaaggcgtcggcatttactttgtcacccagaacccgctggacatcccggacagcgtgctgggccagctgggtaaccgcgtgcagcatgcgctgcgcgccttcacgccgcgcgatcagaaggcggtgaagacggcggcgcaaaccctgcgcgccaatccggccttcgatgccgaaacggcgatcaccgagctgggcgtgggtgaagcgctggtgtcattcctcgacgagaagggccggccgaacgtggtggagcgggcgatggtgatcgcgccggaatccaaaatgggcatgctcggcgcggaagggctgaacagtgcgatcaacaagtcgccgctgtatggccgctatgaggatatgatcgacagcgagtccgcctacgagaagctgtcgtcgggcggttttgccaccgtcggcaccccgcagcaggggcagcaaccgcaggcgcaacagcaacaacagcaggcgggcggcggcctgatggacggcttgagcgagctgttgttcggttccaccggcccgcgcggcggcaagcgcgacggcattgtccagaccgccgccaagagcatggcgcgcgatctcggccgccagatcctgcgcggcgtgctgggctcgatcaccggcggccgtaaaaagtaa

SEQ ID NO: 426829 - DNA, 279 bp, Serratia marcescens
gtgaaactgacatggacggaacccgccatcgccgatcgtctggcgatttatgaatggttggaacttaaaaatccggccgccgccgcagaaaatgatgcaaaaatcgctgacgcggcggcacgcctcgtgcatcatcccgccagcgggaaaacggggcggatagccggtacgcgcgagctggtcatctccccgtcctatttgctggtctatgaatgggcgactcaacgcgtcatcgtattggccatcgtgcatactcgccgtcggtggccgccggcatag

SEQ ID NO: 426830 - DNA, 1983 bp, Serratia marcescens
atgacggagctgactgccggcctcgccgcgccgctgggcgcgcattacgacggcgaaggcatcaactttaccctgtactcggcgcacgcagagcgggtggagctgtgcctgttcgacggccagcaacgcgaagtgcgcctgccgctgccggcgcgcagcggcgatatctggcatggctatttgccgggcggcaggccggggcaacgttacggttaccgggtctacggcccgttcgacccggcgaacgggcagcgtttcaaccccaacaagctggcgctcgatccggccgcgcgcgcggtggaggggccggtggcggatcacccgcacctgcacggcggttacgaacagcctgatccacacgacagcgccgagctgatgccgaaatgcgtggtggtggacgaacaatacgactggcaggacgatcgcccgcccgccacgccctgggggcagacggtgatttacgaagcgcacgtgcgcggcctgacgctgctgcacccgaagatcccgccggcgctgcgcggcagtttcgccgcgctggggcacccggtgatgatcgcccacttcaaacgcctcggcatcaccgcgctggaactgctgccggtgcagcaacatacctccgaaccgcgcctgcagcggctggggctgatcaactactggggctataacgtgctggcgccctatgcgccggacaaccgctacgccagcctgagcaccgacggcacgccgctgaacgaatttcgcgatgcggtcaaggcgctgcaccaagccggcattgaggtgatcctcgacgtggtgttcaaccacagcgccgagctggacagggacgggccgatgctgtcgctgagcggcatcgataaccagagctactactggctgacgccggaaggggactacgttaacgacaccggctgcggcaataccctgcggctcgatcagccgcagggcgtggcctgggtgatggattgcctgcgtttttgggtgcgggagtgccacgtcgacggcttccgcttcgatctgggcagcgtgctcggccgcacgccggggttcgatcgcgatgcgccgctgttccaggcgatgctggcggacgatgtgctgtcgcgctgcaagctgattgccgaaccctgggacgttggccccggcggctatcaggtaggggcgttccccggccgcttcgccgaatggaacgaccattaccgcgacgacatgcgccgtttctggctgcagagcggcgtgtcgctcggccagttcgcccggcgtttcgccgcctccagcgatctgtacaaccagcgcgggcgggcgccttacgccaccgtcaacatgctgaccgcccatgacggttttaccctgcaggacgtggtcagcttcaacgagaaacacaaccagccgaacggcgaaggcaaccgtgacggcagcgatcgcaatttcagcaacaaccacggcgtggaaggcctggtcgccgacgacgccattgtgcaacgccgcagggccagccagcgggcgatgctcgccacgctgttgctgtcccagggaacgccgatgctgctggccggcgatgaacagggacatagccagcaggggaacaacaacgcctattgtcaggacaacgccaccacctggctcgattgggccacggcggatgacgcgctgaccgattacgtcgcggcgctgatcgcgctgcgccgccagatccccgcgttgcaacaggaccgctggtggcagcaggacgacggcagcgtgcagtggctgaatgcgcaagggcagcctctcgacgcgcagcagtgggagcaaggcgatctgctcatgcagatcctgctgtcgcagcgctggctgctgctggtcaacgccacgccgcaaacggtggagatgaggttgccggaaggcgattggcaggttgtcgccccgttcactcaggaagactcacgggcggtgttacccgcctggcaccaggccgcgcgctcgctttgcgttctggtacggaaataa

SEQ ID NO: 426831 - DNA, 339 bp, Serratia marcescens
atgccccaggaaatacgttttaccgtcgcgccggcggcggaatggagcctgaaagacatcgagtcttataagagcggaacgataggagcagtcgcggccggggtgttcgtggacaatctgttgttatcgtccctcgcggcaattgccgacgatcctgcctgctaccgcttcaacgccgtgctggcgggcatggggggacggttgcacgagcgattggatcccgacagcgaataccgcgtcatctatgactacggcggccagacggtggagattctgcttttcatcagcatgaagcaggatctggaaagcgcgctctaccgctatttgttgctgcaataa

SEQ ID NO: 426832 - DNA, 270 bp, Serratia marcescens
atgacgactaccatgtcccaaaaagcggcgcgcgaaggattaggttcgcccgacctgtttgaaggcggggtttacgtcacaaaaaatggtgttgccgagctgtttgtacaaacggcggctgagagagaggccgaaattcgggaacgcaatctggagcgccagtccaacgcgttgttgaaactgactatgctggcgaagcaagagattaaaaatcagcgtggtctgtcgcccgaagaaaccttgcagcggctgcgtgacgcgcggaaatag

SEQ ID NO: 426833 - DNA, 852 bp, Serratia marcescens
atggataacaatcaccaaaaattcgattcacagtcgattgccaatcgggtcagggagctgtttttacattacgggattggaaaacgtcagcatgcccgcgagctcagccgcatcttggatctgagtttttcacatgcgcaccgcaaactgaaagggcaaagcccctggacgctggaacagatcaacagcgtcgcggccgcgttgggagaaacgccggcggcgatcgccgatttgagcgccgaacacgagaccaccgagccaaacatggcgctcgatgccatctttttcgtggcgggggtggcgatgccttgcgtcgggcacattggcgatgagcttcctgccgggcggccggcggaatttgtggcgctgcgcgtggaagggcagtggcgtatctatcgcgccgatgaggcaccggcaggcccgcgttacggcgtcgatctgatcgaaatccggcccggcttcggcgacgacgagcggctgagcatcgcggtattggacgattcgcatcaggcggccgatgagctggccaagtatctcggcggctgcggcttcaacgcggtggcgttttacgacgtcgacagtttttgccaggcattgcagcaaagcctgtttgacggctacgtggtggactggctgatcggtgaggaaacggcggatcgctgtatcgccaccattcgcgcctccgacaacccggacgcgccggtactggtgctgaccggcgaactgggcaccgaccgacgcgagtcggaaatcgctcaggcgatgcgcgagtacgacgtgctcggcccttatgaaaagccggtgcggctccatgtgatcgaagccgcactgcaacgctgttttaatctttag

SEQ ID NO: 426834 - DNA, 738 bp, Serratia marcescens
atgaataatccattagcctcattatcattatcattatcattagcgtggatgctttctggctgtaccagcccttatccgatctcggtagaaaaacctcggcccgcaccgtggtcggtcgcggcagaaaaaaaacctaagattgataacattaaaaaaatcgctttggtttatcgagaattatggcgagggaaatacataagtctttatcggaaaacctatgggtataatgaggtgggtttttttggtactctcgtcgctgtaatttctgccgcaagtggttcagtgacgactgcgatgtacagtggcggcattgctgttggcgataatattttttctggtcattataattatgcggcgcaaatctataattacaagacggctgcggcatcggctaattacatgtatgaagttatcaaccttttagaccagggtgttgtgttaattattgataataacaaggcatactatactgatgtgggaaattatctttaccaaaatctgggggatttggcatatgaattggaaatcaggctggcgggtgttgaattaatcacgcctaatcttgatgcaatggcggaggctattaaaaaagaacaacaaaacaaagcaaggttgttgggtgtcacaacgagtcaggggtataagttttacagtaaagaagataaagagttagctgtcgcctctgtgacgttgaaaataaaaatctgccgaattaatatgaccgacaaaccgtcataa

SEQ ID NO: 426835 - DNA, 315 bp, Serratia marcescens
atgatgtcttcctgcgccacgccggagaaatgggaagcgcaaacggcaaccccgacgcccctggaagcggccagagccagctgccggcaagcagccgaacagcgctatcccgtcagcctgtctttgcacgccagctcaccggccttctcctccatgactatcaacggcacggagatccccaacgccggtggcggcgcctttccctcggacagcaatgcaatgcgcagaacagaacacgttaatgcctgcatgaaattggaaggatgggaaaataaaaataaggtgacggggttattggcatttttatttaactaa

SEQ ID NO: 426836 - DNA, 1998 bp, Serratia marcescens
atgagtgagaaagacacccccctaaaaaatccgcaaagccatatcaacaaagcggtattcttcacctctgcagtcctcatttttcttctggtcgcgttcgccgcctttttccccgacgtcgctgacaagaacttcaaacttctgcagcaacaaatcttcaccaacgccagttggttttatattttggccgtggcgctgattttgctcagcgtgacgtttctggggctttcccgctacggcgacatcaaactcggccccgatcatgcgcaacccgattttcgctaccactcatggtttgccatgctgttttcagcggggatgggcatcggcctgatgttcttcggcgtggcagaaccggttatgcactatctttcgccgccggtcggcacgcccgagagcgtcgaggcggccaaacaggccatgcgcctgacctttttccactgggggctgcacgcctgggcgatctacgccatcgtggcgttgattctggccttcttcagctatcggcatggcctgccgttgaccctgcgctctgcgctttatccgatcatcggcgaccgcatttatggccctatcggccacgccgtcgatatcttcgcggtcatcggcaccgtattcggggtcgcgacctcgctgggttatggcgtgttgcaggtcaacgccgggcttaaccacctgtttggcgtgccgatcaacgaaaccgttcaggtgatattgatcgtggtgattaccgggctggccaccatttccgtggtttcagggctggagaaaggcatacgctttctgtcggagctgaatcttggcctggcgctgttgctcctggccttggtcttgctgttggggccaaccgttctgctgttgaaatcctttgtggaaaataccggcggctatctgtccgagctggtcagcaagacgttcaacctgtatgcctatgagccgaaatccagcaactggttaggcggatggacgctgctctattgggggtggtggctctcctggtcgcctttcgtcggtatgttcatcgcacgagtttcccgcggccgaaccatccgcgaatttgtcacgggcgtgctgttcgtcccggccggcttcaccctcatgtggatgacggtgttcggcaacagcgccatttacctcatcatggaaaagggcgcgacagacctcgccgctacggtacagcaagacgtggcgctggcgttgtttaacttcctggagcatttcccgttctccagcgtgctttcgtttatcgccatggcgatggttatcgtctttttcgtcacctccgccgattccggcgccatggtcgtggatacgctggcttcgggcggctccagcaacacgccggtctggcaacgcattttctgggcatcgctgatgggcatcgtcgccatcgccttgctgatcgccggggggctcagcgcgctgcaaaccgtcaccatcgccagcgcattgcctttctcggccatcttgctggtctccatctacggcttgcttaaggcactgcgtcgcgatctgaccaagcgcgacagccaaaatatggccaccatcgcccccaccgccgcccgcaaccccattccctggcagcgcaggctgcgcaatatcgcctatctgccaaaacgctcgctggttaagcgctttatggatgaggtcatccagcctgccatgacgctggtgcaggaagagctgagtaaacaaaacacgctcagcagcatcaacgccactgcggaagaccgcattcgtttcgaggtcgatttgggcgatgagcttaactttatctatgaagtcagactgcgcggctacagttcgccgacgttcgctctggccggactggataacgatgaacagcaagccgagcagcacaagtattatcgcgcggagatctacctgaaagaaggcggccagaactacgatgtcatgggctggaatcaggagcagttgatcaacgatattcttgaccagtacgagaaacacctgcatttcttgcatctggttcgctga

SEQ ID NO: 426837 - DNA, 756 bp, Serratia marcescens
atgatgcagagtcgtacggtatacaactaccgtagctgccgcgatgacagggccctgactcagaggataagagagattgcagcagcgcgagttcgctacggttgccagcgcattcatattcttttacgacggtcaggctggttaataaatcataagaaaacccaccggatttactgtctggaagggctgaatctgcggacaaaacggccccatcgacatgtcactgccagacatcggcgcgttcgtccggaagttagcgcggtagatcagtgctggagcatggattttgttgctgataatctgttcaacggccgccggatccgggcgctgactatagtcgataattttagtcgggaatgtctggctatccaggttggacaggggttacggggtaaggatgtagtggccgttatggagcgcctgaagcaaatgaagcgccgtgtccccctcaggttgcagacggacaatggcagcgaatttatcttcaaatctctggaccgatgggcgtatgaaaataaggtgacgatggacttctcacggcctggaaagcccacaaacaacgcactggtcgagtcatttaatggcagccttcgtgatgaatgtctgaatgtgcattggttcctgtcactggaagatgctcaggagaagatcgagtgctggcggcaggaatataaccagcaacgacctcattcatcattaaacaacctgacacctgaggaatttatccgaagtctgcaaaaatgcccggttctctga

SEQ ID NO: 426838 - DNA, 267 bp, Serratia marcescens
atgaaaaagacccgctataccgaagaacagatcgcttttgcgttgaaacaggccgaaaccggcaatcgggtggaagaagtgtgcagaaagatgggcatttctgaagccacgttttacaactggaagaaaaagtttggcgggatgggggtaacagaattgcgccgtctacgacagctggaggatgaaaatcagcggctccgtcgtctggtagcatacctcagtctggacaaggaaatgctccaggatgtcattcgaaaaaagttctga

SEQ ID NO: 426839 - DNA, 813 bp, Serratia marcescens
atgaaaggaatatgtaagctatgtcttgaagagaaggaactacaagagtcacacagtattccaagaagctatttcaaacggttaaagaaaaacgattcacaattgattttggtgcgaaaaggcagcaggccaaagcgagaaaacgttgaccctaaggagcctttgctgtgttttgagtgtgagcaatttattagtactgaatacgagtcatacggcattaggttgttgagaaatcatcataatataaggaaaaactctgatcatattataattaactcatttaattataagaggttctatctgtatttgcttagtatcctgtggcgtgcttcaatatcaaaaaatatacattactctactgttgtaggcgcgcctgagttagatgaacttatgcggtactgtgtaaaaaataacttgatcaggataaataagttaagccaatttaaggtggattacttcataaaaatatgcgtttttcggcttgttgatagtacgaataacattcgtgacgttgaacttaaagcggtgttaagtaatttctcttttagagaggtagagcaagttaacggattcttatggttctttgttgcggagggttttgctattttttatgtatttagtattggtgagaattataatgatgtcaggagaattcgattgaagtcacaactaaagagtggtagccatcagaagatatacaaaatagaaatttcccaagatgctctatttagagatattttcaatgatttgattgccgccgcaaagggtgattttgacaaaattgagagagagttgtatacgcgagtaaagtga

SEQ ID NO: 426840 - DNA, 567 bp, Serratia marcescens
atgggatggtggaaagatctaactaaagacagcgtatcgggcgtagttgtagctcttgttactggcggaggtggtttggctgcgattgtctggttatggagctacattaagtcgtgtttcctatggttgattaatgttctattttatccagtaactatgcctgtatgggcggtgattactgtatcgataatattgttgattacgctacctacggttggttacgttatacgccagaaacttgcatccggaaatctggagcaagaagatagttttttaaactatacgaatgatactatttttgggatgctggtttcatggcgttgggttagaggtatgggggggtattcgttagattcgcttaatatgaggtgtcctatttgctttgggatgttgagcgaacatgaaaataacatatatggtttgagtccgtacccattaataaaatgtacggctcatggttgtaattggaaaattgcacgtgattttgaacgtgtaagctatagggagatgcatgttaaaatggatcaagaaattgatcggcggtgttaccagatgtttaggagttag

SEQ ID NO: 426841 - DNA, 498 bp, Serratia marcescens
atgatcgttcgcttatccaaagcgctgctggtctgcgctatcgctttgttcgcttcgctggtggccttcggcaatatcaccgattacggctccaacttcgccttcgtgcgccacgtctttatgatggacaccattttccccgacgccaccatcggctaccgttcgatacaaacgccgtggctgcatcacgccggctatatcttcatcattgcgctggagagcctgaccgcgctgctgtgctggatcggcggcctgcgcttgctgtgcggcctgaaactgcccgctaaagctttcaacggcaggaaaaagctggcggtagtggggctgacgctgggcttcctcacctggcaggtcggctttatgtcgattgggggcgagtggtttggcatgtggatgtcgaaacagtggaacggcgtgcccgatgcgtttcgcttcttcgtcaccatcattctggtgctgatttatctggtgcagcgcgacggggagttggacgagtaa

SEQ ID NO: 426842 - DNA, 987 bp, Serratia marcescens; identical to SEQ ID NO: 426012

SEQ ID NO: 426843 - DNA, 234 bp, Serratia marcescens
atgcagactgacggttccccgctcgcgggcacctcgcggcggctgatatatacaggcgtggcggcgctgctcgttctgttgacgctgtcttttcgcggcgatgcgcagagccatagcgacaatggcccgcatgctgccggcttgcaacgggggcatcaggcagcgacgtcggacgcctacggctgcgtcaaagcgcggattaaaaagcagctgcgccgcctggctcagctttga

SEQ ID NO: 426844 - DNA, 660 bp, Serratia marcescens
gtgaacatactgttggtggaagacgacctgcaattaggcaaggcgctgtgccgcgcattggagctcaccggctttaatttgtgctgggtgcgcctgctcgcggacgcggaaaataaactttcacccggcgggttcgacctgatgctgttggatctcacgctgccggacggcgacggtttgcaaaagctgatcgcctggcgcgccgccgggcaaaatatccccatcatcatcctgaccgcccgcgaccgcatcgaaagcctggtgaacagcctggattccggcgcggacgactttctggccaaaccctttgcgctgcccgagctcatctcacgcgtcaaggcggtcaaccgacgcatggcgggcttcgcttcgcaaacctggagcctcggcacgctgtatctcgacccggtcaaccatcaggtgacgctggataacgaactgctgatgctgtcgaaaaaagagtatcacctgctgcacgagctgatgcgctgtgccggcacagtggtgcgcaaagcggtgttggaacagcggctgttcggccacggcgacagcgtggaaagcaactcgctggaagtgcacatgcataatttacggcgcaagatcggtaaagaaagaattattaccgtacgcggcattggttatttgctgaagaaagagtag

SEQ ID NO: 426845 - DNA, 1419 bp, Serratia marcescens
atgatcggtttcaaatccttctttatgcgcaccattattttccaggtcctggccattttattattgtgggggatcctcgtcgcctgggtgaaatattggtattaccccgacatggaaaaatatttcgataaccagcaacgcatcgtcgccgtgggtatcgccaatattctcgatgaaaccggcaccgacaatatcgattaccgcggcatcatcaagaccattgaaggcatgtacattgattccatcaataacggcatgcaggatcaaatcgattaccacccgctgttcgtggtttacgatcgggacaaccgggtgctttacagttcgcaaacgcagggagaaccgctgcgcctgccgccttcggtgctgtcgggctccgttaagtacgccggcgccaactggcatcttgccggcagctggagcgaaaagcgtcagtaccgggtgatcgtcggcgagtcgttcaacgatcgcaccacgctgttcggtaacccggcggaaagcactgccatgccgctgctgggcattctggcggcgatcatcatcaccttgctgtttaccgcctacttcagcctgcggccgctgcgccagatcgcccgcaccatctccgatcgccagccgggtaatctgtcgccgatcaacgtcagcgagcagtatcaggaaatccggccggtggtggtggaggtcaacaagctgatggcgcgcatcgacgccgccaaccagcgcgaaaaacgctttatggccgatgcggcgcacgaactgcgcacgccgatcgccgccgtgctggcgcagctgcatctgctgacccaggtcagcgagcagcaggagcgccgggagatcatcggcgacatgcagcaggggctagatcgcgcggcgtcgctgtcgcgccagttgatcaacctggccaagctggaggcggaagattttccgctgaaaatcgaggcggtggacatctacgcagagatcggaaaatgcatcgcgcagcacgtcccctatgcgctggaaaaggatgtggaactctcgctcgacggcagcgaggacgtggtggtaaccaccgatcgccatgcgctgatcgccatcttcaccaacctgctggacaacgcactcaagtacgcaccgcccggcagccgcatcgaagcccatatccgttcgctggcaccgctcggctgctatattacgttgcgcgacaacggccccggagtgagcgaagagcaccttccgcgcctgtttgaacgcttttaccgcgtgcccggcacgcagcagaccggcagcggactgggattggccatcgcccggaacctggccgataagatcggcgcgcagctgcgcgtcaccgaaggcctcgacgatcgcggcatcggttttattatcgatttgccggaaagttaccggccacagactgagagtgaacaacgatcatga

SEQ ID NO: 426846 - DNA, 1677 bp, Serratia marcescens
ttgcttgttaaacgttccgtgaccggcagcctggccagagcgctgttcggcatcgtgatactgtcggtgctcgccaccgggttggcgttgaccaccgtcgccggcagccagagcgatgccgaggcgatcaacattgccggttcgctgcgcatgcaaagctaccgcttggccttcgctctcgagcggcagagcccggagctggagctgcacctgcagcagtaccggcaatcgttgcaggcgcccgcgttgcaaaagctggcgcgcttttacgtcccggccgaggtgcgcaaccactatctggcgctgcaacgaacatggcaaacgatggagcggcagatccgcgacgggcaggcggccgcctaccgggctgaggtcgccggctacgtcaaccgcgtcgatcatttcgtttccgctctgcagcgttattccgagttgaaactcaccctggtggccgccgtcagcgtactgggctacgccgccatcatcggtctggtgctgttctgcatccgctttatgcgccgccaggtggtcacgccgctgcagcatctggtcgacgccagccagcgcgtgcaacagcgcgactttcgccatccgcagctggacgtggcgctgccgaacgaactcggcgtgctgtcgcaaaccttcagcgccatgtctgacgagctggcccggctctatcagtcgctggagctgaaagtgcaggaaaagacccggcgcctgcaacaggccaacgaaacgctggaggtgctgtatcgctgctcgcaggcgctgagcgtgcgccagatcgatcagcaggcgttcgaaaatgtgctgcgcatcgtgcgccaaagtgaacgactgcgctgcatccggttgaacgtggcggacgatcatggccagtggcaactgaacgaaggagagccggcgccggcgcaaacctggagcgcgctgccgatcacccaaggcgataaactgctgggcgagttgcgatggcagcccgaagcacagccgccgcatcctcacctgatgcagagcctggccaacatgctggggcgcggcgtctacttcaaccgggcgcaaaagcagcaccaatatctgctgttgatggaagagcgtggaaccatcgcacgcgagctgcacgattcgctggcgcagacgctgtcgttcctgcgcatccagctgacgctgctccggcgcgccgccgacgatccggcggcgcaggcgattatcgacgatttcgagcgcacgctggccgatgcctatcgccagctgagagaattgctggccaccttccgcctcaacattcaggaggcggatctgaatgccgcgctggagcaactgttgcagccattaaaggcgctaacccccgcgcggattcagttacactgtcggctgccctcgcaggcgctcaacgcccagcagcaggtgcacgcgctgcagatcgtgcgcgaggcggtgctcaatgccgtcaagcacgccggagcgaacgagatcgcggtatgttgcgaggtcaacgccgcaggcgacaacgtattcagcattaccgacgacggttgcggcatcgccagtctggaagaaccggaagggcattacggcttgaccatcatgagcgaacgcgcggcgcgactgggaggaacgctgcgcatccggcgcagaagcggcggcggcacggcggtctgcctgacattctcgccctga

SEQ ID NO: 426847 - DNA, 258 bp, Serratia marcescens
atgagggggagagcgcgggcacaaaaaagcccggtgaaccgggctttggggagggggtatacggaaatcgccgttgttagcgtgtttctgttactgctcgagaatcttttgtattgtctctacggaagcaccgtttctttcggccgtttgggccagttcttgcttttgtttgtctttttcagcgattgccatatctttggcggcggctatcgcggccaggaaaatttctttttccgtcgcggtgagcgggccttgtag

SEQ ID NO: 426848 - DNA, 261 bp, Serratia marcescens
atgaaaaaacttgccctgttgctcgctaacgcattggctgttgttgggctggctgtgctgacaataaagctttttcctgtacccaggctaaaccaggatcaaaccgcttggctgattgacgccagcgagtttttccattttaacgatacggaatggtttggtgcgctcatttttggcgcggtttatctgctggccgggtgtttggaatggctctttatccgccaggtttttcagcgggtgagctgcgggcaccgccactaa

SEQ ID NO: 426849 - DNA, 1782 bp, Serratia marcescens
atgaagtttttccagaatttacaaaatgatggcatctcctcacgcgcgcagatccgcctgctggacaacaccttcatgcggttggtgttcagcttcaccgccgtgcctttcgtcggcatcccgttcgccatctggatttatttgctgggggatgaactcggcccaaccattgcctggatcatggtttacctgctatgcgccgtggcgatcagaatatggcatcggcgctaccaacgcgaggccaaagaaaatgatgaagacgccgtgctgcgccgctggctgccgcgcattaataaggtggcgtttattcacggattggggatctcatcactctatttaattacgccgcagacccataactttgacttttttctgctgctcaatatcagcatcgccgcgatcgtcgccgccaacgcaacgcatctgacgccggttatcagcacctttacccgctttttcttcgcttcctgggggctgctgaacctcggcatcatctggcggctggaagacgtgatgttcatcgtgctgatgctgaacttgctgtacggcttcgccatttaccgccacgcgttaacctcgcatgcgttctttatccagcaggcgttgctcgaagaacaaagctcccgcctggcggaacagttccggcaagctaaagaggaggcggaacaggcgctgctggacaagaaccagttcctgaccaccgccagccacgatctgcgccagccggtgcacgccatgggctttctgatcgaagccatcatccacaagaaccgcgacgacagcctgacgccgcagctgctggatctgcaacagagcgtgcgttcggtgcatttgatgttcaattcgctgctcgatctcagcaagatcgagtccggcaacgtgcgcaccgccgccacccatgtggatatcggcgccctgctcgactcggtgatcaccctgttccgcgaagaggccaacagccgcgccctggcgctgcgcacctggcggcctaaacggcgcatcagcgtgatgggcgatccgctgctggtgcggcaatcgttgatcaacctgatccaaaacgccctgcgctacacgcaacggggcggcgtgctgatcgccatccgcccgcgcggcaccgagtgcctggtggaagtgtgggacaccggcgtgggcatcgccgacgaagagaaaagcaaaatcttctccccttactaccgccccgaactggcgtggaaaatcgacagcgccggccacgggctggggctggcggtggtggcgcgctgcgccaagctgatgaaggtgaagtacggcatgcactccgtcgaaggcaaaggttcgcgcttctggatgcgcttcacgcaatacatcggcgaagacaaagcgccggaaaccgcggccgcctacgacaacaccgccacgcccatccgctatgcgccgctgcgcggcgcctgcctggtggtggacgacgatcctttggtgacttcagcctgggagagcctgatgagcacctggggcatcaccgtgcgctgcgcggcctccgccgaggaagccttcgccatcgtcgacgacggttttacgccgttcgccgtgctgtgcgaccagcgcctgcgttccggcgagagcggtttcgacatcctgaaagcgctgttcgaacgcctgccggacgtgagcggcgcgatggtcagcggcgagttcaattcgcaaatattgcaagaggccgagcaggaaggctatctggtgctgcgcaagccgctggaaccggccaggctgcatgcgctgctgacccagtggggggccggctag

SEQ ID NO: 426850 - DNA, 153 bp, Serratia marcescens
atgaaagtagagagcatccactacgttatagaatcctatgagcagcaggagcgagataacgccattactctgctgaaattgctgacgctgtcagagaaggataaagcggaagggcgcgtgttctcgaaggaactgctgttggatgtgctttaa

SEQ ID NO: 426851 - DNA, 1770 bp, Serratia marcescens
atgagtgaagagtggattctccaggccaaggaaacgcgcaggttattttctaacgcggcgtgggttcctttgagagcgtcagttgagaacaagaaaggggatctaaaagaagtaggctatgtcagtgaatatttcggctgtggctctgttgcattcccgtcagagcatcgccagctagttgaggaacgtcttggatggagcgacataggtattgggcacacagtcgcgccttatgcatacaaagatggatattatacgtccattgaccaatatcaatacaacgataaagagccaataggtgtcaatctagtttatgaacacccgcaacctgttgttggtggtagaaaatggatactgagccctgatttggtagtcgcgctgcacttggttaaagaggagggcaactgggtcagacctgaagaaaatttcgttgtggtagctcgcgagacagtgagtgaagatggcgagcatcgtcagatagaaataaaaagagaatttttactcgactatctagcggctagaaatctgtcactccgcctttcatactaccgacagagggtagaaaacgtccccgtatttgaggacagcgcatattcaaatttgcagcctcacaatgaggaaagagataacggtaaattcaccctaatcgttcgcaagcttgatgacgtctttgggggaagctgggcgatgtttcgagcctggcgaacggacgtagatgagggtgaagacgcccctgtgatgggccctgagaatgactcgaacactgactatgaaagttcaaaggggcatcgtggaggctataaaggtgtacgggtagagggggagttttggcgtgaggaatggatagaccaccaatcaaaaagcctacgcgttcgtggagatgcagatccgaacctcccgcaattcatcgtggaaaccgatggaacgcgaatgagatcagcagagcttgataacgaggacataggccgctggctatggtttcgggtcagcgtcgtgaatgagcttctcaatagtcgaggatttaagttggcgtggtacacggctgaaactggagctattagttccacatcaggatataaaacgcatttcgggataaacagttcggatcttatcaccgtatatgcttatgacatcgcacgactcgccccatgggagcagcatgtttgggcggggcataatgtagctcctgaaggaaaggtttcaagtgagttgttggacgcgcaggtgaggacgaaaccggcatccacatatgcggttgaagaaatgttttttggaagcatgaggcttttggaagacggcttcaggcataaatacgaaatatcgctgttcacccatgatattgatgactccgaagtagggcagcaaatatctaggtttgcaagcaaagacagagcgaccctactcagattagccaaggacatcattcgcgtattctcggacaggctcaacgtaaccgagctacgcaagctttctacacaccaagagaaagccaagctcggctcaaacaagttactccaaagtattttggctgagaaaataggagacgacaaagccaagagagtatttgctgagattgccggtgcttatgatatgcgagtgggagatgcacaccctacaggctcaaagataacagacgcgatcaagctcgcgggcgttgatgaagaagactcgccattgcgtcagggagagcagctcattcacaacgttgggcgatcgatttggtacacagggaaattcttgttcggcgagactgatgagtcggacgagtag

SEQ ID NO: 426852 - DNA, 216 bp, Serratia marcescens
atggtgttttctagaggaaatctgaccatgctgaccgataccaagctgcgtaacatcaagccgaaagacaagctctacaaagtgaacaatcgtgacggcctctatgtagccatcacgcctgcggggtcgatttcattccgctacaactactcgatccacggcaggcaggagactatcaagcgaaggccattgcttaatcccagcatgctttcatga

SEQ ID NO: 426853 - DNA, 228 bp, Serratia marcescens
atggccaatagacgtattttagacccgctttgtaatatgatggcgctaacgttgagcatgttacttgtctcgttctcctcgctaagtgttatttcatacggagaacatttggtagatgcggtcatcgcggtttttacttattttggtatcagaagctgctgcctgatgtgtgtaagtttattccattggttccacggcggaaataaccgtattcatcttgataaataa

SEQ ID NO: 426854 - DNA, 879 bp, Serratia marcescens
atgaaatacgcactggggccggtgctctactactggccgaaaaacgacatcgcggcgttctatcagcaggcggcagagagcagcgccgacatcatttacctcggcgagagcgtctgcaccaagcggcgcgagatgaaggtcggcgattggctggcgctggcgcgcgaaatcgcccgcagcggcaagcaggtggtgatctccacgctggcgctgctgcaggcgccgtccgagctgaatgagctgaaacgctatgtggagaacggcgagttcctgtttgaagccaacgatctgggcgcggtgaacatggcggcggagcgcggcttgccgttcatcgccggccatgcgctgaactgctacaacgcctataccctgcgcctgctgcgccgccagggcatgatgcgctggtgcatgccggtcgagctgtcgcgcgactggctggccaacctgctgacgcagtgcgacgagctgggcttccgccatgatttcgaggtggaggtgctgagctacggccacctgccgctggcctattcggcgcgctgcttcaccgcccgctcggagaaccgcggcaaggacgagtgcgaaacctgctgcatcaagtatccgcagggccgcatgatgcgctcgcaggagcaacaacaggtgttcgtgctcaacggcattcagaccatgagcggctactgctacaacctcggcaacgagctgccgagcatgcaggggctggtggacatcgtgcggctgtcgccgcagggcgccgagacgctggcgcaaatcgatgccttccgcgccaacgaacgcggcgaaaagccgctggccttgaccgatcacgccgactgcaacggctactggcgccgcgtggcgggattggagttggtgtcttag

SEQ ID NO: 426855 - DNA, 783 bp, Serratia marcescens
atgcaactgacctttctcggcaccggcggcgcgcagcaggtgccggtgttcggctgcgactgcctgatctgccaacgggcgcggcgcgagccggcatttcggcggcgagcgtgcagcgccatgcttaactatcagggggaaacgaccttattggatgcgggattgccggctttggagcggcgattttcggcggggcaaattcaacgttttttactgacacattaccacatggatcacgtccaggggttatttcctttgcgttgggggtgcggaaattccattccggtgtatggcccgccggatgaacagggctgcgacgacctattcaaacaccccggcattctggcgtttcagccgccgctggcgccctttgccaccgtcgagctgggcggcatgcgcatcaccccgctgccgctgcaacactccaaactgacccacggctatctgatccaggcggcaggcgcttcgctggcctacctgaccgacaccgtcggcctgccgccggccaccgtcgactatctgcaaaacgtggcgctggatctgctggtgctcgattgcagcctgccgccgcagccgcaggcgccgcgcaaccacaatgacctgacccgcgcgcaggagacgcagcggttgctgcagcccaaacgcacgctgctgacgcacatcagccatcatctcgatcggtggctgctggacaacgaactgcccgccgggctggagctggcgttcgatcacctcagcgtcagcctcggtagcagtgcagccgatccgactccagcaccctga

SEQ ID NO: 426856 - DNA, 192 bp, Serratia marcescens
atggaacagcggaataaacctgaaatggacgtagaggcgatgttgctggagcaagcgttacgtgaaagagtggatgttgccctttcacgcttaagaaacggcaccgcggtttatctcagccattcggaggtagaaaaacgaatggctctattcaaggtgaaaatcagggagcgttatcggcgagcgtgttga

SEQ ID NO: 426857 - DNA, 1086 bp, Serratia marcescens
atgctgtttacttacacttatgtaccacatcaaatggagaggatgcagcgatttgttaatttcattttctatcaagtgtggtgtaggtcgaggaaagcaggggaatatgacttggctctatttgatgctaatccgcctctaaaagagataatgacctcttttgcatatggtgatactgaggctggtgatcgtttttcaagtcaagttcaagctatttataaaagtttctccgagctctcgcgagagcaaatagctcagtttaaacggtggtaccaaggtaataataatctggaaaaggtatgtgccaatacgccgaatactcaactagtccgttacgctgacatcgcggtgaaccataaaaagctgtcagatcaactcggtacgtttttcaaaggattatactcgcagtcattgctggatctcgcttctttgcgggccaaaattggtgatattgacgatcattacaagaacttcgtgcaaattaataaagttgggaaatgcccgttttgtggtatcagtgacttacttggcgaataccatactaaacgcgaagcttacgaccattatctgcctaaggcattgtatccttttaactctataaactttcgtaatctcgtgcctacctgccactactgcaatagtagctataagactagtaagaaccctgtctacatgccacaagaccctgcaggagctgttcgtcgtcgcgcggttttctatccatataaatctgtgactcattccatcgagttacaagttacactgcaaacttcagacatagaaaacttagaacctaacgatatcgccctgcaatttggtccagataccgttgcggaagaaatcgatacatggaaggaaatttacggtattgaagaacgctacaaagctaaattctgcgggggaaatggtggaaagtactggctagtgcaagtgcttgacgaatggaaagaggatggcaaaaatccttctgattttcttagaactttggcgcggcagactctgagtcgaccatacgccgattgcaattttcttaggaaaccttttcttgatgcatgtgaggctcgaggtctttttcgtaatttatag

SEQ ID NO: 426858 - DNA, 1785 bp, Serratia marcescens
atgaaactactacgtctgaagatcaccgacccggcaggctttcgcagcctgccctgcggttttgaacaccattttcgcaccgaatggaacttgcaggatgaactcgcaaaagctgaccactttgcccccttcgtctgcgccggaccaaatggcagcggcaaatccaacttgcttgaagtcctggcggcaatcttctttcaactggaaattctgcgtgtgcgccggagttttcttcctgaagcattgcaagatgagaccttggatctttcccccatttcctttgagctagattatttgattcgagtccttcctgaataccgtagctctaacagtcccgaatgggcaaaagtgcatgtttggaaaaatgctggtgaatcggtgcgctttctttgggaaaaccaaagtgactttggtacggacataaatgaaccattcactagtagccatatagacacgctgttgcctcagtacgtgcttggttactcttcaggcgagaacgaaatccttagtcttcctttttttaagatgcgttttgtacagtttgatgagtactacaacgcacttacccagcaacttccatatcccggtcacccagaaaccagacttgcatatcttgataacggattcagccaagccatcttgctgtgcaacctgctgtttctcgatgaggataatttgcgacctttccgcgaggatgtgggaattgaagggctgcaggaattccgcattatcgttcgtcgaagcattggactgcggacagaacaacttactgcttttgccagtgaagatgaaaatcaataccaatcacctgaagacatagtcaataataatcccgctctacaggtccatatcgacgaacagggagtactcaattaccgtctaaatattctccatttacttgaaggcgacgaaagatcttcattaatggttaacgccttacagcggtgcgctaccttgagttatgtcgatgatgccactgatacgctaattttagattaccgagttaatgaggcaactaagaaagctttccgtgaaaactttgacggttcaccattagttctattccaggcgtttcaggtgttgttagctcttaacctgtatgttgtaagtgatacgcttaagtctgatttgtacacttcaaccagccactatgttagtgaaacagtaccgacgctagcatctgatgagcgaatcatgcgctttaaacatttctatttcaggaaaataggggtcgagaagccgatgcttctcaaagagctatcggatggcgaacaccagttattgcatagccttggtttgtgtgtgctatttcgtgacactaactgcctgtttctgctagatgagcctgaaacccactttaacccaaattggcgagccagttttatcacccgcttgcgtcagtgcttacctgatcaaaaatatgtggcgcaagaaatgttgatcacaacccacacaccgtttctgatttcagatagtaagccagacaaggttttggtattcagcaaagatgaagcaactggtgttgtcagcatcaatcccccgggctacaacacactgggtgcttctatcaacaagatcacgatgaacacttttggcaaacgtgaaactattggtggctatgcacaaaccctgctcgaagatttgcgaagacgttttgaggagggtggagaggatcgggaagctcttattaccgaaattcagcagcaattaggtgactcggtagaaaaactattgttgatcaaaacaattcttgaccaaaatgcacaaggtagcgagaaggagtaa

SEQ ID NO: 426859 - DNA, 1542 bp, Serratia marcescens
atgaaaaaatcgaaacttagagatttattcgattacctgccaaaatcaaaaatcaaggctggtgatggattggacaatggtccttacccattctatacatctagcggaaatcagactaaatatctcgatgactaccagcatgaggcaggctgtttgatttttggtacagggggtaaggctagtgtgcacttcgcaacaaagcggtttgcaacgtctaccgattgtattgctattcgtccaaaacataatgctcatattgatgccagttatgcctatcaatattttaagagcaacatgcaagtgcttgaaaatgggtttaaaggagctggattaaaacatatctccaaaggttatttatcagaaatacaaataccacatcctgagagttctaccgaccaaatccgcattgcgcatctgctcggtaaagtggaaaggctcatctcccagcgcaaacaaagtctgcaacaactcgacgaactgatcaataatgtatttttggatatgtttggcgatccggtgattaatgagaatgggtgggaaaagcctgaattcttgacgattatttcaaacatgcgcaatgggctatcgccatcaaaagcgggtaaatataaaggacgcgtttacacactgtccgcgatcacaggggactccttccgagaaatattcaaggaagacattttttcacaaattcatcaaaaatattacccgacgtcgaatgattttcttttgtgtcggggcaacggaaacttaagcctagtaggaaaaggatacttcttcccgtcagtatcaaccgacgtgattttccctgacacgattattgcggtttcaattcaacctgaagctattaacagagaattttttgaaactctatggagaactaagttcatacggcaacaaattgagagtaatgcaagaaccaccaatggggcacacaaagttaatcaaagcgtcattgaaaatataaaaattatccggccacccatggacctccaagacgaattcgccaccattgtcaaaaaaattgaatctatcaggcctctctaccagcaaagtctcactgacttggagagcctttacggtgcattgagccaacaagcatttaatggtgagctggatctatcgcaagtgccgatgccaataccacctactcaagatgtcactactatttaccaaggagagcaagacaccatgcctgcctctgttgtaaaaaccgtgcctgccatgcatttgcccgataccgataatctgttggctgccttggaaaatgctgagtcttgcaagacattgattacagaatggctggaagcctattgtacgcaacttgctgacacaccattttcgttacaacaatttatggagcttgcacagagtcggctggcagagattcatccagacaacgactatgtgctgggtacaagcgactttgaacatatcaaagattgggtattcgaggcgctgacgaccggcaaactgtcccaggtgtttgacgatgcaggcaattgtattgaacttaagtccgctatcgagcaaagtctgacatga

SEQ ID NO: 426860 - DNA, 1665 bp, Serratia marcescens
atgttacagaacaaccctgaactaaaatctaaaatcgacctgctttggaacaaattctggagcggtggcatcagcaatccgcttactgccatagagcaaattacctacctgctgttcatgaaacggcttgatgagttggatcaaaaacggcaggccgatgctgagtggacgaatgaagaatacacctccaggtttgaaggcacttggattccgcccgaggagcgcaactggcctgtgacggaacagcgtcccattgacaaacgtacgctgcgttggagtgaatttaagcgtatgcaggctgaggagatgctgcagcacgtacagggcaaggtatttcccttcctgaaagacctgaacggtgcggagtccaatttcactcaccacatgaaaaacgccgtgttcatcatccccaaaccggcgctgttggtagaggcagtgaagaccatcgacgacatctttgcggtgatggaaaaggactcacaagagcatgggcaggccttccaggacatccagggcgatgtttatgaaatgctgctttcggaaatcgctaccgcaggcaagaacggtcagttccgcactcctcgacacatcatcaagatgatggccgagctggtgcagccgcaactgggtcaccgcattatcgatccggcctgcggcactggcggatttctgctgggtgcctatcaatatatcgttactcagttggctatcaacgccggtacgaggaaccttgtacccgatgaagatggttttatccgcacttcagttgccgcaacattcgatgaaaagcgccaattcgtcctgcaagaaagcctatacggctacgatatcgatgccaccatggtgcgcttggggttgatgaacctgatgatgcacggtatcgatgagcccaatattgactatcaggacactcttagcaaaagctacaacgaagaatccgcctacgacatcgtgctagccaacccaccctttaccggcagcatcgacaagggcgacatcaacgaagccttgcaactggccactactaagaccgagttgctgtttgtcgaaaacatctatcgattgctgaaaaaaggtggcaccgcctgcgtgatcgtaccgcagggcgtgctgttcggctcagccaaagccttcagggatttgcgacaaaccttggtggaacgttgcgatcttaaagctatcatcactctgcctagcggcgtgttcaaaccctacgccggagtcagcaccgctattttattgttcaccaaggtctggggagcaaaagacaagattacaaaaccagctaccgaacacgtctggttttatgaaacggttgccgatggctactcgctggacgataaacgtattaagcaggaaggttatggcgacctgcaagatatcatcaccaagtaccacacccgcgatgcggaggtcaacaccgaccgaaccgctaagagtttcatggtaccgtacagcgagattgcggatgagaagaacaaatttgacctctccctgtcgcgctataaggaagatgtatttgaggaggtgcagtacgataaaccagccgtaattttggaacgactgattcaggccgaagtaggcgatatggatgaagctgcgctgaccaatgtgcaaagcggcattgtccgggagttgttgaagctaaaggggatggtgggatga

SEQ ID NO: 426861 - DNA, 2799 bp, Serratia marcescens
atgcaaagttctgagaaagaaactcggattgcttttatcgatagccaattgtgcattgctgggtgggatgtacaagatccaaccaaggttgtgcaagaattcgatatcctcactaatcaatcagaaggtgtagctgaacctcaccaggagtatggtgggcaccagtacagtgactatgtgctcttagggaaagatggcaaaccacttgctgtagtcgaagctaagcgcactagtaaagatgcagctctgggccgtgagcaagcgaagcagtattgctacaacatccagaagcaattgggtggtgagctacccttctgcttttacaccaatgggcacgaactttatttctgggatctagaaaacgcaccgccgcgtcaggtcttaggtttccccacgcgagacgatttggaacgctttgcatacatccgtcgtaatcagaagccgttgacgcaggaattcattaacacctcaattgctggtcgtgactaccagattcgtgctattcgttcggtgcttgaaggtattgaacaaaaaaggcgtgactttcttctggttatggccactggcacaggcaaaacgcgcacttgcattgccatggttgatgctttgatgcgtggcggacatgctgaaagggtactatttctcgtggatcgcatcgctttgcgtgagcaagcattggcagctttcaaagagcacttgccgaatgaaccgcgctggccaaatgtgggtgaaaagctgattgctacagaccgtcgcatatacgtcgcgacctacccgacaatgctaaacatcatccgggatgatatgcagcacctgtcgccgcacttcttcgatttcatcgtcgttgatgaaagccatcgctcgatctataacaccttcggcgaagtactcgattattttaaagccatcacattggggctgactgccacgccaactgatattatcgaccacaataccttccagctatttcactgcgaagacggtattcccacgttcgcttatacctatgaagaggctgtaaaccacgtgccgccttatctctgcaattttcaggttatgaagattcagaccaaattccagatggaaggcatcagcaaacgcactatttcgttggaagaccagaaaaagctgatcctgcaaggcaaggatgtcgaagacatcaactttgagggaacccagcttgaaaagcaggtgattaacaagggtaccaataccctgatcgtccgcgagttcatggaagaggcaattaaagatgccaacggagttttgcccggtaaaactatctttttttgcgccaccaaggcccacgcccggcgtatggaagatattttcgataagctctatccgcaataccacggagaactggctaaggtgctggtatcggaagacccacgtgtctatggcaaaggtggccttctcgatcagttcactaacaatgatatgccgcgcattgccatcagcgtggatatgctagacactggtattgatgtacgtgaaatcgtcaaccttgtgttcgccaaaccagtctattcctacaccaagttttggcagatggtcgggcggggcacgcgcctgctggaaaccagcaaactcaagccttggtgccttgaaaaggatatgttcctgatcctcgactgctgggacaacttcgaatacttcaagctcaacccaaaaggcaaagaactcaaaccgcaattgccattgccagtgcgttttttcggcctgcggcttgacaagatcgagaaggcttatgaccgtggtcatgccgatattgccagtcgtgaaattgccaaggttcgtgtgcagattgcagcgttgcctaaagagtcggtcgtaatcaaggaggctgtcgcagctctggcgcgactggaggatgacaacttctggattaatctcagccacgaccgactggaattcttacgtgctgaaatcaaacctcttttccgtactgtttctgaggtcgacttcaaggccatgcgctttgagcgcgacctgctcgaattttcgctggctgtgctcgatgaaaacaaagaacaagccgaaacgctcaaagaaggcatcgtcgagcagatcagtgaattaccgctgtcagttagcttcgtacaacaagaagaggccttgatccgcacggcacaaactaatcattactgggccaaagccgatgaggatgcgttcgatgttatagtcgctaggctcggccctttgatgaagttccgtgaaaaatccagaggcgaggagcaaactcagcttgatttggccgatgagctttataagaaagaatgggtggaattcgggccgcagcacgaagccgtcagcattacccgttaccgtgaaatggtcgaaactttgattgccgagctgaccgagcacaatccggtgctacagaaaatcaagaacggtgatgcggttagtagtcaggaagccaatgaactggctgagctgctgcatgaagagcatccgcacattactgaagacctgctgcgtcaagtctataagaaccgcaaggcacgtttcgttcagttcatccgccatatcctcggcatcgaagtgctcaaaagctttcctgatgaggttagtgcagccatcgaccagtttatccgtgtccacactacgctcagcagccgacagatggagttccttgaactattgaagaacttcattgttgatcgcgaaagggtggagaagaaagacttaattaacgccccctttacggtcatccatccaaaaggcatccgcggcgtgttcagcccggctgaaatccaagagatcttacagcttaccgaacggttagctgcctaa

SEQ ID NO: 426862 - DNA, 921 bp, Serratia marcescens
atggctggacagagaaatccagacgacactcgtaataaattggttagaagttatataaaaatactctcacaagtaaagcctaagtattttgtaatggagaatgttttaggtatattatcagcaaagtttactgaatatgatggggttgatcgggcttataataatgagcttgttgtaaatgtattgctatctgaatttaagagtataggttatagcaatgttgaagtaaaaacactcgatgctagtgactttggagtacctcaaagaaggtatagggtgatatttttggggactagggatgatgtttctgtgaaagtgaagcatccagagccacttttaacaaataaaatatctgcaagcgaagctatcgatgatttaacagacatatcttatggggaatctgtttttgattataataaagaaactaactctgcatatcaaatagaatcaagaacaggtagaacaaaatcagtctctagtatttcaatgcaaggcgctatgctgatgaatcatcagacaagtatacacaacgaacttgtgattgaaaggttttcgcttttaaaagaaggcgaaacagtgcggtcattattaaatagattattgccaagtaaaaaaaaccagctaaatactaagaagcaaaattgcaaaaaaatagtcagaagcatcccatcgcccactgttttgacactgccggatgatcttgtccattattcaaagagtagaatactgacagtaagggaaatggcaagattgcaatcatttgatgatagctttgagtttttagggaaaaggactactggcggttctttaaggaaacatgagactccgcaatatacattggttggcaatgctgttccgccattgcttgcaaaggcaattgctaaagagattatggatgcattgttagaattagaggattag

SEQ ID NO: 426863 - DNA, 2139 bp, Serratia marcescens
atggaaaaattacacttcaaaactagctctggtattaagaatattcttggtcgagatctgattacagatcgttttgttgcagtatttgaattagtcaaaaactcttatgatgcaaatgctacgagggttgatgttctttttataaatgatggtgtagagaatagaataataatcaaagatgatggggttggaatgaataaggatgacctcattaacaagtggttgtttatagcttattcagaaaaaaaagaggggcatgaaaataaaagtgaccgtgcttttgtcggctcaaaaggtattggtcgtttatcttgtgatagtttaggtgaataccttactataaaaacaaaaaagaaaaatagcaatatagttcataaccttaaagtgaattggaatgacttcgaagagtccttggagaaaaaaattgaggatgtgaatgtaacttattcatttgagaacacatcagaactagaaagtaactttactgaattgattatttcggggctacgtcatagctggaatagtgaaagtgacattcagaaaacaaaaagaaagctcgagaggttaaagaatccttttgtctctgataataattttaacatctattgtaaaagaaatttgtccgagcctgatggtgattcaattattaaaaataatatatctgaaatactcgaggggaaaacaatatctataaaggcaactatcgatgacctaattgtcattgaactttatgatagggggaatgtaatatataaaatatccaaggaaaatgatgttttccctgaagcaaaacttagtatagtggttcattacttaaatacaagtgcaaaaaatcagtttaagagaaaaatgggggttgaggctgtaaattatggaaacatatttgtatataaaaatggatttagggttaatccctatggtgaaaaagaggaggatttatttggcataaatgtcagaaagtcacaggggtacaaccgaaatttaggtacaagagaaataatcgggtatatatctatcaaggatacgcataatctttttaaggaaagttcctccagagataatggttttattcataacttttattttaatcaattacaagatttttataaaaaacaaattcattttcctttggagaaatatatattatttgttaaatggggggaggtttcaggcactggagaggctatatcttttgatgatcaaagcagtaatgaaatacaaaagttcaaaaagtcacttgttagatctaataagggatttgccatagactatttttacgataatataaatgttgatgaaataaccccagaaaagcaattgttgagaatctcgagcacccttcaagatgaaaataggaaaataataaatgatgtagcaaagaaaataacagagattaaggttgagaacgctcaaaaagaggaggtaattaaaagaaaatctgaggaaattagggttattgagcagagaaataaaaaccttatgcagagtaggcctgatacttcgtatggggagcaagttgcacatcactttattaagatggcacaggcattaaattatagtgtaaagtcacttgtgtcctttaagacgcttgttcctgacgacaagcatgacttatatataaaaacaataaataagataaagaaaactgagatggaattaactttgtttagagagcttttattaaaaacacaatatgatatgcgctcagcacaaagtgttaatttatatgccttatcaaaatggtatttttcggaaagaaatacatctgatgatttcaaggtaatatgtcatgttgttgatggtgtatcggaaaattcttgggatatggagtgcaaagtattagacttcgtaatgttgttagaaaatttttacaataatgctagagagcatggcgctagatatatagagtttttgttctataacgataatattacgataactagtgactcgaagccaatagtcgactctttaaaagataagattttcgaaattggaatttcaacaaaggaaaatggaactgggatagggttatatcaaatacgtcagttttgtaagaaaaataatttaataataacagttgaaaacactaatggatgtgttgttttcaatattaataaggataaaaattatgaggcttga

SEQ ID NO: 426864 - DNA, 843 bp, Serratia marcescens
atgaggcttgatttcaatgttctactgattgatgatgagattaatgacgatgatgaaaatgagcagttaattgagctacagaaagctatcactgatcacgtaggtaaaaaagggttcaaagctgttataaaacccgttgaaagtattcaacaagcaaatgttgaccgtagtaatagaattgatatatttatcagtgataataatttgcatggaaaagaaaatggtattgatttctatttggcagtaagtgatgactatatatgtgaatttgttttatacactaggtcgagcacagacgaaatcattaagaagctttctgataaactaattgagggtaagaatcctaatttattctctaggttttcatttgcagagagaagaaatgacgaagagtggttcaatcatataaaaaaaataatagatcatattttgtctcgtcgtgaggaaattaataatttcagagggttatatgcacagttgacgtcaagaatgcataagaaacttcaggataaatatggtatatacaagcttaatttttgtgaaaccataaatagagttagagaggaagggaggatgtctgacgattcattatatagttctcttcataggattagaatgattaggaatagtttgatgcataaagatgaggttttttgtgataaaaaaggaatatttaagattgtatgtgatcttcatttaaataaatttacaaataaaatcataactggtgaaaattttgataggaatacaatgaaggtaaaggatttaattatatatgaaaatgagctaaaaatatacagagacgaaataaattcagtttacagtaaagttatggcaatgtga

SEQ ID NO: 426865 - DNA, 768 bp, Serratia marcescens
atggctgccgcaaaactttggactagggaagaattactactcgctttcactctgtatagtcagattccgttcggcaaacttcattcgagaaatcccgaaataatccactatgcaaaattgatcggacgcacgccgtcagcactcgcaatgaagctggttaacttagctagcttggatccgtacatcatcgaatctggtcgcagcggtttgaaaggggcctccaaggccgatcgcgagctgtggaaagaaatgagccaagatatggatttgttcaatcagcaatgccaaacggcaatggaacacctggaaaaaccaacaacaactgagtttgatgaagaaccaaaagatttcagtggcagagataaattctctacagtcaaaacacgtgtagaccaaaacctgtttcgcaaaaatgtattggaagcttacgaatatcgttgctgcataaccggattagaagaaccagcattactcgttgctagccatatcctgccttggagccactcaatcgaacaacgccttaaccctagtaacgggttgtgtctatccagtttgcacgataaggcttttgaccgtgggttaattacctttaatgaaaattttgagttggtattatcgccacaactcaaaaaattaaaaagtagcatttatatagataactttgaaaaatatgaaggcctagttatttatttacctatatatagcccacctaacattttacacttatccttccatagagagagaatatttattcacaaacacatataa

SEQ ID NO: 426866 - DNA, 957 bp, Serratia marcescens
atgagcgacaagatccctatcggcatcagcgcctgtttactgggcgacgcggtgcgtttcgacggcggccacaaacggctggcctttgcggtggaacagttggcgccctatgtgcgctttgagccagtttgcccggaaatggcgatcggcctgcctacgccacgcccggcgctgcgcttggtgaagcaggcgcagccgtggccggcgatgcgctacagcaacgacgccggcgtggatctgaccgaggagatgcgcggcttctccgcgcagcgcgtggcggccttgcagcatctgtgcggctatatcgtctgcgccaagtcaccgagctgcggcctggagcgggtgcgggtctacagcgaaaacggcaaggactcgcgtaaaaacggcgtcgggctgtttaccgcggaactgctgcgccagatgccgtggctgccggtggaagaagacggacgattgcaggatgcggcactgcgggaaaactttatcgagcgggtgtacgcgctgtacgagttgaacatgctgtggcgccaggggctgtcccgcggcgggctgatcgcgtttcacagccgctacaagctgtcgctgctggcgcattcgcagccggcgtatcgcgaattggggcgcttcgtcgccgatattcaccgctgggattcgctggaggccttcgccgtggaataccgcagccgcctgatggcgctgttggcgcacaaggcaacgcggcgcaaccacaccaacgtgttgatgcacgtgcagggctacttccgccgtcagctcagtacggcgcagcgccaggagctggcgcaccttatcgaccgctaccggcagggcatgcagccgctgttggcgccgatcgcgctgctcaagcattacatggcggaataccccgatcgctatctggcggaacaacgctatttcgaaccttatccggaggcgctgcgtttgcgttacggccattga

SEQ ID NO: 426867 - DNA, 321 bp, Serratia marcescens
atgagttacattgtggttattatctggttcattatttcccgcttacgcccgttctccctcccccatcagggacaatctcgccaccggcctgatgattggaatgctaaattcccgctgaaatttcagccatttttatactttttttacacccgcccgcgcgattttttcatcttctttctacccctctccctacactgcctctatcaaaaacaacacctctggaggtgtcccgtgagtttcagcgttattggtggtgcgctgttggttctgctgctgttggcctatctggtctacgccctgtttaacgcggaggatttctga

SEQ ID NO: 426868 - DNA, 690 bp, Serratia marcescens; identical to SEQ ID NO: 424125

SEQ ID NO: 426869 - DNA, 330 bp, Serratia marcescens
atgaaccgcgacactctccccagtggcacgctgctcacgggtatccagtgcagcaccgcgcatatcactgatgacgacaacacattgctgtaccacgcgtcacaccagcatgaagagtatggcagcggcgagtggcttcattttaccggaacggggtacctgatttggctcaatgcgtggcgacatccggtacttcatcttaaacggttaggggtgtcaaaagcctgccgccggctggttgctacactgatgaaccatcaccccatcgctctcctgcacctcgatgcggcaggtgaaattctgtcggggtttgagatctttggctggtga

SEQ ID NO: 426870 - DNA, 297 bp, Serratia marcescens
ttgctcacctacctgctggcgcagcactacggtctgatgctcaacgacactgcattcagcgacgatgccgtaatacaggcacatatcgatgacggcatctccctcgcggatacgctgaatgccatggtggaaaagtttgatctggtacgcattgaccgccgggggttcagcggtctggcgcaatcgccccttgtgaccgccatcgacatcttgcgcgcccgcagggcctgcggcctgatgacgcgagccggttaccgggaggtcacacgaacgattcagggaggcaaacgcccatga

SEQ ID NO: 426871 - DNA, 339 bp, Serratia marcescens
atgatatcgaccaagaacgtcccatcctggggactgaaacgcaacgtcacaccgcagtttggcgcccgtctggtacaagagggggaacgactgcattttctggccgaccgtgctgacatcagcggaattttcagcgacgcacagcgccatgatttggagaaggcttttccgcagttcatcaaccacctggaattgatgctgctctccggtgagctcaattcgcgttatcagcactgtgtcacactgtattgccatggcctgacctgcgaagccgacagtctgggctcatacggctacgtttatctctcgatttatccgacacctgaaacgcccagatag

SEQ ID NO: 426872 - DNA, 483 bp, Serratia marcescens
atgatgaatatcaccttatcaccggcaaccgccggtctgcccttgcccacccaacgcaccattcaacgtgcactggcattgctggagcaacatctgcgcaaaccgggagaacccttcaccgccccgttcatggtgcgcgactggttgcgcctgcagatggcccggctggagcgcgaagtctttatggcgctctatctcgacaaccaacatcgcctgctggcgcatgagtccctgtttagcggcagcattgccagcacccaggtgcatccgcgtgaaatcgtgaagggcgcactgaagcataatgccgccgcggtcattgtcgcgcactgccatccttccgggcatgccgaccccagcgaagcagacaaacttatcacccagcggatacaggacgcgctggcgctgattgacgtcagggtgctggaccactgcattgtcggcggcatgaccgtgtactcgttcgccgaacacgggctcttatga

SEQ ID NO: 426873 - DNA, 1245 bp, Serratia marcescens
atgctattcaactcagcagtttcctcgtcgatacagacgcctcttcagcaacggttgtttgcgtttaccgcctttttgctgggagcctccctcccgacctccaatcccctgatgaatatctcactggggctggttgtcgtctgtctgctctggctgcgcgatatccggcagtgggctgcactggcttgtcatcccctggtctggttgccggccctgatgtttgcgctgctggcgttgtcattgctcacgcatgctaacgcctacggccccaaaatggttggcaaatacctaaaattgctgtatgtcctgccgctggcgctgttctttctggcagactcgcggctgatgacgcaatttgtccgcggctttttgtgggccaatgccgcgatattggccatcagcttcatgagcgggcttggccatgtcacattgggcgggctgaaccccgacaaccctacggtttttaagctgcaaatcacccagaatgtgtttatggctctggcggcgctggtctggttgtcgcgtgcttttgcctgtagcggaaaacggcgctgggggtatgctggactggtgttgctggcgacggttaatgttctgctgatggtgcaggggcgtaccgggtatgtggcattggccgttggcatgggcgtctggttattgcttaccctccggcgcaagcagcaagtggccgtgctcgcctgcggcatactggctgtcgcgatgctggtcatgacccccaaccgcgccatggagcgcctgacgctgggtgtacagcagattcagggatgtatttgggctcccgccgaaaccgcctatcaagcctgcgacaactccatggggcaacgcacggctttcgcccgcgaagccctgcgactgatacagcaatccccgctgctgggtaacggcgccggcagcttctggtacggtaatacacaaaccggctacggcgtccataacccgcacaatgaatacctgctggaaacggtgcaaagcggcttgctgggattgatggtgtttctcgcctggatgtggggctgctaccgtgtcgcctggcgcttgccgccggcgtgtcgcaatctgtttgttgcggtgctcagcagctacatggcctgccatgtgttcaattccttcctgctggactcctccgaagggcacctgtttgtcattatcgccgcgctgctggccgggctttccctcaatgcacagcagccaaagcctatatgcgccagaccgccccaaacatga

SEQ ID NO: 426874 - DNA, 1161 bp, Serratia marcescens
atgaatgcccatcgcaccaccggaaaacgccccgtatccccgctggccacactccccgatcgccgggtgcccaatgcgcttttgcatcgggatagcgtgcaacgcattctcgtcatcaagctgcgccactttggcgatgtcctgttgatgacgccggtgctcagtacattgcgcgtcaactaccccaatgcgctgatcgatgttttggtctatgacggcaccgaggcgatgctggccggcaatcaggatgtttatctggcctttaccgtggatcgagagctcaagcatgaggggctgaaagcgcaataccgcggcgaatatgcgttatggaacagcctgcggaccggccattacgatctggtgatcaacctctccgagcaatggcgggcggcgttgtactgccgttttctcaaaccgaccttcagtctggggtttcgctaccccaaacgcgacaatcgactctggcgggcctgccattcgctactgatcgacgttgccgacccggcgcagcacaccgtgctgaataatctcagcattctggcgccactggccttgcccacgacaatcacgcaggtgacgcaggcctggcggcaatctgatgtggatgacgttgaccggctcagtcgacgccatcacctgaccgattttgtgctgatacagccgaccgcacgctgggctttcaagacctggacggtggacggattcagcgccgtgattaaccacctgaccgcccagggcagaacggtggtgctcaccggaggacgcacgcaagatgaagccgcgatgataagcgccattatggccggctgcctgttaccgcagcgggtgattaatctggccggacgtctggagctgcctgaactcgcggtgttgattgaccgggcgcggctgtttatcggagtcgactcggtgccgatgcacatggccgccgcgctgaatacgccctcggtggtgctgttcgggcccagcgacctcgcgcgatggtccccgtggcaggcgccccacacgttgctgtgggccggagactatcgtccgctgcccgccccggaagccgttgacaccaacacccgcgagcgttacctcgcggccatcccggctggcgatgtgatacaggcggttaacaggcaactggcatccctcgccgggtctgcgcagcgttaa

SEQ ID NO: 426875 - DNA, 477 bp, Serratia marcescens
atgaagacactgatgacaggacttttttgctgtgccctggcggcaccttttatggctcaggccgaaaccggctcatggaccagcgggtgggggcagggaacgacagaatacagcgtgcgtggccagggacaatcgcagctctacatcggctgcgatccctataaggcaatgttcgtgatgttcaccgatgccgcgggtcgctcgctgaccaactatgatgcgcagacgcaaacgcggtcattttatatcgccgtcaatggcagtgagcccatcccattcaatgatgtgttctcccgcgtgggtgcggatagcgtgcgcttcgcctgggacaagctgcgcaaaggcaagacggtgagcgttagcggtgaagggatgcaaaccacgcgttttacgctgaaaggcgccgggcaggttttgcccgcattttcgcaatccgactgtaaagtcggcgccgacattcccgctggtgagaactaa

SEQ ID NO: 426876 - DNA, 348 bp, Serratia marcescens
atggagacttccccacagaatgcatcttcacgccttaccccttctttaattggctggtggattggcgctttgctgttttcacttctggtggtcacgcgcaataccgccggccagatccaggaggccggcacaggtacgctgatactcgcggttatcgtcggcacggcgctgggatgcctcggtgccttgctgggccagttcttgcgtaatctcgcgcatcccgatgcggtctataccaccggtggcttcttcagcctggtggggctgcgtctgttctggctttgtggcccccagctgattggcctggccggcggcgtatttttaggtattgcgctgatagtgcactga

SEQ ID NO: 426877 - DNA, 858 bp, Serratia marcescens
atgtcgccaccactctccaaaatcaccttgctgtctaccaatgatttagatgaatgctattttttcatcgattatttagatcggaagaatattataaggaaaagtagattcaggcgctttgatggcccggctgacatctgcagctatctcaatagctcgctgaagaagttcttcagagatacccctgaaaaagtcaatgatgtggtttctgatctgttgtacttactcagcaaaagaatcccgcctgaagaggaagccgcctggcttaagaaagataagcgcgcttgtttttggttatggacagagctccattgtcttgatcgtgatggcatgccatttgataaaattaaagggtacgttccacatagtcatcaagagcggcatcgtgaggttatgcaaaaatataaagaattccacttggacgatgaaagtcggcgctggagtaagatggtcagtaaatggaatgaaataaaagaaggtgattcactggtggggtgtctttcgccagatgatgagaatgttatttcttatgcctggaaatatttatgctctcatggtcattatattgagcagaaatatgctccattagacaatgaggaacgatacctatccattcttaattacatggacttttacctcactcatcctttagaaaaggaattgcttgtcagaaaaataaagccggcaattaatcagcgtagtcatagattgaaaaagcaaaaactcagcgtcagtaagaaattttatctgaaaaaagaaaatattgataagctaaaaaaattgctcaatgaaaacagaatgaccatggatgaatactttaattcgctcattgagcaggagtctgacagactgacgtaa

SEQ ID NO: 426878 - DNA, 570 bp, Serratia marcescens
atgaatcatgtcataaacaaaaatcactccgcagataagtcgatacagcgtattttgttaacgcatcaggatgcgctgtttgaacgctattccaaattgctgatgctccgtgtggattttgcttatcgccgagaaagcttgtcatttaaccgtgccgacgagaatcaactggtcgcccagatgacttacttaatggaacagtgcgctgatattccgggaatagtcgggaatgcatgggtgatggaatacacggaacagcatcgtttccatgtccatgcagcattttatatcgatgggcagcgccaccgcaaaatctggccattctgggaagagataaaatacctctgggaggtaattacagagcatgaaggatatgcacatcggtgtgagcctaaatccttttatcgagtaaggggggagagagttgtggctgcgtctgacgtgcgaggccgcggagggatgcaatacatcctgagttatttggggaaacgggagcaacgtacggcgcggcccatttatcaggtgagttccgtgccggtcgcagtccgacgggggcgacctcgtcgctga

SEQ ID NO: 426879 - DNA, 207 bp, Serratia marcescens
atgacaaacgaataccctctgctcagcgaccaatttgttgacatggcctttatcactcgcctgacaggcctaacggataaatggttctacaagttgataaaagacggggagtttccgaaacccataaagttgggacggagctcccgctggttgcaaagcgaggttcacgtctggctgcaacgtcgtatagataaatcccgtacttaa

SEQ ID NO: 426880 - DNA, 705 bp, Serratia marcescens
atgtcagtagaaaaagttgcgcttattataggtggcgggtccggcatgggggcagccattgccagaaaactggcgtgtgatgggtaccatattgcagtgctttcctcatcaggcaagggggaagctttagccaatgagttggggggcatcggcgtcaccggctcaaatcaatcgaatgatgatttacaacggcttgttgatatggcaatggcaaaatggggcagaattgatgcgttaatcaattctgccggtcacggtccgagcgctgctgttctcgatcttagcgatgaggaatggcaccaaggattggagatctatttcctgaacacggtccgcgcggcacgtttagtcacaccgataatggaggctcagggcgctggagccatcgttaatatttccaccgcttgggcatttgagccccttgatatgttcccaacctcaacggtatttcgtgcagggttagcaacctttattaaacttttttctgataagtatgcaccaaaaaatattcgtataaacaatgtgatgccaggatggatagacagttaccctgtggtcgaagagcagcgtgcaagtgtacccatggggcgctatggtaagacagaagaaattgctgcgacagtcgcttttctactgtcagacggtgctggctatctcaccgggcagagcatccgtgtcgatggaggcgttacccgtgcgatttga

SEQ ID NO: 426881 - DNA, 879 bp, Serratia marcescens
atgacgcttacaggacagctcccccctttgaatgcgttgcgcgccttcgcgatctcaggacgtaaaggaagctttcgtgctgcagccgatgaaatgtgtgtgaccccaggggccgtcgcccagcaggtcagagcactggaacagcatctcggcatgacgttatttcatcgcctgccgcggggtttagccttgacgccttccggagcggcttatcttagggatgtaactcgagcattcgatattctgacagaatccacaagcaagctactggcccagccaaatacggtaacaatcagtgtcaccccaacttttgcggcaaaactcctgataccgcgcctggcagagttccatgctgagcttccggaaattgagttgcgaactgttgcgactgaggctttatccgatttcgagcgcgaccaggtggacattgctatacggttgacacacatgccattttcttccgagctggaaacaacgctattgttcaatcaagagctcgttgttgttgcgagcccccatctcgtacgaggtttgacactccccttaaatgtcatgcaacttcaaacgttgccgcttctccacgatatgcagaattactggcctttctttttgcaatcggaggagaagcaacccggatctgcatttaatctgacggctctggccctggatgccgcattggcaggacaaggagtggcaatagcatgcagagcttttgtgaatgcggatattgatgcgggccgattggtacaggtgatggatatcaccaaaacgctggcatccagttacttccttgtttgcaaacgtgcagcggcccaaaggcagatcgtgcgttcagtgtgggagtggtgcgttaaaagattgtccctgccttttcaatag

SEQ ID NO: 426882 - DNA, 1218 bp, Serratia marcescens
atgaattcttataaaacattactcatgctggtcgcctttatgacttacatgattatggctgggcttctcacacagataggtatcgtgattcggccaatgtcggagtatctaaacatctcactcacagaatgcgcggctatgttttcgtatctcacggggggaacgcttataggcaccatcatttccatggtggtgtacgaaaaaatcagcattaaacgggtgttgagagctatctatctggtctttattgcaacaacggcgctgttgtctctgctgaacttcaggcgccctgaaatcatttccttctacctggcgatcctcggcgttagctgtggggtggggctttcgggcggcgcagtgattatttctcgaatcttcgatgaagataaacgagcttcggcatttatcgcaacagattgtgccttcagcgcatccggttacgttttccctacgttggcaactatgctgttcgctgcacattttgagtggacatatgcttactacggggtcgcggtgctcgccattctcgtgctcctcagcaccttagtgatccactacccagaagttaatggggcagattcaaaggaaaaggctaccgtagaactggcgaaattcggtttaggggatctgcttacgccacgcgtgttgctgatgggactggggctgagcctctatctatttgcgcaaaatacatttctgacatgggggccgagttaccttaccgaagtgttcggcctttcgcctgaaaaagcgggcggcgtagtcagtaattattgggggccatccatatttggcctcatcacggcctcaattctggttaataaatttccggcgcgcacaatgttgctatccgtaatcagcatcgcgattatcctcacgatttacctcagtaacactcgtgtgccgcagcatttcctactcgtcactttgggatttgggttcctgacatcctgtatttacaaactgggtatcgctgttggttcccaacaacttgccacttcgccggccgttttggtgactttcctcttaacatgcgggactgtcggcagcaccgttgcccctgccctgtcggctctcatcgttgaacatctcggggtaaagagcgcgatgtttacgaccagcgttgcatttatatgcgtattggcttgcgtcgttgcatgccttgcgttggaaaaaaaacaattagttaaagcaaagcagcctaaggaagtattatga

SEQ ID NO: 426883 - DNA, 960 bp, Serratia marcescens
atgagcaagaaagtcatattggataccgatccgggtatagacgacaccatggcgatactattcgcacatgccagcaaacggattgaccttatcggtatcaccaccgtctttggcaatgccactattgaaaatgcgacacgcaacgcgcttttcgttaagcaccgctttgggctaagcgcagacgtttctgtcggcagcgacacccctttggtcttagaggcaggagaaccaaccacatttgttcatggcgataacggactgggcaatatcatcattccggatgaatactatggcgaagtggatgttttgcgcgctgaagatttcatcattgaccgcataaaaaaatttccgggtgaaattaccttaattgcggtaggtcgcctcactaacctggcgcgggcgctggataaggcacctgaaattgccgggctggtgaaagaggttattatcatgggaggcgctttcggccaccatgaccattgcggcaacgttacgcctttcgctgaggcaaattttatcggtgaccctcaagcggcagacaaggttatcacggcaaattggccaactaccattgtaggattagacgttacgcatcagactgtcatgagcagtagatacatcgatcatctgcgcagccgttcagaacgctacggaaagttcatttatgacatcactcaattctacaccgattttcaccggcgggaggcgggtatagacggtttctatgtacacgattcttcggctattgcctatgccatttctcccgagctttttacgaccattaaggggaaaatacgcgtggtgactgaaggaccggcgatcggccataccatgataaaaaaggatgatcgtcgctatcccatagatgaatggagtgattatccggcacaacgggtctgtgtcggcgtggactcagcgggcctgctggaattgtatgccagtacactggcggcaggctga

SEQ ID NO: 426884 - DNA, 1038 bp, Serratia marcescens
atgagtaatttgaaagacgttgcaaaaaaagcaggcgtatctgttacgacggtatcaaactttattaataataagaaggctgtcaaagaagagactcgaataaaaattctcgaggcaataaaagatacaggctaccgatataatacagcagcggccttgctgaaaagaaacagcacagagcccagtactattgctattattagcgtagtcgatcagaataattttttttcggagttattctttagactggaaagtgagtgctttaataaagggtacgccgttgtctcttgctttcgccaggaagacagtaacaatcttaaaaaatacattaatctcatatcgggaaaggttgatggcattattctgatttcaatctgcaaagataagattgattcgataattaagaatgtgcatgccatacccgtggtagccattgcttttgatatcggttctgttgcgtcactctgcggtggtacacaattcgatttgcacaaccagatgggcggctacattgcaggccggtaccttgtcgccaaagggcaccgcagcctggcgtgcgtgacgggaccggccgacctgaagacaaccaaagatcgcattaacggtcttgaaagcgcactggcggaaacaggcctgccggttggtcacattaaatacatcgaaggagactactcttacgacagtgggattgcggctatgtacgcgctctactcttctggaaaacttcccaccgccgtaatgtgtcataacgatctgatggccgttggtgttcagaacgcggccagtgagctcggaattaaaatccctaaggatatgtccgtgatgggatatgacgatattgaaactgccagaatggctaatccaccgctgactacggtaagaatcccacttgaaaatctggctactcaggcgattgatgagctgattaaaaagataaatgagcccggtattcctgctttgatttccgtcaacccagtactggttgttcggggttcggttgatgaaccgccgatggataaagcgcgcaagcctgaataa

SEQ ID NO: 426885 - DNA, 795 bp, Serratia marcescens
atgactgaaatagccccttccgtattgattacgggtgcatcctcaggcctgggggccgtgtatgcagaccgctttgcacgccgtgggtataatctggtgctggttgcccgtgacgccgcgcgcttggaaaaactcgccattcgtttacgagtggagtatagcgtcgaagtcgacattttgcccgccgacttggcccaggaaagagagcttgatgttgttgcaaaacgtctggaatgcgacacccgtatttccattctggtcaacaacgccggaataagcctatctggtacattcaccacgcaaacgccggctgacattgatcgtctgatcgccgttaatctggctgccgttgtccgtttgtcccgcgctgtggcaccgcgattggttcaagcgggcacaggctccatcatcaatatcggttccgtggtcggtttggcaccggagtttgggctcactatttatggcgcgaccaaggcatttgtccttttcctgtcacagggattaagtcttgagcttgctccgcatggcgtttatgtccaggcagtattaccggcagtgacacgcactgaaatctgggcacgagcaggtaaagatattaattccctgggcagcgtgatggaggccgaagagctggtcgatgctgctcttagcggttttgatctccgggagacagtgacgatcccccctctacacgaggaaattttgtggaaccatcatgaacaaacgcgccaagcgatgctacccgaattcagtcaggaacacgctgccaagcgttatcttactgcacgcagatag

SEQ ID NO: 426886 - DNA, 846 bp, Serratia marcescens
atgtcgaaacttgactggaaaacattgacgcttaaacgcgatagttctagtaagggagttccgcccggaaaggagtatcttgcgtgggtaacgaatactgtaacgctgatttacggcgagcgtgatgccgtattagttgatacctttctctccgataagcatgccagagaactggtaaagtgggttgaagagagtggtaagaatctcatcgctatttacatcacccacgcccatggcgaccactacttcagcctgcagagattgcttgaacgattccccgaggctcgcgctatcgcgctgccctgcgtcgttgaagcgatcaaaaaacaagtggcgccggaattcatcaggaatttttgggagccgcgctttcccaatgagctgccaaagaaatttattgtgccggaaagtatcgaaggcgatctgttttacctggaagggtatccactggaaattgttaaattaggacatacggacacgtccaatactactgcgttatatgtgccgtttattgatctagtggtctctggagattgtgtttataacaatactcatccttacttagcagaatgtgatgggagcgcacgcgatgcgtggttgcacgcgctagatattattgactctctcgatcccaggtatgtcgttgcggggcatggcgtagaatatccggacagttcgccggctcatatcgatgaaacacgccgctatattaaagattttaatcaacttgtttccgtaactgataatcatcttgaactgtataacaaaatgctggagctgtacccggaaagggtcaatcccggctctctttgggcatcggcaaggtttgtcaaaggaggaggttga

SEQ ID NO: 426887 - DNA, 885 bp, Serratia marcescens
atgcccgttcttgacgtaaaaatacccgtagatggcgatatctatctcggagcaaggctgtatgtacctaccggaagagggccgtttccagccataacaatggcgcatggatatggtggaactttcgggcatgggcttgagaagtttgctcaaaagttcgtagagaaaaattttgcggtaatactccacgatcacagaggttttggtgaaagtgaaggagaaccccgtcacgacatcgatccatggcagcagatcaaagactggcgtcgggttatcacttacttgggatctcgtgaagaagttgatgaaaagcggatcggcatctgggggacgagttatgcaggagggcatgccattgtgcttggggcaaccgatcgtcgtcttcgctgcgttgtctctcaggttcctacgatcagcggatacgagcaggggctgcgcagaatcaatcccgaccgaacttctgatttcgatgcaatgcttgcgcgtgatgagcgagctcaattaaaggggcaaattgggtatcagccactggtaagtagcgatccgtacattgcagcgagctaccacgatcctgaggccgtggctttttatcaacaaccacttacgcgttcaaactgggaaaataaggtcactatacgctcgacacgcctggcgcgaatgtatgaaccaggccactgggtttctcgcgtatcgccaacgcctttgctaatgctcgttgctcagcaagacaaactgacactgacggatcttgaacttgcagcctatgaagacgcgcatgagcccaaaaaactggtgcttatcaaaggcggccactttgctccctatctcgatcagtttgaggtttcatcttctgaagccatccactggttcatccataatctatag

SEQ ID NO: 426888 - DNA, 789 bp, Serratia marcescens
atgaacaaccaagttattgagctaaataaaaatgtgataaccatcatatttattcatggttttcttgatgaagcctcgttttgggatgatgtcatcataaacctcggtgaaaatggcctagtgcaaacgctcgcgatagatcttcccggcatgggggagcgagctaacgataaacccaatttatcccttttggcacttaaagattatgtacttgataaaatagaacacctttcaggccccataatacttgtcggtcatagtatgggaagtcagatcgcagaactggtcgcgataaacgcaaaagtgcccattaaagcactgatactgattagcccagtgcctcttgaagggaaccaacttcccaacgaaactaaaaaagcaatgttacatcttccaggcaatgaacaggcacacagggatattcgcacaatgctctgcggccaggctaatgaaaaggtaattacgcgaatggtggctgcagggatgaaagtttcttccgatacgcttcccttattgcttgaggcttggagtacaggattgccggcctgcgatcgcccgtcaaaattctccgcaccggtattaattataggagggaaaaaagatcctttttcaacgccggaaatgattatttctttgatactaaaacgctttcctggcgcaaagatcgctttcgatgagcactctggacactggccacacatggaatcgcccgtggacatcgcttgctgtattcatacatttctctcacatctcattacaaagcagaaaaaaaacttaagttctgaatag

SEQ ID NO: 426889 - DNA, 1125 bp, Serratia marcescens
atgccgcgtgtgcaagatttaggaattactattggacttggcgaacggggcccgcttaatgccatcaccgatgtaccgggtgtgcgtgtcggccatgccacgattaatgcaaatttagctgacggccgtggggtgcataccggcgtgacggtgatcgaacctcgaccagggctggcccgccaatccccttgttttgccggggtgcacgtgctgaatggcaacggcgatgcaacgggattggagtggatccgcgaagcagggctgttaaccagtcccatcgcttttaccaatacccatagcgttggcgtggtgcgtgacagcctaatcgcactggagcgagaaatgctgccgccggacgataaggccgtttactggagtatgccggtggtactggaaacattcgacggcttattgaatgatattaatgggtttcatgtaaaacccgaacatgtgcggcaagctctgcttgctgccagttcaggtttgccgcaagaaggggctgtcggcggcggttgcggcatgatttgccatgagttcaagggcggcattggcacggcatcgcgccgcttgccagtcgaacagggaggctggaccgtcggcactatcgtacaggctaaccacggcaaacgtgatgccctgttggtcggcggatatcctgtggggcggaagctgacggacgagcattcgccttttaacgccatgttgccctatcctggtatgggctctatcgccgtagcgctggcaaccgacgcgccattgttgccgcatcagtgcgcgcggttggctcagcgtgccagtattggcattgcccgtacgggagggggaacggaagattccagcggtgacatttttattgctttctctaccggcaacgaaggtctgcctccggcagattacggcagcaaaggtagcctgaccacaccagtggaaatggttaacaatagtgctatctctgaattatttgtggctgcggcagaggctgttgaggaagctatcatcaacgctttgctcgctgcggagtcgatggtcggcaatcggggctatcatgctgaggggctaagtgcggaaacattactgacggcgcttaaggctagcggctggcaaggcacggtggcaaacacataa

SEQ ID NO: 426890 - DNA, 705 bp, Serratia marcescens
atgaaggctaaattaattgagtgggtacatcagctgacgggaagactggcgcatttcataattgtagggggtatgttgctttcctgcgcggcgaacgcctcatttcagctagaaagcaccgggattatattgagcgaacaagatggaaggatcagttttgatattcgaaatacttcttcttccccgatcttgttagccagtaaattagaggatttggatcaaacagggttgagtaagcgtatattgatctctcctcccattacccgtatcgatgccgggcaaagccagcaggtcaattttgtcttaagaaaaggtaagccgctaacgcatgaagtgatgctgaaagcatccttcgaggggatcatgcagacgacagaaaatagtacacagatgcctgtaaggcaaagcatcggctttatcgtgcagccggccgctgtggcggtgagtaaaacgccttgggatgcactgacttttcagatggaaaatggggagctggtgatgcgcaatacaggacaaagggttgtccgaatggtaccgactttgcaattgaacccaaccaatgcgcagcttgctcaggatgaatactacctgatggcgggtgaggcgcgtagatttaaggttgcgaacgcgccaatttcggtcacttttacaccgctaagcagatatggttttaagctggatgatgtcactatactggtgaagtaa

SEQ ID NO: 426891 - DNA, 2184 bp, Serratia marcescens
atggtaaatcatgctcgtatatatacggttgaggcactatttaacgatgaaggacaattatgtgccgagcccgtagtcattgaaacattgaagctgcggacgatgccattgactgagacggaacgatgcactgtgtttacggatatcttgccggatgcccaggttacgcttcgacccggaacattcagcgtagaggtgatcttgcctgaatcggctttcgattcgcaaaaaattagcggtgaggaatacggtggtatcggtgccgttttgaattacgatcttaacgcacaatacttttctggctcttctactcgtgagcagagtttccaggcaatgctggttccaggggggaatgtgagtaattgggtagtgcgcaaccgtagctattattcgcaaacgtctagggagagacgattgcagattaatgagacgtctgctcgtcgcgtgttaccgggtatgaatgcgctattggaggtggggcagttcggtgccggtggttcattatttagtgggctgccgatcaatggtgcacagatcacgaatacgttcagtgtaggtagcggcaggctattatcaccggtgaacggcatggctgatagccaggctatggtagaggtgcggcaacggaataacatcgtttatcggacattggtctcaccgggcccttttacgctgtcgcaattggggaatgctgttggtggaatcgaaaccacgatggaaattactgagtccgacggcagaaaaaaagtgcataccttcactccccaatttattgccgacgggcaaatcggccgcgaagtttttcagctgggatttgggcaatatcgtaaatccggtgagcgagcgttgctgtcaaccgctccactgttgttaacaggggagcaaacgatcggtcaaaacgacaattatcgttcggtttggggaggggtggcttcctcattctatcaaacggtgatgggaaataacgatatcaatctgcctgacggcggacaaatgagtacgggaatagcttattcccgtactcatggcaaccggcagggtacacagatggatgctcggttttttggggccacgtcaatcaataccgctttatccttatcgtcgctctatcgtacgcagcactatttggggccggatgagggaatggctgcgagcgagcaatcggaaaaaagcataagaacgttacggttgtcgttaggcggctctgtttcttggggaaatgccgaatggggccgatttacatacggtgtgtatcaaaatcactactaccacgcagaagggagcgttacgcatttatttacagctgcgcggcaagtaggggctggggccataaatctgagcttacaacgttccgccttcgatccctttttggtttttatcggcgcaacgtggccgttaggagggcatagcattcattcacgcctgcagcagcgccgtggagacaccttaacgagcgggatatcagtacaaggtggtaaaggtgatgatattgggtacagcgtggatgtcataacggaaaaagagcgtacagaactttcgagcaatattcagaccaccaccccgtatagccggctgagcggtgggctaacgcaaaataaccaagggagccgttcatttagccttggagcatccggtgcgctggcctatgcgaatggaacggcagtgatgtcgccagtgcatgctggggaaacgttcggggtgttacatatggatggtcgcgcaggcacgcaactatacgtacccggtagcgggagcgtcaccacggattttcggggaaatgcattgcttccttcattgcctgcgtatgaacagaccaacgttcaggttaatacccagactttgccactcaacctgaggctgaacagtaccagcacagaactacatttagcctacggatcagtcgcaaccaggcgattcaaagtaacggaggttaaacagttgttgcttaccctctctaatgtagcaggtgtagccttggcggtagggtcgtcagtgcatgatgagcgcgggcgttttatggggacattaatgagtggcggcaccctgctgctggtcaatgaggatatcggaaaagcattggaggtgaggccggccaatgcgcccgcttgccgggtaatttatgaggtgccggattattttgacccggaagcgttgtacgaagaaacggttgcggtttgtcagtaa

SEQ ID NO: 426892 - DNA, 642 bp, Serratia marcescens
atgaagtataatgcgatttctattgtagtaatggcatgtgttgccatgggttcattcagcgtaaatgctgcggcgccgacggcggaaataaaaatcaaaggcgaattggacgcgccaacgtgcactgtcgcccttggcttaaataattctggtaccatcgatcttggcaagatatcgccggcgctggttaaaccttctgcgaccaccgcgttaggcgaaagaaacgtggtgcttaatgccaaatgttcggccgatacgtttttgaactttactattatcgataatcgagagtcttcggttagccttcctggcacccagcgctttggtttggggcatatcaatggaaacggtaagatcggttattatgagatcaaaatgaatcaagcctatgttgatggcagctcaacggggctatttagttctgcaagtgaaagcttttcctcgctgtcagaaattaagctgaccaaaggcatgcgaaatggttggagcactggctcgggtcggcaagctatcggcaaggatttcactgccttattgatcgtacagccctatctggggtcgtccaaagatatggggggcgccattaacgataaggcagctttagacggctcagccactctcagttttgcctacggcatctaa

SEQ ID NO: 426893 - DNA, 603 bp, Serratia marcescens
atgaagcagactttatggcgtttttatggaatatttatgtgtgtatctatagcccatgcttcccctccggcagcggaattgtctgtcaacggtgaatttaaatcaccgcagtgcactatacaatcccctaataatggagaatacgatattgggaaagtgtcagacaaggctaagctagatggccgcaatttgtctggcatgacgcaaacctggcgtgtcatttgtgacacagacatgatgatgcatgtcactccgactgataatcgtgtgggaaaaggccgtgtcgcagacccagaacggtttggattatgggcgggagacggtatcggcactgtgggattttattatctggagtttacggacgccagtgtggatggtgctccagcgaaaatgcaaatggcggatagtacgatgggacgtgcgcagacaggcagaagcctgacctggataaaagagaatggtgaaccggcaaatggaaaggtattttctgtaaacattactgttctgccacaaatatctggccttaatgtgatgaaagaggagcggaccgagaaagtcaattttggtggctcggtaacgctaagttttaactatggggtttga

SEQ ID NO: 426894 - DNA, 1671 bp, Serratia marcescens
atgataacttgttatcgcctgctggttgggctgctgctaccgctgtatggcggtggcgtcttcgcggatgatggcattcctgcactgctacagtttgctgaaaaataccaggaaagtcgccttcctgcagacgccgcgccggggagttcccccacaggtaaggcagtttccgactctgctcccaagtctaaattagtgcaagacaggatgtcggtgcgtggatcttctgaggcgaaaaaaccggcgacggccaaaccaactactacacccgccatagagacccagcaaaaaacgttgcaggcacaggctgtgcagctgaaggcgcaacagtcgaccatcgcgcaactggagaaacaactggcagaggcgaagcaaatgccgccgtcagtacgtgcgccggacgccgctgcaccggatctgcaggggatgggcctgctggcacagcggttgcgccaggcactgggcttcacgcctgcggaggcacaggcaattgagcagcttagtaagttacgcgaacgggaggccgatagcagcgcgcagctggcgggagtgataaaagacaatgccaggctgcaggcgcagttgcgcagtctgacccgcgccagagaatacgcggaaaaagcctatctgcaggagagggggaaacagacgcaactgcaggagacgctggtggatgtgaaacagatgttggtaaccagggagactactctggcagagaaagagcaggcattgtcggcagcacagcaggaactggcgagtctgcaaaaagcactgcagaggcgtgaagcagaaaagggacaggcggtgaccgtgcagactgcagcacagcaaaaacaggatacattgactgtcgagctggcggccttacgtacgcagcttaccgagcaggaaaaggtgaataaggcactgaacgtacagcgtgacgaggtggagagggccagacaggcgctctctgtgcaactgactgctgagttgcagcgtggggagcaattgcagaccgacattgttgccctgcgcgaccgcgccaaatggctggcggcaccgcagacgctgaagaccgacacggggaggcaggcttacgccgcgggggtctcattggggcgcgatattctcgacatgttggaagagcgtaaagggtggggtgtcacagtggaacgcaaaacgatccttgccggaatagtggatgtttttgccggacaataccagctgacgacagacgtgttggcgcttgcgctggccgagtcagaagcagcggttaacctggcgcgtgataaagcaggagctgcgcagcaaaagctgggcgagaagttcatatctactttcaagacaaaacaaggcgtagccctgtctgcatcaggtttttggtatcaaattaattatgccggcgacgatcccatcgtcgccgacgccgtcgtggagttggtggtaaaggaatcgctgacggacgggacggtgattcaggacatggatagcacgggcaatgtgctttcccagccgctcagtgcttatccgccactgtttagagaggcgttgggacatttgcgtaaccacgggacgctgactatggtggtgccgcctgaactggcttacggtgcagcgggatacccgccaaaaatcccgccgcatgccactatggtttatgaactgcgtgtggtcgatatcaagctgtaa

SEQ ID NO: 426895 - DNA, 240 bp, Serratia marcescens
atgtgtcagcgggaactggaggcgttgaaaaacatctcaccggagcagttcgaacgataccagactgccttttcgagattgatgagcggggcggcaaaatacgccggcgtgcgagctaaggtcaatctcaccactcaggatgccattgatgctcgttatcgctatcaggtcactttgctttgctctgacgtcagtcagtcggtgatgaatgggttgcttgagagaaaggctgaaccgtaa

SEQ ID NO: 426896 - DNA, 846 bp, Serratia marcescens
atgagactaatcctagcgcttggctgcgcgttatatgcgtctatgtcctacagcgtgccctggccgatcctgatggacccgaaaatcacgtcttgtaccgatagcgcaactccaaaatacggcccgtgttccacaggcgtctactactcgaacagtggtgtccaatttatcgatgtaatccctgtgggtacccctaacattagtggggtctctacaaatgtacgtcctattggggtgcattgcgccgaaggtaatggggtaaccggtgtactcccgtttagatcctgcgtttggcggaatgacaccgcacactatccccaactggtaggtacttgcagtctacgtgatctgacatcgtggacgctgacacaagactccacctgtgcaataggcagtacatggggtcctcactcgggggcaggccccgggggggaatgtatcgtctttacgaataccgtccagttaaataatgcagtggccgtaaacacgccctggggcccgcttactgccgatcaagcggccaacggcggcaacagattttgttcgaaaccccttccgccatccgtgacttgtgaactgcaattgcctagtgtgatcgaccatgggccggtccgtgccggggagacctcgaaacgggaggacgatgggtccgtaacttgcgggggatcgccaaaaatagacgtactcgtgaatggggaccgggataccgggggggttcggataaccgcaaccccgttcgtcgtgaacccaacgaccgtccggatcacctcggaaattaacgtgagcagcagcgctgttccgggagaacacaacgccacctacgtgttcgtagcgagcccgtactaa

SEQ ID NO: 426897 - DNA, 1011 bp, Serratia marcescens
atgagtaagcgcccttgccaggcactgaacaggccgcaaaacacgcaaattatcgagagctgggagcgggcataccattggttatgccggcggcgccagcatgcaccggtcaacgcggatatatgggacctgcggttctggtggtttggtgaaaagcgggcgttgctgaaccgggtgttgtctggcgactatcggctctcgccgatgcaggcatataaccggcagggcaaaagctgggtgcaatggtcggcacaggatgccctggtccttaaatgggtcgcgctgcaggttgaacctctactgccccgtcacacgcgttgccatcacctgaaagggcacggtggtgtcagtggatcagtaaaagcggtcagtgccgcatggcgcagcggaaactggcgttatgtctatcggacggacattcgcggttattaccgccatatattgaagcatcaggttgaaggccaactgcacagatatatagatgatgaagtctgcagggggttatgcctgcaatggctcaattacagcgtcgacgatggcggtgatatttacacgccggaaaaaggaatatgccgcggcagtgcgctcagcccgttaataggtggcagtctgttgcgacatatagacggttattttgcatcgcgagaggaattattttatgccaggtatatggatgactttattgtttttacccggacacgctggcatttacgcaaggcaattaaaacactgcatgagttttttgatttgggcgggtttgaaactcacccagataaaacgcagctcggcaatattgaaaggggctttgactggctgggcatatggtactccccgctggggccccagatagcgccaagagcattagagaaccatcgggaacgttgcgcgcggctttatgagcaagccaggtatcggaggctgccgagggcagaaactgaggcgttggtgcgtgagtatgaagaccggtggagtgtgtgggcaagccgtcagctatatcttgctggcggataa

SEQ ID NO: 426898 - DNA, 573 bp, Serratia marcescens
atgaaacgcaaatcaggaaagcgagtctatcaggggctgtggcgtaaaaaagtagctggcctgttactgacacaggcactgattacgtttgctgtgccgccggtgacggcagccgacaacgtgcacctgtatggcgcgctggtcgcagagccctgcgtcattcctccgggggacgaagaaatccagctggattttggcaccatcgtcgacaagtacctgtaccagaacacccgtacactggggcagccgttcgagatacggctggcggagtgtgacattagcctgggcaagacggtgaaggtgaccattacgggcatggaaaatacggcgttacccggcctgctggccatcgatgccggcagtggagcgaaaggcattgccatcgggcttgagacgctggagggcaaaccgttgccgcttaacaaatcgagtgacaattatgtgttgcaggcaggcaacaatctgattgcgctaaaggcctatgtgcagggggagccgcaggcgattgccaatcgaaccattggttacggcccgttcaacgcggtggcgacgttcagcctggagtatgagtaa

SEQ ID NO: 426899 - DNA, 501 bp, Serratia marcescens
atgacaatgcagacgatgatgaacactctactgctggccctggtatggggggtgaccggtgtcgcgctggcggaaggcgatgtcgatatgacgttccgcggcacgctgatagaaccgccaccgtgcactatcaatgacggcgagcgtgtggatgtcgatttcggtgagcgggtgggcattaacaaggtggatggcgtgaattatcggcagatcatgaactatcaaatcacctgtgataacgccggcagtggcagttgggcactgacgctgagtttaaccggcgcagcggcggggtttgatgaacaggcattgcagaccaacaagacggacctggggatccgggtttatcaaaacgataaaccgttcacgccgggcagcacgttggccattgatataagcaatccaccgcggctggaagcggtgccggtcaagcgggaaggggcaaccctgaccgaaggggcattcgagtcctgggcgacactgcgtgccgattaccaataa

SEQ ID NO: 426900 - DNA, 504 bp, Serratia marcescens
atggataacgaaaaataccgctcgcgccatcctgcccgtgtactggttgcgttgctggcggcggtgccgttgatggcccttgcctcaaatatggccaccgtgaccgtgaaggtgaccgtcgtcaagccgccgccgtgcaccatcaatgacgatcggccgatagaggtggattttggtgatgtgatgacgagccgagttgacggcaataactataagatgccggtgaattacgccttgtcgtgttccgatgcttcgtccaatgcgatgaaactgcaggtgaacggtaacggtgcaagctttgacggtacggtgttgcaaaccaataaaaccggattgggtattgagctgcgtcagggagataacaaactggcggtgaacagctggttgaactttacctacccgcagaagccggagctttgggctgttcctgtgaagcaaagtggtaccaccctgacgggaggtgagtttacggcgggggccaccatgaaagtggcctatcagtaa

SEQ ID NO: 426901 - DNA, 660 bp, Serratia marcescens
atggcagggaaatacgacatcaatacggcgcaagcctgctggttaagcgagctgcgctattacggctcgctgggtgggctggcgctgatggtgccgcttgcgctgggcactatgctgtggctgttgccggatgctcgggcgaaggtggacaactgggatgttgagggggcaaacggcacgttgtatgtgcacggcgcgctgaccgagagtgcctgtcggctggagatggaaagtgctcgtcaggatatcgcgctgggtgacatcggcacggggcgcctgcagagcattggtgcgcgtggtgagcctgtacggttcgaattgcggctgaccgactgcctgcgtagtccgggggggcaccgcgacagtcgtaccggcaacctgacctgggcggacatgcagccggcggtgacggtgagtttccgggcaaaccgagatgcggacaacccgcagttggtaaaggcacagggcgtctccgggttgggactgcgtctggaagatggccggggcgaggacgtgcgcctgggcagtagtggcaaagcattgctgctgacgccggggcagaacaccttgagctacacggtgacgccggagcgtacgccggccagcctggtggcaggcagctatcgggccgtggtgaattttcatctgagctatgactga

SEQ ID NO: 426902 - DNA, 813 bp, Serratia marcescens
atgatgcgtaagaatacagtgacgatgtggcgccggcacgatggccgagtggcagcgtggatgaagaacaacactctaagctcgacggtgatggccgtcgccctgctgagtgcactggcggcccagcaggcccaggcggcgattgccctggaccgcacgcgggtgatttttgacggcgaccagaaatcggtcagcctgagcgtcaccaaccaaaacaagcagctgccgtacctggcgcagggctggattgaggatgagcagggtaacaaaatccagagtccgctgaccgtgctgccgccggtgcagcgtatcgagccgggcaagccgagccaggtgaaaatccaggcgctgccggcggcaaaattgctcaagcaggaccgtgagacggtctactacttcaacctgcgggaaattccgccgaagagtagcaaaccaaatactctgcagattgcgttgcagacgcgtatcaaactgttctaccgcccagcttccgtcgcaatggacaagaacgcgccgccgccgcaggagcagttgaccctgacgaaacagggcaacagctacatagtgaacaacccgacgccgtactacgtgaccatcgtggatgcggctactaaaaaaggggtggaaggggtgaaagggttcgagccggtgatggtgccgccgatggataagctgccgctgacggtcaacgcgtcgagcctgggcaacagcccggtgctgatctatgtcaacgactacggcggccggccatcgttgagcttcagctgcagcggcaccgcctgcagcgtggtgccggacaagaaggcaggctga

SEQ ID NO: 426903 - DNA, 2613 bp, Serratia marcescens
atgcgcctccagactttggggctctgcatttcgctggcgctgggtgtgccgtcggcggcggtgtttgccgctggcgatattcagttcaatacggatgtgttggatgtgcacgaccgtaaaaacatcgatctgagccagttctctcgtggcggctacattatgccgggcacctacggcatggtagtgcacgtcaataaaaatgatttgcaagagcagcaggtgccgttttatgcgcctgaggatgatccgaacggtagccgagcatgcgtcacgcaagtgttgaccgggcaactggggctgaaagaggatgccctgaaaggggtgacctggtggcaccagggtgaatgcctggatgaggctagcatacctggcatggaggtgcgtggcgatctcgccacctcggcgctgtatctgagtatccctcaagcgtttctggagtacaccgctgagaactgggacccaccctcccgttgggacgaaggtattccggggctgctgtttgattacaacgtcaacgcccgcactcagaaacagcatcagggcaacggcagtagttacagcctgagcggcaatggtactaccgggctcaatctcggcgcctggcgcctgcgcgccgactggcagggcaatgtcgatcacactactggatcgggccagcctaccacgcaaaagctggactggagtcgttattacgcctatcgcgccattccagcgctgcgctcaaagctgactgttggggagaattacctggactccggcatcttcgacagcttccgttttaccggggcgagcctgatgtcggacgacaacatgttgccgcctaacctgcgtggttacgcgccggaagtggttgggatagcgaagactaatgccaaggtggtcattagccagcaggggcgagtgttgtacgagacccaggtagcggcgggaccgttccgcattcaggacatcaacgatgcggtcagcggtgagatgaacgtacgggtggaagagcaagacggcagcgtgcaggagttcacgatgaatacggctaccatcccgtacctgacgcgtccgggctcggtgcgcttcaagctggcaagcggcaaaccttccgattttcagcaccactcccgcggtccgatgtttggtaccggcgagttttcctgggggatcagcaacggttggtcactgtacggcggcgccctggtgggtggcgactacaacgcattgtcgttgggtcttggccgtgacctgatggcgctcggcgcgttgtcttttgacgccaccgagtcgcgggcgcggttgccgcaggcagacggcacgctgagcggcggctcgtaccgcctgagttattcgaagaactttgatgagtacgacagccaggtgaccttcgccggctaccgtttctcgcaagaagacttcatgagcatgagcgagtaccttgacgcgcgctattacggcacgcgcactggcaacggcaaggagatgtacaccgttaccttcaacaagcacttccgtgactgggggctgagtacctacctcaactacagccacgagacgttctgggaccggccggcgaatgaccgctacaacctgacgttgtcgcgctatctcgatatcggctcgttccgcaacgtgagcttgtcactatcagcgtaccgaaacaaatacaacggcgtaaatgatgacggcggatatctgtcgctctcgttgccgtggggcaacagcggttcagtgggttacagcgctacagtcaaccgcagcgatgtaacgcaccaggcaaactattacgaccgtctggatgaacacaataactacagcatgagcgccggcagttcgcgcagtggtgccagccttagtggttactacaaccacgaaggtgatatggcgcgcatgagcgctaacgccagctatcaggaagggcgccacagtgcgatgggggtgtcgctgcagggcggggcgacgctgacgatggaaggcggtgcgctgcatcgcgccgggataccgggcggcacccgcatgctgattgataccaacggtgtggcggatgtgccggtgcgtggctacggccgcaccagcaacaccaacgcctggggtaaggcggtgataggcgatgtgaacagctattaccgcaacaaggcgagcatcgatctgaacaagctcggcgacaacgccgaagccaccacatcggtggtgcaggcaacgctgactgaaggtgccatcggctatcgccagttcgacgtgattgccggcgagaaggccatggcggtcatcaagctggcggacggcagccagccgccgtttggtgccacggttatgaacgcccgcaagcaggagaccggtatcgtcaacgatggcggcagtgtctacctgagcggcatcaatgccggcgataccatgacggtgcactgggcaggcaacgcgcagtgcgaagttcggatgccaacgctgttgccggcggagatgctgatgaatagcctgctgttgccgtgccacccattgagtgcgcaggcgccgacccatgacggccagacagcaaccgaggatgcaccaggagcggtgacgtcgacagtgccagaacggacagtgcaaccgccatcgctgagcgatgaaaaccgcgagttgttttaa

SEQ ID NO: 426904 - DNA, 438 bp, Serratia marcescens
atgcaaggcgccattattgataccgcctgcgctatcgctattgagagccgcgaccagactatcgatatggaggtggtgccgttggcggatattattcgcgatggacaggggcgtagtaaacctttttccattgaactggtcaactgcactcttgaacgcccggatcccacattacctgactggaagcaatttcaggtcacgttcgacggggataatgagggtgaattatttggcgtgcggggtgaagcgtctgggatagcgctgcgtattaccgacgagaatggaaatattgccacgccgggtgtcccactgcgcgctcaggacattatcaccgataccatgcagcttaattatcacctgcggctggtcgccaatcaacatgcgctgaaagccggcaattatttttcagcgatacgtttcaagctggattatttctga

SEQ ID NO: 426905 - DNA, 549 bp, Serratia marcescens
atgaaactgaacaaagtaatgatggcaactgtgctggcacttggtgtttcttccactgcatttgctgcagatgaagggcacggtaaagtaaccttcacaggttctatcatcgatgcaccttgctctattacgcctgaatccatcgatcaaacggtagaactggggcagatttctaatgttgctctgaaaaatggcggcaaatccaacccgcgtccattttctatcgatctggaaaactgctcttttgaagccgatgctcaaggaaatccacagaaaaacaaagtggctgtaacctttaccggtatggagtcttcatctgtaagtggcctgctgggtattaccggtacagcacagggcgcaggcgtcgcgattacggacggttccggtgacgtaatttctctcggtcagccaactaaaacgcaggcactgcaagaaggcaataacaccctgagcttctccgcttatttgcagggtgctagcgcatccggcaccgctatcgtaccgggtgacttccaggccgtggctgattttaccctggcttataactaa

SEQ ID NO: 426906 - DNA, 924 bp, Serratia marcescens
atgaaatatatatttaatttcagcatggtctttctcccttcggaaagatctctatcaatacttaacaataaggaaattgagatttccctgtctgcgcctgcgacacgccttttgttggaactaataaagtacaaaggaacaacagtgaccagagaagcactgttgaaaaacgtctgggaagactatggcttttccggctctaacagcaatctcaactcttatatcagcgaaataagaaaggcattcattcaacttggatacagtgaaaaaatcatcatcacgattccaaagcaaggagtaaaactcgaagcaaatatagaaacgctagtaaagcaaccgccattggccggtgcttcagctctttcagagtgggtgccagcaggtgaagttaatgaggctaatgaggctaatgaggctaatgaggctaatgaggctaatgaggctaatgaggctaatgaggctaatgaggctaatgaggctaatgaggtagttctttcgcaaagcgctctgaagtcaatagacaaaagaaaaaagaggcgttatatcaacgcaattgatagtgttctgattgccctgctcttaataggttgtattatcgcattagtgaagcaacagcagaatcttgccatcaatgtccaaccagccgatattgaacctttgttccgtatcgaaaagtgtaatatcttcaccattgaagattacgatatctatcctaaagaaaaaactattaaactcgcattaaatgagatagaaaaggaaaaaatcaactgtaataacacctcttatgacctttactttgccaagatgttactcaataaggaaaactcccttttttcgtttctaggcatatgtttaaaaaatgaaaaaaacaagcagacatattgtaaaacccggacaaacaataatggcaaagaaaataattag

SEQ ID NO: 426907 - DNA, 1194 bp, Serratia marcescens
atgcgtcgaaatgtattaactggtgcgtttctggccattgtttcttctacggtggcaccgttaaatgcgatgggcactgaaagcagcgttgtgccatataaattgtcgcaattggcgagtgaggaaacgataggtgatgtcgaagttgtcgctgttttcgatggcgctatgccaacgggcgtaacggtgacggaaactggacggatatttgtttgtttccctcgatggggggatgaggttccttataccgttggagaagtaacaaatcggggggtgatagcgtatccgaatctcgagctgagtaatgggggactgcctcacgccaaaacacactttatcagtgtgcaaagtgtcatcgcggatggaaaaggttatctctgggtgctagatacggcggcacccgccttctcagcgccagaggttggcggtgcaaaacttgttgcgattgacttaaaaacgaatcagatcgtgaaaagcatcgtattctcaaaagatgttgttttacccaccacctatctaaatgatatgcgttttgactttcgtgtagggaagagtggcgtggcttatatcacagattcttcgactcgtggtcccggcggcatcattgttgtcgatcttgattctggcagcgctttccgccgtcttaccggtgacccttccacttccccagaaaaagggtttatgccaaaagttgaaggcaaaattttgctgcaacgttcccctgacggtaatgttgcacctctgagcgttgcctctgatgggatcgcactttcccctgacggcaaaacgctgtattacagcccactttcgggacggcacctttactctgtgccaactgacttattacgtgatatacgcgtcactgagcaacagctttccaaaaaggtaacagattggggagagaaaggggcttcggatggattggaggcggatgctacgggcgcaatatatgccagcgattacgagcataacgcgattcgaaaaatgagcaaggatggacgttggaccaccattgcccacggaccacagcttctctggcccgacactctttcaataggttatgacggttatctttattttatcgtcaatcaggtccatcgtcagccaggtttccataaaggggaagataagcgacagaagccttatgcgctgctccgcatacgtatcgatgctgctcctgccgaaacgcggtag

SEQ ID NO: 426908 - DNA, 135 bp, Serratia marcescens
atgcttaaaatggaactttccctgctaaatcaagaatatcaagcggcattaatcaccataaaaaagcttgaacagcaactctcagccaggagtaaaagtaggttgctttttatggggctgaaaaaaattagataa

SEQ ID NO: 426909 - DNA, 585 bp, Serratia marcescens
atgacagggaatatgattgatctagtttcatacacttttgcaactgcctttacacccggtcccaacaacatcgttgcactggcatcggttatggcacttggcctgaggcgcagcgtaccctttttattgggtataggtgtcggaatgagtgtgaccatgttagtaacaggcgcattgacctcctggctcctgctgagttttccggcggttctcgttcttttaaggggggcgggatttatttatctggtttggctcgcttataaaattgcaaccagtagccgttttgacgaggataatcgtaccagcggttatgggttcattggtggctttgttcttcaggttatcaatgcaaaaatcatactgtttaccataacggccatctccgctttcgtcattcctgccggtagcggcctgttatttattttaggtgcatgcctgatcactgcaatgatagcgtgtttgggaacgctgacctgggcggttgcaggggcatttctcaaaaaagcttatctgaattactttagaacggtaaatataacgatggctgtcgtgctaatctatttcgcctgcaaaatgattgtttga

SEQ ID NO: 426910 - DNA, 1581 bp, Serratia marcescens
atgaatggggttttcctcttcgagacaaccatttttgtcattctcattattattataataaattggctatctattaaaataaaaattccatcatcggtaatgttgatagtgggtggcagctttttggcatttatacctaacttacctgatattgctttcgaaccagagttgattcttctgattctgcttccgccattattaatggatggcgcatatttcactgctgtcgcttcgttcaggcagcacatatcgggcattctattattagccgtaggtgctgtactctttacaacgttatgcattggtgttgtcgttcacttccttatcccaacgctcccttgggctgcttgcttcgtgttaggcgcgatcgtttcaccacctgatgccgtttctgcccgggcaattctcaataaggtaaaattacccagcaggattactacattattggaaggtgaaagcttattgaatgatgcttctggattagttttattcaaagtggcggtggctgcaacattaggtggcgttttttcttttaaagatgccgcaatggattttatcttattatcatttggtggggttattgtcggggttgcaatctccataatatggattgcaatgctgaggtttttaaaaaatgacaatctgatggcgctattgtccgtgattttgtgctgggttacttacattattgctgaaaagattaatgtatcaggagtgattgccaccgtctctgcgggattgatatatgggtggtttcaacatagagagttcagtgcaacggtcagattgaaaacaacttttttttggaaaattatggtgtttctccttgaagcgatagtatttatcttgattggtctttcactaaaaggtgttattgagcgcgttggtggggttgaaaagattgctacaacgatgggcatgaccgttgtttctatcactgtagcggttatcttttcgcgctttatatgggttttccttgtcagaatgctggccttggctcttcataaatatcggctttctttccatccgctaagtgtgcaaggggcggcagtgctaagttgggctgggatgcgaggtattgtaacaatggcagtagcgtttacactaccggaagaatttcctggtcgggatttaatgttgattacggctttctcggtcattctggtaaccgttatgttgcaaggtgcctcgctaggctggatgatccggtggttaagaccacaagataagagcaaaaataaccaccatgatatacgcgcggtgagaaaaattatttcatatgaaaaaaagaaggcacttgatagtctaaaggcgagggagataaaaaaacagggtttcagttcactggtcaactattttagtcttcagattgctaatgatgagacacatgcctattcagatcttaaaggtaactgcgctcaagaagaggttgtaatcgataagttgattggtgctgccagggccgctttattgtcattgcatgagtctgataagatcagtgataccgacatgcattatattgaaagagaaattgactttgaagaactttacttaaaaagcgcaatttcgaatgacgaatag

SEQ ID NO: 426911 - DNA, 969 bp, Serratia marcescens
atggatcccttatccgccttgctcggactgttaaaagtcactaactatcattcagccacattgtcgctcggcggcaattgggcattcgattttccgcaacgaggcggtatcaaatttaccgcagtggtaaaaggaagctgcctgttaaaaatggacggcgagtctaccctacaacgccttcatcaaggcgattgctttttaatgacccgaggcgtcccttttcagctttacagcgatacctcactccctcccatggattcaaatgattacatcgtgcaccggggcgagcgcgaaattgctttgcattacaacggcgacgatgttcagctcgtcggcggccgatttgaatttaccggcatgccagcgcgcgttttgctggagatgctgccgccggttgtgcatgtgcatggcgaatcgctgcaagcctctgccttacgctggttgcttgaacgtttatctcaggaattgcacgaaaccaaatacgggcgctcgcttatcgccgaacactatgcccacattatgctggttgaagtattgcgcgttcatctctcgtcgcgaagccaccatgatataggctggttttctgcgctggctgacaaacagttaggggcggcgatcgcagcggttcacaacgctttatcgttcccctggaccgtggataacatggcgaataaggccaatatgtcccgctcagcgtttgcccaccgcttcaaagatgtggtcggattatcgcctatggaataccttacccgctggcggatgttgcaagcctgcgatatgctaaaaaatggtgaattatcaatatccacgattgcatttgagctggggtatcagtctgagagcgccttcagcaacgcctttaaacggataatgacgctatccccccgccattatcagcggctgcccgccaccggaatgcgtattttgccgcctatctcattgacggcctctcctgatatgcatcagtaa

SEQ ID NO: 426912 - DNA, 1428 bp, Serratia marcescens
atgcaaagaacttttatggtcgcgaaaggcaagctcagcttgctggctatgatgctgatcttggccggctgcaccgttggtcccgattaccgggccaagcatgacgagccgctgatactatcgcagcctttagatcaaaagctttacagcaatgaaagattgcaacgtgaatggtggcgccagttccaggatccccaactcaatcaggctatcgatcttgcattacgtaacaatcaggatattcaaatagcgcaagcgaggctgttggaggcgcgagccgcgttggatgaaaggcagcttgataggttgccaagtatcaccagcggcatgtcgtatacgcgtagcctctctcaggaaaatccgggcgttaccggggagcctaacgtggcgaaaaactaccgtggcgcgttggacatgcaatgggaagtcgatttgtttggtcggttgcagcggatctctgaagcggcaatggcgcgcagccaggccagcgaagacgaccttgcgcaggtgcaaatcatcgtcactgccgacgtggcacgtaactattttcaaatgcgtggtgcgcaaaaaaaactggagatcgcccatgcgcatttaaccaatcaacaacaaacggtgcgagtggttgaagcgatggttgccgctgggcgcgggcaagaagatgaactcgcgagcgcaagggctgaacgtgctcgcgttgaggctagcttggcgccgatgacagagcaatattatcttgcgcgttataaattagccgtattgatggggttacgcccgaacgacgttgagcaaatcataccgaaaacgccattgccgacgttgagcgttcgtttaccgatcggcgacgtgggcgagctgttacgccagcgcccggacgtagccagcgcggagcgttcgttggcggcttcaacggcggatgttggcgcagcgaccgccgagctgtatccgcgcattaatctgggcggatttatcgggtttgtcgctattcgaggcggagatatccccaatggagacagcagagcctttggcatcatgccttctatagattggcctgcgctgcatttcgccaccgtgaaggccaaacaacgccaagcgcaagcgcgcctccagggcgctgaagcacggcatagacagacggtgttgcaagcaatagaggagactgaaggcgctttaatgcgctatagccagtcgcagcagcgcttacaggctttgacggacgcggcgtcggaaagtcggcgagcggccgcgttggctgaggcccgctacaaagccggtggcgcgccctatctgaccagcctggcggccgatcgcacaaggttatcggccgaggaaagcctggcagaggcggatacggaaacgtttatcgatatagtgatggtatataaggcattgggagggggatggtccgcggggaggggcgcgtcataa

SEQ ID NO: 426913 - DNA, 3096 bp, Serratia marcescens
atgaagtttaccgacatattcgtccggcggccggtattggcgctggttgtcagcacattgatctttttaatggggctgttagcgcttaataacttgcccgtacggcaatatcccttaaccgaaagttcgacgcttaccatcaccacacagtaccctggtgcgtcaccacagctgatgcaaggttttgtcacccagacgatcgcgcaggctgtcgctaccgtcgaagatgtcgactatatgacgtcaacatcgacacagggtcgcagcgttattatggtgcgcatgaagctcaatgccgattctaataaggcaatgacccagattatggccaaggtaagcgaggtgaaataccgcttgcccgcagaagcttacgatcctgtaatcgtgaagtcatcgggagatgctactgcggttgcttatgtcggtttttcaagcccgacgatgagtacggcggcgctttctgactacgtttcccgcattgtacagcctcagctctcttctatcgaaggtgttgggagtctggatttgaacggcgggcaaagaatggcgatgcgagtttggttgaacgccgagcaaatggcggcgcgcggcatcgcggctggagacgtttcacgggcgttgctggagaacaatgtacaggccgctccgggccaggcgaaggggctttatgttgtttccgatattcaggtaaatacggatcttgtcagtgtcgatgagttccgcaatatggttgttaaaagaacgataaacggtgttgtgtatcttcgtgatatcgctaccgttgaactgggcgcggcgtcaaccaacaccagcgcattaatggatggcgtcaatgccgtttattttgggctgaatgccgcgccgaatgccaacccattggttatcgtaaaaaaacttaatgaaatactgccggagattaaaaagaacctgccccctgatgtaacggttgcggtgccttttgaactggcacgttttatcagcgcctccatcgatgaagtcgttcatacgttaattgaagccatcgttattgttattttcgtcatttttctcagtttgggctctgcgcgagcggtcattattccggttattaccattcccttatcgatgttgggagcggcggcattaatggccatgttcggcttcagcattaatttattgaccttattggcgatggttttggcgataggacttgtggttgatgacgccatcatcgtcgtggaaaacgtacatcggcatattgaagaagggcattctcccgctcgtgctgcattgataggcgcacgcgaagtcgccgcgccggttatcgccatgacgctcacgctggcggccgtgtatgcgccgataggattgatgggcgggctaacgggatcgctgttcaaagagttcgcctttacgctggcgggatcggtattgatatcagggatcatcgcgttgacgctatcacccgtgatgagttctttcttactgaatcagcatcagcaagaaagctggatgtctctgcaagccgaacgatttttcagccggttagggaatgcatacgggcgtttattaaatttgtcgttgcatcatcgctgggtaacctgctgcgtagctttgattgttctggtcagcctgccgttgttatatcacagcgccaaaaccgaattggcgccggtagaagatcagtctaccgttttgacggccataaaaacgccgcaaaatgcaaatatagagtacgtagagaagttcggccaaaaatggaatcaggtcatgtcgacgttgccggagcaaagcaatctttggttaatcaacggaatgaacggcgtctctaacagcataggcggcgtcaattttgtcgactgggagaagcgaaagcgcaacgctgatcagatacagagcgatatgcaaaatcgcgccaacggcattgaaggcagcagcgtattcgcattccagttgccgtcattaccgggaacaaccggcggtctgccggtacagatggtgatcaagagcgcaggcggttacaaccaggtttatgaggcgatggaatcgctgaagaaaaccgctcggcaaagcggattgtttatggtggtagacagcgatcttgactacaacaattcggtgatcaggatcaacatcgatcggaccaaggcgagcagtatggacgtcagcatgaaagatatcggcgataccctggcgatattggtaggcgagaattacgttaaccgatttggtatggaaggtcgttcatacgatgtgattccgcaaagtttacgggatcagcggttatcaccggaggcgctggctagcttctacgtgaccagcgtttcgggaaaacaggtgtctcttgcaaatctggtgaccttatcgaacggggttgaacccaaccagctgacgcagtttaaccagcagaattcagcgaccttccaagccattttgaatccgggcgtcacgatgggagaggccgttaagtttttggagcaacgcgggaaggaactgccgcctggttttacctatgactggctatccgatgcgcgacaatatcatcaggaaggatcggcgctgataatggcgtttgttttcgccattatcgtcatttatctggtattggccgcgcagtatgagagtttgcgcgatccgttcatcattctgattagcgtgccgatgtcgatctgcggagccttgatacctttggctttaggtatggcaaccatcaatatttacacgcaaattggactggtcacgctaattggattgatcagcaaacatgggattctgatggtggagtttgccaatgaaatccaggtgaaagagagggttgatcgccgggaggccattttgcaatcggcgaagatgcgtttgcgtccaatcttgatgacaacctgcgccatggttgcaggtttaatccctttactgttcgcgaccggagccggtgcccacagccgctttgatcttggtttggttctggtggtgggaatgtcggtcggtacgctatttaccttactggtgctgccgacgatgtattcgattattgccgttgaccaccgcgccggggcagacacaccgcgcgccagagcgttggcttttaacgatgaaccgacagaatctgcgcacggataa

SEQ ID NO: 426914 - DNA, 1122 bp, Serratia marcescens
atgaacagtaaatccaaatcagtattctatgttatgggtatcctgagcgccttagcgctgacatcaggggctttatatttctccaggagcgctgactcaggtaataatacacagagtcagcaagcgattcttgttgccgctgaggaggcgcgcgctaaaacggtaccgacggtgctgacgggtatcggtgagctggaggcgactcgtcaggtcatggtgacgtcagaaagcggcggattggttaccgccattctctttaacgccggcgctcgcgtgcatgcgggacaaacgctggtgcaactcaacgatgcgccagaacaggggcaattgattaagttaaaagccgagagcgtaaatgccgaagcacaattggcgcgtacgcgtacgctctttcgccaacaagctgccacgcaagaacagcttgatcaggttcaggccaattggcagcaactccaaggtgaaattgttagagttcaagccttaatcgatcagaagcgcattaaggctcctttcagcggtgtgttgggggtgcgtaaagtgaacaccgggcaatttatacaagcaggcgacgggatggtctctttaaccgatgccggcgagatatatgcaaacatcacgttaccggaacacgcattacctgtgattaaaacagggttgaagatgaatatcacggtagatgcttacccaaatcaaacgtttagcggcaccatcagcacaattgaacccatgattgatagaggcacaagaaccctgctggttcaggccacactcgctaattccgataatcgcttgtctcctggcatgtttgtgaaaggcagcatttcattgcccgatccgcagaagatcgtgagcgtaccggaaacggccatcagctataacgcctacggggattttatctacgtaattgataaaaatgatgaaaataaactcgttgcccgccaggtttatgtcaaaaccggggggcgcgatggcagctacgtcgctattgtcgaaggcatcaaggccggagtacgcgtcatcacgtccggacaactccgtatcaacaacggggcacctgtcgaaattgcatcggtggatactctagccactgaagatcaaagcgcgcatagcgtggctcagtaa

SEQ ID NO: 426915 - DNA, 423 bp, Serratia marcescens
atgagcacggctgatgatgctaatagtgagattattgacaacgaaaacgcaaacaataacaacgagagcaaagttattattactaataaccacacctctgaaaaaaacattatagctaagaacaccgcaaatttagagggagatattggtgtagatgtaaaaaaagattttaatataacaaatatcactggttccggtgaacaggcaaaaacaagtactatttggtatgtaatatccttcgtcctcactttatatgcatgtgtgctgactttcattcttgtaattgatgtgctgtcgactggtggtgaaaacatcctaacctatacaaaagaatcttgggcagtgtttactccaataatcaccctatccttagggtatttgtttggaaaaaaggatgaaagcacaaaaagcaaagttgaataa

SEQ ID NO: 426916 - DNA, 390 bp, Serratia marcescens
atggaaaacaaaatcgtaaacaaactctctatagatgatttcatcatagatgaaagcgtaagcattatcacgagaaagaatgaagttatcaatatcacggtcggaggtgacattgagttatccatcgaagtaaaaaaaactggagaaacagcaaaaataactaagaagccttcagagaaaaaaatcaacttcactatacataaaatagatgaaatgctgacagacggttttagcagcaactttttccccatctattacaatgataaaagaaaatatttcatgaggattggtgttgcaaaattctctaaagccggaattgaactttttttaatttttgccagtaaatccaatgaagaatcagaaaaaggttctcttgagggcgacgcataa

SEQ ID NO: 426917 - DNA, 231 bp, Serratia marcescens
atgattattaactatatcttagagaatgataaatacttcattggggtgattatatcagcgctaatgataatgttattctccattttctcattcaaaattataagtaagattaaaacaggaacagagaagaaagtatttttagtttattcttactatttaataacaaagcctggttttatggtttttattacggctatattttcaattttcatttataagctttgtaggtaa

SEQ ID NO: 426918 - DNA, 1467 bp, Serratia marcescens
gtgaccctgctcgatgaaaccccggatacccgttacctgcagctggcggatacgctggccgaggccattcgccgcggcacgctgctgcccggcgaccgcttgccttcggtgcggcgctgtgcgcaaacccatcgcgtcagtattaatactgtggtgtcggcttaccgcacgctggaggatcgcgggctgatcgaagcgcggccgcaatcggggttttatgtccgcagcacgctgccggcgctgaagatggcctcggcgcccagcggccgcatcgagccgccggcggacgacgtgctggcgctgatcgatactgtgttcgccgcccagcagaatccggccttcaccaacattgcgctggcctgcccgcagaccagcgatttttatcccggcggcaagctggggcgcatgctgtcctctcagctgcgccgtcaaccggatctgatcggacagtattcgttgccgcccggcagcctgcggctgcgtcagcagatcgcccgccgttcgatgacgctgggcatgctgctggagccgggcgacgtggtgctgacccacggctgcatggaggcgttgcagctggcgctgcgcgtcaccaccaaaccgggcgactgcgtcgggctggagtcaccgacctacttctacctgctgccgctgctggccagcctggggctgaaagcgctggaaatccccaccgatccgcagctggggctgtcgctggacgcgctggagctgctattgaacgagaaacggctgaacgcggtgattgccatgcccacggtgcaaaacccgctgggctgcaccatgccgctggcggcgaaaaagcggctggctcggctgatgaacgatcatcaggtgccgttgattgaagacgggctgtatgccgagattcagttcggcggcgcgctgtcgccggcggtgaaggcgttcgatcgcgacggctgggtgctgttttgctccagcttcaccaaaacgctggcgccggattttcgcgtcggctggatctgcggcggccgctttcacgaggcgttgcgcaagctgaaggcggtgtcgtcgatgtccgagtcgcagctgctgtcggaaacgctggcgaccttcctggagagcggcggttacgatcaccatttgcgcaacctgcgcaagcgctatgcggcgcaggtagacgaggcgcgggcgctgatcgcccggcatttcccgcgcggcacgctggccacgcagccggcgggcggcttcgtgttttgggttgagttcccccccaacgtggacagcgtagcgctgttccaccaactgctggaagagcagatctgtttgacgccgggcaccctgtattcccccagcgggcgctaccgcaacgcgctgcggctctcctgttgctacccgttcaacgcgcgctacacccaggcgttggcccggctcggcgccagagcctgcgagatgagcggcctgccgcccggcattgcgcaggacgggtaa

SEQ ID NO: 426919 - DNA, 411 bp, Serratia marcescens
atgacaagactttatctctctttgctgtgcgtactgctactgaacggctgtcaatccactcagccctggtaccatccgttggatgtctcgctcaaagacaaccaaccttgctttgccgtgcctatcaacagcgttcgtagcggcgacagcctgcaaaaccggggggtgattgtctcacggcaggaacaacaacaatggcatatcgtctggacctcacctgaagtcacttcgttgcctgacctgaaaccagggcaatgtgtcacttatccgcaagtaaactgggctgcgggagaatactcagtcttgctcggcgtctcgatgaataacgatacggaaaggcgtaagtacatgagaacctttactttaagcatcgaacgtaatggaaagacgcaattacatagcgatcattaa

SEQ ID NO: 426920 - DNA, 540 bp, Serratia marcescens
atggccacaactcacggaaattcacggaaacttacggccggtgaaatcacattggccagactgctctacaaagatgctgtcgattacacccgtgttcgcgtccataacggcagctatttccccttcggcttacagcatgaagatacggccgtaacaccaaatggcacgctctattttatgcccaaacacttcaaagaagactttgccacggcaaacgcctacgatcagcattggtttatccatgaaatggcgcatgtctggcaatatcaattaggcatgaacgtacgcctgcgcgggttggctagttgggcagtttcctatcagtattccttgcccaattatcatcttctatccgattatggaatggaggcgcaggcaagtatcattgcagactatttttacctaactaaattcggacgcaatggctttcaaataatcaccaactacagcggcattattgggccagacatcaaaaaacgctatgaatgggtattgcgagctttcttgaaaaatccaaagaatcggaacaccttgttatga

SEQ ID NO: 426921 - DNA, 1137 bp, Serratia marcescens
atgagaaaaaatacaacgccaatattcattggcggcgtcttgctgtcggcgttatccgccggcgcacaggccgagatcaccattctggataaaaacccgcagagcaatgtgttgctggcaccgctcagtttaaaggtgggcggcagcattcgccccgagtggatcttcaataacggcccggagccgggctatgacaaaaacggccacgacggcggcacgcgttttcgcttcagcggcgactatgcgctgacgcaggacacctcgatcatcggctattacgagtggggcgtcgatctggcgcacgcgctcagctgggacgggcactataacgaagacggcaagcgcgactatcagcgccagctgtacgccggtttcaaagacgatcgttacggcaccctgacctacggccatcaatacggcatctattattcggtggtcggcatcaaaagcgacgtctgggataacgatggccacgcgggcggcaccggcataggtatttccggcgactacgacggcggcaataaaccgaaaaacagcatcaagtacaccaatgatttcgggccggtaacgctgtacgccaactatttattgccggaagacgatctgcacaccgcggataacctgatttatcgccgcaagggcgggggcgggctgggcttcgattacaaggtgacgaaggatttcaccttcagcgcggcctacagttataccgacgcgaagatcaaagacaatctgtacaacgaaaaggattatcaccagcagctgtccggcaccgcgttgacctggcagccgaacaactggtacatcgtcggcaccgccagctactacaaagactatgtgccgagcacccgccagcgcacgctgtcgcacttcttcgccggtgacggctacgggttggaaggcttcgtcggttacaccttcaatatcgacaagccgttcctcaaatcgatccagccttacgtggcggcggactcgttgcggctgaagggggacgaggcgtatcacgccaaccacgtttacctcggcgcgggcaccaccatcggttacggtctgtcggtgtatgtggagcgcacgctggccaacagcagcgacaacgagccggactccacctggattacggtgttctacgacttctga

SEQ ID NO: 426922 - DNA, 324 bp, Serratia marcescens
atgaagcaggaaaaaacgtttcggagtcaggcctttgaggcgattcacagcgccgctgaaggattgcatcgtgctggcgccatttctctggaaaccctacgcagttttgatgagtcttgccttgcgccggtcgagatgttgcagccccaggagatcaaagcgttgcgcgagcagttacgtttaagccaaccggtttttgcccgttatctgaataccagcgtgtcgaccatacagaaatgggagacgggggtgaaacggccgggcggcgtgtcgcttaagctgctttcgatcgtacgcaagcacgggcttgaggtcttgttgtag

SEQ ID NO: 426923 - DNA, 285 bp, Serratia marcescens
atgctcactgccatgattgccgcatgcgggctgtggggcgtcagctggtgcctcggcgatcgcttggccagcgcctggggcgttttgctgccgtgcgcgctgatgccgctgctggccttgatcgatctcgatatgatgcagctgcgcagcctgatcgtgatagcgatgttggcgacgctggtgatgctgttcaacagccggttgcgtcattatctgctgctgccttcctgcatggcgctggcgggcggcctggcggcggtcagcctcaacttcagcttcgggtga

SEQ ID NO: 426924 - DNA, 276 bp, Serratia marcescens
atgctcaacatcgaatggactcgagccgcacgtcaggatctggcggagattgtgggattcatcgccaatgataaccctctggcggccagaaaaatgaaggttctcatcatggaggccgtcattcccgccggcagacatcctcgaattttccggcgcggcagagtggacggcacgcatgaaatccccctacatccccattatctcctggtttaccaggtgctggaaactcacatccgggcgttgcgggttttacatacgcgccgacaatatccttaa

SEQ ID NO: 426925 - DNA, 1053 bp, Serratia marcescens
atgaacattacccatgcctatgccgcgcatgacgcgaagtctgcgctggtgcctttcgattaccagccgcgcgccctgcgcgagcacgatgtgcaaattcaggtgttgttctgcggcgtctgccactcggatctgcaccaggcgcgcaatgaatggagcaataccatttacccggtggtgccgggccacgaaatcgtcggccgcgttagcgccgtcggcgaccacgtctcgcgttaccgagtcggcgatctggtcggcgtcgggtgcatggtggattcctgccgcagctgcccgagctgcgatgaggggctggagcagtattgcgagaacggcttcaccggcacctataacggtcaggatcgccagaccggcgccgtgacctacggcggctactccaccgatctggtggtagatcaggacttcgtgctgcgcgtgccggagaatctcgatccggccggggtcgcgccgctgctgtgcgccggcatcaccacctattcgccgctgcgccagtggggcgcggggccaggcaaaaaggtcggcatcgtcgggctcggcgggctggggcacatgggcgtcaaactggcgcgggcgatgggcgcgcacgtggtgctgttcaccacctcgccgtcgaaaatcgaagacgctaagcgtcttggcgcgcatgaagtggtgatttcgcgcaacccggaggagatggcgcagcacgtcaacagcttcgacttcatcctcaacacggtagcggcccagcacgatctgaatccgttcctcaacctgctgcgccgcgacggcaccctgacgctggtcggcgcgccggagcacgatcatccgtcgccgcaggtgttcaatctgatcatgaagcgccgccgcatcgccggttcgctgatcggcggcatcgcggaaacgcaagagatgctggacttctgcggccaacacggcatcacgtcggatatcgagctgatcccgatgcagcagattaatgaagcctatgagcgcatgctgaaaagcgacgtgaagtaccgcttcgtggtggatatcgactcgctgcgggtctga

SEQ ID NO: 426926 - DNA, 627 bp, Serratia marcescens
atgttgcgtcgcccgcaacatctgctcgtcagccacggaggcggcgtcgtagacccaacggaaagcgccgtcagccttgcagatttgcaataccgcgcgcgagccggaagccatgatggcggcaaccccctcgtcttcaggctgcaacccctgcgccgagcgccggctgacgatcgataccgccgtcggccaagtctgagacgctcgcaggtccgcatcgcgcgtcagcaacgcgggatgataatcggcatgagcgcgcaactggctatattcctgttccagcgcggccaacgcctgctggaaattgccggtgtgatcaacagagacctgcagcggcagcacgcgcgcgctcaggtgagcccaacgcccccaattccgatcgtccggggtgatccaccccagctgaaaatcggtttcattgcacatgcgcgccagataaagggttgctgccgccagcacatgctcgccggcaattttttccaggcgctgccaggccgtcgcctgccagcgtgcgggaagatccgcctggcggccaggccccggcgggaacggcgccggataataacgcgtcaggcgcggttgccaaaaagcggcgctatcggcgctggcgccatacgccgcgcctaa

SEQ ID NO: 426927 - DNA, 870 bp, Serratia marcescens
atgcccgcccagttcgaagaagtggtcatagcgaccgacgcgctctacgcccagcagctcgcgccagatagccgccagcagattttccgcctcgccctgcggcggcgcataggcttcacgcacataggcgtcgacctgcggcaccggcagagcccgcttgtccaatttgccgttgccggtcagcggcaacgcctccagccaaacgtaagccaccggcaccatataatccggcagccgcgcctgcagatgctgacgcagcccggtcgccagcgtagcgcgttcggcttcctgtgccggaaccacccacgccaccagtcgcttgcccccgtcgccatcgtcaatcgcgtccacggctacgctgcgcacgcgcggatcggtactcagctgagcctccacctcgccgcattcgatacggaaaccgcggatttttacctgctggtcattgcgccccaggtattcgatatcgccccccggcagatagcgcgccagatcgccggtacgatacatgcgcgcacccggcgcccggttgaaaggatcatcgagaaaacgttccgccgtcaattcgggccggttcaggtaaccccgcgccaccccttcgccgccgacgtacagttcgccgatcgcccccatcggcaccggttcgccgtcggcgcccagcagatacatgcgcaaatccgggatgcggctgccgatcggactggtggtgatcgccgtatcctgcgccgacagcggccgataagtcacatgcaccgtggtctcggtgataccgtacatgttgatcaaccgtgtctgccggttctctggacgagcaaaccacggcgcaagatcgcaaggcttcagcatttcgccaccgaacacgatctcgcgtag

SEQ ID NO: 426928 - DNA, 498 bp, Serratia marcescens
atgacaggtgagcaggaacaggtgctcctcatccgccaggcggatcagcgcggcgcgcaccagcggcccctgcgtcaaatcgaacggttgagtggccgcctgacggcacagcgtgtcggcttgcgcggggtgacgtcgcagatcgtggaacgcaagcggcagcccgtttgccggcaaaatctgcacctgtggccgatcttcccgggtgatgaaccggctacgcagcgattcgtgacgcgcatagagcgcatccagactatgttgcagcgcctgccggtccaaccggccgtgcagccgcagcgccagggggatatggtaggtttcgctcatcccctccaactgggtcaggaaccacaggcgttgctgggcgaacgacaggggcaaatcgccgtcgcgcgccaccggcagtatcggcagcggttcctgagccggcgcaacttccagcgcctgcgccagcacgtgcagtaccgggctggcgaacagcgcctgcaacggtaa

SEQ ID NO: 426929 - DNA, 201 bp, Serratia marcescens
gtgcaacaatactgtgagttagtacgccgtacttacgccgagattggcagtggagatcttggctacgtgcctgatgcgctggcttgtgcgttaaaggcattggacgatgtcgcagcgaacgacgcgctaccgtcctccgttagggaacaggcggcctttgccgccgctaacttattggtgagcgactatgttgatgaatga

SEQ ID NO: 426930 - DNA, 1620 bp, Serratia marcescens
atgctgaaaaatatgaaaatagccacctggctgatgttgatgctgttgctgttgggcttgatgcccatgggaaccggcgccatcgccttctatttcatgcagcaaaacggcaacagcatcggcaggatgagcactttctccgacgaggaagcggcgctgaaccgcagttggcgtgctttgctgcaaacgcagacgctgatcgacaacatggcgttcgagcgcatggcgcagacggacgccgccgatatccgtaagggcatcactgaggcgcgtaacgagctgcgcagcgccgacgttgcgttcaacctgttttgggagacgccgggcctgacggtatcgcgcccggatctgggcgaggcgatgaaaacggtctatctggcgcagcaggcggtgctgaagcaagagctgacgctgttggccgacacgccgcaggcggcgctgatcgagcggctgcacgccatggccgctgagaagcgccaggtgcgccagcggctggatagtcagtttgccgactacatgcgggccacggtggccgctcatcgtctggcggtggaggcggcggtgcagacccaaaaagtctttgcacgcctgctgagcggcaccctggcggcgatcctgctgctgctggtcgccgtgcaacgtgatttccgccggcgcttgatcctgccgctgcgccagatcgccgaacacttgcaaaaggttgggcgcggcgatctgcgcagcgagatcgcggtacgcaacagcaatgagatcggcatgctgttcgccagcctgcggacgatgcagcaggagctgagcgccaccgtgcaacaggtgcgtgatggcgtggagtcgatcaatcacggtacgcacgagatcgccgtcggcaacgccgatctttccagccgtacggaagaacaggccagcgcgctgacggaaaccgccgccagcatggaacagatcaccgctacggtgcggcaaaacgccgataacgccagccaggccgccggcatggtcaatcagactgccggcattgcccgcaacggcgaaacgctgatggccaacgcggtcgacaagatgcgggctatcaacgacagcgcgcgccaggtgggggatatcaccagcgtgatcgacggcatcgccttccagaccaatattctggcgctgaacgccgccgtggaggccgcgcgagccggagaacaaggcagggggtttgcggtggtggccggcgaggtgcgcaatctggcgcagcgctgcgcgacctcggccaaggagatcagcagtttggtcgacggcgtaaccggcgatatcgccgtcggcgtgcgcctggtcgagcaggcgggcgagacgatgaatgccatcgttggctcggtgaaccaggtgacgtcgctgatggacaacatctcgtacgcgtcggaagagcaaagcaagggcattgagcaggtcggagtggcggtgacccagatggatcaggtgacgcagcagaacgccgcgctggtggaggaggtggcgaccaccgccgtcggcgtggaggagcaggcggccctgctggcgcaggcggtggcggtattccaactggcggagggggaataccgccaggacgaagcgcaggcatcggcggccgttgccggttgggcataa

SEQ ID NO: 426931 - DNA, 1008 bp, Serratia marcescens; identical to SEQ ID NO: 425016

SEQ ID NO: 426932 - DNA, 534 bp, Serratia marcescens
atggaacgccaaatcgcggcgcgcgatggcgcgcttttcgccggtgtggatgcgcagctcgagcagcatttcctgacgccgagccagcggctgtcgccgccgggcgtcggcaatgtcatgttgctgatggtttgcctgacgctggggctggcgggcgtgatgggcctggccacggacgtggcggccgcctggagcggcaagacttccgctgccgttctcatgggcagcggcgcgatcgtggcggtgtggatgacgttgatcctgttccaactggtgcagggtaaaaacagcggggtggtattgttgcaatattaccttggcatgctcggcctgttttgccttggcgccgcggcggcgtgggcggcggggatgaccggcatcgccactgtcgccatgctgctggggggcgtggttggcggggcgctattcagcaaccgggcggcgttctctctctatgtcgcctattttcgcacgcgtcggcgcgtgttgatcaaacgccgttggcagagagaagatctgcgcaacacccgataa

SEQ ID NO: 426933 - DNA, 393 bp, Serratia marcescens
gtgggtagcgtcttgggtacggaagttccagcgcttaacagtgccagcaaaacctttacctttagaagtaccggtaacatcgacttttttaacgtcagcgaagatttctacgctaatttcctgacctgcagcgaattcttgaccttcttccaggcggaattcccacagaccacggccagcttcaacgccagctttagcgaaatggcccgcttccggcttggttacacggttagcttttttgctaccggtggtaacctgaacggcacggtaaccgtcggtgtccaggcttttaacctgagtcacacggttcgcttcaatttcaattacggttactgggatagaaacgccatcttcagtgaagatacgggtcatacccacttttttaccgactaa

SEQ ID NO: 426934 - DNA, 1344 bp, Serratia marcescens
atggcttcacccaagaaaatagggcttattgcctgcaccggcgtcgtcgccggtaatatgatggggagcgggattgccttattgcccgccaacctggcgagtctcggatctatcgccatttggggatgggtgatctcgattatcggggcgatgtcgctggcctatgtgtatgcccgcctcgccaccaaaaacccgcagcagggcggccctatcgcttatgcgggtgaaatttccccggccttcggtttccagaccggcgtgctttattaccatgccaactggatcggtaacctggccatcggcattaccgccgtttcttatctctccaccttcttcccggcgctgaataacccggtacctgccggcatcgcctgtatcgccatcgtgtggatcttcaccttcgtcaacatgctgggcggaacctgggtcagccgtttgaccaccctgggcctggtgctggtgctgatcccggtgatcgtgactgccaccctcggctggcactggtttgacgccgccacctaccaggctaactggaatacctccggtaccaccgacagccatgcggtgattaaaagtatcctgctgtgcctgtgggcatttatcggtgtggaatccgcagcggtcagcaccggcatggtgaaaaacccgaaacgcaccgtgccgctggcgaccatgctcggcaccggcctggcgggcattatctacatcgccgccactcaggtgatcagcggtatgttcccggcgtctgaaatggccgccagcggcgcgccgttcgccatcagcgcctcggcgattatgggcaactgggccgcaccgatggtttccgccttcactgccttcgcctgcctgacgtcgctcggttcgtggatgatgctggtcggccaggccggggtacgcgccgccaacgacggcaacttcccgaaagtgtacggcgagctggataaaaacggcattccgaagaaaggcctgctgctggccggctgcaaaatgaccgcgctgatggtgctgatcaccctgatgagctccgccggcggcaaagcgtccgacctgttcggcgaactgaccggcatcgcggtgctgctgaccatgctgccttacttctactcctgcgtagacctgatccgcttcgaaggggtcaacgtgcgcaacctgctgagcctgatcgcttcggtgtgcggctgcggtttctgcttcatcgcgctgatgggcgccaactcattcgaactgtccggcacctttatcatcagcctgattatcctgatgttctacgcccggaaaatgaatacccgccaggctgccaacgccgcggcggtcgatgaaaacaccacggccaaagcgcactga

SEQ ID NO: 426935 - DNA, 1554 bp, Serratia marcescens; identical to SEQ ID NO: 426559

SEQ ID NO: 426936 - DNA, 390 bp, Serratia marcescens
atgctggcgttacgtcaggtacaccatatcgcgatcattggcgcggattacgccgccagcaagcgtttttactgtgacattctcggattcaccctgctgagcgaagtctaccgcgaggagcgcgactcctggaaagcggatctggcgctcaacgggcaatacgccatcgagctgttttctttcccttcgccgccggctcgcgtcagccgcccggaggcctgcggcctgcgccatttggcgttcagcgttgacgacattgaccaagccatcgcccatctgcaggcggccggcgtcgcctgcgaaccggtacgcgtcgatccttacacccaatcccgctttacctttttcagcgatcccgatggtttaccgttagaattatacgagagttaa

SEQ ID NO: 426937 - DNA, 963 bp, Serratia marcescens
atgcacaccaccacctcgccgcactacggcatcgtggcgtcgatggagaccgcggccgccatgctgcgcggcaacccggggcgccgcttgatcaaccgctcggtggagcgcgcgctgcattttcgccgtgaagtgcagcggctgcgcgaggagagcgacagttggttcttcgacatttggcagccggaagagatcgatgaagcgcaatgctggccactggatccggacgacaactggcacggtttcggccagaccgatcgcgatcacatgtacctcgatccgatcaaggtgacgatcctgacgccgggcatgaacgagctgggtgcgctggaggaggaggggatcccggcggcgctggtggcgaagtacctcgacgagcgcggcatcgtggtggagaagaccgggccgtacaacctgctgttcctgttcagcatcggcatcgacaaaaccaaggcgatgagcctgctgcgcggcctgaccgacttcaagcgcgcctacgatctcaatctgcgggtgaagaacatgctgccggatctgtacgccgaggatccggatttctatcgcaacatgcgcattcaggatctggccgccggcattcatcgcctgatctgccagcacgatctgccgcgcctgatgcagcgggcgttcgacgtgctgccggaaatgaagctgacgccgcaccagatgttccaggagcaggtgcggggcaacgtggaaacctgtgagctggatcagctggtgggcaaggtggcggccaatatgatcctgccgtatccgccgggcgtgccgctggtgatgccgggggaaatgatcaccgaagagagccgggcggtactcgattttctgctgatgttgtgctcgatcggcgaacgttaccccggttttgaaaccgacatccacggcgccagactgacggaggacgggcgctatctggtgaaggtgttgaaagccccacagccataa

SEQ ID NO: 426938 - DNA, 549 bp, Serratia marcescens
gtggcgcagcttaaccgggataccgagcatgccaacgacggcagcatcagcccgatattcaacaaggagaaggagcagaaccggctcaagcaggcgcagttgattggggagattggcggccaggcgatggacgtcatccgcacgcagggggatatcgccgggctgaaggcacagaaagacccggcggcgctggcgcaggccagggaacagcttgagaagagcggcaaaccgacgaacgatgcggcggtgatgcagcgggcatacgacaacgcgatgcggcaatacggcaccggcagcgacctgcagaaggcggcgcaggcggtaacgggggcgctgacggcgctggcgggcaataacctggcgggcgcgctggcgagcggcgcctcgccgtatctggcgacggaaatcaagaaactgaccaccaatccgctgaccggtgaagtcgacgttgctgccaacacaatggcgcacgctgtactgggggcggtgaactggcggcgcgctacattgccgggcagctgttcccgggcaaaacggcgcagcagctga

SEQ ID NO: 426939 - DNA, 927 bp, Serratia marcescens
gtgaaggtggtatggacgcgcgaggacgacatccgcaacggctggtatcgcccgatgatcctgcaccgcctgcgcggcgccatccgcggcggcaaggtggtgggctggaccgataccgtggtcggccactcctggacgcggcacagcgcgatggatgcgctggtggtcaacggcctcgatcagatgatggtcgagggcgccagcgaggtgtcatacagctttgaagccttccgctgcgatgcgcacatcgtgccgggcaaggtgccgaccacctcgctgcggtcggtcgccagcacccacaccggccacgcggtggagagctttatcgatcaactgctgcaggaaaccggccaggatccgatcgaagggcggctggcgctgatgggcgacgcgccgcgcgcggcgggcgcgctgcgggcggtagcgaaagccgctgactggcagggcgccaaggtggtggacgggcgcgcgcgcggcgtgggcgtcgccaaggcgttcgatacctatgtggcgcaggtggccgaggtgtcgatcggcgaaggcggcatcccgaaagtgcacaaggtgtggtgcgcggtggactgcggcgtggcggtgaaccccgatgtgatccgcgcgcagatcgagggcggcatcggctacggcctcagcatggcgctgtacggcaatatcacgctgaaagacggcgtggtcgaacagtccaacttcaataacttccgcccgctgcgcatcgatgagatgccggagatcgaagtgatcatcgtgccctcgagcgagaaaccgaccggcgtgggcgagctgggggtgccgaccatcgccccggcggtcggcaatgcgctggcgctgctcgggcggccgcgcacctcgctgagcctgccgctgcataatcccaccgcgaacccggcgtctgacaaggagagaacctga

SEQ ID NO: 426940 - DNA, 459 bp, Serratia marcescens; identical to SEQ ID NO: 424054

SEQ ID NO: 426941 - DNA, 1023 bp, Serratia marcescens
gtgcaggcgcatggccgcggcccgcagggcgagttcgaggcgcagtatcattacgacgcgctgggccgccgcagccgcaaggcggtgcgctacaagggcaaaaccgaacagacgacccgtttcctgtggcagggttaccggttgctgcaggagcagcgcgacgacggcagccgccgcagctggagctacgatccggccagcccgtggagcccgctggcggcgctggagcaggcgggcgacagccgctcggcggatatttactggtatcacaccgatctgaacagcgcaccgctggaagtgaccgacgcggcgggtaacctgtgctggtccgggcaatacgacaccttcggcaagttgcagggccagacggtggccggcgcggcgaagcggcagggcgcgcaataccagcagccgctgcgctacgccgggcaatatcaggacgacgaaagcggcctgcactacaacctgttccgctactacgaacccgaggtggggcgtttcaccacgcaggatccgatagggctgcgcggcgggttgaacctttatcagtatgcgccgaacccgctgatgtgggtggatccgttggggttatctgtagaaggagttccacatggctttaatagtttcggccaatttaaacaattcggtgaagcattacaggcaggaatgagtaaattaggatatcccggcacagtttcatatatgcaaggaagctccgtatcgggggtaagtttctctacaggtcaaccatttgatgttggccgtgttagtgattttgacgttgctatttcacatcctgagctatatcaaaaagcagaacagctgggaataggaaaaggagggcgcactggaccaattgatatgggtagtgaaatggctaagaaattaggtattgatgatacattgcaaaaattatctaaaatgtcaggaggtagacctgtgaacgcaatggtctttgagtctgctgctgaagttaaggctaaaggaaagggaactagaatacctggtaaatgtggtggataa

SEQ ID NO: 426942 - DNA, 564 bp, Serratia marcescens
atgctgatgctcgtccccttcaggatggcctgcaccacgctgcgtccctgcggatcgttcaccgccgtgctgcccaccagcgacgcatactcgctctggcggcccggcccgttccactggtggcagccgctgcagtcgttggcgaacacccgccgcccgagcgactgctcttgcccacccggcaggatcggcgtggaagcccccgcgcccttcggctgcaggttcaccgccgccgcgccgtcgccggcgatcggttcgatatcgcgcaagtatttcaccagcgccagattgtcttccggcgtcaggaactgcaggctgttttccaccgcttccgccatcgggccggcggcgctgctgcgccccggtgcatggccggtggccagatattgcgacagctgttggtcgctccagccgccgatgccggtctgcttatccggcgtgatgttggcggcgaaccagccctgcaccacttcgccgctcagatgcttgctctggttgaggccgaaccccagattgcgcggcgtatggcactcgccgcagtggcccagtgccgtcgccagatag

SEQ ID NO: 426943 - DNA, 1971 bp, Serratia marcescens
atgctttcttcttcacagaatttcagacatgacatcaacgggcttagagcttgggcagtaatcgccgtcgtactttttcatttcggcatcccgggttttgccggtggtttcgttggcgtggatattttcttcgtcatatccggtttcctgatgacgcgaatcatcgtttccggtcaggaagaaggtcggttctcactttggcaattttaccttgccagggccagacgcatcattcccgccatgttggcgctttgtctgaccttgctgtgtctgggttggttttggttgccgactccagattatgttcaactggcaaaacacgccttcaccaccatcctcttcatgtctaacgtgaagttttggaaagaggccggctattttgacagcgcatcccatgaaaaatggctgctgcacacctggtcgctatccgctgaatggcagttctacattattctgccactggctttcatgctggtctggcggctgtggggcaaacacggactcctgcgcttcatcgtgttagccggcgcgctctcctttggcttatcagtcatcttgtcatacatcgcgccctccgccggttttttccttatcccaacccgcgcctgggaaatgctggcaggtgggattgtctggcggttgacgcaaaacctagccttcagcggaaaaacccgtatttataccgaatggctaggcatactgtgtattgtgatagccataacgacgtttgactccagtatgccctggcccggttacaccgccctgttgccggttatcggcgccatgctgatgctcgccgcggcccgtcaggattcacgctttacctcaaaccccatcgcggcacgtctcggcgcgtcatcctactctatctatctttggcattggccgatcgtggtagtgctggtctacaccaatacgcaatccgagatgaaatgggtagcggcgggattactggccagcctgttgcttggcgagttgtcgcttcgccttatagaaaaccccgcccgcaaatggctttcaaggcaaacaaatcgtcaatctgcgtgttcaatcagtatcgccaccctgctggttgctgcgctgtgcgtcacactgtttaccgttaatttttccgtcaggttaccgcagcaaatcgatctgatcgccaacgaaagcaccaacatgctcgccaacagagatgaatgcttcgccaaatccggtatcagctcgccatcctgtctctatggcggcgaaaatatcagggttatcgtcgttggcgatagccacggcgatgcgatgatctctgctgtcgagtccgccctgcccaatcaaaccgatggacttctcaatctcacttatgccggctgcccgacgctgtccggagcgaaggttgttcccggcgcacttgacgataatattcaatgcaaagaattcaatcagtggataaaagaaaaacttttcacgctggacagcaatatccccgtggtggtgattaaccgaaccagcgcctatgctttcggccaacaaattgcgggcgccaagctgaaccaaccgtcagtgtacttttcgacggtgtatcgcagccctgagccggcttttctgtccgagttcaaaacatcgttcgtcggcaccctgtgcgaaatggcagcagaaagacaagtttatgttatgcgcccagtgccagaaatgcgcgtcaatgtaccgaaaacgctgtcgcgggcactgagctttggcggttctgagcccggcatcttcatctccgaaacagattatcgacaacgccatgcatttgtttggcaagcgcagaacgaagcggcgaaaagatgcggcgtaaaaattttggatccgcttccttacctctgccaagacggcaagtgcccaggcacctataatggacgccccatctattttgacgataatcatctgagcgagtatggcaacaaactgttagtgccaatgttcaaaaccctgttctcaccggcatccgattaa

SEQ ID NO: 426944 - DNA, 627 bp, Serratia marcescens
atgttgagcgagacggcgctgtcaataataagcattaccggcgcgattgcgctgggggcgatgagcccggggcagagctttattctggtggcgcgtacggcggtggcttcctcacgtggcgacggcatggcggtcgcgctgggaatgggcgtcggatgctttgtctttgcactgttggccctgcttgggctgcagtcgctgttgctggcgctgccgtggctttacgggacgttgaagctgttgggcggcgcctatcttatctatctggcgttcaacatgttgcgcggcgccaaccggccgctgaacgtggatggagtgggcgggcagccgctgggatggcgtaaagccttcaccaccggtctgctgacccagttgggcaacccgaatacggccatcgtctttgccagcgtgttcgccgcgttgctcagccacgcgattgcgccgtggatgtatgtggcgctacccttgatcgcgctggcggtcgatgtggcgtggtacgcctttgtcgccttcgtgctctcttcgccgcgtccgcgccagatttatctgcgcttcaaggcctggttcgatcgcttgagcggcggcgtgctggcgctgttgggcatcaaactgatgcttagccgctga

SEQ ID NO: 426945 - DNA, 1005 bp, Serratia marcescens
atggattaccaaaacgtctttcaattgacggatcaggaacgaaacgagttattttcggcattagataaaattgcttacgatcccgccggcggtgatgcgtatattcacgctatacgatcggccatgattacccatttgccccacagattaagcgctgcattaagccagcaaaaggcgtcaatcaaacctcggccttatcttattttaaaaaatgtgccggtggataaagaagttttcttttccccttgcccgaaccaatacacgccttcggccaaatccgggaatatcagcgaaaatctgttggtgggtatttcttcgttaatcggtgagccctattcgatgtatttcgaggggaaggagctgattaataatctgatccccaaacgcgaagccaaaaaagagtataccggtctggggttcgatgttgaactggacttccatattgaaaatgcggcgctgaaacacctggagcagttcaacgtttcgccgatgggcctgctgctggccggcgtgcgccgcgatccgcacagcccgatgacgcgcatctccgattcgcgtttggcgatcgctcaactgagccgcgaggacgtcgaaacgctggccagcccgctatacagcatcaaactgccttatcgctggcgccaatccacgcaggccgggcgggaagaaaccgcgctggtgccgctgatttcgcaaaatcacgtattgccggatgtgagcgccgtcttctatcccggtatgattgcggccagcacgccacgagcggaagccgcgctggagcgtttctacgggctggtgaaagaaaacgccatcggcatcgatatttgcccaggcgatttggtgtatatcgataaccgctttgcgctgcattcgcgcgataaattcacgccttctttcgatgaaagagatacaccgttgcgctgggtgcaacgcgtcttcatttcggcaagcttgtggaatcaccgcaacctcaatcaggttgaagagcgcattttctcgatttaa

SEQ ID NO: 426946 - DNA, 918 bp, Serratia marcescens
atgctgaacgtttttctttctatattgccgatttttttgttaatcgtgcttggttatttgtcaaaactctatgttaaagatgtcgccgtattttggggcttctcagataaattcgtttattacctgttttttccggcgctgttgatattggatatcagtgaggcggattttagcggcgcggacagcttttatcccgttgtggcgaccattgtttccacgctggccatcgcgttgattattttcgttggcaaactgttcttcaatacgtcggccgatctgtttacctccatttttcagggcggagtcagatacaactcttatgtattcatcgcgctgtcgcaatcgctgttcggcagcgagggggtggcgctgtccggtttcttcgtggcgtatatgatcattctgaccaacatcatgagcgtgttggtgatgaaccactacggcaccggcagcaagaaaagcctgagcggcgcgctgctggcgctgacgaaaaatccgctgatcatcggcgcgttgttcggggtgctgatgaacctgtgcaacctgcacatcaccggcgcgcttaaacagctgttcgtttatctctccaacgccgccacgccgctgagcctgatgtcggtcggcgcagggttgatcgtcagcatgcatatccgcaagctggtttccatctcttatgcgaccgtgctgaagctggtggccatgccgctgattaccattgcgctggtgcactatttcggtgccaccggcgtgccggccagcatcgccattctctactccgccgtgccttgcgccggcaacgcctatattctggcgcggcaaatggggggcgatcatgaagcgatggcctccatcatcacctggacgacgctgctgtcggttatcaccgtgacgttcatcctgggcagcgtagcgctctaa

SEQ ID NO: 426947 - DNA, 162 bp, Serratia marcescens
atgttattgaaagtcggcgaactggcgcgccggatgggcgtttcgctggcggaagccggggcaattctggcgcgttcagggccggcgcttccggcggtgattgagcagcagatcgccatgttggacccgcagttggctcagatcgccgtattgcgcggctga

SEQ ID NO: 426948 - DNA, 450 bp, Serratia marcescens
atgtcgatcaaatttgcccccaaggtcggggaaattctcgagtgcaactatggcaactatcccctatcagtctgccaaccgcatgaagccggcttttatgatgaccacattccaccagaaatggtgaagaaccgtttagttgttgtgttaaatagcaaaattaacggcaacgcctgcattatcgtaccgctgtcgaccaccagagattcgaacaagatcgaacgcggattgcacatcgaaattacgcgtgaactcatcgaagatatgagattctttcatccgcaaacgcgctgggcaaagggcgatctggtgcagcaagtcagccgccaacggctgaacagagcccgtaaagagagaggctttcttacccagtgtctgtcgcgcgagcttgttgctgacatacaacgcgccgtcattaagtcgatcaatgccaaaaatatgctgttctga

SEQ ID NO: 426949 - DNA, 1002 bp, Serratia marcescens
atgaggctgggctggctggcgttgttgacgctgtgctgcgcgctgttttcgctcggcgttggccgctttcaggtaccgatgacacacagcctgatgattttgctggagccgttcaccgggcaacattatgcaggcatcgatgctatccaacgccaggtgatcctgggcgtgcgtgtgccgcgagtgctgttggcgatgggcgccggcgcggcgctggccctgtgtggcgcggctttacaaggcgtctttcgcaacccgctggtcgatccgcatattatcggcgtgtcttccggcgcggcgtttggcggcacgctggctatcctgctcagtttgccgttggcggcgctgctgctgtcggcttttgttttcggtatggcggcgctgctgctgattttcactctcaccagcgccattgcgcggcgcaatattctctctttggtactggcgggggtgatcctcagcggctttttctccgcctgcgtcagcctgatgcaatatctggcggataccgaagagaaactgccgagcatcgtgttttggctgctcggcagctttgccaccgccgatcggcaaaagctgctgatgctgtttgtgcctttgctgttggccggcggcttgctgttggcgctgcgctggcgcatcaatctgctgtcgttgggcgatgaggatgccggtgcattgggcatcaacgttgagcgcacccgctggctgattttgacgctgtgtgccgccatcgtggccgcccaggtggcggtcagcggcagcatcggctgggtcggcttagtgatcccgcacgtggcgaggcggctggtggggccggatcaccggcgcctgctgccggcttcgctttgcctgggggccctgtacatgctgttgatcgacgatttggcgcgcacgctgagcagcagcgaaatcccgctgggcattctgaccgcgctgattggcacgccgctgttcgcgctgctgctgcgccgcgcgcaagtgagaggctggcatgactga

SEQ ID NO: 426950 - DNA, 462 bp, Serratia marcescens
atgcgtatcgaacctctgccggcacatcgccggcgtattgacgaactggccgagttactgcatcaggaatggggtgcctttgcacaatggagcagccgagacaccatcagccggcggctggccgaacgttgcgcgcccgggcagcggggcgtcgtgctgttggcgctgtcgccgcaacaacagattctcggtaccgccagcctgacgttgtatgaactggcggataaaccggagcgccaatactggctgagcgaagtcttcactcacccgcagcaccgcggccaaggcattgcccgtcgcctgattgcacgctgcgtcgaacatggccgggcccagggcatagacgaactctatttgtacacgcccgatcagcaggcgctgtatcagaaactcggctggcgctcgctggagcaacgccagatcgccggcgaagccgtcacggtgatgagccgcacgttgtaa

SEQ ID NO: 426951 - DNA, 933 bp, Serratia marcescens
atgaaaaaagtattgagtctgaccaccctgatggccggcgcgatgatggtatttaatgctgccgcagcggatgcgccgaaagagctgaacctgggcattctcggtggccagaacgccacccagcagatcggcgataaccagtgcgtgaagcagttcctggataaagagctgaacgtcgataccaagctgcgcaactcgtccgactattccggcgtgatccagggcctgctgggcggcaagattgacctggtgctgagcatgtcgccgtcgtcgttcgcttcggtctacatcaaggatccgaaagcggtggacatcgtcggcatcgcggtcgacgacgtcgaccagtcgcgcggctaccactcggtggtggtggtgaaggccggcagcccgtaccagaaactggaagacctgaaaggcaaggccatcggcttcgccgatccggattccacctccggcttcctgatcccgaaccaggcgtttaaaaagctgttcggcggcacggtcgacaacaaatacaacaacaccttctccagcgtcaccttctccggcggccacgagcaggacatcctcggcgtgctgaacggccagttcgaaggcgcggtgacctgggcgtcgatgatcggcgactacaacaccggctacaccagcggcgcgttcacccgcatgatccgcatggatcacccggacctgatgaaacagatccgcatcatctggcagtcgccgctgatcccgaacggcccgatcctggtgagcaactcgctgccggccgacttcaaggccaaagtggtcaccgccatcaagaagctggataaggacgatcaccagtgctttatcaaagcgatgggcggcaaacagcacatcggcgacaccaccctggcggaataccagaacatcatcgatatgaagcgcgagctgaccaaaggcgaccgttaa

SEQ ID NO: 426952 - DNA, 1839 bp, Serratia marcescens
atgagcgaccctgttgaaacgtgcggttttaccctcagtgaatggcagcaccattatcaaacccgtccggcgggtgagcgcctcgcctgcgtcagcgcgacgatcgaaacgctgctcgccgggctgaacccggacgataacgcctggctgtatctcgccacgccggcgcagcgcgagcagcagtatcggcagctggcgatactgctggcggcggtcgacggcgatctcagccgcctgccgctgttcggcgtgcccttcgccatcaaagacaatatcgacgtcggcggctggccaaccagcgccgcctgcccggcgttcacctatcaggccgcggcggatgccaccgtggtcgccaacctgcgcgccgccggggcgatcgccctcggtaaaaccaacctcgaccagttcgccaccgggttggtgggcacccgctcaccttatggcgcggtggtcaacagcttcgacagccgctacgtcagcggcggttccagctccggctccgcctcggtggtggcgcgcggcctggtgccgttcgcgctgggcaccgacaccgccggttcggggcgcgtgcccgccgggttcaacaacatcgtcgggctgaagccgaccaagggccggttgtccaaccgcggcgtggtgccggcctgccggttgaacgatacggtgtcggtcttcgcgctgacggtggccgatgcggcgcaggtggcggaactggcgagcggctttgacgcggcagatccgtattcccgccccgatccgcataccgcgccggcggatattcccgccgcgccgcgtttcgccatccccgcccaactggagtttttcggtgacgttcaggctgagcgggcgtttcaccgcgcgctggcgcagctgcaggcgggcggcgccacgctggaacccctcgatttcgcgccgtttcgcaccctggcggaacagctgtattacggcccctgggtggcggagcgcaccgtggcgattgagcaggtgctggaagcgagcccgcaggctatcgacccggtggtgcgcggcatcgtcggcaacggcctgagctacagcgcctgcgacgcctacaaggcggaatacctgcgcgccgagctgacgcggcaaattgctcagcggctggcgccgttcgacgcgctggtggtgccgaccgcgcccactatccgcaccctggcggagatggcgcaggagccggtgctgttcaattcgcagttcggcacttacaccaatttcaccaacctggccgatctgagcgcgctggcgttgccggggccgctgcgcgaagacgggctgccggcgggcatcaccctgattgcgcccgcctggcatgaccgggcgctggcggcgtttggcctgcgctggcaacggcaaagcgccttaccgctcggggctaccggccgggcattgccgccgcagcccacaccggccccgtctgcgggccatgtgcgtctggcggtagtgggcgctcacctcagcggtatgccgctcaacgtccaactgacgcagcgcgacgcggtgcgggtggagcaaaccgtcaccgccccctgttaccgcctctacgcgctggccgataccgagccgccgaagccggggctggcgcgcgtggcgcagggagcggcgatccgtcttgagctgtgggacatcccgctggcccgtttcggcgagtttgtggcggaaatcccggcgcccttgggcatcggcacgctgctgctggcggacggccggcgggtgaaggggtttatctgcgaagcctgggcgctggaaggcgccacggatatcactgagtttggcggctggcgcgactatctcgccagccttaaggggcacgaacatgtttaa

SEQ ID NO: 426953 - DNA, 3621 bp, Serratia marcescens
atgtttaataccgtactgatcgctaaccgcggcgaaatcgcctgccgcgccattcgcaccctgaaacgcctgggcgtcaccagcgtggcggtttattccgacgccgaccgcaatgcgccgcacgtcaccgaagccgacaaggcagtggcgctcggcggcgataaggccgccgacagctacctgcgcatcgacaagatccttgcggccgccaccgccaccggcgcgcaggcgatctaccccggctacggatttttgtccgagagcgccgagtttgccgaagcctgcgaggcggcgggcatcgcctttatcggcccgacggcggcgcagatccgcgagttcggcctcaagcaccgggcgcgcgagctggcggcgttggccggggtgtcgatgacgccgggcaccggcttgctggagagcgttgagcaggcggttaccgccgccgcgcgcatcggctacccggtgatgctgaaaagcaccgccggcggtggcggcatcggcctgacgcgctgtgacggcgaggcggcgctgcgcgacgcgtacgacagcgtcaaacggctgggagaacagttcttccgcgacgccggcgcctttatcgaacgcttcgtcgatcgcgcgcgccacgtcgaggtacagattttcggtgacggccaggggcgggtggtagcgctcggcgagcgcgattgctcgctgcagcgccgcaaccaaaaagtggtggaagaaaccccggcgccacacctgccggcggcgacccgccaggcgctgcaccgggcggcggtggcgctgggcgagtcggtgaattaccgcagcgccggcaccgtggaattcatttacgacgccgcgcgcgacgagttttacttcctggaagtgaacacccgcttacaggtagagcacccgatcaccgagatggtcaccggcctggatctgatcgaaggcatgctgcaggtggcggcgggcgacgcgctggattgggcggcgctgcaacgcgcgccgcagggtgtggcgatcgaagtacgtctctacgccgaagatccgctgaagaacttccagcccagccccggcgtgctgaccgaggtgcatttccccgccgacgtgcgcctcgacggttgggtggcgaccggcagcgaagtctcggcgttttacgacccgatgatcgccaagctgatcgtgcacggcgcggatcgggcgcaggcgctggaaaaactgcgcgtggcgctggcggcgacccgtttgcacggcatcgccactaacctcgactatctgcggcaggtgatcgccacgccgcaatttcagcgcggcgacgtttggacgcgcctgctggacgaggtgcgtttccagccgcactgcctcgaagtgctgcaacccggcacctacagcagcgtgcaggattatcccggccgcctcggctattgggacatcggcgtgccgccgtccggcccgatggacgacttcgcgttccggctggccaaccgcatcgtcggcaaccacccggcggccgccgggctcgagtttaccctgcaggggccgacgctgcgctttcattgcgacgccatcatcgcgctgacgggtgccagctgcccggccgatctggatggcgaagcggtcgcttactggcggccgatcgcggtgcgggccgggcaggtgctgacgctggggcgcgccacgcacggctgccgcacctatctggcggtacgcaacggctttgacgtgccggtgtatctcggcagccgttccacctttgcgctgggccagtttggcggccacgccgggcgcaccttgcgcgtggcggacatgctggcgatcgctcaaccgacgctggccgccagcaccacgccggcgccgatcgccgcgccgcaggcgatggacgacagcctgatcccttactacggcgaccagtggcacatcggcgtgctgtacgggccgcacggcgcgccggactttttcaccgctgaatcaatagaggccttcttcgccgccgactggcaggtgcattacaactccaaccgcctcggcgtgcgcctggcggggccgaagcccgaatgggcgcgggaggacggcggcgaagccggtttgcatccttccaacgtgcacgactgcgagtacgccatcggcgcgatcaacttcaccggcgatttcccggtgatcctgacccgcgacgggcccagcctcggcggcttcgtctgcccggtgaccatcgccaaggccgagctgtggaaagtggggcaggtgaagccgggcgaccgcatccggttccatccgatcggctttcgccaggcgcagtcgctggagcaggcgcagcttggcagcatcgaagcgctggcggcggtgaaggccatcaccctgccgccgccggatctggccccggcggagaccgtttccgccgcggtgctggcggcgctgccagcggcggaagggcgtccggcggtggcgtatcgccaggcgggggacggttacattctgatggagtacggcgacaacgtgctcgatctggcgctgcggctgcgcatccatctgctgatgcagtcgctgcgagaggaggcgataccgggcgtggcagagctggcgccgggcgtgcgttcgctgcagatccgctacgacagccggcagattagccaggccgacctgctgcagcgcctgttggcgcgcgaacgggcgctgggggacgtcagccgcctgaaggtgccgacgcgcaccgtctggctgccgatggcgttcgaggattcggccacgctgggcgcggtggatcgctatcagcagacggtgcgcgcttcggcgccctggctgccgaacaacgtcgatttcatccagcgcatcaacggcctgagccgacgcgagcaggtgcgcgacattctgttcgacgccagctacctgatcctcggtctgggagacgtttacctcggcgcgccctgcgcggtgccgctcgatccgcgccatcgcctgctgagttccaaatacaacccggcacgcacccacaccgccgaagggacggtcggcatcggcggcatgtacatgtgcatctacggcatggattcgccgggcggctaccaactggtggggcgcacgctgccgatctggaacaaattcctcaaaaacccgcagttcaccgccggtgagccctggctgctgcgcttcttcgatcaggtgcgcttctacccggtcagcgagcaagaactggacgagcagcgcgaagcgttccgcgaagggcgcatgcaggtgcgcatcgaagagagcgaattcgacttcgccgcctacaccgatttcctggccgacaacgccgaggcgatcgccgacttccagcatcgccagcagcaggcgttcagcgccgaagtggcgcgctggcgcagcgatgacgacgaggccgaggcgcagctgttgccgccggaggaagaagacgccatcgacggcgatctggtcagcgccgatctgaacggcagcgtgtggaagatcctggtggagccggggcaggcggtggcggccggtcagccgctgatcgtggtcgaggcgatgaagatggagctggcggtcaccgcgccgcgcgccgggatcgtcaaacgcatcagctgccggcaggggcggccggtcgggccgggcgacgccctgctgtggctggaaaaagcggtctga

SEQ ID NO: 426954 - DNA, 1077 bp, Serratia marcescens
atgagccaaccattgaccgtaaccggcgtgcagaaagcgccccggctggcgttgagcatcggcgcgctggcgttgctggcgctgctggtgatgccgttcttgacgctgttgccggcggatcatccgctggcggtgtccacctataccctgacgttggcgggcaagatcctgtgctacgcggtggtggcggtggcgctcgatctggtgtggggctatgccgggctgctgtcgctcggccacgggctgttcttcgcgctcggcggctacgccatgggcatgtatctgatgcggcaggcggcgggcgacgggctgccggcgtttatggcgttcctctcctggaatgagctgccgtggttctggagcggcacccagcatttcgcctgggcgctgtgcctgatcgtgctggtgccgggcctgctggccttcctgttcggctacttcgccttccgctcgaaaatcaaaggggtgtatttctcgatcatgacccaggcgctgacctatgccggcatgctgctgttctttcgcaacgaaaccggcttcggcggcaataacggctttaccggtttcaccacgctgctcggctttcccatcaccggccccggcacgcgggtggcactgttcctggcgacggtgctgctgctggccgccagcctggccatcggctttgcgctggcgcgcagcaagttcggccgggtgctgaccgcggtgcgcgatgcggaaaaccggctgaccttctgcggctacgatccgaagggcttcaagctgttcgtctggacgctgtcggcggtgctgtgcgggctggccggcgcgctctatgtgccgcaggtcggcatcatcaaccccggcgaaatgtcgccgaccaactcgatcgaggccgccatctgggtggcgctcggcgggcgcggcacgctggtggggccactgctcggcgccggcatcgtcaacggcgccaagagctggttcaccatggccattcccgaatactggcagttcttcctcggcctgatgtttatcgtcgtcacgctgtttctgcccaaaggggtgatcggcctgctacgccggaggaaaacctcatga

SEQ ID NO: 426955 - DNA, 306 bp, Serratia marcescens
atgcccgcgtttcgcctcaccccgcaagcccaacaagatctgttggctattcgtcatttcaccgtcgagcactggggcaaagcgcagtctcgccgctatcttgagcagttgagagaggtcatgcatcatctggcggatatgccggaagcgggtaaggcacactttcacgatttgggcgaagagatacgcagttttccttacgccagccataggatctactaccgcagccggcctgccggcatcaccgttcttgccattctgcaccaggcgatggtgccccaccggcatctggaacaacggctgtaa

SEQ ID NO: 426956 - DNA, 261 bp, Serratia marcescens
atgtacgcactcagcgcgaacgaggccaaaacccaattcggcgatttgctgctcaaggcgcagcgtgagccggtgcaaatcaatcgcaacggcaaaccggtcgccgtcgtcatgtcggtagaagactaccaggcgctggaagatctcaaattacgcgcgctgcagcaaaaaatcgcgcaggctaccgccgaggaagacgccggtaaggcggtagacggcgatgccttcttcaaccgtctgctcaccgacgaaaccgactga

SEQ ID NO: 426957 - DNA, 183 bp, Serratia marcescens
atggctctgttttctggtacgccgcggctgcgctcggtcggttggtcacgctggcgtctgtatctgcaacgctacaggacgcgaaaagaattattattgctggacgatgcacggctgatcgatattggtttgtcgcgtgcggaagcgctgcgtgaaggctataaaccgttctggaaagaataa

SEQ ID NO: 426958 - DNA, 546 bp, Serratia marcescens
atggcccatccgcagcatgtcacgctggtgatcacccaccgtttggcgccggggaacgagcaggcctatgaggcctggctgaaccgcatcatgcccgacgccgcgggcttcaccggccatttgggcgtcaacgtgattcgcccttccggcgacgaacaggcctatacggtgttggtccgcttcgacaacctcgacaacctgtaccgctggatccactcgccgctgcgcaagcaatacatcgaagaagtcaccccgctgctgctggagagcgaccatatcgagatccgccccggcgcggagttctggtttaccccgcccaaccccggcgtgcgccagccgccccagtggaagcagttcatcatcaccctgctggtgattttcccttccaccaatctggtgccctggttttggggggtggtgctgccgcagcaggacggcacgctgctcggccattttctcaatgacgccaccgtggtcgccctggtggtgtacctgtggatgcctatcgtgactcgcgtttttcatcaatggctgacccgccgctag

SEQ ID NO: 426959 - DNA, 381 bp, Serratia marcescens
atgaaaggcgagcatcattatcaggtggcggtcacctggcaggggaatttgggcgcaggcaccgaggattaccgcgcttacgggcgcgatcacctgatcggcgccgcgggcaaggcagacatcgccggctccgccgatccggccttccgcggcgacgcgacgcgctggaacccggaagatttgctggtggcttcgctcagcgcctgtcacaaattatggtatttgcatctgtgcgccacctcgggcatttccgtactggcctatcaggacaacgccgtcggggtgatgcgtgaagacgcggcgcgcggcggctttttcacctcggtgacgctgcggccgcaggtcacggtgcgcgacggcgacgatctgcagctggcgtaa

SEQ ID NO: 426960 - DNA, 720 bp, Serratia marcescens
atgacgattcccgattcccctctgaaacgacaaaaactggtgatcctcggcggtaccagcggcattggcgccgcggtggcctacgcggcggcggcgcgcggcgctgaagtggtgctggcttcgcgccgcctgccccacatcggggagcagaacgacgcgctgcgcctgatgcaggccgatctgaccgatgaagcgtcgctgcgcgcgctgtttgccgccgtcggcgctttcgaccatttggtgatcaccgccgggccgctggtggaggccaagccgctggcggagaccaccctggaacgggcgcaggccgacttcaacgtcaaattttggggaagtttgcgcgcggtgcaggcggcgctgccgacgctagcgccgcagggctccatcaccctgacttccggccagctgtcgcgtaaatatctcggcggtcagttggtcaaaaccgccatcaacgccgcgctggaagcgaccggcaagcagctggcgaaggagctggcaccgcggcgggtgaacgtggtcagccccggcatcaccgccaccgaagcctacgacggcatgagcgccgcgcagcgtcaggcgctgttcgaacgggttggcggcagcctgccggtcggcagggtcggccaggcggccgacgtcgcggcgggttacctgctggcgatggagaacggcttcgtgaccggcagcgtgatcgacatcgacggcggcggcctgttgtaa

SEQ ID NO: 426961 - DNA, 912 bp, Serratia marcescens
atgacctcatttgtcgatctcgaggtgtttgtccgcacggtggacggcggcagtttttccgccgcggcgcgcgcgctggatatgacgccggcggcggccagcatcgcggtgaaaaggctggagcagcagctgggcgcgcggttgctggtgcgttccacccgcagcctgcggttgacggaggagggcgcccgctatctcgacagcgcacgcctggcgctgggagcgttggctgaaggggagcaggcgatccgcgaaaagcatcaggggctgtccggggtgctgcagatttccgcgccgtcggatttcggccgcaatctgctgctctgctggctggacgagttccggcaacagcatccgcatattcagctgcagctcctgatcaacgatcgacaggccgatctgttccgcgaaccggtggacgtggcattgcgtttcgggccgctggccgattcttcgctggtggcgctgcctatcttgccgcagcaccggcggttgatctgcgccagcccggattacctgcggcggtatggctcgccgcaaacgccggccgatctggcccggcacagcattctggtgtatcagcccagcggcaaacggcaggtggaatggcggctatggcgcggtgaggagctggttgaagtgccgctgaacggcagctattttaccgatgacggcgaggtagcgcggcgctgggcactggccggccacggggtggtgcgcaagtcggcgatcgacgtggcggcggatattcgcgccgggcggctggtgcaactgctgccggaatggctcagcgacgcggtgccgatcaatctggtctgcccgcatcgctcgcaggtgtcggaacgcgtcaggcagctgcagcgctttttacagcagcgctgccagcgttggatggacgatcacttggcctga

SEQ ID NO: 426962 - DNA, 849 bp, Serratia marcescens
atgaaggtggaaggcgcagcgcgcaaagcatcccgggaacaggcccatttcatgcacgtcgacgatctcggcgggctggaagtgctgcaggctacctactgccgccaaaccttctcgcgccacagccatgaaggcttctgcgtgggcgtcatcgacgacggcgcccagcgcttctaccgcaccggcggcgaacacgtggcgccgctgggcagcatcattctggtcaacgccgacgacatccacaccggcagctccgccaccgaagagggatggtcgtatcaggcgatgtacccgacgccggagctgctggcgtttttgtcgcgcgatctgaaaaccggcgccggcgcgacgccttatttccccaacccggtggtgcacgacgtcggcctggccggccagctgcggatggcgttcagcctgctgcgcagcgatgagaaccggctgatgaaagagaccatggtgttctcggcgctgacctggctgatgttgcggcacggcaaaagccgcatcgatcccacgccgcagagccgggcgcaaagccaggtggcgcgggtgaaagcctttctcgacgatttccccgaggcggacatttcgctgctggagctggcggagcgagtggcgctcagcccttattacctgctgcggcagtttcagcaggccaccggtttgccgccgcacgcctatcaaattcaggcgcggctgcgtaaagcgcgcggcatgctgaaggccggcagcagcgtgctggacagcgcgctgagctgcggttttcacgatcaaagccatttccatcgccattttcgcaagtcgatgggcattacgccgggcgactatgtcaaatcgctgaaatag

SEQ ID NO: 426963 - DNA, 711 bp, Serratia marcescens
atgactgattcaatccccctcatcacgccgccgtctgctcgcctgcgccccgcgctgcagggtggggtggcgatcttgccgctgtgcctggcggtggtgccgtggggcatactggcgggctcgatggccctgcaaaacggcctgacgccggcgcaggggctgggcatgtcggccatcgtgttcgccggggcggcgcagctggtggcgatgggcatgatcaagggcggcgccgggctgctggcgatcttgctgtcgacctttttcgtcaccgcccagcattttctctatgcgctgcggctgcgggagcgcattgcgccgctgccgttacgctggcggctggccctgggattcttgctcaccgatgaactgtttgcgctgaccggcgaacaggcgccggcgcgtttcgaccgctggtatgcgctgggcgccgggctgactttttacctgtgctggtttctctccacgctgctcggcatcgtagccgccggcagcgccggggatctggacggttatgggttggatttttccatcgccgccacctttatcgccatcgtggtgccgctggtgcgcagcctgccggtattggcctgcgtactgaccgcgctgctgctttccatcgtgttgcaccatttccagacgccgggcgcactggtgatcgccaccgtggcggcgatgctggtcgggctgctgtgcagcggggggcgccgatga

SEQ ID NO: 426964 - DNA, 312 bp, Serratia marcescens
atgatctggctgacgatagtcttgatggggctggtggtgttcttcaaccgctactgctttttggcgccgggattgccgctgcggttatcgccgcgcgttaaaaagctgctgagcttttccgtgccggcggtgctgacggcaatttgcgggccgattatcgccttcagcggcgaccagctgcgcgccgcgccggataacccttacctgtggggggcggtgtttgccgtgatattggcgttctttctgcgcaacatgctggcggtggtgttgctgagcctgctgatatttatcgcgctgcgcggcattttttaa

SEQ ID NO: 426965 - DNA, 639 bp, Serratia marcescens
atgctgcacattgagccgtatcgcgatgctgaccgcctgcaaacggcggcgctgatctacgctgcgttctgcgacaagttccagcgcgcgcgccgtctgagcccccgccttcaatggcgtttgttctatcggctgtggcgttggaagcaaagcggcagccgggagcgcagcttcgtggtgaagcaggatgaacaggtggtggcggcctttgccctcaatgcggccgctggtgagaacaacgccgggcggcgtccgcatgccttgccgatttggcggctgtgccgccgctatggttggctgaacgtttggcgcatgtatctgcaaatggcggtgttgcggcacaccccggcggccgatgaactgtatctctcttacctggcagtggccgagaatcagcgcggcaaaggggtaggcaagcggctgctgcagtggatgaacgactacgctgccgggcaaggcgcgggccggcgcctgagcctgcacgtcagccggcgcaacgtggatgcgctgcgcctgtatcggcgttgcggttttcaggtgcgacgcgaagaacattatgccttgctggggttactgttcggccaggccgactggctattgatggagagacgctgcggggaggcgacgtgcgcagaatag

SEQ ID NO: 426966 - DNA, 2226 bp, Serratia marcescens
atgccgccaaacgcagactcccgacgaggttctcatctgcgagaacacctgcttttcctgctgctgttgctgaccctgaacgtcttcgcaccaccggccctggcgcaaaacgcgccgcccgcgcccgccgacaaaagcgagcagcagaaagccgcctacgccgcgctggccgatctgctgcaggacgacaaagcgcgcgcggaactcatcaaccacctaaaacaggccgccggcgacgcccccgccaccgccccggcaacgccggtggaatcaacgccggcgaccctgagcgacagcctgaactcgctggcacaggaaggcatcagcacctttaaccagaagctcggtgcgctgcaaaagctgatcgattccggcccgaagcgcgttttcaatcccgccggctttttccgcgcgctgggctattttttgctgacggtggcggtcacctttgcgctgttccacctgatccggcggctgatcgcgccgctgtacaagcgcatgggcagttgggggcacaacgcgcggctgcagcgcggcccgtggtataagcgccccgccgccattctcggcgctttcgccgtcgatctgctggtgttgctgctggcgctggcggcgggcaacctgttcgcccgccacgtccacgccgacagcgccaccattctgcggctgcagaccctgtttctcagcgcctttgcggtgattgaattcttcaaagcggtgctacggctgattttcgcccccaacttcgactatctgcgccccttccccttcagcgacccgagcgcgcgctactggaacacgcgcctcgcctggctcagcgggctgatcggctacggcctgatggtggtggtgccggtggtggcggtgcagatcagctacccggccgccgccgccgtcaacctggtggtgatgctggcgctgacgctgtatgccatctggctgatcctgcacaaccgcaagccgatacagcaacagatcaacctgctggccgaacggtcgatggcgtttttcagcgtgatcctgcgcggcctggggcatatctggcacctgctggcgatcgcctattttctggtgttgttcgtgctgtcccagttcgacatcggcaacagcctgcgctttatgatgagcgccacggtgaaaagcctgctggtggtcggcgtcggcgctctgctgtccggcatgctgacccgctggattttccgccgcatttcgctgccgaccgacgtcaatctgcgctatccgatgcttgagcggcgcatcaactcctatattcccaacgggttgaagatactgcgggtgatggtggtgctggcggtgacgctgttcctgcttgacgcctggcacctgattaatctgtaccagtgggcaggcagcgaaaatggccagcggacgctcggcgggctggtgcatatcctgctgatcctgctgatcgccgtcttcagttggacgctgatggccagcatcatcgagcaccgcctggcgttggaactcagcaacggcgtgcggccgagcgcgcgcgaacgcacgctgctgacgctgtttcgcaacgtgctggctatcgttatcagtaccatcaccgtgatgatcgtgctgtcgcaggtcgggctgaacatcgcgccgctgctggcgggcgccggcgcgctggggctggctatcagcttcggcgcccagacgctggtgaaagacgtgatcaccggcgtgttcatccagttcgaaaacggcatgaacaccggcgaatacgtcaccgtcagcggcatcaccggcaccgtggagcgcatgaccatccgctcgatcggcctgcgcgatgactacggcgtctaccacatcgtgccgtactcctcgatcactacgctggccaactatgcgcgcgaattcggggtgtatcgcgccaactacaccgtcagccgcgacgaggatatcgatcgggtcaatgaggtgctgcatcaggccgtcgcggcgctgaagcaagatgagcaggtgaagcatttcctgattggcgagccggtcttcaacggcgtggtggcgctgggcgaccgctcgttcaccacccgcgtgacggtacgcacgcaggcgctgaaacagtgggtggtgcaatacgccctcgatcggctggtgaaaatccatttcgatcgggccggcatcggcatgccgcagcaggcgatgcagatctcccgcgcgccgcagccgcacgaagaacaggcaccgcccgcgcctcccggcggttag

SEQ ID NO: 426967 - DNA, 519 bp, Serratia marcescens
atgaaaaaaattgcatgtctttccgcagtagcagcttgcgtattagcagttagcgcaggtaccgcattcgctggtcagagcaccgtatccgctggctatgcgcagggcgatttccaaggcgttgctaacaaggccgacggtttcaacctgaaataccgttacgagttcgacaacaacccactgggcgtaatcggttcctttacccacctggaaaaggacggttctcaggacggtttctacaacaaagctcagtacaactctatctctgccggtccagcataccgcatcaatgactgggcgagcatctacggtctggttggcctgggttacggtaaattcactaccaacgctcagaacggcacttctcgtcacgacaccgctgactacggcttcacctacggtgccggtctgcagttcaacccaatcgagaacgttgccctggatgttggttacgagcagaaccgcattcgcagcgttgacgttggcacctggaacgttggcgtaggctaccgcttctaa

SEQ ID NO: 426968 - DNA, 576 bp, Serratia marcescens
atggagattgatgtgagggagatcaatgcgcgacctgttacggagtataggtaccgaataacggtttataaaaaagccagcagcgttgctgcgtattaccttgattttaaaaaagcgacgttaaggatgcgtcaatggcttattggggcttatcctgcttcggaagtattggacaatgcttacgtcatggaactgtacgatgtaagggcattggaaacccgcgccgaagtaaccaaatccttatttgatacctataccaggatggcgtacacccgaggtgaacgagaacagctattcattaatggcatcggtctggcgatcgtcacttttgtggcgcaataccaagcgagattggttttcagcgtaccgctcaggccagcgttagccagaatttatgactcgctcttgaaaaaacatgcgcaccgcgtacattatttgtacaaccaagagcttattgaggacggattatatgtcatcgaaatcccgcctgttaacggcagaatcccacccaacccctatgagcataaaggaacggcaccaaaaagaaatgcaagccttccacgaagaatgggctga

SEQ ID NO: 426969 - DNA, 1422 bp, Serratia marcescens
gtgagcgggcgcacgtcacgtcggccggtatcgctgacgctgcgcaccgccacgctgttcgcgctggtggccgcgttggtggtgagcgggacgggcgggtatctgtatagcgccatgcgccaggaaatgacgctgcgcagcgatctgcaggtgaccgggcgcgtagagtatttccgccatctgctggggcagcgctttcctttggctcgcctgaccgccaataacggcctgtttgaaaacatgctgggcaatgaacaggacgtgctgattttccaaatcccgggacaaaaaccgctcatcaacgtgaacccggccggggtggcattgccgccgatcgtgccgacgccggccggtcaggcgcagacgttggccgccgtgcgcagcggggaaacggcgcagggggtgccgctgcgcgcggcttccgcgatggtgcgcctggaagacggcagcctgttgcagatctccgccgcgcacgtgatggtcaacgaacagaagatgctagcgcgctacctgtggcgcatcgtcgcggcggtggcggtggctttcctgctgattgcgctcctggggtatggggtcatgcgccgaggattgaagccgttatggcgcatggcggcgcaggcggcgcagattgcacccaatacgctgtcgacacgcctcagcgagcagggggcgccgaaggagttgcagcaactgacccgttcgttcaatgcgatgctcgatcggttgaatgaaggctatcagcggctgacgcagttttccgccgatctggcccatgagatccgcaccccggtaggggcgttgatgggccagtgccaggtggcgctttaccagccccgcagcgtggaggagtacgaaaccctgctgtcgaacaatatggatgagctggagcgcatttcccgcatggtggaaaatatcctgtttctggcgcgcgccggcgaggcgcagtctgcgctgaactacagtcggctggatgtggcgctggagctgcggcgggtggcggattacttcgaggggctggcggaagaacgcggcatcgcgctgagctgcacaggtgagggaacgctgaaggcggacgcgatgctgttccagcgcgcgttgagcaacctggtggctaacgcggtacgttatgccgacgagaacagccggatcgtcctgcgggctgaacggcgcgccgatgcctggtgggtgcaggttatcaatcaggggccgccgatcgcgccggcacagctggaaaagctgttcgatcgcttctatcgcgccgatcccgcgcgcagcgccggcaatcatgccagtgggctggggctgtctatcgtgcgcgccatcatgacgctgcacggcggtgaagttcgcgcgcagtgttccgatggccggggttctgcttgcttgacctttagcctgatattcccttcatcagttcaatga

SEQ ID NO: 426970 - DNA, 1626 bp, Serratia marcescens
atgaagtcgtccttattcagccgctacacctgctttgtgctgagcatcttgctcactctggttttcttaatcatgatgcgcaaccatccgtggttctggctgccggccctggcctgcggtggcttgatggtgctgggtatctacgatctcacgcagcagcgccacgccatctgccgcaactacccgatcatcggccgcctgcgcttcttcttcgaattcatccgtccggaactgcgccagtatttcctcgagcaggataatgaagagatcccgttttcgcgcacccagcgcacgctggtgtatcgccgggcgaaaaacgagatgggcgacaagccgttcggcaccctgctggacgtctatcaaaccggctatgagtgcatcggccactccatgcggccggtggaagccgccgacccgaccagtttccgcatcaccatcggcggcgccgattgccgccagccctactccgcgtcgatcttcaacatttcggccatgagcttcggcgcgctctcagccaatgccatccgcgcgctcaacctcggtgcggccaagggcaatttctaccacgacaccggcgagggcagcatcagccgctatcaccgggaaaacaacggcgatctggtgtgggagctgggcagcggctatttcggctgccgcaccgcagacggccattttgatccgcggcgctttgccgaacaggcacaaagcccgcaggtgaaaatgattgaaatcaagctcagccagggcgccaaacccggccacggcggcattttgccggcgaagaaggtggatgcggaaatcgccgccacgcgcggtgtaccggagggcgtcgattgcatctcgccggcctcgcacagcgccttcaccactccgctggagatgatgcatttcatccagcagctacgcgagctgtcgggcggcaagccggtcggtttcaagctgtgcatcggccatccgtgggagtttgtcgccatcgtcaaggcgatgctgcacacccgcatcctgccggatttcatcgtggtggacggcaaggaaggcggcaccggcgccgcgccgctcgaactctccaactatatgggcatgccgctgcgcgaagggctgctgttcgtacataacacactggtgggctgcggcctgcgcgaccagatcaagataggcgccagcggcaagatcatcagcgcattcgacatcgccagcgtgctggtgctcggcgccgattgggtgaattcggcgcgcggctttatgttcgccgtcggctgcatccagtcgcaaagctgccacaccaaccactgcccgaccggcgtggcgacgcaagatccgctgcggcaaaaggcgctggtggtgccgaacaaggcggaacgcgtctatcacttccatcaaaatacggtgaaagcgctggcggacatgctggcggcggccggcgtcagccgcccggagcagctgacctcgcaccatatgctgcgccgcatcacgccgaccgagatcaaagtgtacgccgatatctattactacctggaaccgggcgcgctgctgcagccggagatcaaaagcgagttctacgcccgcatgtggcgcatggcgacgcccaccagtttcgatcaggcgatctcgctgccggcggcatga

SEQ ID NO: 426971 - DNA, 558 bp, Serratia marcescens
atgaaaatctctaaactgtctgctgtattggcattggctgtaagcaccgctgctatttcttctttctctgctcaagctgctgacggtactattacttttaacggtaaagtgactgaccaaacttgtactatcagcaccccaggcggtaaagatttcaccgtaactctgccaactgtttctgcttctactctggcaactcagagcgcaactgctggccgtactccgttcgcgatcaacctgaccaaatgctctaaaggccaggtagctacttatttcgaaccgggcgctactgttgatttcaatactggccgtctgaacaaccaggcgcagactgatgctgcaactaacgtgcagatccagctgctgggcagcaacaaccaattcctgcctatcctggctgctggtgctaatggcgcgcagaataactcccagtgggttaccgttgctaacgaaggcgactctgctgacctgaactactacgctgaatattacgctaccaacgctgccggcgctggtgatgtgacttctagcgttcagtacaccatcatttaccagtaa

SEQ ID NO: 426972 - DNA, 687 bp, Serratia marcescens
atgcttttcagtagcagcgttttttccagtgtcattattaacggtactcgtattatttatccgggaaagcaacgggaagttaccgtccaattatcaaataatggtgcttcaccggcacttattcagtcttggattgatgaaggcgacgcaaaaaccacaccagaaaacagcaaagcgccatttatcgtttcaccgccaatcagccgtgttgaaccggctaccggccaagcgctgcgcgtttcattgaccacggcgagtttgccgcaagacaaagaatccttgttctggttgaacgtactggagatcccgccagcaccaaccggggcaaacaatggcgcacctgaaaactttttacaggtggcattccgtacccgcgtaaaactgctgtatcggccgaccggtctggcgggagaagcgaatgatgcgccggaaaaactgcagtggcgcttcagcgctgcgggcgtcagcgtgaaaaacccaacgccgtactatgtatcatttaccgagattaatgccgtcgtaaaccaaaagcgtgtgccgttggccccgcacggcgacatgttggctcccggacaggaaaagacattgtccttctccggcgacagcgcgcgcattgctgacattgcctacaccactattaatgattttggcggacgcgtgtcccgtactaagaataagcaaaagtaa

SEQ ID NO: 426973 - DNA, 2562 bp, Serratia marcescens
atgaaagagttacctatctctgcagctgttaaaatggcgctgtccaattataaatcgattctgctgttaaccggtagcgcgctctgtctggcggctcctgcggcgtcctgggcggagggggcggccgatagcaaaaagccggcggcaccggttgaagcgacttttaacagcagcttcctgattggggaagcgcagggcgtggatctttcacgattccgtgatggtaacccgatcttggctggaaaatattcgctcgacgtgtatgtgaacggcgagtggaaaggcaaaaaaagtatcgactttaaaaacgtgccggggaaaaacagcgccgatacctgttttagcttactgtcgttggatgagttcggtgtggatacctccacaatgagcacggatcctgccgttaataccgagacgtgcaaaacgctgactcaatgggtgccggaagcctattaccgcttggacacaagtacgctgcgcatggatatcagcatccctcaggcagcgctgcgccgcagcgctcgcggctatgtcgatccgcgcttctgggatcgcggtattaccgcgggcagcctgtcgtataacttcaatgcgttcaatacccacagctctgccaacggcagcaactccgattcaactaatgcatatttaacgttgaatgccgggttgaacgtggcgggttggcagctgcgtcacgattccaacgtgaactggcgttctaacgacagcacccattggcaaaacaccgcgacttatgcgcagcgggcaatgccgtctatccgcggtatgctgacgttgggcgacagttacaccagcggtgatttcttcaactccatcggttttcgcggcgtgcagatcgccacggacgatcgcatgctgcctgattcattgaacgggtatgcgccggttgtgcgtggcgtcgcgcaaagcaacgccctggtggaagtacgtcagaataaccagctgatctaccaaactaccgtcgctccgggcgagttcatcatcaacgacctctaccctacgggttacggcggcgatctgaatgtcaccattaacgaggccgacggcagcaaacgccagttcagcgtaccctatgcttcggtagcgcagatgcttcgtccaggtattcagcgttatgccatcactgcgggtcgagtacgcgatgataatttaagcaaggaacccgacatgttccaggcgacttatcagcgcggttttaccaacattcttacgggatacacaggcgggatcgtcagcgatggctatggtgcagtgctggtgggcagcgcggtcgcgacaccggttggcgcatttgcgctggacgtcacgcagtccaatacccgcttgaagcagggtgaccaatcgggccagagctataagctcagctatagcaagttgatgaccgaaaccaacaccaacttcacgatcgccgcttatcgctattcgacttccggctacctctctttgcaggatgccgtctactcccgtgacaatgagcgcaagggtttaagcgcagatgcggttaaccgccagcgtagcgaataccagctgacgctgaaccaagggctgggcgacaattacggttccttgtacatcaccggttcggtacgtgactactggaaccgtggcgggagcaccaagcagtaccaggtgggctataacaactattatggtcgcgtgacctacggcctttccgccatgcgtacttcggatatgtacaaccgagatgagactcgctattacctgacactgtcgattccattcagcgtcggttcgcaaactctgagcctgaacagttcactgggctacaccgacaacggttacgacagcagccgtgtgggcatgaacggttcaaccggcgaagacaacaacatcagctatagcgctacgttagccaacgatcgctctggcggcaccaacagcagcgtgagcggtgaataccgtagccgtttcgccacgatgaacgggtcctacagctatggtaaagattatcgtcagtcgtcgatcggcgcatcgggcagcgtggttgcccatagcggcggcgtcacgctgacaccgcaacgcggacagactatggtgctggtggaagcgccagacgccgctggcgcgattgtgaccaactcgccaggcgttcgtatcgatgacaacggttatgctgtggttccttatgttgcaccatatcgcatgacgagcgtaacgctcgatccgagcggcatgtcgcgcgatgttgaattggaaagtagcagccaacaggttgcgccatatgccggcgcggttgcccggctggaattcaaaacaacgaaaggccaggcattgatcattcatgcgctcggccctgatggcaacgcgctgccgtttggtgctgaagtgctggatacccgtaatcaggtggtcggcattgttgggcagggcagtcgtatctacttgcgtaccgaagctaagaaaggtttgttgcagattaagtggggcacacagccaacgcagcagtgctctgtcagctatagcgccaaggcgcaaagcaataatcctgactacgaaattattgaagcgagttgcaaatga

SEQ ID NO: 426974 - DNA, 1038 bp, Serratia marcescens
atgataaagtttacgcgtgttccaccgctgaataaagcttcagcgaaatgcctgatgctgctcggactgctgatggcgggcggccagagcgcttatgccgcctgttacgttaataatggctacaaggcgcaggtgatcaacatgaagcttgggcgcgtgctggttacgccaagcagccaggttggagacaccttggtcaccggtcagttcgcgattaacccggtctccggttatggtcgttgttataacggcggtagcgcgattgggcagatcctccagggcagccggaccagcttcagcaatgtctggagcaccaatattccaggtatcgggattcgtttataccgtgaagcggggacaataagtacttattatccccacacgttggcattacggggtaatacaaccgtcaacctgaatggcggttactttaagatcgacattgtgaaaaccgccgcgcaaaccggcactggccaactggtcccaggcaagtacacgacttactatatggatggttccggtcaggggttgccgatgctggaatcgatcgtcgacgccaacagcctgacgatcgtgacgtctacttgcaacgtggacagcggttccaagaacaaggtggttaatctggataccgtcactgcagcttcgtttggcggcgtaggttcaacacagggtgaaaaagcatttgatatcaatatcaattgcgttggcggcgttggcgaggatctgttgccaggcagtgcgggacaagggatcgtcaatgtgcgttttgactatacgcaggatgcttccaatgcacctggggtgatcaaatccgagcctggcgccaacacagcatccggtgttgccgtccagctgttgaccggcaatacgacccagccgatcaagaatggcgatgcggtcaatgccggacgtaccattcccaaccaggccaatacgttaacgctgccgctgaaggcacgctactatcgtaccggttcgacgattaaaggcggcaatatcaagtcgaccgccacctttaccatcgagtacaactaa

SEQ ID NO: 426975 - DNA, 1020 bp, Serratia marcescens
atgtccgtatgtccttatgccgcggctctcgccgccgagccgcagatccactatcgcgccttgccgcccctgagctggaataacgcgcggcaatgttgggtggccgcaacgccgcagtgggtgagggaagcgctgctcaatgccgatctcggcgtgcggccggccgatgagccggtgccgacggccttgctggagacgccgatggcgccgctgttcgccgcgctggcgcggatgcgcgacggcgaagatcaccgcaccctcaaggcggcgctgcagcgggcgttagcttcctgcgatgatactctgattcagcaaaccgcggcactgtgcgcggcgcggttagcgccaaagacccccgaggcggcggcgatcacccgctttaactacgggttgccgatctgcaccctcggcgcattgttgggcgtgcccgaagcgcagtggcaacatcttatcgacgacagcctggactttgtccgctgtatcgcgcccggcggcacgccgcagcagctggcacgcggcattgcggcggcgcagcggctctgtgcccggctggcgacggggaatggcgtgctgcgccaggccctggtgcgggagatcggcgacgcccggcttgagtcggccaatgcgctcggcctgctgtttcaggcctgtgaggcgacggcgggctggatcgggcaggcgtatttgctggcacggcagaacggcgaagtggataccgcgctggatcgggtgcgggcgctgacgccacctatccaaaacacgcgccgtttcgtcttacgcgagacgcagcttgccggttgtacgctgcgcgtggggcagactgtcttgctgttgctcggcgccgacggcgaactggccttcggcgcaggggcacaccgctgcccgggcgaacgctgggcgaggattatcgcgcgctgcggcgtggcgcatctgtgttcgctgaatattgatgagcgggcgttggaatcggtgcggtggcgccattcctacaatgcgcgcgtacctgagttttgccgttga

SEQ ID NO: 426976 - DNA, 507 bp, Serratia marcescens
atggacatcactttacgccacgaaacgccggccgacgtcggcgccatcgccaccctgaccgccgccgcgttcctgcatgccgaacacagcagccacaccgagcagtttatcgtcaacgcgctgcgtgcggcaggcgctctcaccctgtcgctggtcgctgagcacaatggcacaccgatcgggcacgcgtccgtctcgccggtcatactcagcaacggcgccgccggttggtacgggctggcgccggtgtcggtgctgccggcctgccagggccaggggatcggcagccggctgatccgccagctattggccgaactgcaagaacgacacgccgcaggctgcgtggtgctgggcgatccgaactattacggtcgtttcggcttccaggcgcagaccgcgctgaccctaccaggcgtgccgcaggactacttccgtgccatcgccttccagggcgcgctgccgtgtgcggaagtcgccttccacaacgcgtttaacgccgaagcctaa

SEQ ID NO: 426977 - DNA, 258 bp, Serratia marcescens
atgaacatttccaaagcggaacaacgcgtactgcacgtgttggccaaaggcggctatatcgccttcacccgcaacgacgccggtcgcgtcacccacgtcgaatgctacacccgcgaagggctcggcctggccgactgctcgctggccgtcttcaccaagctcaaaaccaaacgcctgatcctctctcgccaggggcgcccttatcgcgtcaccttcgccgggctcaaggccgtgcgtgcgcagctggataaccgttaa

SEQ ID NO: 426978 - DNA, 432 bp, Serratia marcescens
atgccgcacctctataacaccgcgctgctgatcggcgccgcgctgagcgccatcgccgcgctgctgcatatctgggtgatcgccgccgggccgcgcggctaccggctatgcggcgccggcgatcgcttcattaaggcggcggaagcgggtaaaaagttcccggccgtcgtcaccgccggtatcgcgctggtgctgtttatttgggcgctgtatgcgctttccggcgcgggcctgatcgcgccgctgccgctgctgcggcccgcgctgtttatcattaccttcatctacctgctgcgcggcgtcgccggccccttcgccctgcgcgataccggccgcagccagcgctttatcgtcgtcagctcgctgatttgcctcggcttcgggctggtgcatctgctggggatgacgcagcgctggggggcgttggcgtaa

SEQ ID NO: 426979 - DNA, 912 bp, Serratia marcescens
atgagactggcgacgggtatgctgagcgcattggcgctgtggagcgggctggcgatggcgcaacctgcggcgctgacgctgcccagggaagacggttcgagtattcattactatctggacgccgcggtgcccgggcaatcgtcggcggcgctgttggtgatcctgcaaggatcggattgcaacagcgtacggcatatccgcctgctggcgccgttgcggcaggtgttccccgccgcagacctgctgacggtggagaaatacggcatcgacgaccggttgccgtaccgtgaagaagtcccgcggcaggattgcccggacgcttttgtacagcatgacacgccgcagcggcgggtgagtgatgtcactcaggtgctgaaggcggtgattgcgcgcaacggctatcaaaaggtcgcggtgctggggggcagcgaaggggcggtgatcgccaatctggtgacggcctcctcgggcctggttgatgccaccctcgcgttcagcggcggtgggcgctggtttgtcgacgacgtgcggcacagcgctgccggcgcgccgaaggaagaggtggccgggctgaacgcatttttacagcaggtgatgacggcgccgccgttcgccctgaacgccagcgatcatggctatgactggtggcatggcatgctgaacatcgatcagctcgccaccctgcgcagcatcaagacgccggtgctgatcgtgcagggcgaccaggatcgcgccgtttcgccgggagcggtcgggaaaatgatcgccgagctgcgggccgacggtaaaacgaatatcacctacctgaattatccggcattggaccatgtgatgcggcgcgaaaatggcgccagcgagatggagcgggtggtggcggacatgcgcgcgtggctggagaagcaactgcgctga

SEQ ID NO: 426980 - DNA, 1305 bp, Serratia marcescens
atgaacactgcagaaaatgcattgcccaaaagccaaacggcggagaaaggcgcggtaaattacaaagtgattgtcggcgccagcctgggcaacggcctggagattttcgatttcaccgtatacagtttctttgccgccattatcggcaagctctattttcccagcgacagcgcctacggctctttattgatgtcagtcgcggtgtttggcgtcggctttatcatgcgcccgctgggcagcatggtgctgggcgcctatgccgaccgggtcggccgcaaggccgccatgctgatgaccatcgtgctgatgggcatcggtactgctctgattgccttcgcgccgacccatgcgcaaatcggcgttctggcgccggtgctgatcgtagtcggccgtttgattcagggcttcgccgccggcggtgaagtgggctcggccaccacgctgctgctggagtcggccggcgccaatcagcgcggctttttcgtcagctggcaggcgatcagccagggcgtcagcgccctgcttggcgcctcttgcggcctggcgctcacctattttctgccggaagacgcgctgtatgcctggggctggcgcgtgccgttcatcatcggcttgttgatcattcccgtcggcgtgtatatccgtaagcatctggaagagacccacggcggtgaacaaccaaatcctgcgcaaccgccgctgaatccggtatgggatctggtgagcaaccatgccaaagacctgttgctgggggtgctggtcatcatgtccggcaccgtgatggtctacgtggtgctgctgtatatgccgacctacatgatgcagacctaccacattgccggcccgaccgcctatctgttcagctgcatcgcctctgtggtacagatcgtggcggtctattgcgccgggcgctatgttgatcggatacagaattacaaaagaccgctgctgttctccatctttgcggcgctgatcctgatttacccgacattctggttcctcagcaccacgcaaactctgtggttggcgatcgttttccgcatcctgctgatcggcgcgctggggatcaatatgctgtcgagcaccatgctgatcgtctcggcgctgccgcgccgcgtgcgcgccaccggcacctcgatgatctacgcctttggcgtgacgctgttcggcggctcggcgcagctgatcgtcacttggttgctggatgtcagcggcaacccgctggcgccggcgtggtacgtaaccggcatgttgaccgtcagcctgatagccactctgttgttccgggagcgccacaccaactag

SEQ ID NO: 426981 - DNA, 129 bp, Serratia marcescens
atgatggagaaagctattgccatgtgggtattctgcatggcgaatagcctgtttctgccggatattcagacctttgcaatttttttgcgtgctcgctttttgttatcgcgattaagggaggaaaagtga

SEQ ID NO: 426982 - DNA, 327 bp, Serratia marcescens
atgagacaagttcagaaaatcaccgtaaataataaaggtggctatgtatttaatttctcagttcaatggttaggaagcgacggaaaatggaataccactgactggaacagtgggaattatcctgtcgcgcagtccagaacaacacctccgcttaatgaaattggtgtcccggatgatgcattggctgtaacgccatatgggcatgcagtgctcggcacttcgggccagggaacaccgtttgtttcctctgcctccaacgggcagattgcgacctatgatgccgttggcacgacgttaatcggttttgccattgtgctgatcgagtag

SEQ ID NO: 426983 - DNA, 942 bp, Serratia marcescens
atgaatccgaaagtcagcattattatagcaagttacaacacggacaaatacattgttgagtgtgtgaactctgcacttgggcaggattacgaaaatattgaagtcatcgttgtcaacgacgggtcgactgataccactgaagagcttttatttgaacttgctcgcaataacactaaactcaaaactctaacgcaagaaaatcaggggcagtcagtcgctaggaacaacggacttacactggcgacaggtgagttcgttatttttcttgatagcgatgataaattttataactcattgatatcaaagtgcatttccgcactaaactcaacaaaaagcgacattatcttcttcaatggtgagagcttttacgataatgaaggtgatcctctcactgcgggctttgctcctaagtacattagaaacaccagtttgtgtggcaaggcgatggatagccacacattctttaaaaagtcgtgggaattaaataattatacagtaagtccatgcatgttcatcgccaggactcaacttgtgagagataatccattttatccaggcattgtgcatgaagacaacttatttaccactaaaatcttgctatcaaaaaaatcaaccattgcctgtataaacgatattttatataaaaggcgtatacgccccgattcagttatgacatcaaaaaaaagcgaaagaaatgccataggttatttaacggtagcaaaagaaatgatatcccttcgttcgcaaacggataatgaactgaatgcctgcttaaacagctttatttctcattgtgtcagctcatcactgaacgacgctaaagcttgtttcgaacggatacctaaagagctgaagaaagagtacctggaggtcatcaaagatattggttggatgaatatcaggaaaaaaaccttagctaaatttattttagcttacttttaa

SEQ ID NO: 426984 - DNA, 1440 bp, Serratia marcescens
atgagcgcatcaagtaatgcaaagtgggtaactctgtcacaaatgggtaaggttttcacccagttaatgagcatgctcgttctggcaaggctgattcctccaggggaattcggtttaatggccatggcttacgtagtgattaacttttctcttttgatcagagacttgggcacttctgcggccatcattcaacatcgtgaattaaagaacagcacaattaacgccattttcggtctcaacattacaatgggaacagtaatcgccattgcaattgtaattttttcaccgctaatcgcgcatttattcaaggaacctcgattagtcgacgtcttgcttctcctgtctatttcctttcctattgccagcagcggctctactcacctagcgttattggaaagaaattcaaaattcatgacagcttctttgattgagttgtcggcaggtattatatcgcttatcgctgcgattatactggcatatatgggtgctggcgtttatagccttgtcatatcaaacttactgacagcaattatatcaacgaccctactttggataaaaagtgattggcgcccaagcataaagaaaattttcaacaaagatgagttgaagttgattttctcctttagcagtaatcttacattattcaactttgtcaattatttctctagaaacgccgacagcatacttatcggccgctatatgagtgccaacgttctcggctcttactctctggcctacagaatcatgttattcccgcttcaaaacttaacattcatcgcgtcccgatctctattccccataatgagccgtcagcaagataatgaagcagaggtcaaaaaactatttctgaaatcgattgatgtaatcacattccttgtttttcctctgatggtaggtctggcaacgttacgagagccgttctttaatattgttttcggacctgaatgggcactgagtgcaacgattatgctctggttagcaccaacaggtattgtccaagcagtgaccagttctactggtgcagttttaatgtccaaaggacgtgctgacatattgcttatgttgggagtccttggagcatttctattgctaagtgcatttaccatcggtgtacgatacgacattattacgctcaccatgctttatttcgttgctaacgtaataaatttcattccggcaatgcttattacaatgcggttgttgggaggtaacctcttcgaggtcattgtccgtctcgttggacctgcattttgttcaggagtcatgttcgcagcactctactggttgttacatttctctcatttaaatattgcggtaaatagtgtactttcgttgattggcgtatcattatttggtgcacttgtttatttcatcgcatcagtgctatttttgcgtgaccgaattagtcacttcaagaagcttgtattaaagaaggtatga

SEQ ID NO: 426985 - DNA, 1215 bp, Serratia marcescens
atgaagggatttccctcgctgattaacatgctgctggccagttcgctggtgttgaccatcggccgcggcgtcacgctgccgttcattaccatctacctcaccgagcatttccatctgctgccgaagagcgtgggcgtgatcctgggcgtcagcctgaccctcggcatccttgccagcctgtacggcggctatctggtggacaaattcagcaagaaccgcctgatcctgctgtcgattttattgtttgcgctgagcttcttcgcccttccctggatcccgcgccccggcggcgtgatcgtggtgctggcgatcctgcatacctgttattcggtgctgagcatcaccattaaggcctgcttcgccgactggctgccggtcgagcagcgcatcaaggctttttcaatcaactacacgctggtcaacgtcggctgggcgatcggttctgcgctcggcgttctggtagccgggcttagcccgctgctgccgttttacctgtcgggcgggttggcgctggcgacggtagcggcactcagcctgcgcttgcgcggccgggaacagcgcgcaacgccagacgccgccgcaccggcagcgctccccaacttccgccagacggtgactatcctgcgcagcgatcggcggctgatctacttcaccctcggcagtaccctgggcgccgtcgtgttcggtcagttcaccggctatctgtcgcagtacctgatcaccgtctccagcgccgagtttgcctacaaaatcatcgggctggtgatgatcgtcaacgccagcatcgtcatcgccctgcaatacctgctcagccgcggcatgcgtcaggaaaatatgctgcgctggctggcgctgggcacgctgtttttcatcgtcgggctgctcggctttatgatggccggccaggtggtctggctgtggctggcggcgatggcggtgtttaccctcggcgaaatcatcgttatcccggtggaatacatgttcatcgactttatcgcgccgccgcacctgaaaggcagctactatggggtacagaacctcagcgcgctgggcggcgccatcaacccggtgctgtgcggggtgctgctcagctatgctgcgccgccgttgatgttcgtgatgctgatcgtcgccgcgctgctcagcctgctgtttttcttcctcggccaccggctggcggaacacgcggcggcaaccgccgaagacacgcgctga

SEQ ID NO: 426986 - DNA, 1353 bp, Serratia marcescens
atgatagagcttcttattggcgccgtagtggcggcgggcgtgggccgttacatcatcaaggggtattccgccaccggcgttttgatggtgggcgggctgctgctgctcggcatcagcgccctgatggggaaaacgctgttgccgtccggcgcggcgtctaccggctggcgcgcgaccgacatgatcgagtacgtcaagattctgttgatgagccgcggcggcgatctcggcatgatgatcatgatgctgtgtggctttgccgcctacatgacgcatatcggcgccaacgacgtggtcgtcaagctggcctcgcgcccgttgcagatgatcaattcgccttatttgctgatggtggcggcatactttgtcgcttgcctgatgtcattggcggtctcttccgctaccggcctcggcgtattgctgatggcgacgctgttcccgttgatggtgaacgttggcatcagccgcggggcggcggcggccatttgcgcttcgccggcggcgattatcttggcgccgacctccggcgacgtggtgctggcggccaaggcggcggagatgccgctggtggacttcgcgttcaaaaccacgctgccgatctcgattgccgccatcgtctgcatggccgtggcgcactttttctggcagcgctatctcgacaaaaagaacaatgaacaacatcacatcatggacgtcagcgaaatcaacacccacgcgccggggttctatgcgattttgccgtttacgccgatcctcggcgtgctgattttcgacggaaaatgggggccggagctgcacatcattaccgtactggtcgggtgcatactgttggcggccgtgatcgagtttgtgcgcagcttcagcgccaaacaggtattcagcggcctagaagtggcctatcgcggcatggcggacgctttcggcagcgtggtgatgcttttggtggctgcgggcgtctttgcgcaaggtctgagcaccgtcggttttatcagcggcttgatcgggctggcacagtcgtttggcaccggcggtttgatcatgatgctggtgctggtggtgatcaccatgctggcggccatgactaccggttccggcaatgccccgttctatgcgtttgtcgaactgatcccgaaactggcggcgcagatgggcgtgaatccagcctatctggtgatcccgatgctgcaggcgtctaacctcggccgcacgctgtcgccggtctccggcgtggtggtggcggtttccggcatggcgaaaatctcgccgttcgaagtggtgaaacgcacttcggtgccggtaattgtcgggttggtggtggtgatcgtggcgaccgagctgttggttccccagtaa

SEQ ID NO: 426987 - DNA, 894 bp, Serratia marcescens
atgacgaagttaaaagctgtcattcctgtcgctggcctgggtatgcacatgctaccggcgaccaaagcgattcctaaagagatgttgccgatcgtcgataagcctttgatccaatacattgttaatgagtgcgtagcggcgggtatcaaagagatcattttggttacgcattcatctaaaaatgcaatagaaaaccatttcgatacgtcctttgaattggaagcgatgcttgaggcacgcgttaagcgccagttgttggatgaggtccaatcgataacgccgaaaggtgtaacgttgatgcatattcgacaagggcagcctaaagggcttggtcacgcggtactttgcgccaaaccgctggtcggagacgctcctttcgtggtgctgttgccggatgtgttgcttgacgatgctaaagccgatctaaaaaaagataatctggctcacctcatttcccgcttcgaagagacgggtttgagtcaggtgctaatccaacccgtggatgaacatgttttgcgcgactattctgttgtggagtgccagaacagtgcgttgcggcaaggtgaatcctcacctattaccgccatcatcgaaaagccggacagtggtattcagctgcaatccaactattcagccgttgggcgctatgtgctttcagccgctatctggcccattttggaaaaaaccgagccaggcgcctgggggcgcattcagttgacggacgcgattgccggattgctgaaacagcagacggtagaagccactgaattagttggtgagtcgtttaactgcggtgagaagatgggctacttgcgggcattcgtgacttatggcttgcgccacccaacgcagggcaaggcctttcgcgagtgggctgaacaactttctttgtaa

SEQ ID NO: 426988 - DNA, 1197 bp, Serratia marcescens
atggttggcatggggcttggcattacatgcattttttactttgaaagtgatgataactcgatggcaaaaaaacaatggaaactgataccgcttttggtatctatcagtgtggttagcggttgtactatcgtgcctggctctcatctttcaaccagcggcaaagatgtcgtcaaacaacaagatagcgattttgaccttgacaggctggttaatatttacccaatgacgccaggtctggttgaaaaaatgagaccaaagcctgttgttgcacaaactaactcctcacttgagcgtgaattgcaaaactatgaatatcgtataggtgtcggcgatgtgttgatggtgaccgtatgggatcatccagaactgacgacccctgcggggcagtatcgcagcgcgagtgatacaggcaactgggtcaactctgatgggacgattttctacccttacattgggaaggttaaggttgtcggtaagacgatgagccaagttcgtagtgaaatcgcaaatcgtttggcgcaattcattgaaagccctcaagttgatgtcagtattgctgcttttcgttcacaaaaaacgtacgtaacaggtgaagttgctaaatcaggtcagcaaccgataacgaacgttcccttaacggtaatggatgctattaacgcagcaggggggctatcggagaatgcggattggcgtaatgtagttctgacccataatggtaaagagcagcgtatttctctgcaagcactgatgcagcgtggtgatttgacacaaaaccgtttactctatcctggcgatattctttacataccccgaaatgacgatctaaaagtattcgtcatgggggaagtcaaaaaacaggccactctcaaaatggatcgcagtggtatgaccttaactgaggcattaggtaatgctgaggggatggatcaaagtttcgctgatgcaacaggggtcttcgtcattcgtcctctacgaggtactgaaggtcaaaaattggctaatatttatcaacttaatgcctcagatgcggctgctatggtgatgggaaccgagttccaattacaaccctacgatattgtatatgtcactactgcacctgtagttcgttggaaccgcgttattagccaattggtaccaacaatcacaggtttcaacgaccttagcgaagggtcgctgcgtattcgtaactggccttag

SEQ ID NO: 426989 - DNA, 2172 bp, Serratia marcescens
atgtcagataaaaagaagtcggttccatcttcggatgtcttgagtgagttggatataacacgattgatggctactttggttgacaatcgatggttaatttgtgcggtaacagccttaataaccctgataggcattatgtatgcattgttttcaacgcccatttaccgcgctgatgcattagttcaggtcgaaaaaaatattggtagctcattgttgaatgacatatcatcgatgctgccgacaaattcgtccgcttctgcgtcagaaatagagctcattcaatcacgcatggttataggtaaaacggttgatgatctgaatcttgacatcgaaactaatcaagattatttcccagtattcggaaagggatttaaccgactaaagggggagaaaccggctgagattgctgtttccaggctttcattacctgaagcttggtctgacaaagatcaggaaataaaggttaccatccttgataaaaatagttatgaggtttcctttgatggtggcgacttatttaaggggacagttaataattttgagtctcacaatggcgtgaatttgctgattagtggcattaatgcccctgcgggtacgagctttactattaccaaacatacacgattagagtctatcaatgacatattggacaggcttacggtttcagataaaggaaaggaaactggtgttttagagatatctttaactggtccagacccggtccttatccgtaaaatcgtggatggaattagtcaaaattatttgcgccagaatgttgagcggaaatctgaagaagccgcgaaaagccttgaatttctcaaagaacaacttcccattattcgtgcaaacctagacagttcggaaaataagctcaatagttaccgtcagcagaatgactccgttgatctgtctctggaagcaaagtctgtacttgatacaatggtttctgttgaatcacagcttaatcaattgacgtttagtgaggctgaaatatctaaactttatacgaaagagcatcctgcatataaagctcttttagaaaaaagaaaaacactagaaaacgaaaaggaaaaattgaataagcgcgtcagcagtatgccaaagactcagcaagagatcttgcggttgacacgtgatgttcaatcggggcaagaagtttatatgcagttgttgaataaacaacaagagctcaatataaacaaggcaagtactatcggtaacgttcgaattgttgataatgcaataacacaacctaaacctgtaaaaccgaagaaaacaatcctcgtattagctgcaatgatagcaggactggttatatcctcaggctatgttgttcttatgagtttgttacaccgcggaattgaaagtgcggaacagcttgaggagaatggtataagtgtatatgcaagtatcccactttcggaatggcaggttagtcaggtcacaaaaaacctagccaagatgaagtttacaaagaatcacgttagcaatgattctttactagcggtcggcaatcccgctgatctggctatggaggccatcagaagcctgcggacaagtttgcatttcgcaatgatggaagcaaaaaataacgtaatagttatctccggtgctagcccaggcattggtaaaacatttgtttgtgctaacttggcggcaacggttgcattgagtggattgcgcgtattgttcattgatggagatatgcgtaaaggctattcacataaactctttacagatggaaagaatgatgcaggcttatcgtcggtattgtctggtaaagattctattgaacaagcaattttcagaacaaaaattgacggattagattttatgggaaggggccaagttccacctaacccatcagaattgctaatgcataagaatttcgaacacctgataagtacggtatcaaaaaattacgatattgtgttaattgatacaccacctatattagctgttaccgatgccgctattataggcaagcaagctgggacatcattaatggttgcgcgttttgatgtaacacctttgaaagaaattgaggtaagtattcgtcgatttgagcaaagtggtgttgagattaaaggagttatcctaaatgccgttcgcaaaaaggcgtcaggatattacggttattatcaatacgactataaatcatcgaatacatga

SEQ ID NO: 426990 - DNA, 915 bp, Serratia marcescens
atgaataatgcactgatctcagtatacattcctacgcataatcgaagtgaaatgcttaagcgggcagtgtcctcagtacttagacagacttataaaaatgtcgagataataatttgtgatgatggctcatctgatgacactgagcaagttgttactttactaaaagaaaaatataaaaacattcgctatttaaaaaatccaaccccgaaaggggcatgtgcagctcgcaatttgggaatattcgaggcgaaaggtgaatatatcactggtttggatgatgatgacgagttcactgaaaccaggcttgaggaattatttagtgccctttgtttagcaaacagtcgctacgcatttgtttgtagtggcatcgaaatgagggagaaagaagtaacttcgtttggctataccaaacgcggagcagttagcctggatgatttacttagttcaaacattgtagggaatcaagtactgactaaaacgaaatacctgcaagatattggaggatttgatacgtcattccctgcttggcaagattatgattgttgggttcgtctttgcaataaatttggtaacgggtatcgagttggtaacgtaagctatattatgcatatggagcatgaacatcaaaggatttctactagcaataaggtgaaaaatggttttgagcggtttactaatgtccacgcagatcttatggatgagagacaaaagaaagccctttatgttaattttaaactggggcaaaatgaaagtttctctatttatgaaataataaaattcacatcctaccgaacacttcctttggtttttaaagcttttttaaaaaaacgactcttttttcttaggaaattttacagttatgtacgggcgcaacagctatcaaataggcacaattctttagaagaaaaggactga

SEQ ID NO: 426991 - DNA, 1206 bp, Serratia marcescens
gtgttaactgaatatgaaagcagaacgataaagacagatgccagtctgatatttttcttaggttcatttcttctatggggaattgctgcattttctccattattgggattttatggttcactgatctatcttgcgattcagggattctcactaaggatccttaggatcaatgtggctattatcgctatcataagtggttcgtttattgcagcatcccgtaatacattaatggtactaggtgacgattttaacgttaactattacgtatatcaactgatgcaacatggggaatcaattttctatcatgatttttcaggtggtatagagtttattttacctttatattttaaaataatcggttctgtttttaacattgaaaatccggtttatatattcttttccgttaccgcactttgcttgacactattctatatatggctagagaaatatgctctaaagaacatagatgcggataaaagagcattatgtgtagcggcatctttgggattgttcgttctatttagtactacacagttgatgagacagatgatatctactgtgtttcttttgtatgccttgtcgctttggactgaaaagaaaaaactatcctttgttatatttttcgcgttggcggtattttctcatttgagttctgtcttattgttttttgttatcacaacattaatgggagaggatagatataaaaagtacataatattattaataagtattggttttgtttcattgtttacaatattcttatcgtatgtactaggtagtagtttgctaggggcagcaacttataaattcaattactatgcctccacggaattgtcaggtttcaacctggattctttttttaaatttcttattattatgtggtgcggagcgattttctttagaagcaaagttaacgaaagatggaatagcctgctagtttttggtggtgcaatgtatatcatttttctgccgcttcctttagcgtcagatagaattttaatgttgatggtttcttaccttcccggctttcttatgtttattgccttctatagggcagcattagtttttaaagtaattcttattgctttttttactttgaaaatactgcttttgggtccgctgtatagtggcggtgcattagaaggtatggaactatggaaaagttatccttggtttaataaagagtttttctattaccttgtttaa

SEQ ID NO: 426992 - DNA, 1104 bp, Serratia marcescens
atgaaagtagttatggttgttcaatgtatccataagattggtggaacagaaaaggcaacgattgaactggcgaatcttctacaattgaatggccacgaagtaacaattgttagtctttaccaaaaagttaaaaacgccgcatcagatctaaatcttgctgaaggaattaatatttgttacgtatttcctcatgtagtacttttcaagtacaacgataaattttaccgattacacgatcttttgctgaaaagagcgattagcagatgcatagattcgttttctccagatgtggtatttcatacaagtataaaaaatatagaatttaataacaataagtataagaagatattaatggttcatttttccttggagcattatttgaccggtaaggtgacgtcaacgctgttgaagaaaaaacaccaatttattgataggattgtttttttatcaaaagcagatgcggaaatatatcatgagaaatttagcgctagtaatgggacttatgtacctaatagtactaccatttgcatagccgatagaaagggatctgaaagtaacaagagaattatatttcttggccgtattgatgagggacagaagcaactgtcccatgccatagaaataatggagtcccttaaaaatcacaacaaactaaatggttgggggctcgatgtttacggaagtggccctgatgaaaagaaactcgctgagctgatagtggctaagaattgtagtgatgttatcaccatgcatggtttttcgaacgacatagataaagctctcgggactgctgatattatgcttttaacctcaaaatatgagggaatgccaatgtgtttgattgaggctgctgctagcgggatgccattaattagctatgactgcgcgccgggtatcagagacattataattgatggctataatggttacattatagctcaggatgataaggaagcgtttattaaaaaattgtcatctcttattaacgagccagaactgcgagctttaatgggaaagaatagtagggatgtggccgattctaagtttagccaggcgagtattaaacagcgctggtgcgaaatactagagaatgtgacaaaatag

SEQ ID NO: 426993 - DNA, 1065 bp, Serratia marcescens
gtgatatatataaatggacgattccttacacaagaggtcaccggtgttcagcgttttgctgaagagatatccattcacttaaagaagtttcgtgatgatataaaaatactatgccctcctaatgttaattaccctagagttacacagttaggtaatgttgaaataattggtaagaatacagggcatatttgggaacaatatgatctccctaagtatttaaaaggtcgtggtggttctctcctgattaatctaagtaatacagcccctgttttttataagaacaaaatagtgactcatcacgatataacgtataaaagatatcccaatagttattcattaaaattcaggatgctttataatgcaattattccaattatattaagaaccagtaaggcattaattactgttagtgagttttctaaaggtgagatttgcgctgcgtatggctatgatctcagcaagactcatgtcatatacaactcaactaacagcgattttactcggaaagtagatgaaaaaagtggggacagatactttttggcggtctcttcttctaattttcataagaatttccatggattagtaagtgcttttaaaaaaatgccgaatgaacatggtattcaattgaaaataataggtggctggaataagaactttgctaatcctaggctaaattcggctatcgaacatgacgatttaagtagtataaaatttttaggaagagtgtctgatgaagagttggtcaagctttattcaaatgcactggcatttatattcccatcattttatgaggggttcggtatcccaccactagaagctcaagcatgcggatgcccggtagcatcttcgaatcgggcatcgttaccagaggttctatctgacagcgtgttatatttttcacctgatgatgaagaggatataataaaagcaatggaattactcatcaatgaccagtcaataagaagtgacttaattgaacgtggttttaggaacgtaaaaagattttcttgggataattctgcgaaaaaattaaatgatttaatcataagcttagaaagctcataa

SEQ ID NO: 426994 - DNA, 1155 bp, Serratia marcescens
atgaatagtagtcaaatgaatgtgggtgtcgttgctgactggcttgtgacgtttgcaggcgctgaaaaagttattcaagagattattaatatttatccatcaactacgctatattcagttgttgattttttatctgatgatgcacgtgttaaatttctaggtaagaaggcaaatacaacatttatacaaaagcttccaaaagcaagtgcttatcaaaaatatctacctctcatgccatttgctatcgagcaattagacgtttcatcccatgatgttattatttctagcagccatgccgttgctaaaggtgtattaacagggcctgatcagttgcatattagttacgtgcactcaccgatccgctatgcgtgggatctgcaacaccaatatttgaaagaggcgggtttagataaaggcatgaaaggtcatcttgctcgatggattctacataaaatgagaatgtgggactatcgaactgcgaatggagttgatcattttatcgctaactcgaaatttattgcgcgaagaattaagaaagtttacgggcgcgaggctgatgtaatatatccaccagtagatgttgaacgtttcagctatcaagatgataaagaagacttttactttacagcttcacgaatggttccttataaaagaatagatcttattgttgaagcatttagtcacatgcctgataaaaggcttgttgtgataggtgatggttcagaaatgactaaaataaagtcaaaagcaaaaaaaaatgtagagattctcggttatcaatcaaatgatgttatgcttgaatgtatgcagaaagcaaaagcatttgtttttgcagccgaagaggacttcggtattactccggttgaagcacaagcttgtgggacgcctgtaattgcttttggcaaaggtggctctttagaaactatacgtccatttggtgagtcgaaagcgacaggattattttttcccacccaagaaatagctgctattgttgatgcggtttctagttttgagaaaattagtacttctattcttccacaagattgccgtgataatgcattgcgtttttccgtctcgcgattccaatcagaaatggaggagtatgtaaacaataagtggaatgctttcagttgttcaaaggcgataagttattaa

SEQ ID NO: 426995 - DNA, 1014 bp, Serratia marcescens
atgaagaaaatatttcacatattcgtctttatttacttgatttcaggtgttgggtactcatatggattctaccctggagttggagttcatcctaatgaatttaaaggtagtgcagaggaacttattggtttgatggaaaagtatcaaattaagtcgttccgaactgactatccatggagtaatgtagagattacaaaaggaatattgacgagttcaaatgatacaaccgataagcttatcaatattgctaaaggcaatggaatctctccattgatcatattagactatggtaataaaaactatgggggaggaaaacctctttcaccattagcgatggacgctttcgttaattatgcggcatggacagctagacattttaaaggcaaggctgagatttttgaagtttggaatgaatggtctcatcgcagtggacaggcccaggatgcgactaataatacttcagctgaggcctattttcagttggttaaaaaaacttcacaagcagtgaagaaagagaatccggcagcaatagtcattgccggcggctttaatcctctcgataatactgacaagaactggggaattacactcgtacagctaggcatacttaactatgtggatggaatctctttgcatccttattcttaccagaatagaactgttgccgatccaaagcttaatcttaagagaattgacctttaccaagctgagttagttaaaatcataggtaagaagattcctttctatatcacggaggttggatatccagcatatgatggtggggcaaatctctctgacgcagaagtcgcgaaatacgcttatgaatatataacatcggcaagtaaaatgaattatatagaaggtgtttggtggtacgactttatcgatgatggtgttgataaaaaaaatagagagtataattttggcctcttaaaaaatgatctttctgaaaagttagtaactaaagaatttagtagtgctttgaaagaaattactaggagtgtcaataaataa

SEQ ID NO: 426996 - DNA, 993 bp, Serratia marcescens
atgatggctgttgctcatttaaggcgatatattaaaaaagggatgagagtggtatgttatattcccttggggaataataaaatggctgaattattgaatgcctcttctatttgttatgagtttcatggtgtccgacataataatatggaaataatccattctttttttaatccatgtcatattcttcgcactgcttatttccttctttcaataaaaaacaagtttgattttatctttgtaattcaaggagacattgagtttggctctgtttttatcaatgtgggaaaaatgttggggataaaaagtatcattagttatcttccttatacgcatagttttaggaaaatggaaagctgggccccttccattaaagactttcttgctaggtatgtatataggaattgtaattgctttttcactatctgtgacacgacagctaacgatatcattatcaaaaataaaaaggctgttgtccgggttttggaaaattttgtcgccaggccagaaatatctgaaataagaggggtgggatatgaatttataccatcaaatgagacattgaaagttgtcatggcggggagggttctttttcgtcaaaagggacaggacatacttattaatgctttgaaaaatataatatttcctgttgaattgcgagtttttggtgatggcccagatctcaagcgatttagggagttggctactaagctttcgccgaacatcgaagtcgttttcttagggtggaaaaataatgtttgggcagattccagagatatagacttcattgtcgttccatcacggtatgaaggggttccattaataatgcttgagtctttagcgagaaatatacctgttatctcaccagctagagacggaatgattaattatttgaaagccgactcactttataatactggcagtgcagacttcgaggcgtatgagttgagtaagaaaatatcagaatttttcttcaagagggaagggaaaaagtga

SEQ ID NO: 426997 - DNA, 1536 bp, Serratia marcescens
gtgaacaataggcaaacggtgctacttaattcttttgctttatatggccgtacgttgatattgatgtttgtcactttatatacctcgcgtatggcgctaaattctcttggtgtctccgattttggtctctatagccttgttagtagtgtcatctttttgtttacgttcattcaaaatgttttttcactttccacgcaaagatttcttactgttgaggtggcaagagaaagtgaacaatttgaaaaaaggtttgcttctattattattatgtacttgggtgtttgtttccttgtcttttttttggcggaaactgtaggcttatggtttgttttgtcgcaagtgaattcttcaactgtaagcgctaacgatatcttcatgctataccaattcacaataataaccctcctttttcaaattatgcagacaccctttatgggatacttactcgccacggaaaagatgtctgtttttgctaaggttggagtatttgatgcctttcaacgttggttgatggtttttatattctcgtccttcgagtttcgacataaagttgtttcttattcttgccttgttctcattggttttgtttttgtttttattgtgtatgtttatttttgttcaaaatacgttcggttatataggggggggttctcaagagatattgacttggtctttttaaaggagattctgtcgttctctcgttggccattgttaggtgcgttcagtattgtaagcgtttcccaatcaattgcattcttagtttattactttgtagggttggtcgctaatgcttctatctggttggctgaacaggtcctgaacgcctttaatcgggttaccggtgctttgcaaatggcctttgcgccgaaaataataaagagtggctctttggggcattttggtgagatgaatggcttaatttttctgtcctgcaagctgactgcatttgtcacgatattgtcaggtgtgcctgtttttgtttttgctgatttcgtgagtactgtatggcttggtggtgtaccggattatcttcccaattttattcgaattgtcattgtttatgtgttcattgattccttatctaatcctttcgttactgctatatatacaaaaggggagttaaaaagatatcaactggtcatatctcttattcttgggttttccgttctgttgatgaccgctttgtttttcttgcattattcaatctattttgttcttttgataagggcgctgtgcgtgctggtactgctcgtgttgagggttttgtggacgcaaagtatttttcctctctgtaatcttaatatttttttgtttaagcttctcccaaagttttttattgtggcaataatttcagttttgacttgtctttatattaaaaatgaggttgttgatggttatttttctttgttaatggtttcttttttaaacttgtttcttgttgctgtaatgttcttctttatcgtttttgatgctgatgatagagcatcatttctcaagttgcttaggaaactgaagtacagtgagaggggattgtaa

SEQ ID NO: 426998 - DNA, 1002 bp, Serratia marcescens
atgacaaagtatggatttctgacttacgagagtgatctttaccgtaaaagagggtggattaatttaggtgattatgtacaaactcttgccgccaggcagtttctcccttcgtgtgatatcccaattccacgtgatgctataggtggttatcatggggagcctgtgaaggtgataatgaatgcatggtatatggactcaccagaaaattttccgccctcctgtaacatttatcccttttatacgtctgtacatatcaattcttcggttgaaaataaaatattttctgctgaggccatttatcacctgaagcaatatgctcctataggatgccgggatttctatacggtaaacttgctcgagaaatatggtatacctgcatattactcggggtgtatgactttgacattaggcaaagcatataagcgaaactcctgctcggatgatatttactttgttgatgttatgtatgactcattgacacctttcgaactgctgcgacaacctctgcgtttagccaaaagaattcttaatggacgtgtgtgggagcttttccacaagcgggaagtgcttagagagtgctttgataaagagctcttaaatgatgctagagtgatgactcaaatagttccatatgttccttatgaggtggggattgaaatggcccataactttctgctgaaactttcttcggctaaactggttgttacgtcacgtattcacactgcacttccatgtttggcaatgggaacacctgtcatttttatcaatggcggttttaagaataaaatagataattgtcgctttgatggtctgctcgattttttcaatagaattgatgttgataatagagggtgtgtgataaaaaattttgggtcatcaaatgacaaaataaacaataatacggtgattattaatggtggtaaacaccttgattattcagtttcgctggcaaggtcttgtaatgaatttattggtcagcctccttttagcccggtaacttga

SEQ ID NO: 426999 - DNA, 510 bp, Serratia marcescens
atgctcgttataatattgccgccagtcattaatcgttttcctagcgtaaacaatactgctgaaccagttcttattcaggcactcatctcgaagtcgtccgttacaactctcaataaatccgttctgggttggttagcctggcagaataagctgccgttccacgcaattctcgatggcccattgatccagtgtgcggcagatgaattcaggtcactgatcggttcttatcgtcgccaaatagccatgaaacagtgctatgctggccagactacgaatgacctacataccagaaatcccgaaattagcagtaatcgtcgggcacttcatagtgaaatcatccatacaggtcaggcacttgttcctccgaccggcggccaatgtatccatgacgaaatccatcgaccagctcaggttcggtgcatcctggcgctgaagcgaaaacagcccgctcgccaaccctttacgacgtcgtctacgtttacgctctgtccgttacggtatacccgctag

SEQ ID NO: 427000 - DNA, 2640 bp, Serratia marcescens
atggcttctcaagttttgctgtaccagaaggtagtggcagctatacagtacgccgtcttaggacatagtacttttactagtctcacagcctttgatgccgatgccggtcaaatccgtacgggacaaattactgcacagacttacgttggcaacctgctagcatctgctgaagggcaggcgctgtatggctcgagttcttcgttggatatcttacgaacggtttataccaaggtttatggttctgcacctgctgatagcgttctccaaggtattctgggtacaacgtcgttgaataatgccatttacagcgcaatcgataacttattaaattataagcaattcgatagcactaatttggctgcccaaaccaattttgacaaccacatcgatgctttgctgtttaataattacggtacggcggcatggaaccagtggagcgttgcgctttcgtctcaggaacaggtagcttctgtttatctggctgtaccttaccgttcggctgactctagtgggttgaactattggacgaactatttattacaaccaggtaagtcattttctcttttggttagcaacctgctggcttcttcggagtttcagcagaaaggcgccaatttggccggtgatgcattcatacagcacatttttaatggtgtgtatggtgtgaatgccacagcttctcaactggcaacttataacgctttgggaacgaacaagtctgttattactcaggctattatcaatgacttacgtaactcgactgcaacggatgctactacagttacgcaacagcatgcctttgaatatcagatcggcaccagtctggtttacaacaccgctgcagccttgtcgtcatctgcttctggtggcaatgccattggtacgattaactctggactttcccatcagatcagtaatgccgaaacggcagtattgactgatgtccaactcaacgctagcacagccagcctggtcaatctgaagttcgccgatcacctggctaacctgaccatcaacggcaccagcgctgcaacggtgaacctgtcagataacggcgtcaaccctggcgtggcggtgactgtcaacaacggcaacattatcctgaacgccagctccggttcagataacgtggtcgtgacttcgacggctaacatcgcgaccggtaccgcacagtttaacctcggcgccggcaacgacagcctgcactgggcgggtaacgcggtctccggcggtgcgaacaccgttgccaatgccgtcaaggctgacggcggtaccggcacggattccatctctgccaacttcatcaccaaaaccgtcgtgaccaaccagaacgccctgggcgttcgcaccagcaccgtgaccagcaacgccaacaacttctcgaactttgagcagattgatctgaccggttatatcggtaagtctgtcggtacgctgattacgacaccgctgattggttcaccgaccaccaccagcgtcactacgccaaccaacaccttcgactttggcctgaccaacggcacgtctacggtagaagggactacgggcggtacggtcacccagaacgcagcggcgaccaacctgggggcacaagggttcgtgatctccggcctggctaacgtcaacgtcatcaacgctgccggcggtaacgccgcacagctggaagtgaaaggcgacgcgacatcagccagtacgctgaacttcaccttcgtccaaaacgccaccgaccacttcaacatcaactttgatgcagtgagctcggcgaacgtgaatgccggcgccatcagcctgaacagcagcagcagtgcgctgttgggcaccgcgctgacgacggtgaacgtggcttccggcggtaccggttcgttcaacaacattctgtccctggctggtaccaatgcgcaggttcagactgtcaacgtgaccggtgaccatgcgctgaacttgacgttgggtagcggcttcagcaacgttcgtgacgttaacgcctcaaccaataccggcggtttgaacctggattcaagccatgcgggtaccggtgacggtattatcgtgcagctgttgaacgcgttgccactgagtgcggttaccaccgcattgctgaccccgctgctgaacacgctgggtctgaacggttaccaactgacggtagaaggcacgtccacggccgacagcttcaacgtactgggtaacaccacgttgaccgggggcaccggggcgaatatctacgatctgaaatccagtacttcgcaggcgggggtcaccatcaccgacttcagcactgcgaaagacaaaatcgtggatgcggcttccggcctgaccctgtccaacaccggtaccgcggtggcggattacggtactcgcgcttcagatacgttggatgcgctgttaggttcgctggttggcggtctaactaccggcgttgtcggcctgctggggggcatcctggggctgagcaatccaaactcgttgacggcaaaagtgggcgtggcctcggtggtgttcagtggtacaggtaacaatgctgactcctatgtgattattgacaataacaataaccacacgctggatgctaacgataccgtcatttacctgacaggccagaaccaccagcaattggtggatactctgcactacgcctaa

SEQ ID NO: 427001 - DNA, 1425 bp, Serratia marcescens
atgtccaagatagtcccggtaattatggccggaggaacgggtagccgcttatggcctttgtctagagaatcttttcctaaacaattcctgtcgattgacgatagtggtttaagcctgttgcagcagacgttagtgcgcttggagaacgctgccaatctagagattgcggcacctttagtgatatgtaacgaagagcaccgttttttggtcgcagaacagttgcgtgagatcggccaactggggacaaatataattttggaacctatggggcggaatactgcaccagctgtggctttggcggcccatctggcggcagaagaagcctttgacggcatacttctggtattggctgccgatcatttgatcacgaaagtgagcaattttcatgaggcaatcaacacggctactcagtttgccacacaagatcggctggtgacgtttggtattatccctcagcatccagagacgggttatgggtatattagacgtggcgacagcctctccaaggagtgcttcaaagttgaagcctttgttgagaagccttgtctggaaaaagcaaaagcatatgtcgcttccggcgattatagctggaacagcggcatgtttatgttcaagacggagaaatttctcagcgagctggaaaaatttagcccggagatttaccaaacgactaaaaaatcagtcatggagagccaacgcgatatgaatttcattcgcgtggagcaagaaactttccaatgctgcccgagtgactccattgattatgccgtgatggaaaaaacccaggatgccgttgtgatcccgatcgatgcaggatggagtgatgtcggatcgtggtcgtcattgtgggatgtgtctgcaaaggaccattcgggaaatgtgaatgtcggggaggttatctccattgattcaaataataattacatatcttctgactctgctctggtggctacgatagggttgcatgacatggttgttgttacgaccagcgatgccgtgcttattgccaccaaagataaggttcaagaggtgaagaaaatcgtcgaggaactgaaaaagcgcaatcttcatcatttccggcaacattcttcctcgtaccgtccgtgggggaaaatttgcgacatcgacagtggcgttcacttccaggtaaaaaaaatcatcgtgcgccctggcgaggggctttcgctacaacgccatttgcatcgtgcggagcattgggtggtggttagcggaacggcgaaagtgaatgtcgatgataaagagttctttctgtccgaaaatcagtcaacttttattcctgctggcagcgtgcacacactggaaaatccagggaaaatcaatctggaaatgattgaggtcagatcgggacgctatctggaagaggatgatatcgaacggttacacgatcgatatggcagagcctaa

SEQ ID NO: 427002 - DNA, 1368 bp, Serratia marcescens
atgaaaaagttgacgtgttttaaagcctatgacattcgcggaaagctgggcgaagagctgaatgaggacatcgcgtatcgtattgggcgcgcctacggcgagtttttgaagcccaagtctatcgtattgggcagcgatgtacgcttgaccagtgaaagcctgaagctggcgctggcgaaaggcttacaggatgcgggctccgacgttatcgacatcggcttaaccgggaccgaagaaatctattttgccacgacctatttgaaaacggatggtggcgtggaagtgaccgccagccataaccctatcgattataatggcatgaaattggtgcgcgaaggctctcgcccaattagcggcgatacgggcttgagagcgattcaagagcttgcagagaaaaaccaatttcaagcgccgacggcaacacgtggtaactatgtccgccaggacgtgttgagtgcttatgtagagcacattctttcctatgtcgacgtaaaaaatttcaagccgttgaagttggtgatcaattcggggaatggcgctgcgggacatgtggtcgatgctattgaagcgcaactgaaggcgcagggcgtaccgcttgagtttatcaaagtgcatcaccagccggatggcactttccccaacggtattccaaacccgctattgccggagtgtcgtgcagataccgccgaagcggtgcgtgagcatggtgctgatatgggcattgcgttcgacggtgattttgatcgctgtttcctgttcgatgaaaaaggtgatttcattgagggctattacattgtcggcttgctggcggaggccttcctgcagaaacaaccgggtgcgaagatcatccacgatccgcgtctgagctggaacaccatcgatgtggtcaccgaggcggggggcgtacccgtgatgtcgaaaaccggccatgctttcattaaggagcgcatgcgtgcggaagacgctatttatggcggagaaatgagcgcccatcactattttcgtgattttgcttattgtgacagtggcatgataccgtggctgttggtcgctgaattggtctgtgtgaaagggcaaactctggggcaactggtgcaggggcgcattgtcgcccacccgtcttccggtgagattaatatcaagttgtcgaacccagaaggttcgattgaaggtattaaaaaccactatgtttcgaaagcaagctcggtcgattataccgatggcataagcgttgagttccctgaatggcgtttcaatcttcgctcatcaaatacggagcctgtagttcggcttaatgtagagtctagaaataataaaaaattgatggaagaaaaggttaaggaaattctgaatctgttgaatttataa

SEQ ID NO: 427003 - DNA, 1398 bp, Serratia marcescens
atgaaaatacaacatcagcgggcgcattccaaagcaaatgcatctctaatatctatggttcagcgtttttctgatatctctattattttctttggcgcgtttgttgcaagtaaaataaatggttttaactttaactatgaaatcattttggttgctctcatagctttagtcgcatttcaaatgattggtggtataactgatttttatcgctcttggcgtggcgggaaattctcatcagagcttcgacttatacttaaaaattggacgctaagcataatcgttactgccggtataacttcattcatgccgagttccagttttacatttgaagtatttttatactggtatctatcagtatgtctcgggttcacgttctgtcgttctgcaatccgttttttggtggggacaattagaaatctgggatacaacaaccgaaaggtagccgttgcgggttcgatgcctatcggtgtaaggctgctgaaaaattttaaagaagaaccttggttaggatttatcgttgaaggtatatacgacgatgtacaaagtcacaatgataatgaaataaagtactgtggtgacttggataagttagtcgaggatgcacgccaaggacgacttgattatgtgtatatcgcgatgaaaatgagcgaagagcataagtttaagaagatactggggcagttaaccgacacaacctgttctgtcatgtttatccctgatgtatttacgtttaatatcttgcagtcaagaactgaagaagtaaatggagttcccgtcgttcctttgttcgataccccattgaatggcataaataaagtttttaaaagagctgaagatattattttgtcaatgctgatattgatatttatttcgccggtacttgctttgatcgcgttcgctgtgaaatttacatctcaagggccagttatatttcgtcaaacacgttacggtatggatggcaagcccatcatggtttggaaattcagatctatgactgttatggaaaataatgatgtagtcatccaggcaaaaaaaggtgatgccagggtgaccaaggtcggggcgtttttgcgacgaacctctttggatgagttgccgcagtttttcaatgttcttattggcgggatgtctatcgttgggcctaggccgcatgctgtggcacacaatgaacaatatagaaatcttatcgaaggttatatgctccgacacaaagtcaaaccaggaattacaggttgggctcaaattaatgggtggcggggagaaacagacaccttggataagatgcaaaagcgagtcgaatatgatcttgagtatattcgtgactggagtatttggctcgatctaaaaataattttccttacagtatttaaaggctttatacacaaatccgcgtattga

SEQ ID NO: 427004 - DNA, 1014 bp, Serratia marcescens
atgacaaccctagtcaccggtggtgccggttacatcggatcccacaccgttttatctctgttggaacgtggcgaagacgtggtggtgttggacaacctgtcgaactcttctgctgagtcgttacgtcgtgtggaaaaattgacggggaaagccaccgtgttctatcagggcgatatcctggatgctgagtatctgcagcgtatcttcgaggcgcacgatatctcggccgtgatccattttgccggcctcaaggcagttggggagtcgactcgcaaaccgcttgagtattatcagaataacgtcaccggcacgctggtactgttggatgctatgcgccgtgccggcgtacatgatttcatcttcagttcttccgctactgtctatggggccaattcgccggtgccatatgttgagacaacaccgatcggcggcacgaccagcccttatggcacgtctaagctgatggtggagcagatcctgcaagatttcgctaaggcagagccgcaattttcgatcattgccttgcgttactttaacccggtaggtgcccatgaatcgggtttgatcggtgaagatcctaacggtattcccaataacctcttgccttacatctcgcaggtggctatcggcaagctggagaagttgggtattttcggcggtgactatcctacgcaagacggcacgggagagcgtgattacattcacgtcatggatttggccgaaggccatctcaaagcgatggatcatctggcgaagatcaatggcttcaaggcttataacctgggggctggtgtagggcattcggttctggcgatggttcaggcatttgaaaaagcgtccggcgtaacgatcccttaccaaatattgcctcgccgcgacggcgatctgcctgctttctgggcgaacgcggatctggcatatcgagagctgggatggaaagttcgtcggaatatcgatgatatgatgcgcgacacttggaactggcagaaaaaaaatccgcaagggtataagtaa

SEQ ID NO: 427005 - DNA, 888 bp, Serratia marcescens
atgctgaaagctgtcatccccgttgccggtcttggtacccgcatgttaccggccacaaaggcaattcctaaggaaatgctgccggttgtagacaaacctcttatccaatacatcgtaaatgaatgcgttgctgccggtattaaagagattattctggtcacgcactcgtcaaaaaatgcgattgaaaaccactttgacacctcgtttgaattggaaagcatgctggagtcacgcgttaagcgccaactgctggaagaagttcagtctatctgtccgaaaggcgtgaccctgatgcatgtaaggcaggggcaatctaaaggattgggccatgcggtactctgtgccagacctctgatcggtgatgcgccgtttgccgtattgctgccggacgtgctgatggacgatattgcctccgatctgacgaaagataacctcgccagtatgattgcccaattcgaagcgcacggtcgcagccagatcatggtagaacctgtgccagaaaaagatgtgtccaaatacggtgtggtcgattgtcgcggcgtggctgtggcgccaggccaaagtgtgccgatgcatgcgatcgtcgaaaaaccttctcaagaagaggcgccttcaaatttggccgtcgttggtcgctatgttttggcagctgatatctggccgctgctggaaaaaacgccttatggtgctggcggtgagatccagcttaccgatgccatcgccatgttgatggagcaaaaaccggttgaggctttcgccatggttggacgttcgcatgactgtggcgataaattaggttacatgaaggcctttgttgagtatggtcttcgtcatccaacgcagggtgaagcattttctgagtggttaaaggggatgctgccggcttaa

SEQ ID NO: 427006 - DNA, 768 bp, Serratia marcescens
atgaagtatagcttaggttatctttgggatttggcttcggtcatcacagagaaagaattaaaagtaagatataaaagcagcttctttggctatttatggtcaattgctaatccattactctttgctatgatctattattttatttttaaattggtcatgcgggttcaaataccaaactataccatttttattattacaggcctgttcccctggcagtggtttgccagttcaacgactaactccttatattcgtttattgcaaacgcacagatcatcaaaaaaaccgtatttccgcgttcggttattccttttagtaatgtcctaatggagtgcctgcatttcctttgcacgattccggtcattatcttctttctctatgtttatgacatgcgtccatcaatcgattggctttggggagttccgcttatcggcatcgcacaaatgatgatgaccttcgggatcgcgatgatgctatcaacgctgaatcttttcttccgcgatctggaacgcttcatcacgctgggcatcatgctgatgttctactgcacgccgattttatactccggtgatatgattccagaacaatatcgattcctgattgattttaacccactggctaacatgatactgagctggcgtgatctttttatgaatggtgtaattgattatcatcagataggcatgctctacggatatgcgttactgttcattatcatcggcgtcagcattttcaataagttgaagtacagatttgcagagatattataa

SEQ ID NO: 427007 - DNA, 741 bp, Serratia marcescens
atgagcgtagctatagaatttaaaaacgtcactaagcgctatccattatatcatcatattggatctggcattaaagagctgatttttaaccctcgtagagcgttgagtttactgagcggccgcagttatctggcgatagaggatattagtttccaggtgaaaaaaggcgaatcggttgcgcttataggccgaaacggtgcagggaagagtacgtcgcttggtttggtcgccggtgtgatgaaaccgtcatccggttcggttcatgtcgttggtcgggtggcttcgatgctggagttaggcggcggctttcaccccgaactgactggccgcgagaatattcgactgaatgcgacgttgttaggccttcgtcgtaaggaattgaagcagcgtctggataaaattatcgagttttccgagctgggtgaatttatcgatgagccaattcgagtttactccagcggtatgttggcgaagctggggttctcggtcattacgcaggttgatccagatattctgattatcgatgaggtcttggcagtcggggacatttcattccaacgaaaatgccttgaaacaatcaatgagttcaagaagaaaggggtgacaattctttttgttagccacaatcttcgtgatatcgaaaaaatttgcgatagagttatttggatagaaaaccataagatgaaagttatgggtgaggctcattctgttatagcgcaatataaagaagcaatgagttga

SEQ ID NO: 427008 - DNA, 1884 bp, Serratia marcescens
atgcagaatattaaaatatatacatgtcatcacaagcctagtgcttttctcgactcaaagtggatacagccaatccacgtcggtaaggctaatagccttaccgagattggatgccttggtgataatacgggtgataatatatcgttcaaaaacccattttattgtgagctgactgcgcattactgggtgtggaaaaatgcagagccagccgactatgttgggtttatgcactaccgccgtcatctaaacttttctgaagatcagcgtgttcctgaagatcgatggggtgtggtgggggctgagaagataagtaaagaataccaagataaatttggtttgaatgacgaagcgattcctctgtgtctcgaaggcgtcgatattgttttgcctaataaatgggatgtcggtgctgcaggtagcaagaataattatcagcattataaaatctctaaccatctgcatatcgaagactatgatgctgcattgaccgtgttggaggagctttaccccgaatatatcaccgctgcagaaaaatttaaccaagcatcagatggttattatacgaatatgttcgtgatgagaaaggatatctttgaggactattcaatttggctcttttctattttggataaattggaagaaaggctgagatttaaaaattacaacgatcaggaaaagcgagttgtcggccacatagcagagcggttacttaatatttatgttggccacaagcgagaggttgagaccttaaatattaaagaattgcagagaactttcattaagaatgagaccttctcggcgaccctggaacctgcattctctgataataatgtaccagttgtcatttgcttcgatgataattatgcaattagcggggctgcattaatcaactctatcattaagcatgctaatcctcttttgaattatgatttggtggtgcttgagaacggagtctctctggcgaataagcagcgtttcttttctctgcttgctgagcatgacaatatccatcttcgcttctttgatgttaacgctttttcagagataaagaatgcgtttacgcgtgcgcattttagcgctgcaacctatgcgcgtttgtttattcctcggttgtttgttgagtatgaaaaagtgatctttattgactcggatacagtagtcgagaatgatttggcagagttactcgatattccgttggccgataatttggttgcggcggtaaaagatatcgtaatggaaggattcgttttgcttggtgccatgtcacaatccagtgatggggtgatgccggcgaaggagtacctttcttcttcattggatttaaccaatccagatgaatatttccaagcgggaatattagtatttaacatcgttcagatgaatcaagaaaataccttttccagtctgatggaggccatgcagagcaagcgatactggttcctcgatcaggatattatgaataaagtcttccatggtcgcgtacattatttgccgttggaatggaatgtctatcatggtaacggtaatacagagacatttttccccaacttgccattttcgacctacatgcgtttccttgaggcgcgtcgtaatccgaagatgattcacttcgctggtgagaataaaccgtggaatacgcgttacgttgatttttttgataattattacaagaatatactgaatacgccctgggctccggagctttatgcccgcttgcaaggcgagaggaaggatttttcacccacacgtaagaatagtggggcaccgatattaaaacgctccataatgtttattcttaatagtgtagcgccgaaagggacaatgcggcgtaatgcaatgaccaaatactactacaaatttaggcagctaattcgcggatcataa

SEQ ID NO: 427009 - DNA, 1158 bp, Serratia marcescens
atgatgaacagtaagaaaattttaatcgttggagcaggcttttccggtgcggtaatcgggagaaagttggctgagcaaggccatcaaattcatattatcgatcgtcgtacccatatcgctggcaactgctacgacgctcgggatgaaaagacggatgtaatggtacatacctatggcccacatattttccatactgacaacgagcaagtctggaactttgtgaatcagtacgccacaatgatgccttatgttaaccgcgtaaaagcgacggtcaacggccaggttttctcgctgccgatcaatttgcacaccatcaatcagttcttcaaaaaaacctgttcaccaacggaagcgaaagccttgatcgccgagaaaggcgattccagcattaccgacccgcagtcgtttgaagagcaggcgctgcgctttgtcggcaaagaactgtatgaagccttcttcaaaggctacaccatcaagcagtggggcatgtctccggcgcagttaccggcctcgatcctcaaacgtctgccaattcgctttaattatgatgataactatttcaatcataaattccaggggatgccgaaagacggttataccaagatggttgaaggtattttggatcacccgaacatctcggtggagctgaatacccagttccaaatgcagaaccgcgagggctacgatcatgtgttttacagcggcccgctggatgcgttctatgatttccagtttgggcgcctcggctaccgtacgctggactttgagaaatttaccgtggaaggggattatcaaggctgtgctgtgatgaactattgtgaacagtcggtaccttatactcgcatcaccgagcataagtacttctccccttgggaacagcacgaagggtcggtttgctataaagagtacagccgcgcttgtgaagaaaacgatatcccttattatccgattcgtcaggtcggtgaaatggcattgctggaaaaatacgtcgatttggccgaaaaagaacatgacattaccttcattggtcgcctgggtacgtatcgctatctggacatggacgtgaccattgccgaagcgttgaaaaccgctgaaacctatctggccagtctggagcaagaaaacgctatgccagtattcacggtcagcatcagatga

SEQ ID NO: 427010 - DNA, 900 bp, Serratia marcescens
atgagatgttcggcgttaattgttacattcaatcgcctggaaaaattaaaacaatgttgggcggcaacttctgcgttgccgtttgatgacattgtcattgtcgataacgcttcgaccgacgaaacgcagtcgtggctgcacggtatcgaagatagccgtttgcacgtcatacgcgccgcgcaaaatgacggcggcgcaggcgggttcaggctcggagctgaatatattgcgagcaagatagacactgactgggtgtttatgttcgatgatgacgcttatcccgatcacgcattattgacacgtttcgctgaattggcgcaacggtttgactatgctgcctactgttgccgagtcttggataagcaagggacgttatgcaaaatgaacgtacctttcagcaagatgccaacgtcgttggtacagactttgggttatatttccagacccgtacgttacatccccgcagagcttacgcccgcggatgtcgtgactttctcatttgttggtgcaataatacgcaaagacgttttagctgctaacattgagtacatctggccagaactttttatttattatgatgatctttacttctcttacaggttgagtcaacaagggtatcggttccggtactcaccagagttggtatttctgcacgatgtgcctgctaaccagggggggataaacccgtcctggaaagcctactatctggtcagaaacctgctcctttcaaggacgcttttcaacaaacatgaaagaccttactcactcggagctatcgtgttacgtattgcaaaatatttactttcttttacctctcaaggaaaaaaaggcgaatatattaaatacgtagtgcgcggtattgttgacggtatatcacgtaaaaatggtaaacaacattag

SEQ ID NO: 427011 - DNA, 1143 bp, Serratia marcescens
atgaaaaagatttgttattttatcaactcagattggtactttgaactgcattgggttgaaagagcgctggcggctcaggctgctggctatgaaatccacgttgtcagccactttgtgggagacgacattcagcaaaagttggcagataaaggtttcatctgccacgattcgtcggtatctgagctgtccatcaacccgttcaatttctttggttcattggccaaggtatggtcattgctgaaaaaaattgaccctgacgtactgcattgcatcactatcaaaccttgcttgatgggtgggttctttgcgcgtttttacaacaagccgattattctaggctttgtcgggcttggacgtgtctttatggaggataaattgtcaatgaacgtcattcgttatctgacgttacattcgtacaatcatatctttaagaacaaaaaatgcttgctggcctttgagcatgaacacgaccgcgatcggcttctggcgctgactgaagcgaaaaaaagccaaacggttgtgatcgatggtgctggtattaaccccgatatttatcactactcgctagaaatcaaccgcgaaaagccggtcgtcctgttcgccagccgtttgctctggagcaaaggattgggcgatctggttgaggtgaaaaagcgcttggcgcagaaaggcgtggattttgtgttgaatgtggcgggaatttccattgttgacgatccggatgctattccgctgtcgcaaatagaagaatggcatcagcaagggctcatcaactggttgggtcgttgcagcgatgtttacagcctgattgaagcctctaacgttgtcgctctgccttctacgtattcagaaggcattccacgtattttgctggaagcgtcttcggttgggcgtgcttgtatcgcttatgacgtgggcggctgccaaagtctgattattgatgagtacaccggtagcctggtggaaatgcgcaatatcgaggttctggcagagaagttggaacagctgcttaccagcccaagcaagcgtgtcgagatgggggtgcgcagccgtgagcgtatcgagagcaagttcgcctcatcattggttattgatgacacgctaaagctctatcagcgtgcgatcgcagccggaagttattga

SEQ ID NO: 427012 - DNA, 1101 bp, Serratia marcescens
atgaaaaaaataacctaccttgaaggtttacggggtatatgctgttttattgttattattgatcactgtgtcagcatctataagccagatattagatatacatcgtttagcgatatcggagggatgctacggcggttaattgcatggacaccgttaaatatagtttacagtggaattgcgcctgtttgcatcttcttcattctaagcggttttgttctttcaattaagttcaataaaacccacgagagtagtgccatattcaatggcgttgtaaagagatacccgagactggttcttcctattttagcctctatgctgatgagtgcattgctatattatgtattgaagtatacaactggtcatgtgattgaactcggttttattccagcggttcttgaagcggtgtatttcgcgcctttccaacatgtaccgctgcataattatgcactgtggactatatctttcgaattttatggatcttttattgttttcggtctgcttgcttttttcggcatgcatcgtaggcgactaatattttatgcattggttttctctttcctttatgcatggggctccttttattgtctcttcgtctttggaatgattctaaacgatttatacattggcaataaatttaaaatccatggagtgctgcgtgcgcttatgtttttgatcggcattgtgttggcaacttcgccgtatgaacgggatggtgtgtatttatacgggggggtctataaatacatcgaatatatatccgttggttcatatcgtgatacttatcaaatgcttatgttgacgggaagtatgctgattttcatgtctattttaggcagcagtttgagcgaaaagttgctcgaaaataagctggcgcagtttttgggacgcatctctttcccgttatatgtcgtacacgtctgtatacttaatattgtcgcagcaatagcgaagagttattatggtgagattcacatgtctacattcattatgctgttgttagtaaccgtatcagtatgcctactgctttcttactactttgaaaagtatgttgatttgccctcaatcaaaatggcaaatgtattcgctaaaaaaatagcatga

SEQ ID NO: 427013 - DNA, 1023 bp, Serratia marcescens
atgaataaggatgctatgatcgacgttaatagtaatgcttccgcagcaaacgaaagcgttaaggtctcgataataatcccggtatacaatgctcagaatttcattgttgcaaccctggattctattttacgtgcgattaagagtacatatgaaatcatccttgtcgatgattgctcaagtgacaatactatcttggtgatcgaggattatcttgcccagagagaaaatatcaagctcattaggcaagagaaaaatcaggggccgggtgttgcccgagatgtaggcctggcatcagcgagcggtgagtatacgatcttcttcgacagcgatgactttatgttgcctaatgtggctgataatgccatcgccaagcttgaaaaagaaaaactggacgttgctgtaactcagtacaatatcgtttatggcaaagccaaagaaagcattggcatgtgggaaggcgatgagaagttgtttgaggaagtgcgtgtaaaatatggtgatatcctttctctgcaaatgttacccaattttctgacgctaacaaattacccttggaataaagtctgtagaacacaatttttaaaggataatgacataaaatttggcagtttgcgtctgcatgaagatattttacctcactggaaaattttgatgaatgcagaaaagattgtcattctgaacgacgcaatatgtaattatatgctttgcccagaaggcagcaatgtgactaataataaaagtcagttacgtatgcagtgcgtagatgctattgccgaattatatgactatattaagtcagatgagcgctatggtgtatatacaacgagtttcttcgtgtttagcgttaatctggttgattgggcaaaagaaaatatagtcattgacttcaaatcagcactaatctccaaagtgagagacgttttcctgcagagtagctacagcgatctgcaaaaaattttccacacggataaatatattcattctaaagtgtgtgagtatttagttaataaaaaggttttttga

SEQ ID NO: 427014 - DNA, 1275 bp, Serratia marcescens
atgactgcaaaattatctatcattgtcacatcctataacatcgaaaagtacattggcgaatgtttggacaatgttctggctcaaacgctagaagatattgaaatcattgtagtggatgatggttctaaagacagcacgccgaaaattatcgaatcatatgccgagaaagatcagcgcatcattcctattctgatgaaagagaactcacctggtggggttgctaccgttgccaatataggcatggaagcagctacaggcgaattcattggttttgccgatggtgacgatctttacgatccgacaatgttcgaaaagctttataacattgcagtggctgaaaatgccgatgtcgcgatgtgtaatttcctcgagtttgagacagaaaccggtatcgaaaatgcgccgtatgagcctgcgtgggcaccattggcgaaagagcctgtttgggatatccgcagtgttgagaacaagaagaaagttctcgagttattgcctgtgccatggcgtaaaatttacaagcgtaaactcattactgacaataatctgaaattccctgttggaaaatacttctttgaagataatggattccattggtttgtcacgttaacgtcagataaagtctgctttgtcgacgaagtgctgtgctatcaccgacgtaatcgtgctggccagacgatgatggcgggtggggatcggttgctcggcgttttcctgcagcaccaggttatttttgactatcttgaaaagtcaaaaatgctggcgcaatatcgtgagtactcactcaactggctgattggccatattgcttgggtaagccaggttctcacacctacattttccacagagttctaccaaacgctgttgccgcatgtaaaacgctatcagaaagatgaaattcagcggtacttgtctacgcgcttctatgacagaaaaacggtaggtctggttatcgcactgatgaaagaaagcagtgcagatttctcagaagtcatgaatggctgggtagcgaaaacaaaggctgaaaaattacgcttcaactacgacaaactgggtgcgagtggtttgctgaacatgctggtacgtgttggcaagcacaagtttgtcgaacgcgggctacatcgcaagagtacgcgaactttgttaattgaaaacaatgcaaaactggattctattcattggcgtttgtcggaattagagcggatggttgaatctggatttattctgcaggaacagagaattgcagaaataaagaaacaggttgaagaaattaagtaa

SEQ ID NO: 427015 - DNA, 1371 bp, Serratia marcescens
atgtctgaagataaaacgataccctatgtttcggtagtcatgccagttttcaatgccgagatttatattttcgatgtcattgataaagtcagaaagcaaacgctgaaatcgctcgagattattatcgttgacgataattccacggatagtaccaaggcgatcctggaacgtattgctgccgaggatgacagggttatattgctttccggagttgaaggtggaggtgcaggtgctgcgcgcaatgttggtttaagccatgctagaggtgagtttgttgttttcctcgatgatgatgatttcgttgatgaaaacctgatggaaaaggcctattcaatggcgaaatcgcatgatgccgatgttgtcatttatagaagccagttctataacgttcagcaggataagcatctgtcgataccctggtcgatacgcacagatctgctgccacaaaaaaacgtattctcttccgttgagattgaaaaggacttttttaacgcttttgtttggtggccttgggacaaaatgttgaagcgtgagaggatattagctgaaggtttgcaatttcaacagataagaacttcaaacgatctctatttcatttgtgcgttcgttttgttatctgaaaaaatatgcattcttgatgatgtattaattgatcacactgtttccagagaaacatctctgtctaatacccgcgaaaagtcctaccactgtgcaattgatgcgttggaagcattgagatccttaatgattgagcgagggttctatgatggacgaaaaatcgattttatcaactactcggcttcattcctcgagtggcatctgaataccctgtatggtaaggcttacttcacattatatgaagatgtcagaaattatctgaataaactcggtgccaagtttgaggatctttacgaagaaagaacacaagtctttttcgacagtctttatcgtttgtcagcggatgactatctcttttatttaagtcgacgtctgcagaatgaaaacgatgagctggtttctgctaattatgatctctcttctgccaatcgcgaaaccgcatcatcttatcagatattgtccacctcctatcaagatgcctgcgcagaacttaaacggaaagaggaattggaacagaagtttcatgctgagcagcaagctatcgaggctaagctgagttccttagaggttcgactcagagctcacgaagaggtaattcttgagaaagcccatcaattgagagacgccgaaaaagagagagaggcgcttacgcatcaactcaaagagttagaaacgcataatcgtgagatcgtgaattcttggccatggcggatgatggctctgttttggccttcgcgtaaaagcgacaaataa

SEQ ID NO: 427016 - DNA, 1308 bp, Serratia marcescens
atgtcgaccttcaacacgccgatcgattgggcaacgtgcagcgccgaacgccagaccgagctgctgatgcgcccggcaatcaccgcttccgacagcatcacccgcacggtgagcgagatcctcgacaacgtgaaggccaacggcgatcgggcgctgcgcgactacagcgcccgtttcgacaaggcgcaggtcgccgcgctgcgcgtcagcgccgagcagatcgccgccgcctgcgcccgactgggcgatgacatcaaacaggcgatggcggtggccgtcgccaacgtggaaaccttccacaacgcgcagcgactgccgccggtggacgtcgaaacgcagccgggcgtgcgctgccagcaggtgacccgcccaatcgactcagtgggcctgtatattcccggtgggtcggcgccgctgttctccaccgtgctgatgctggcgacgccggcgcgcatcgccggttgccgccgggtggtgctgtgctcgccgccgccgatcgccgatgagatcctgtatgcggcacagctgtgcggcgtgcaggaagtgtttcaggtcgggggcgcgcaggcgatcgccgccctggcgttcggcaccgaaagcgtgccgcgcgtggcgaaaatcttcgggccgggcaacgccttcgtgaccgaagccaagcggcaggtcagccagcgtctcgacggcgcggctatcgacatgccggccgggccttcggaggtgctggtgatcgccgacgccggcgccaccccggcgttcgtcgcctccgatctgctgtcgcaggccgaacacggcccagattcgcaggtgatcctgctgacgccggacgcggcaatggcgcaggcagtggccgaagcggtggaaagccagctggccgagctgccgcgcgccgagaccgcgcgccaggcgctggcgagcagccgcctgatcgtggcgcgcgatctgcctgagtgcgtggccatcagcaaccgctacggcccggagcacctgatcattcagacccgcaatgcgcgcgagctggtagacggcatcaccagcgccggttcggtattcctcggcgactggtcgccggagtccgccggcgattacgcctccggcaccaaccacgtgctgccgacctacggctacactgccacctgctccagcctggggctggccgattttcaaaaacgcatgacggtgcaggaactgacgccgcagggcttcagcaacctggccgccaccatcgagacgctggctgccgccgagcagctgatcgcccacaaaaacgccgtgaccctgcgcgtcgccgccctgaaggagcaagcatga

SEQ ID NO: 427017 - DNA, 885 bp, Serratia marcescens
atggaaagcttgggttctctcgacgttttcgtgcgggtcagtgaaagccgcagtttcacggcggccgggcaacagctggggatctccgcgtcggcggtcagcaaaaccatcgcccggctggaggaacggctcagcgtgcggttgtttcaccgctccacccgcacggtcaacctgacgccggaaggcgccttgttcctggagaggtgccgacgcattttgagcgaggtgaaagaggcggaagccgaactgttgcaaacgcggggaacgccccagggcaagctgcgcatcagtctcccgtcgctgggcacgcttttcatgccaaaactgggggacttcaagcgccgctatcctgagatcgagctggatattgattattcggatcggctggttgacgtgattgaggaaggtttcgatgccgttatccgcagcggcaccccgagcgattcacggctggttgcccgccggctgggcacctgtcgcaaggttttcgttggcgcgccaagctatttcagccaagcgggtatgccgaacaagcccgaggatctgacaagccatgcccgtttgcattatcgctttcccagcaccggcaaactggatgcctggccgctgggggacaagacggagatgatccccgaacggccggccagcatggtgacaaataccctcgatccgcaggtgtgcttcgcggagcaagggctcggcatcgcttatttgccggagatcgccgtgcgcagacagctggaacagggcagcctggtgacggttctggatgaatacgaccgcgagaacatggtttttcatgtcctctggccgtcgggccgccacctgtcagtcaaaatcaggctgttcgtcgactttgtgacgagccaccttttcccgctttaa

SEQ ID NO: 427018 - DNA, 1191 bp, Serratia marcescens
atgaatcaaacgacgatatctgcgcctgccgcgagcagcgagcggttgccgctggggggcctgctggcgttggcgatggccgctttcatcacgctgctgaccgagatcatgccggcgggcgtgctttcttcgatcgcgggcgatttgaacgtgtctgaaagcctggcggggcaattcatcaccgcctatgcggtgggggcgttggtcgccgccattccgctcaccgcattgacgcagggcatgcggcgccgccccttgttcttgagcgcgatcggcggctttgccatcgtcaaccttgtcacggcgctgtcgcatgattaccacgtctcattggcgacgcgtttcttcgccggcgttttcggcggcatcgtttggtccttgctggccggttacgccgtgcgcatgtcaccggcccatcttggcggccgcgctattgcgatctccggcgccggcgccaccctggcgctggtgctcggcgtaccgctcggcacgttgcttggccgagccatcggctggcaaggcgcctttggcctgatgacgttgatggcgctgatgctcgtggtgtggatcatcgccatcgtgccggatttccccggccaggctaaggcgcatcgcccgtctctgagcggcgtattcttgcaatgcgggatccgcgccgtgctgttcgtggtgttcaccttcatcgttgcccacaacattctgtatatctacctggagcctttcctcaagccgtcggggttatccgaacgggtcgatatcgtgctgtttatcttcgggctgggcgcgattgccggattgggcgtcgccggggtgctggtcgatcgacgagtccaatctcttacggtaatgagcatcgtcacctttgccctcgccgccgtgttgttggcaagtggcggaaggatagccccgatggtgtatctcgcggtcgcattgtggggcgtggctttcggcggtttcgccaccctcacgcagacggcattgtcacgcctttccggccgcgcggccgacgtggcacagtccatgtatacgacgggctggaataccgccgtagccgccggtggtgcgatcggcggcatgctgctcgacaagggcggggcggcctcttttgcctgggctattatcgggctccttatcctgtctttaaccggcacgctgtttgccatgaatcgggcgctggcctctcagcgatga

SEQ ID NO: 427019 - DNA, 1002 bp, Serratia marcescens
atgaccctttccaccttgccgctggcgataaccatgggcgatcccgccggcatcgggccggagatcatcgccaaactggcggccacagagcggttgagcacgccttatgtagtgattggcgatgccggtgccctggcgcgcgcggcggccagtctggggctgacgctgcacatccgcgagctgcctgcctcgctggcgggatgggacgaagcctggatgcggggagaaaccgccgtctattccgccggcgttgcgctgccggcggacttgcccctcggcaggctcgataagcgcgcgggcgcggcgtcttatgcctgggtggttgccgccatcgatctggcgttggcggggcgtatcgccggcatcgtcaccgcgccgctgaacaaggaggcgatgcgcctggcggggatcgattatccggggcacaccgagatcctggcggcgcgctcgggcaccccggacttcgccatgatgctggccaacgacgagctgcgggtgatcctggtttccattcacgtttcgctacgggacgccatcgacgcggcgaccgtggaaaacgaactgcgcgcgtttcatctggcgcaaacggcctgtcgggcgctgggcattgcgaaaccgcgcattgcggtggccggcctgaatccgcatgccggggagaatggcctgttcggccgcgaagatcttgacgtcatcgtgcccgccatcgccctggcacgggaacaggggttggacgtcagcggcccctggcccggcgataccgttttcatgcgcgcccggcgcggggagttcgacattgtggtcgcccaatatcacgaccagggcctgatcccggtgaaatatctcggggtggatcatggcgttaacgtcaccgtcggcctgccgtttatccgcacctcggtcgaccacggtacggcgttcgatatcgcgggcagcggacgggcggaacacgccagcctgctgtacgccttccggcaggcggaaaaaatgttgcacgcccaataa

SEQ ID NO: 427020 - DNA, 693 bp, Serratia marcescens
atgcacacacccgagtttattttcatgctgacgcgcaacgacagcacggtgcctgatgcgcaagcgcggctaccagaggtgctggctgccggcgtgaagcatatcggctttaaggatatcggcctgccgctggatcaactcaaacagttggcgcaggcgatccacgccggtggcgccaccgcttatctggaagtggttagcctggatgaggaaagcgagatgaattcggcgcgcgcggcgctggcgttgggcgttgatgtattgatgggggggacgcggccggaaagcgtgctgccgatcattcgtcagtctggcctgcgctactatccgtttgccggccgcatcagcggccatcccagcgtgctggaaggtgacatcgaagacattgtcgccagcgcccgccagcgcgccgctttatcgggcgtgacagggctggatctgctggcctaccgctttgccggcgacgtgccgacgttgattcggcgggtgtgcgatgcggtcgacaaaccggtttatatcgccgggtctatcgaccgcgaagatcgcatcgccgccgtggtgacgggcaatgcggttggcttcaccgtcggtaccgcggcgctggacggcgtgtttcccgccgacaagccggggctgacggcgcaagtcaacgccgtgaaatgcctgattggcaatgtgatccgcaaactgtaa

SEQ ID NO: 427021 - DNA, 351 bp, Serratia marcescens
atgaataaagggttagggagtgccgttgtggcggtgagcctgttgttaaccggctgcgataccttcagcctgctgcgcgatcaaaagatcgccgaggcctttcacgtcggcgccgacaagcgctcggtcagccgggatttcggcgcgccgatcgccacccggccgacgctgaacggccagggcgtgtgccacgactataaccaccgcttgccgaacggcaccgtgacgccgttctacgtcggcttcagaaacagcgacggcaaagtggtggcctttggccccatcacctgcagggaagcgcaggccaacggcaatctgaacagtgatgaacctatcaaacagcggttctaa

SEQ ID NO: 427022 - DNA, 1590 bp, Serratia marcescens
gtgacttgcaagataaggatatccaatgcgttatcgttcgctaaatctcggggaggtgacaaggaaaggggccggaacgccgccccagggaagcgacgtacgggctggtgccgtatgaagctgctctctctcttttctgaacacacggcgccggaaagtttctcccggatactcaccccgacacaagcgcgccatgagctggaacggcattatctgttcggcggcgcagccggcatatcgataagcagccggtattccataacccgtaatactcaatccggtattggcgtcaccggttatcgtgaggacgcgattgtgaagcgcagcgtgttcgatgatctcaaccggggcggcttgctggcgattgatgagggaatgggcgcctggacgccgaccaaatacgcgttttacgtcgacgcggaaggccgattacagcgctatcccggcagctctcttcctgccttttatccaactgggcgcgtgatcgcccgctatgaagaaatggtcagccgctatggccggcgggcaaaaccgacggtgctgccagcgaggcagaatacgacccggaatccccctctgcagcaagccatcgctaccgcagtggcaaccgttgccgccacggtacaggccattcgtccgatgaccaaggcagaacgctggcaagaacgccagtacctgatagggcgaggcaaccgcagcatttacccggatgcgcgcatggcggcacagcgattggcggagaacaacgtcgcggtcgaaaaggcgaagttggctgagaatgtttacaagaccaccgattcactaggcgaactacctggagtaccggagggctggaaagatatcagtaatgacgagcgagctttaaataggcttggtctggacagtaaaatgctttatgacaagccgataaatcctgattttttagcccgagtttatcaaccagacgagagtatctttggtaaagcgatgagtccgacggtggtgtttcgaggatcgcgtgcgcctgagctcccggaaggaataagcactgcagttcaaaaagctttattaaaaggcgacctgtcaggcgttaaaaacctgagcgactggacaaacaatggtgctcagggaatagggcttaattctgaatactacaaaaaagcggttaatatcggcaaagcaatcaaaggcgatgttgggatatctggccattcgctgggcggtggcatggcgtctgctgcctccatggccagcggcaagccagcttggacgtttaatgccgctggattgcatgcggggaccgtagaaaaatacggcggctctataataggcagtgtcgataatattcaggcgtatcgcgtaaaaggggagctgttgaccaagctgcaggaggttgatttgtgggaggatgccaaagacctcaatttttatccgcctgcggtgatggcgaaagagcggttgtccatgttggcgcctgacgccgtaggggttaaacacacgcttcccggtggaacaggctcactgctggataagcacggtatagaccaggcgatacaatgcattgaaaatgaaaaagacgatgacattgccacaatcaagggaagaatatga

SEQ ID NO: 427023 - DNA, 744 bp, Serratia marcescens
atgaaaaagcttattctcattatcacgatggtagtgtctatgctcatcatacaggggtgcgaacaaggtatggatttacaaccgcaggattattttgacggtcagcaattggacattgccaaagccatttatgatggagataggccgcagttggataaactgttgtcatcagtaaacaaagagctcttaaatcgtccagctaaggaagaaatgaccttattgttctgggcgataaataacgctatctttgacaagaacacgccagagcggctcaagatcattacggatctggtcaaggcgggggcagatccattacaacctcaacctaacacgccaggtagccccgctgagtttgttatgaaggcggacaaaggcgtctggatacaggccatgctggaaggtggcctttctccaaacgcaagagataaggttcataatcaacctattatttttgaaagttttgaagcgaagaataccgaaacattaaaggtgctgattgcgaacaaagctgatgttaatatcaaaggggctatgaacagaactccattaattaatgcgctgtataacagttgccctgagcacattgaggttcttttggctcatggcgctaaccccttagccaaagatgattttaatgacagcttcctctctctgatttctgcggaaatagccaaaggagacaaaaataattcttatataaaaaaattaattaaaattaaagagaagataaatattgtgaattag

SEQ ID NO: 427024 - DNA, 774 bp, Serratia marcescens
atgaagcacattactctgattatcaccgtggtgctgtcgctgtttgtgatgcagggatgcaaacaaggtagggatctacaaccacaagattactttgaaggaaagcagctggacatcgccaagatcatctatgagggtgacaggcaaaagctggataaggttttaccgacggtaagcaaagaaacgttaaatcggccggccaaggcggagatgacgttgctattctgggcgataaataacgccatctttgacaagaatacgccagagcggctcaagatcattacggatttggttaaggcaggggcagatccattacaacctcaacctaacacaccaggtagccctgctgaatttgttatgaaagcggataaaggcgtctggatacaggctatgttagagggcggactttctccaaatgctagggataaggttcataatcaacccattatattcaatagcatctttgcaaaaaatactgagacattagaggtcatgttggagcatggtgctgatataaatataagaaattcactgggtgatacgttactcatcgatgctttagactatcactcctatgaccacgtcattcttctattagaaaaaggcgccgatagcgatataagaggcaactcgggttggacgatgggcaatcagctgcaacggctgattaatagaagtccggacggtagtgaggtgaaagagtctcttgaacgtatcaaagacgagctaattaagcgtggcgggaaatggccgcctgctcctgtcagtcaataa

SEQ ID NO: 427025 - DNA, 1035 bp, Serratia marcescens
atgacagttcggaaacaatcatccggtaagtggttatgtgagtgctaccctgctggccgagaaggtcgcagggtacgtaagcagttcgcaaccaaaggtgaagccttggcatttgagcgcttcactatggaacaggtggacaataagccgtggttaggtgaggcaattgaccgccgcaagctgagcgatatcgccaaactttggtacaacctacacggacaatccctcaccgctggtgaacgtacctacaaaaaactatgccttgtcatcgaagccctaggcgatcctcctgctaccaccttcaccgcaaaagacttcgcgcattatcgtgataagcgtctgtccggtgaaatctacttttcagagaagtggaaaaacggcgcagaacctgtgaccgtcaatcttgagcaaagctacctaagcggcatgtttagcgagttggcacggctaggcgaatggaaccagcccaatccgttggaaaacatgcgcaagtttaccgttgcagaaaaggaaatggcgtggctgacgcactcacaaatcacagagttgtttgcagcctgcagcaaaggcgattctgatttgccgctcgtggtcgaggtatgcctcagtactggtgctcgctggcgagaagcggaaaacctcacccggtcacagataacaccgcataaaatcacgttcatccgaaccaaaggcaaaaagaatcgcagcgttccgatcagtaaagcactgtacaagaagttggtaacgcggggcgatgatcgtctattcagcgaatgctattttcgctttatggccgcgcttgagaacaccagcattcaattgcccaaaggtcaactaacgcatgtgctacgccatacctttgcggcgcactttatgatgtctggcggcaacattctggtgttgcaacgcatcctcggccatcatgatatcaaaatgactatgcgttatgctcaccttgcaccggagcacctcgaaacagccctgcaattcaatccgctggcgactatgctaggtggcgacaaagtggcggcatag

SEQ ID NO: 427026 - DNA, 1551 bp, Serratia marcescens
atggagtttttaaaattaatattggactacatgcgctggcccgcaacactaataataatatcctttatattcagaaaaccgctaataaacctagtaaataaactagaaaaactgaaatataacaatggaggctcaacacttgaagcaataattttccccactgaggtaaacacgcaaacaacagtaatagcacccacaactaatcccactgaaaaaaaagcaattgacagtactgatgatgacaaagaggaaaaaagtcattggatttttgaaacatccaaggagttagaaaaaggcaatatagaacaagcaagggaattattttcaaaagcaagagaaggtatagcatcagaaaaagaattgtttttagataaagcattctttctttatatggcatatgacaggacaaacaggactgagatactagatgagttagagcgacatattaccaatgctaaaactgaagagcaaacaacgggagcaacatcttggtatattagttgccttgaaatcaaaaaacaatataaacctgcgctaattttattgtcaaaacaactggaaacactaaaggaatcagagcaaataactattacaatagttaatcttgctggaatacacttatcgaattcagagtatgataaagcaaaagaaataataacaaaacgcttgcaggataatttaaacgatattgaatattatcgcctgtataataaactagccgaagcagaggaaaaactgggcaatgaaaagctctctaccctttgccaagataaagcattggaatataaaccagatgatgaggactcttttcttaacactgcatacaaagctagccaaaataatttgctagctattgaactgagcaactacgatacattaacaactataaaccctaaaaacagcttagctctgaataacatgggggtatcagctggaacaataaaattaaattcggtttctgcgcgatattttgaaaaatcgagcattttaggcaacactttagcaatggctaacaagggcaataaactctatgaatctggcttacttgatgctgcagaggaaattgccaacaaagcgttagaaaaagacaatcctcatgagaacatttacaaactacttaaagacataagaacaaaaagaagtagcgaaaatgagaaatggcaagaaagcattgataaagcatttcgcattcaaaagaaattaaggttatacacacatgctttctacattaatgacaaccaaataaacttggtcggcagttggttgttaaataaaacaatagaggtcacactagataaaaaggatggaaaatcatttagcattgagtttgacaatggttctaaaaagataaacatagttggtacaatagataatttatccctcactggagtttatattgagaaagacataagcaatgaggtgacaaccttattaacaagtaacaaaaacttccttatttatgggtattatgataaggatgaagaaaagttgcttctattccctcagaattttgatgatgaacttgatttttctttaacaagaaagtcctaa

SEQ ID NO: 427027 - DNA, 627 bp, Serratia marcescens
atggcgaacattaagatcgcaatgggaatctgtcaatcttttttgttcgactggaagaactttatggatttcaaaaccggagggcgtgaggtcattaatcgcctgatcgaggcatatggcttcactacgagacaagcactttgtgaccatttgggtgtttcaaaaagcactcttgctactcgttacatgcgtgatatttttcctgcggaatgggtgattcaatgtgccttagagacaggggtatctttgtcttggttaacgacaaaatctggcccaatgtatgaaccatcaaagatagatgtcatttcagtacctcgtctgaaacttatcgatggcaaagcgtatgaatctgacatgtatttttttgatacagcctttctccctaaagaaattaaaaaaccggtagctataattgatggtgaaagtatttacatagctgaaaaaaaattcagcgaggtgactgatggcaaatggttaataaatatagagggaaaagaaagcataaaagaaataataagaattcctggaggaaaaatacgcatacatgatggcaaattccattttgactgcaatatttcagatataaccccaatggctgtaattaaaaaatcttatatgtcaatataa

SEQ ID NO: 427028 - DNA, 222 bp, Serratia marcescens
atgcgacctaacatttcaatcactctgatcacgcctcatgtcactatagagcgctacagcgaacttactggtttggctgaggatactatcaatgacatgttggccgatgggcgtttgcctcgccatcgcctacgtaaagataaaaaacgcgaaaaagtcatgatcaacattgcgcagttgaccgttgatgctctctcaaattgcgacattgctacggcatag

SEQ ID NO: 427029 - DNA, 510 bp, Serratia marcescens
atgtttgattaccaaacgtccaaacactcacacttaagcagcgcttgtcgaagattcgctcaggcacacaacctgacggaacttgccccggcgctgaatgtctcgccgcaggtgctgcgcaataagctgaatccggagcagccgcacgagctgacgctttcccagctggttacactcaccgcgatcactgacgacgcggcaatccttgatggcctgttggcgcaacttaattgcttgccggcggtgccaaccaacgaggcaaagcccaacagcttgcctactcacacgttaagtgccactgcggcgatcggcgctattgccggcgaaaccgcatccaatgcgcctatgacgcaatcccgtaaaaacgccattctcgaccgtgccaaccaggcaattcgtgatttgtcgctgatcgtcgtgtcggtagaagcgcgtttccaatctacgccagtgctggccgccgctgttgatgtgttcaacacctgcgcgccggcgttcggcatgagctga

SEQ ID NO: 427030 - DNA, 204 bp, Serratia marcescens
atgaaagcttttgcgcaatacctgaagcgacaatcaccgaccccgcagctggccagctttggccacggttggattgagctgccgaacggccagcgctggcagccatgcgccagccgagtggtgttttccggggattccgttgcaccaggtaagcaggccaaatgtcgcccctggtggttccgcttgatgggtatgagggggtaa

SEQ ID NO: 427031 - DNA, 852 bp, Serratia marcescens
atgaacaggagtaattccccatttgaagttcgaacagcatggtgccatgctgcattgattctaagcaagaaactagcaattggttctgctcaagcgaatgatgaattaaaaaagcttttattagaatttggaagtattgagaacatttatcaacattacttttcaatgtttcctattgactctgatattgagaatgaattaaatctaattttttccaaagttgatttttcctacgagacaataactatcaataatgataattaccctgcatcattaaggaatgtaaaaggcgctcctcctgtattatattgtaaaggcgacttgagattattcaattttgataagagtattgcatttgttggtactagagagttaaccaatcctcttcatatacaaagtgctaaaaatgcgattttaaggattgcaaaggcaggctatgaagtcgttgtgagtggcctggcaactggttctgatactttaggtcatataacagcaatagaatgtggaatgagaacaattgctgttctgggtacgccattaaatatgttctatcctaaagaaaacaagaatcttcaaattaaaattgcaactgataatttaatcgtcactgaatatccagtagggattcgttcttttggatctttcttcgcaaatcgtaacctcacaacggtatctctttctaagatgggtattatcgttgccagggcaggggataaaagtggaactcagcatgcaataagacactgtgtaaatcaacataaacctgtatatatattggagaataacatatttgaaaacgagtaccaatgggtgaaaaaatataaggataacataaaattaattagaggatag

SEQ ID NO: 427032 - DNA, 1326 bp, Serratia marcescens
atgaaagctatattgtttgatttagataacactctttttgctacacaaagttgcagcgtatatttaagaagtagagcgggtagaagtgatgtatgtgatttaattcagaggggcgttgttaaagtcgagcctttagatccacatctgagtgattatctaaatacactggagaaacaacaagatgttgatgtttatataacttctgattcaccgaaagattattgcttagctatcttgagtaaattctctatcaacatttcttcagataggatccttggttcaatgcataaaccttgcattgacgttgagacagaggaactttttgcttcatatgatgaagtgctagtggttggcgatactcctaaagatatttatttagcacatcgtctaaaggttgcatctgtatttttgacttctttaactgattataatgtgggatattctgttgaaaattccatcccttcagtcgtagctaattcttatcaagagttaactgatgtggtttctcgattcattgaagttggaatagagtatactccgtttatattcaagcctcactttcttactgttgatgaggaaaaggcctctattgttgatatttctgaggaggatattggttttgtaatgagatatattccagacttggatgatataaaagagagtgatgataaattcacatggtttaaaatacataggagtataaagcctgctaagtatttgagttgtgatgagttggataaaaaagtaaaaattccattttataacaacaataaaactattactgagggcatggcatttaaagatatagcttggtttggccgtaataatttttccgaatggctcaagcaaaagaaaatcaccggtaaggtttatttagtcgctgcaccgtcttcagttcctagagagtgtaataagtctcttccaatggaaatgctagtaacttggtgggtgaagtggttcccatatttggaaaacacgaatgttaatttaattaatggatgttatgtagaaagattttggccaactactccggcccacatgtcaaaaggacgcagagaagttagacctcattttaagacgttgggggtatttaaaaatgccccaccttttgatgctgatacttcagcaataataattattgacgatgttgtgacttcgggaacgcaaatgaaggcagttgcatcgcttttgcaaggcacaggtttggttcctgaaggtgttccaatctatggttatgctttagcaaaaaccactagaactgataatcacctagatttcagtaagttactggaggcctttagcaaggctgctaaatcaggtggataa

SEQ ID NO: 427033 - DNA, 1527 bp, Serratia marcescens
atgttcacaccacgctatctgtcctggttgctctgtgccgccatgctgccgctcagcggctgcgatcagcaaaaagtcgccggtgcgatgggcgggagcacaccgcccccggccgctcccgccgctactgcaagtgcaccggcctatacgccgctgaccgccgatcagctgtaccagttggtcagcccggtggcgctgttccccgataagttgctggcgcaggtcttggccggcgcgggctatcccgaccaaatcagcgccgcagatgcctggctggcgcaaaaccgcggcctgcagccggcggcgctcagctcggcggccgacgctcagccctgggatcccagcgtgcgcggcctggtgcaattccccgacgtgctcgatcagatggcgaagaacatcccctggaccaccgccctgggcagcgcctacctcaacgatcccaccgacgtgatgaacgccattcaggtgatgcgccagcgggcggccagccagggtacgctgaaaaacaccccgcagcagcgcatcgtcgtggcgcctacgacccgttacgttgagcagcaatcctatcgccagagcgtggtggcggcgccgggcgaaaccatcgtcatcgagcccagccagccggatacggtttacgtcccgcattacgacccctgggtggcctacggcacgccaatccccgcctaccccagctatcagtatcaaccttcgggctatagcggcggcgacatgttggcggccggcgtgatcagcttcggcgtcggcatcgcggtcgcctcattgttcaatcagcacaacagcggttggcacaactgggatatgcgctgggacgaccgacgccagccggtggtctaccgcaatgcgccttacgtatcgcactccaccaccgtggtaaatcgcgtcaccaacatcaaccaatataacaacgtcaacaatgtgaatcgcagcagcaccagtacggtgaacaactacaatacgtcccccgccgcgccgacgccgcgcttcaacgcatcggcgccgaacgcggcgccgcaacagccgcgcgtcgcgcctgcaacccatgcgccgatgaccatgccgaactttgcgcatacccagccggtagcggccgcgccgcacgtgcaacaatcggtcaacgcgccccatgtgcagcaaccgatgagcatgccgacgttcacacataccgcgcctgcggcgccccacgcgcagcaaccgatggccgtgcattcagcgccggtacagacgcatccaatgccggccgtcacgccggtgcatcaatccgccatgcggccaccggttcaggtcgcacctcacgtcgctcagccggcggtgcgcgaaccggccgtagcgccgcacccggcggtagtgcgcccgacgtcgatgccgcaagaacgcgtcatgccgcatccggccccggcgccgcagatccgcccgtcgttcgttcagccgatacagcatcgccaggagccggcgccggtaaaaccgcaggagcaccgcccgatcgtcgagcagcacaaggtggggtaa

SEQ ID NO: 427034 - DNA, 618 bp, Serratia marcescens
atgaagctgtattttgctcccgatgcctgctcgcttgccccacatatcgtcctgcgcgaattagcgctccccttcaccctgatcagggtgaacaatcgcagcaagcgctgcgccgacggtgaggatttctatcgcatcaaccccaaaggctacgtcgccgccctgcaactggacgatggcaatgtgatcaccgaaggcccagccatcgttcaatacctcgccgacctgcgcccagagtgccggctggcgccgccaccgacggcctttgagcgagtacggctgcaggaatggcttaatttcatcaccagcgagatccatgccggcgccgcccctttattcaatgacgccctgcccgacggcgccaagacgttgttgcgcgacaagttgaggcggcgattgggttatatcgcgcaagctttggcaccacaaacttatctgctgggaacgcatttcagcgtcgcagacgcttatctgtttaccgtgttgcgctggatggcgcgcttcgagatttcgctgagcgagtggccgccgctccagcattatgtggcgcggatcgcagagcgagcgtcggtgtgcgccgctctggaagccgaggccgcgagtgaggaagtcaaatag

SEQ ID NO: 427035 - DNA, 888 bp, Serratia marcescens
atgcacaatcttctccactggcgcctgctggttgccgtcgccgacagcggcaccatcactcaggctgccgcgctctgcggtatgacgcagtctgccgccagccaggccatcgctcaactggagacaatgctgagcacccggcttttggttcgccaaccgcacaatgtcgtcttgacccaaagcggcctacagatcgtcacccatgcccgcatgatgttggaagcactgcgagccattcagcagtgtgcgcaacaagccggcaacgcacacgcgggcaaaatacgcctggccagtttcccgtcggcatttagcaagctgttgccgccgctgctgcgcaaatttcgccgtctgtaccccgacattgagctgattacgctcgagggcaccgatcacgaagtggagagctggttaacatcggcaacggcagacatcggcgtggtgctcaatccggcgccggagcggctgtgcttccctttgggagaggatgcctggctggcggtcgtgcccagcgcgcacccgctggcgcgagcgcggcggccggtggcgctggatgccctgttccggctgccttttatcctggcgaccggcgggtgtgatgtgaatgcgcaacgattggcgcagcagtcaggtttggcgctggccgatatccgcgccaccgtcagcgattggcaaacggcgttgacgctggtcagggagggcacgggcgttgcgctgatgcccgcgtccgtgatcccgcccgacgcgctcggagtttgtgctctgccgcttgttgcgccgatttatcgccgtttcggcctcgcgtgctcatccgaggcggcggcccagccccccgtccaaaccctgatgagttacctgcgagaacaggagcaaaccctgaccagtcgctga

SEQ ID NO: 427036 - DNA, 495 bp, Serratia marcescens
atggcagacaacaagaaacgcccgggtaaagatcttgaccgtatcgaccgcaacatcctgaatgagctgcagaaggatgggcgtatttcgaacgtcgagctttcgaagcgcgtggggttatccccgacaccatgtttagaacgcgtgcgccgtctcgagcgccagggtttcattcatggctataccgcattgcttaacccgcattatctggatgcgtccctgctggttttcgtggagatcacgctgaaccgcggcgcgccggatgtgtttgagcaattcaactcggcagtgcagaagcttgaagaaattcaggagtgtcatctggtttccggtgatttcgactacctgttgaaaacccgcgtaccggacatgtcggcttaccgcaagctgctgggcgaaaccttgctgcgtttgccgggggtcaatgacacccgtacctacgtagtgatggaagaagtgaaacagagtaaccgtctggttatcaaaacacggtaa

SEQ ID NO: 427037 - DNA, 612 bp, Serratia marcescens
atgctcagtatcggtatcgtatctgaaaacatctttttcagagaagcgataaaaagaatattgatgccaaggatttttcataaagatcacgttattgcctactacgacgatctgcctttggctatggggcgtaattgccacgatattctgatcgtcgatgatgcggtaaaaagcatgctgcgcttcagcatggcgatgacattattgtctgctattcatggcgtaaaggtttttttgacgacggaagaaaaacgccgtctgttatttcgttccgtatcgcgtgatgtggttgtgctcgataaaaaaatcagtatccccggtatgagtaaagagttttcttttctggtggataaggtcacgcagcgctctgcattaaatggaggcgttgagggcggagcggttcgcaatacgaaaaaccgcctgacggaaagtgaggtggaaacgctccatttgctttccttcggctatacggtgactcaggtttcccgaattcttgataaaagtgtaaagacggtcagcacgcagaaatgcagtgcgctacgcaaaatgggattgaagaatcgggtgcacaacttattggagatttcatccggtttctcggaggttctctag

SEQ ID NO: 427038 - DNA, 1071 bp, Serratia marcescens
atgatcaggctgatttttttgctgctgctgtccgggctgttcagcggctatagctatgcttcctgctatggcaagggagtggagtttgcgtcgccgattttcgtcgatctctccgataagctgagcgccaatacgccggtatgggaagcacagtacaatacccagtacaccggcacctttaactgcagcaagtccaaaagcaacttttcctacaccatcaaacttccgacgaaagactcgcaggccgcgattttcggttttaacgatggccaacagtgggtccgcgcagaaatcaccaacaagataggcgacagaacgttgagggggcgaggggaacactctgcttcagaattaaattccccgatgaccattcgttattctctggtgcaaaagcctaaggatgggcgggtggtaccgggcgatacactgatgctcgatgatgctttaatggtgagtgacgtgaccggcatcggcatactggaattaccgttttggctgctggagcaggtggggaaactgctcacctggttgcttaccggcaattggccttatgacgatcgcgatatgtatggccagccgatgcacatcaagtacgcgccgaaaaccaccacctgccgtttcgacaacgccggcctgacggtcagattgcccaaaatgggcgtggcgcaggtgctgagtaacaaccaacccggctacacgccgttctcgctgaacatcagctgccagaacatgcagcaggaaggcatcgccgatcgcgccgttgagatgtttctgtccagcaataacctgctggcctcagacgccagcgtgttgaccaatgccaatgcgggcggggcgcaaggggtggggctgcgtctggtcaagcgcgatatgccgagttcgccggtggtactgtcgccttccaacgtcgatcgcggcagcgccacctcactgtttcacgtcgccgccggcggcagcctgaacagtcacttcatcatcggcatgggggcttattattacccttatcagcgagatggcgtcacgcagggggaaatcaacacctcggccacgttgaacatcatctatccctga

SEQ ID NO: 427039 - DNA, 471 bp, Serratia marcescens
atgcaaaagtaccgcatcaggccattacgtctggaaaaaggctggtcgcaggagcagctggcgacgatcgccggcctcagcacccgcaccgtccagcggattgaaaacggtgaacaggccagcctggaaaccttgaccgcgatcgctgccgcgctgggcgtgcaggtcagcgatctcaatgcgcagccgcaacaggcaatggaggaggagacgcctgacgaacagcgcattcgtcgccaggtcgcggcagaaggcaaactgctgagcatggcggtgcgtttcgccgtgattggtgtgatgttgttcgccatcaactggtttacccatccgcaatatctctggtcgctgtgggcgatcggcggcatgagcctcgcgctggtcatgcgggcggtgcgtaccctgctgctgcgcaatgtcttcagccgctggcaggaacagcggctggcgcacaagctgcggcgcttgccctga

SEQ ID NO: 427040 - DNA, 1314 bp, Serratia marcescens
gtgaatcacgccacctatgccgctcctgcactcaacgtcgccattcgcaaaacctggcgcaggttggtgccattgatgttcgccatgtactttgtcgcctttatcgacagggttaacgtcggctttgccaaggacgcgatggctatcgatatcgcgctatcccaatccgcctttgcgctcggcgcggggatattttttgccgcctatgcactgttcggcatcccggccaacctgctgatgaaccgctggggcgccaaacgctggctcagcgccaccaccgcgctgtggggggcgctgtcggcctgcaccgggctggtgaccgacgaacagcagtttatcgccctgcggtttctgctggggatcgccgaagccggcttttaccccggcatcctgctgctggcgtcgatctattttcccaataaggtgcgcgcctcggtcattggcattttcgtactcggcgtgccggcggccctgacgctcggctccccgctgtcgggggcactgctggagatgcacggcgtactgggtaagcccggctggttctggatgttcgtgctggaagggttgccggccgtcgccctcggcgtcttcgcctttttctatctcgacgatagcccgcagcaggcccgctttctgactgaggaagaacgcacggcgctggtcgcacagttggccgccgaacagcagcagaccgaaaccagcagcgtcaaagcggcgatgagaagcggcaaagtttggcatctggcgttgatctacggcaccctgcagatcggcgtgtacggcctgatgtttttcctgccttcgcaggtcgcctcgctgatgggcacccatctcggcttcaaggcctcgctggtggccgccattccctgggcgttctctgcgctgggcgtctatttcctgccgcgctttgccgacagaaacaccgccagaagactaccgatcgccgtcgcctgcatggtcgcggcggcgttagggctggtggtctcttcctatgccggtcctttgctcgctatcgccgccctgagctgttgtgcagtcagtttcctggcggtacagccgattttctggacgtttcccgctcaggtgctcaccggcccggcgctggcggccggcatcggcttttgcaccacgctcggcgcggcgttcagctttttagccccgcttatccgcaccgaggcggaacagcgttttcacagcccgcatgccgggccgctggtgctggccgcctttgcactgctgtgcgccgcgctgttgtgggcgctcaaaaaccggcgcgccgacgtgagcaagcaagacgcaaagattgccggatag

SEQ ID NO: 427041 - DNA, 225 bp, Serratia marcescens
atggtggcgcttgtctgcgatgatcggttgtttgttaaaccgacgccgggcggcaaagcgtttctgaacgaatattcagaagcgccgccttatccgggcgcaaagccttgttttgtgattccggaagagaagtggggcgaaagcgcctggctttcccaattaatcgcgctgacttatgctcagctgcctgcgacgaagaaaaagatctcgaagaaacccacttaa

SEQ ID NO: 427042 - DNA, 453 bp, Serratia marcescens
atgaagtctggcgctatacggcatctggtcaggagagtggctggatgcatattgttcttcgggctggtcgccccgccgttggggggcatgctgatgctgctgctgatgacgtttggtagcagtggctatgtggatcccgggtactttaacgtcggcgatgtgctgggaatgctggtgttcattggggctttttcctatgcgctcggttttctgccggcatgtttggtgggggctatcgtcggaatcgctcatcccggcattcgccgattgcggtggtttctgttgttatgcgcggtgctatccgccgttgctcctggtttgctgaatgccgatcagcgtatttttggtacgatcgcggttttgccgggcacgatcgccgggtttttatggtggcgccggagattgcgcgatgtctcccatgaggatgttttgcacggtaccccatcaccataa

SEQ ID NO: 427043 - DNA, 282 bp, Serratia marcescens
atgcagccgtataaagaggttgagtttgatcatgagctttgtttggcgattggcaaagccgtattggacgtggtggcgcagggggacgaaaccagcgctccggcggtgatgaacgcgattgagcggtctgtggaacaggggctgaatgatgacgaaatcgccacggccgacgatgccctggatttgatggcgcgtctcatccacggctgccgattttttaatctaccgggtgaagaggatactccccatgcattggttgaatttcaaacgctacaagagtga

SEQ ID NO: 427044 - DNA, 297 bp, Serratia marcescens
atggtctggcagccgggtgagttcggccgcaaggttcgtttctgccgtttgtttgcgactattgtggcatttttctcgtgctccgggaaaacacaacgcattaaaatccccttttcggcgttaaatatgcatcaggtgccggatttttccacaatatttcccgctaaaggccaacggcaatatcatggccgggcattattcaggagcaaccgtgtaggcatgatggcggggctgcgcggcggcggtttttcgggtatgatgtgcgccgcgcgcgagccggcaggctgcgcgcgataa

SEQ ID NO: 427045 - DNA, 1059 bp, Serratia marcescens
atgggccgaacccgtgtaaccgacaacagcctgcgtttggccgtcctgctggcgatgttggtgatcattctggctggggtgaaagccgccgccgacatcgtggtgccgtttctactggcggtgttcctcgccatggtgctgaacccgctggtggcgatgctggaacgcagacgggtgccgcgtatccttggggtgacgctgctggtgacggcggtgattgtggtcgtgatgctgttcatcggcatgctgggcgcttcgctgaacgagttcgcccgttcgctgccgcagtaccgcggcatgatgatcgagaaactgcgcgagctgcagtattacgccgatcgcttcaatatcagcctctccagcgaagcgatgctgcaatatgtcgatcccagcgcggcgatgaatctggttacccgcatgctggggcacctgtctggcgccatgaccaacgtcttcctgctgctgatgaccgtggtgtttatgctgttcgaagtgcagctgctgccttataagctgcagcaggcgctggataagccgaatgaaggcctcgccgcgatgcgacgggcgctggacggcgtgacgcgttatctggtgattaaaaccatcatcagcctggctaccggggtgatcgtctggatcttcctggcggcggtcggcgtacgcttcgcctttatctgggggctgctggcatttctgctcaactatattcccaatatcggctcggtattggccgccattccgccgctgattcaggcgctgctgttcaacggattgggtgatgcgctggtggtggcgggcggttttatcgcaatcaacatggtgatcggcaatatcctcgaaccgcgggtgatggggcgtgggctggggttgtcgacgctggtggtgttcctgtcgctgatcttttggggctggctactcggcccggtcggcatgctgctgtcggtgccgctgacaattgtggcgcgcatcgcgctggaaaccaccgagggcggctatcggctggcggttatcctgggcgacggccgcccgccacgtcagcctccggcgccgccggagtga

SEQ ID NO: 427046 - DNA, 1434 bp, Serratia marcescens
atgttcaagaacgcatttgcaaacctgcaaaaagtaggtaaatcgctcatgctgccggtgtccgtgttgcctatcgcaggtatcctgctgggcgtcggctccgccaactttagctggctacctgcggtagtctcccacgtgatggcggaagcgggcggttcggtcttcgccaacatgccgctgattttcgccatcggcgtcgctttgggcttcaccaataacgacggcgtttccgcgctggcggcggtggtggcctacggcatcatggtgaaaaccatggcggtggttgcgccgctggtgctgcacctgccggctgaagagattgcggccaagcacctggcggataccggtgtgctcggggggattatctccggtgccatcgcggcctatatgttcaaccgcttcttccgcattcaactgccggaatacctgggcttctttgccggtaagcgcttcgtgccgatcatttccggtctggcggcgatcgttctgggcgtagtgctgtccttcatctggccgccgatcggtacggctatccagaccttctcgcagtgggcggcttatcagaacccggtcgtggccttcggcatttacggcgtggttgagcgtgctctggtgccattcggtctgcaccacatctggaacgtaccgttccaaatgcaaatcggtgaattcaccaacgcggcgggccaggtattccacggcgacatccctcgctacatggcgggtgacccaaccgcgggcaaactgtccggcggcttcctgttcaaaatgtacggtctgcctgctgcggccatcgccatctggcactcggccaagccggaaaaccgtgcgaaagtcggcggcatcatgatctccgccgcgctgacctcgttcctgaccggtatcaccgagccgatcgagttctccttcatgttcgtcgcgccgatcctgtacgtgatccacgctatcctggccggcctggcgttcccaatctgcatcctgttgggcatgcgtgacggcaccagcttctcgcacggcctgatcgactttatcgtactgagcggcaacagcagcaaaatctggctgttcccgatcgtcggcatcgtctacggtctggtgtactacacgatcttccgcgtgctgatcgccaagctggatctgaaaaccccgggccgtgaagacaccgctgccgagcagactgcgcagggcggttccgaaatgtccgcggcgctggttcaggcctttggcggtaaagaaaacatcactaacctggatgcttgcatcacccgtctgcgcgtcagcgtagccgacgtgtccaaagttgaccaggcgggcctgaagaaactgggcgcagccggcgtagtcgtcgctggttccggcgtgcaggccatcttcggcaccaagtccgacaacctgaaaaccgatatggacgaatacatccgtaatcactga

SEQ ID NO: 427047 - DNA, 510 bp, Serratia marcescens
gtgaaaaagtactcctatccgtttctcttcgctgcgaccatatcatttctaattgttgtttttctattcatcgtatggaagcgagaaatttatcaaatcacttttctccgtgtttcaacgaatcgctgcatgattgtttctgcgatggtgttgtccctatttatttcattgtattttataaataaaggtgctgttaaaagcaataagtacattgattatctaaagttttatggtggcgcttgcgtttctttgttatttgtttttttgattccaataatcacaattacgtatctggtgccaggcgaaacgtccagttatacggcccactattcttacgcatcaggaagttacaaaagctgttctggtgcagatgttgatgatcccgatttagggaccaatatcaggatatgttaccccggtggtaactatgaatctgacagggtgatttttgttcagaaaaggagtaatgccttgggagctgtggttttgcatgcaactacatctccttga

SEQ ID NO: 427048 - DNA, 366 bp, Serratia marcescens
atgagctacgccgtgcggcaaatccatgatcggcgcctggtggttttcgccgaagccgggccgccgttgaaagacgaaaacgacgtcagcctgtttatcgcgcccgcctttgaacacgatgccgggatgattgccctccccgtcaaccgcctcgacgccgccttcttccaactcagaagcggcattgccggcgccgtattgcagaaattcatcaactaccgcctgcgcgtggcgctgcggggcgatatcactccctggctggcgcaaagcaacgcgctgcaagattttgtgcgtgaagccaaccgcagcgaacaggtctggttcctcccttctctcgccgaactcgaacagcggcttggtgcctga

SEQ ID NO: 427049 - DNA, 750 bp, Serratia marcescens
atgtcacgactgcaaggcaaatacgcattgattaccggcggcaccagcggcatcgggttggaaaccgcccgccagttcatcgccgagggcgcgacggtggcgatcaccgggcgcagccaaagcgccctggacgcggcgggccaggcattggcgggcaaggcgctgttgctgctgagcgacgccggcgatatcccgcagcagcgcgacctggcgcagcggctggggcaacggtggccgcagctggacgtgctgtacatcaacgccggcgacgttacgcatcgcccgctgcaggagtgggatgagcagagctatcagcggctgatggacatcaacctgaaggggccgttttttctgatccaggcgttgctgccgctgctggccaacccgtcttcggtgatcctgtgcggttcggtcagcgcccatatcggcctgccgcagagcagcgcctatgccgccagcaaagccggcttgctgtcgctggccagaacgctgtccggcgagctgcacgcgcgcggcattcgcgtcaacggcctcagccccggcccgaccgaaaccccggcgttgggtaagctggggttggcggaagcggatgagcaggcattgcgcgacgatatccgcgcgctggtgccgatcggccgcatgggcagcgcactggagctggccaaagcggcggtgtttctggcggcggacgagtcggcatttatggtcggcgccgagctgcagatggacggtggcgtggggaatttataa

SEQ ID NO: 427050 - DNA, 711 bp, Serratia marcescens
atgcaagggagaaacgtggcgcgtaagaagaaaggcaatgccccgcggccaaagacaggccccgttaaagaaaaatcgaataaccgtttggcgaaagtatcggcatttttggtaggctctgggattctcgtggcgatattgggcgccgcctatcagtacttcgccggcagcgtttcattagctttcgttcaatccgtcggaagagcctatgagttccaactgacgaatgacacgccttcggatcgtaccgtaaaatccttccgcatcattccccccgacgtccagcaagtgatctacaaagtcaccgaggatgtgtatgccacccgcgacgaaaaagggcagattaccttgccgggcggcaaccagagctatgttcccgccgctgaatttaaagagcttgatggccagcgcctatccgcgaactcctcattcaagtttcgcgtgccgccgctttccaatcgcacctggatggcgccggaggcggccatcgtcgatattcgttatgaaatcgactcatcgaaccctgtacttgccgctattgaaggcatatttgacgtccttggtttccactcccgccagcataccgttcgctacctggtcattgaaaactactggacgccttctcgttcaaactctctcaacgaggcgattcgcatattctgccgcgacagcgacacggtggtgaagtcaggcagttgcgacaacttttga

SEQ ID NO: 427051 - DNA, 411 bp, Serratia marcescens
gtgttgaacgatcggttgagccagttgaagagggcgctgcccggctatctcgaggcgtggcgtgagggggctttgccctctgactgggggcagatggccaaccccgaagtggttgccgccctgttggcggagtgggaggcgctcagcgaattggcgtcgctgttcgaaaccgcgactgaaaccccaaccgatcccgccgcgttttggcgggcgcgtgccgagctgatggcgcagcgcaatcgtgaactcagtgcccaactggagacgccaatccgtctgcctggcacgcgggtagccttctttggctatgtgaaaaccgcggtgatggacgccaaacaggttaagtcggcgatttgcaccgccggttttctcattgaagccgatgataaaaatgacagcgtaccgtcatga

SEQ ID NO: 427052 - DNA, 303 bp, Serratia marcescens
atggaaccgactttatattatattctttccactctcgctgccgcggcctgtctggccgtgaaatacggcttcagaccgcctctgggttccaagggttatgtcgctctggttacgatatgctttttaatcctttgctggcaatttaccctttttgccaacggcaacgcgatgtttattgctgactctgaaacatggaccaaagaaaattggcttctacgctactgtgcgttggggtttgctcttgcacatgccttcgccactttcgaatcctccagaagaaagaaaaaagacaaactttcctga

SEQ ID NO: 427053 - DNA, 219 bp, Serratia marcescens
atgacatggcgttattgggccccggcatcgttattgttgttgagcgcttgcagcgcgattcagccgacgtcgacgtccccagactggtctcagccgcagcccgccacgcgggagcagcggcagcgcatcatggcgggtgagtccgcctcctcggtattgcacgaaggaaatgtcggcattggcggcaccttcgatgggtcgaaaatattcgatcgttaa

SEQ ID NO: 427054 - DNA, 930 bp, Serratia marcescens
atgaagctgaagaaactgatcgccgcctcggtactgatgtgcatgctgccggccagcgtgttggcgaaagacatcaagatcggcgtttccatggcttacttcgatgacaacttcctcaccattctgcgccagtcgatgcaaaacaaaatgaaggccgacggtaacgtcagcggccagttcgaagacgccaaaggcgacatcgcgcagcaaattcaacaaatcgaaaacttcgtcagccagggcgtcgacgccatcatcctgaatccggtggatacccagggcgtcaagccgatgatcaagctggccgagaaggccaagatcccgctggtgttcgtcaaccgcaagccggaagtggcgctgccggctggcatggcctacgtcggctccgactccaagctggccggcaagctgcagatggaagcattggccaagctgatgaacggcaagggcaacgtgatgatcctgatgggcgagctgtcgagcgaagccacgcgcgaccgcacccgcggcgtggaagaggtggcggccaactaccccggcatcaagatagtcgacaagcaaaccgccaagttcttccgcaaagaggcggtggacgtcaccaccgactggattttgtccggccagcagatcgacgccatcgcctccaacaacgacgaaatggccatcggcgctattttggcgctgaagcaagccaagaaatcaggcgtgctggtggccggcgttgacggcacgcctgacgcgctggagttcatcaagaagggcgatctggcgttgagcgtgtttcaggacgccaaaggccagggcgaaggcgcagtgcagaccgccgttcaactggtgaaaggcgagaaagtggagagcaacgtgctgatcccttaccagctgatcacccaggccaattaccagcaattcgccgataaaaacaagaaataa

SEQ ID NO: 427055 - DNA, 1041 bp, Serratia marcescens
atgagtaacgtaaagattgagaagccgctctccgccgattcaacgggcaagggaacgctgttctccgggctgagcggcaaaatgccgaaggataccggtatcttcatcgtgatgatcggcatcgcgctgatcttcgaaatcctcggctggtacatgcgcgatcagtcattcctgctgaacccgaaccgcctgctgctgatcgtgctgcaggtggcgatcatcggcatcatcgcggtgggcgtcacccaggtgatcatcaccaccggcatcgatctctcctccggctcgctgattgcgctgactgcggtagtggcggccagcctggcgcagacctcggacagcatctcgccgatgtatccggggctgctcgatctgccggcggcgatcccgatcggcgcggggatcggggtgggcatcgtctgcggctttatcaacggcttcctgatcacccgcaccggcattccgccgtttatcgccacgctggggatgatggtgtcggcgcgcggtctggcgcagtactacaccaagggcaacccggtcagcttcctgtcggacggcttcacgtcaatcggccagggcgcgatgccggtgatcatcttcctggtgattgcggtgatcttccatatcgcactcaagcacacccgctacggcaaatacatctacgccatcggcggcaacatgacctcggcacgggtttccggcatcaacgtcaataagtacctggtgacggtttacaccatcgccggcggcctggcggggttggcgggcgtggtgctggcggcgcgcgtcagcagcggccagtcgagcatggggatgtcctacgagctggacgccatcgccgcggcggtgatcggcggcagcagcctgatgggcggcgtcgggcgcatcaccggcacgctgatcggcgcggtgatcctcggtcttatcaaaagcggcttcacctttatcggcgtcgattcttacattcaggacatcatcaaaggcgtgattatcgtcgccgccgtgtcgatcgacatgcggcgcaaccgtaaaaaacactga

SEQ ID NO: 427056 - DNA, 981 bp, Serratia marcescens
atggccacactgaaggaaattgctgaagccgctaatgtgtccgtcgccaccgtttcgcgcgtgttgaatgacgaccccaccctgagcgtgaaggcgcaaacccgccagaagatcctggaagcggcggagcgcctcgaatacaaggtcgcgccttccaaacggcaaagcgggcaacgcctgcatttcgccgcgctgttcacctatacgcagggcgtggagatcaacgatccctattacctggcgatgcgctacggcatcgaaacgcagtgcgaaaagctgggcgtggcgctgagcgccggttatgacttcaacggcgacaaggtgctgccggcggccgacggcctgctggtgatcggccggccacagcccgcgctgtatgagcagctcaggcagcaggaaacgccggtcgtattcatcgacggcgtggtggaggatgagcggttcgactgcgtcaatgtcgacctgtacaagatcagccgcaaggtgatcgactacttcatcggccgcggctatcagcgcatcggctttatcggcgggcgcgacgatccggccggcatcgaccagcgcgagcaggcgttcgtcgagtatggccggcagcaaaacgtggtgcgagcgcaggatatttaccacggtgatttcagcagccagtcgggctaccagtgcgccaaagcgatgttgcagagcaagaatggctatccgccggcgctgctggtggcgaccgattcgatcgcgatcggcgtgctgcgcgcgctgcacgaacacggcattcaggtgccggggcagatcgcgctgatcagcgtcaacgacattcccaccgcccgctttattttccccgccttgtccacggtgcgcatcccttcggaaaccatgggcgcacaggccgtcaacctgctggcggagcggctgcgcgatgagcgcgccgtcccgctgtcgatcttcgttcccagctcgctgcagctgcgcgataccaccgtcgcctga

SEQ ID NO: 427057 - DNA, 3090 bp, Serratia marcescens
gtgaataattgggaaaacattgaaaaacagtcggagcaccggttggcgccgcgcgcgagcttcttcagctacgcggacgccgggcaggcgctgagcttcgatcgcaacgccagccggcgcttccagctgctgagcggccgctggcgttttcgcttcttcgagcacccggcgcaggtgccggcggcgttttaccgggagccgatgaacgactggggcgatatggcggtgccgggcatgtggcagctggaagggcacggccatctgcagtacaccgacgagggcttcccgttcccgatcgacgtgccttacgtgccgaccaacaaccccaccggcgcctatcagcgcccctttacactcgatgccagctggcaagatcagcaggtgctgatcaaattcgacggcgtggaaacctacttcgaggtgtacgttaacggcgactatgtcggcttcagcaagggcagccggctgtgcgccgagttcgacatcagcccctatgtgcggcagggcgagaacctgctgtcggtgcgggtgatgcagtgggccgattccacctacatcgaagatcaggacatgtggtggatggccggcatcttccgcgatgtctatctgatcggccagagcgccactcaccttcacgacctgacactggtcaccacctttgatgagcgctattgcgacgcgcagttggcgatcgatgccgagctgcgccatctcggtgtgcaggccgccgagggctgccgcctgcaggcgcagctgttcgacggcgatcgctgcgtggcggagcagtggcgcgacgatctgcgcatcgagcaggcgctgagctgccgtttcgaactgccggttagccgaccgcagcagtggaatgcggaaaatccctatctgtatcagctgttgctcagcctgtatgacggcgccggcaacctgctgggcgtggtgccgcagcgggtgggtttccgcgaaatcgcggtgcgcgacgggctgatgtacgtcaacgggcgctacctcaagctgcacggcgtcaaccgccacgatcacgatcaccgcaaagggcgcgccgtcgatatggcgcgggtggagcgcgacatcgtgctgatgaagcagcacaacatcaactcggtgcgcaccgcccattaccccaacgatccgcgcttttacgagctgtgcgatctctatggcctgttcgtgatggcggagactgatttggaaagccacggcttcgccaacgtcggcgatctgagccgcatcaccgacgatccgcgttgggagcaggcctacgtcgagcgcatcgagcgccacgtggcggcgcagaaaaaccacccgtcgatcatcatctggtcgctgggcaacgagtccggctacggctgcaacattcgcgccatggcccggcgctgcaaggcgctcgatccgacccgtctgatccactatgaagaagatcgcgatgccgaagtgaccgacgtgatcagcaccatgtattcccgcgtggcgatgatgaacgccttcggcgaatacccgcaccccaaaccgcgcatcctgtgcgaatacgcccacgcgatgggcaatggccccggcgggctgttcgaataccagtcggtgttcaaccgtcacgccagtttgcaggggcactacatctgggagtggtgcgatcacgggctgctgagccacgacgaacaggggcgcgagcgctaccagtacggcggcgattacggcgattacccgaacaactacaacttctgcatggacggcctgatctatccggaccagcgccccggccccggcctgcgggaataccagcaggtgctgtgcccggtggaggtgacggcggaagagggcgcgggtgacgtgctgcgggtgaaaaaccgctattggttcagctcgctggcggacatcacgctgaaggtcagcgtcaagaccgacggccgcctggtggcaagttacgaattcaagctgccgcatctgcagccgggcgagagcgaagacatgcatctgccggtgttggcgctggggcagggggaaacgctgatcgacgtagcggtgcataaggacagcgccacccgctacagcgagagcggccagcggctggggcattaccagcatctgcgccaggcggcgacgcggctaccggctccaccgttggccgatgcgccggcgctgcaatgccgcgaggaaaatcatcagctgctcgtcagcggcggccggttccagctggcgttctcgctgctgagcggcgaactgctgtcgtggcgggtagacgatgaagaaatagtggggcgggcgccgcgcatcaccttcttcaaaccggtgatcgataaccataaacaggaatatgaggggatttggctgccgcaacatttccccatcatgcagcagcacttccgccgcctcagccggcaatggcagggcggagatctgctgctcgaggtgcacagcctgattgcgccgccggtgttcgacttcggcatgcgctgcacctaccgctggcgcatctccccgcagggctacgtcagcctggatctgtccggtgagccttacggcgatttccggcagattatcccgaaaatcggtctcgatttcggtatcagtcgccgcttcgagcaggtggaatactacggacgcgggccgggcgagaactaccgcgacagctgccgggccaacctcatcggccgctaccggcagcgcgccgaggcgctgttcgaacactatccgttcccgcaggacaacggcaaccggcaggacgtgcgctggctgagcctgcaggacgcagcgggcaaggggatcttcatccagccgcggcggccgatcaacttcagcctgtggccttacagcgccgagatgctgcaccaggcccaacacatcaacgagctggagccgagcgactgcctgacgctgaacctggacgaccagatcctcggcctcggctccaactcctggggctccgaagtgctggatacccaccgggtctatctggcgccgttcagctacggcttcacgctggtgccgttcgacgggcggcaaacgcagggcgccgcgctcgccggttatgacttcgcacccgctcaccaccacccgcagtctgcggaggaaaacgcatga

SEQ ID NO: 427058 - DNA, 1503 bp, Serratia marcescens
atggctgcgtcgaacagaaacaccatcggcaagtttggcctgctgtcgatgacgtttgcggcagtgttcagtttcaacaacgtgattaacaacaatattcagctcggcatcgcctcgtcgccggtgttcctggtggcgacgatcatttacttcattcctttttgcctgatcatcgccgaattcgtctcgctcaaccgcaactccgaggccggcgtttatgcctgggtgaaaagcgcgctcggcgggcgctgggcgtttatcaccgcctacacctattggttcgtaaacctgttcttttttaccgcgctgctgccgcgcgtcatcgcctacgcttcttacgcgttcctgggctatgactatgtgtttaccccgctgaccacggcgatcatcagcatcttcctgttcgccttctcgacctacatctccaacagcggcgcaaaactgctggggccgatgacctccgtcacttcgtcgctgatgctgctgctgacgttttcctacatcgttctggcgggcgcggcggtgctgggcggcattgagccggccgatccgatcaacgtgcaggcgatgacgccgaacttcaactgggcgttcctcggcattaccgcctggatcttccaggcggcgggcggggcggagtccgtggcggtgtacgtgaacgatgtgaaaggcggcagccgcgccttcgtgaaggtgatcatcgtttccgggctgttcatcggcgtgctgtattcggtgtcttcgctgctgattaacgtattcgtgcaccgcaccgatctgcactttaccggcggtacggtacaggtgttcgaagggctgtcggcgcacttcggcctgccgacggtgctgatgaaccgctttgtcggcattgtttccttcaccgccatgttcggttctctgctgatgtggacggcggcgccggtgaagattttcttcaccgagatcccgaagggcattttcggcgagaaaactattcgcctgaaccggcacggcgtgccgacgcgcgcggcctggatccagttcttcatcgtcatcccgctgatgctgataccgacgctgggttccagcagcgtgcaggacttgatgaacacgctgatcaacatgaccgccgccgcctcgatgctgccgccgctgttcatcatgttggcctacctgaatctgcggctgaagtacgaccgggtggcgcgcgatttcaaaatgggctcgcgcctgcagggcatcgccattgtcagcgtgctgatcgccatcttcaccgttggtttctttgcctcgacgttcccgaccggcgccagcatcatgaccatcgtgttctataacgtcggtgggttggtggtgttcctgggatacgcctggtggaagtacaaccgctactcgaagaccctgaacgccgaggcgcgctaccacgaagacatgccgctggcgcgcctcgcgctggaagcgcaggaggggaccgaggccactgcgtttgcgccgccgcagccgcttggcggcaaagggggataa

SEQ ID NO: 427059 - DNA, 882 bp, Serratia marcescens
atgactgaaaaaaaacaggcctgcacattaccggttagcgtacaactgctaggcaccggtggcccacgtccggatccgcagcgggcggggccagcggccatcgtcaagataggtgatgaaacactgctgtttgatgtcggccgaggcgttaccgtgcaaatggtccgggccggggttgcgctagagtcgttgaaagacgtatttatcactcaccatcacttcgatcatatcggcgatctgtatgacgtagtgctcagcacctggatccacggtcgccgtcacgccatcaccttctacggcccgccggataccaagcgcatcatgaatgccttgctgacacaggtatatgataaagatatcgaatggcgctccgatggcgaacccactcacggcggttggtcagagatcaaggtccacgacgtcgcgaccgggttagtggccgaaacggaaaactggcaggtctatgccgaatcggtcatacacggacacggcttggatgtctcgcgcgcctttctcaagcgttggatctgttatggctatcgcgtagagacacagggtaagacgatcgctatcagcggcgatacggtggactgtgcgggcctgcgccgattggcccaggatgccgacgtactggtgcaatgctgttacctggccaacgaagaaatcaccaacgaacacttccgcaaactggcccgccatactctggcgtgcggcgataccgtcggcaagatagccgccgcctgtaatgtcggcaccttggtgctcacgcatcaccgtccgcgcgatgataacggcatgattgaacaactgcggcaggaagtgagccaggactttaagggccggataattattgccaacgatctggacgaggtgacgctttaa

SEQ ID NO: 427060 - DNA, 2535 bp, Serratia marcescens
atgttcgatgtccgcaaggcgacgccgctgcccgcatgctggtgttgcgcgctgctggcgctgccgctgggctgcgccgctgccgacggctataccttcgatcccgcgctgctgcgcggcagcgtgctgagcaacagcgccctgagccagttcaaccagcaggacgccgtcgctcccggcagctatcagatcgatctgtacctcaacggccaatttctcgagcgcgaccaaattcgcttcgtgcgcgcaggcaagcaggtgctgccctgtttcgatcggccgcagctgacgcgcttcgggctgaaaaatccgccggcggccgccgaagcggaatgcctgctgcccggtcgggatctcaaggacatcgcggtgaacgccgatatttcgcggctgcggctggatctcagcattccgcaggcgctgttgaacggccagccgcgcggcagcgtcaatcccgccagtctggacagcggcgaatcgatggccttcgtcaattacaacctcaaccagtaccacgtcagctaccgacaggggcaaactcgcgatctcgactcgacctacgccaacctgaacggcgggttcaacctcgggctatggcgctaccgccagcagtccagctaccgctacgatcgggagttcggcggccacctggacaccagccgccgctacgtgcagcgcgcgatcttgccctggcgcagcgaaatgctgttgggcgaaggctttaccgacgggcacttcttctccggcctgggctttcgcggcattcagctcagttcggacgaccgcatgctgccggattcccagcgcggctatgcgccggtggtgcgcggcgtggcaaaaagcaacgcgcgcgtaacggtgctgcagggcaaaagcacgctgtatgaaaccaccgtcgcgccggggccgttcgccatcaacgatctgtacgccaccaactacgctggcgatctcaccgtggtggtgacggaagccgacggcagcgtcagcaccttcaccgtgccgttcgccgcggtgccggaatccatccgccccggccagtcgcgctactccgcgatcgtcggccgttcccgctacgtcggcgacaacgatctgttcagcgaagtgacctggcagcacggcctgaccaacgccctgaccttcaacctcggcaaccaaatggcggacggctaccaggcgatgatgctgggcggggtatacagcagctggctgggcgctttcggcatggataccacctattcccacgccagcctgccggacggcggcgcctccggctggatgctgcacctctcttacagccgaaccttcagcccgacggataccacgctatccatcgccggctaccgctactctaccgagggctttcgcgatctcagcgacgtgctcggcgtgcggcgcgccgccgtcaccggccaaaactggcagtccgactcctaccgccagcgttcgcgtttcgaagtcgccgtcaatcaggggatgggggcgttcggcagcctgacgatgtccggctcgactcaggactaccgcgatcagcgcggccgcgacaatcagctccagctgggctggggaaaaaccttcggcaacggcgtggcacttaacctctccgtcacccgcacccgcagcctgggctacagcaacggcgactaccgcggctacgggccgctggataacgtctacagcgcgccgctggcgcagaacacgcagaccgtcaccgccctgtcgctgagcttcccgctcggccgttcgtcatccgcccccagcgtctcgctgctggccaaccacagccagggccaggggggcaactatcaggctgcgctgtcgggcagcgtcggcgacaaacagccggtcagctacggcctgaacttcaccaccgacgacgatcgccaacaaagtatctggggcggcaacctgcaaacccgtctgccttacgccaacgtcaccggctcgttctccaccgcgcgccagtaccgacaaggctccctgtcgctgcagggggcggtggtggcgcaccgcggcggcgtgacattagggccgtatgtcggcgacaccttcgccctgattgaggcacccggcgccagcggcgcacgggtgatggacggccagggcgcgcgcgtcgatcgcttcggctacgccctggcgccgtcgctggtgccctatcactacaacaccgtcgcgctgaaccccgagggcatgaacgacaaagcggaactggaagacagccagcggcgcgtggctccttatgccggagccacggtgcgcctgcacttcaacaccgtgcgcggccaggcgctgctgatcaccgcgcagcggcccgataacacgccgatcccgatgggcgccaacgtgttggacaacgcgggcaacagcgtaggcatggtcggccaggccaatcaggtgtatctgcgcagcgataagcgcgccggggaactgatgctgaactggggcgacgcccccggccagcagtgcacgctgcattatcgcctgcccgccggggaagacggcccgattcaacggctcagcgccccgtgccgctag

SEQ ID NO: 427061 - DNA, 495 bp, Serratia marcescens
gtgaaagcaaaagggtttgaaggtatgacgtgctcggtggcccacgtgctgtcggcattgggcgatcgctggggcgcgattctcatgcgcgatctgttgctggggctctcgcgctatgacgatctgcgccaatcgaccggcatcaccaacaacacgttggccgatcggctcaaggcgctggaaggcagcggccttatcgaaaagcggcaataccagacgcgccccgatcgttacgagtatcttccgacggagaagggaaaagatctcgggctgctggtgatggcgatgatccagattggcgacaagtggaacctgtccgagctggccgggccgccgctgcgcgtggtcgaccgtgcgactggccaccccgccaccctgcgcgtggtcgatgccgtgaccggcgaatcgctgccgccgcaaaacctggcgctggccgccgggcccggcgccgatgagatcacgcgatggcggctggccgtcggcaaaacccgctaa

SEQ ID NO: 427062 - DNA, 426 bp, Serratia marcescens
atgccactgtggcagatttaccaccctgaaccggctttcagcgccgccgataaacgcgcgattgcgcagaaggtcactgccctgtaccaggactttttgccgcgcttttacgtcaacgtgttcttccacgcgctgccgccaggttcggcctatctcggcggcgaaccggccgatgatttcgtgcgggtgaccatcgaccatattgcgcgcgccatggacaacgacgcagagcagcagcaattcctggcggcctgcacccgcatcctgcaaccctaccttgccgcgcgcgggttgcgctgggagctgcacgtggacgaaacgccgttctcgctgtggactatcgaaggcttgaagcccccggtgccggggacggtggcgggggagaagtggcgcagcgagaaccggccttcggtgtgggaggggtag

SEQ ID NO: 427063 - DNA, 882 bp, Serratia marcescens
atgaattttcgccatatccaggcattcctggccctcgttgaagaaaaacattttggcaaagcggccaagcgcattcatattacgcagtcggctttcagcatgcagataaaagcgctggaagaagagattggcgcaccactctttattcgcaacaaccgtaatgtcgaactcactgaggtgggagaggtatttttaaaaaacgcaccggatatttatgagaaaataaaaagtacgcttgacgaaaccaaagcggcggcgaaacgtgagaatggcaatgtgcgcatcggatttgtcggcaatgccgtggcggcaggattagtcaccgccgatattcatcgatttaaagcagagcaccccggcgttaacttccgcgccaaagagctgtcatactggaaacaaatcgatgagatcgtcaacggaaatatcgacgtcagctactgccccaatctggatctcaatatcccaccggagctcggctttatacccataaaaaaatttgactgggtcgtcgtgattcaggaagactccgatctggcgaaaaaagaggctttgaaaaaggaagacctctctgggcgagactttatcatctactcggaaaacagcggagacgatggccagcttcgtatcctgaacgccattattgaagaagacatcaaggtagcctatcggttagacagcacattaagcgtgctcggcatggtggcctccggccttggcatcgccatcgttccctcttcgctatcctcaatcaaactgcccaacatcacctacaggccgatccccgccgtcgataacgcaactgaggtttttttcatctatcgtaaggatgaaaaatccgccatcgttaatgcattcatatcagatgtacaacacagcctatga

SEQ ID NO: 427064 - DNA, 945 bp, Serratia marcescens
atgaattcattagccagaatcgacgttcatactcacttggtcccgcccttttggggcagcgcgctgccgagccacggcggcgatccgtccggctggaccttgcccaaatggacggcggacgaccatcttcgctatatggacaaacagcaaatagcgaccagcgtcctatcgttaaccgcgccaagcgtggttggctgggaaggtcaggctcgccgcgatatggccaggaaagtcaatgaatatacggcggatctggtggcgaaataccccacgcggtttggtcacttcgcgaccgtgccgttgccggacgttgagggggcggtgcgtgaagttgagtatgcactggatgtgctgaaagccgatggcgttgtgttattaaccaattatgaaggggtctatttaggtgataaaaagtgggctccgctttgggcggcgcttaaccaacgctctgccgttgttttcattcaccctggtcatcccatcatggatttgctggatggcgttcctggccccttggttgattatccgtttgataccacacgcaatgccgtccatatggtgttgaacggcgttatggataattatcctaacgtgaaaattattctttcgcatgccggcggtttcttgccttatgccgttttgcgttttacattgctggcagagtcacttaatccaaatgggccgtcagttcaggaattggacggtaaatttaagcgcttttattttgataccgcattgtcttccggccctaatgcattctccagcctactggcgtttgcgaatcataataatattttgttcggcagcgattatccttatgcgcctgagcccgtcgccgctaagtttaatcatattctcgacgccgagacaaacctgaccgatgcgcagaaagtaaacttcaatcggaataacggtctcgcgcttttcccgcggttaaataaataa

SEQ ID NO: 427065 - DNA, 1173 bp, Serratia marcescens
gtggaagtatcgacttcaaaacaagggtccaagctcacgtgtcttgattcggtaagggggattgccagtctggtggttgtgctttctcacttgtcattgatttattttttatatctgcataacttctctgggggaagtattccggaaggttttcctgttcaaaaatttcttcaccattcggttttcggttttctctactctggaacatctgccgtttttgtgttttttgtcatgagcgggatcgttttatctcggggtattgaaaaaagaagtaatgaatattactgcgtaacatcatttacgcggtatttcaggctggcaattccagccattttctcatgtgtgttgatgtttattgtattgttttttatttctgctggcgaccaacggattcctggtgcatccgactggcttgagccattcttcatcaagcgttcatcgttgtttgacgccttttcatatggtgctataggcgcttttatcggcccccctgtttggagtgggcacatatataatcctgtgttatggactatgaaaattgagttgattggttcattatttgtctatgtcgcctgtgtgcttttcaaaagaagtaaagttttgtcacttgctgtttttttcgttttatcaatagcaatcttaccgtttagtactctcattgctttaagtatggtttgtttcttttgcgggtttgtttattcagcgtttgatgtaaattacaaaaataatctgctgggtgctattttggttattgttgggctgtatttggctgggattcataacgatagtgaaagttatcgttggttaaccaatgtggttaaaggacgttcatatctactcttcaattttatttctggcataatgattgtttatggtgtgctcactagtaatttaattagccgggctttggagaataatctgttggtttatctggggaaactttctttccctatttatgtcattcatattccggtgatcatgcttacaatctatttaactcgtgatttggccacgacgtctgttgtcagcatgttgactgtatcggccatttctctgattagtactgtgttgttagcgcggtttgttgtgccggtagatgatttttccatcagcttctcgaagcgcgtgtacaataaaatcaccgggctgcggatgatcaggagaacggagtaa

SEQ ID NO: 427066 - DNA, 1101 bp, Serratia marcescens
atgacctacattgcgtccattcccgccatttacagcgacgcctgcattacctacgccacgctgtcggtaagctatttcgttctcagtaaaaatgcaccgttctcctatcgctctgcgctgtggaagcgcgtcgtattcggcctgttggccggggtggcggtgctgtatttaagccaggaccggctggagctgaccgataaggtgcactacagcttttcgatgattccgatgatcctggtgacttttttcggcggcggcatcagtgggctggtgagctttttgttcgctatggcgctgaccggcggtttcaccgtcgataacctgtttatcgcctcaatcctggtgccgctgctgctgtcgcgcgtgtggctgaagaaatcccactgggtgttttacctgacgatcggcgccatcgcgctgtatcgcatcgcggtggtgtggctgctggtggacatgagcgggctgtggctggacgtgttgctgtaccaggcggtttccgcgctctgcctggcgatttgctaccatgcgctgaatttcaaagagcgccacatctacgcctatttcgcgatgcgcgcccgcgccacgaccgacagcctgacccatatcaacaaccgtgccagcgtcgattaccacctgatgctgcagcgcgccgaacgccgcccgtgcgggctgatgatcctcgatctggatgacttcaaaaagatcaatgacacctacggccacccggccggcgacgtgctgctggccagcgtcggccggctgctgcaaaacagcgtgcgcaacgaggacttcgtcgggcgttacggcggcgaggaatttatggtgatcaccgccagctacgatccgctggttatcggtggggtggcggagcgcattcgcagcgcggtggagagctcgacgtttttgctgaatgcccacgatgaagcgcacatcacgctgtcgatcggcgtgtcgctgtatctgcccggcatgacgctggacaaggcgatcgccatgaccgacgaagcgttatatgaggcgaagcgcagcggtaaaaatcgggtggtggccagccgcgtgatgcagctggcgccgctgggcgccggtttctcgcgcgaataa

SEQ ID NO: 427067 - DNA, 984 bp, Serratia marcescens
atgagttcagtcccacgctgcatcaccgccgccgatattgccaccgccgccgacgttatcgccgggcatgccctgcgcacgccggtcatgacttcgcgccaggccgaccagatcgccggcgcgcagctgttcttcaagtgcgagaattttcagcgcatcggcgccttcaaatttcgcggcgcctataacgccatcgcgcaactcagcgcagagcagcgtcgggccggggtaaccgccttttcatccggcaaccacgcacaggcgatggcgctggcggcgcgcgaattgggcgttagcgccaccatcgtaatgccccatgacgcccctgcagccaagctggcggcgacgcgcggctacggtgccaacgtggtcatctatcagcgccacagcgaagatcgtgaagaaatcacccgacgcctggccgcagagcggggcctgacgctggtgccaccgtacgattatccgcaggtgatcgccggccagggcaccgccgccaaggagctgtttgaagagaccgggccattggatctgctgttggtgtgcaccggcggcggcggcctgctggccggcagcgcggtggcggcgcatcactggtcgccgggctgccgcgtgttcggcgtcgagcccgaagccggcaacgacgttcagcaagcctttcagcgcggtgaaccggtgcacatcccggtgccgaaaaccattgccgacggcgcgcagacccaacaggtcgggcggctgaccttcccgatcattcaggcctatgtcgaaggcattctgacggtcagcgacgcccagctgtgtcggcaaatgcgcttctttatggagcggatgaaaatggtggttgagccgaccggctgcctggcggctgcggcggcgatgaacggcctgctcgatctgcgcggtaaaaaggtcggcgttatcgtcagcggcggcaaccttgacgtcgacaagattgcgcactatctcgccctggccggcgaaaattaa

SEQ ID NO: 427068 - DNA, 642 bp, Serratia marcescens
atgagcgatctcaggcaggaaaatgcgctgttgttgcgcgaagcggaaaaaattgttcaggcgttgggcgtgatgttcgcgcccggttgcgaagtggtgctgcacgatctgacccagcccgatcgcgccattgtcgccatcgccaacaatctgtccaaccgccgcatcggcgacgccgcgacggaaatggggctggagcgcatcgcgtcgccggagtttccagacgtggtgcagaactacgccagcgtgtttccggatgggcgcccggccaagagtacctcgatcggcctgcgcaatagccaggggcgctttgtggcggcaatttgcctcaatctggatgtgtctatcttcaacagcgtcaccgctatcctgcagcagctgacggcggtggtgcaaagcgccgcgccgcaggcggcggagagtgcacgctcgctgtcggacatcgctgcggcgatcaacgcgttcgccgcgtcgcatgccacccagccgcgcgccttgtcttccgaacagcggtttcaggtggtgcaacagctgaagcagcaagggtatttgcaactgcgcggcgcggccaccatggtggccgaagcgctcggcatctcgcgggtgtcggtctataacctgctcaagcgagacgccggatga

SEQ ID NO: 427069 - DNA, 1461 bp, Serratia marcescens
atgatgttcaacaagaataaaaaaccgttttcgctgcgcgcccgcttcctgatggcgaccgccggggtgatcctggcgctgtcgctctcttacggtttggtggcggtcgtcggctacatcgtcagcttcgacaagaccgccttccgcctgctgcgcggcgagagcaacctgttcttcagcctggctcagtggaaagacaacaagctcaccatcgccattcctcccgatatcgatctcaacttcccgacgctggtgtttatctacgacgataaaggcaacctgctgtggagccagcgcaaagtgcctgaactggagaagctgatcaacaaggagtggctggaggagtccggcttctacgaaatcgacaccgacacccgcgtcagtagcgaagtgctgggggacaaccccaaagcgcaaaaccagctgaaagattacgacgataccgatcagaacgcgttgacccactcggtggcggtcaacacctatgccgccacgcctcggctgccggcgctgaccatcgtggtggtcgacagcattccgcaggagctgcagcgatccgacgtagtgtgggagtggttcagctacgtgctgttggccaacctgctgctggtggtgccgctgctgtggctagcggcctactggagcctgcggccgatcaaggcgctggtcactcaggtgggcgagctggagaatggcgagcgcgatcagctcgacgaaaatccgcccagcgagctgcgcgggctggtgcgcaatctgaacattctggtgcgcaacgagcgccagcgttacaccaagtatcgcaccaccctgtcagatctgacccacagcctgaaaacgcccctggcggtgctgcaaagtaccctgcgttcactgcgcagcggtaaacagaccacgatcgaagaagccgagccgatcatgctggatcagatcgggcgcatctcacagcagatcggttactacctgcaccgggccagcatcaactccggccagacggtgctgacgcgtgagatccactcggtgccggcgctgctcgacagcctggtggtggcgctgaacaaggtttatcagcgcaaaggggtggtgatcacgctggacatctcgccggaggtgacctttatgggcgagaagaacgactttatggaagtgatgggcaacgtgttggaaaacgcctgcaaatactgcctggagttcgttgagatcacctcgctgcactccgagaaaaacctcaccatcgtcatcgacgacgacggcccggggatcccggaaagcaagcgccagctgatcttccagcgcggccagcgggtggataccctgcgccccggccagggcctgggtttgtcggtggcggcggagatcatcgagcagtacgacggcgaaatcgtcatcagcgacagcccgctcggcggcgcgcgcatgcaggtcaccttcgcccgccagcacgacacccaccacaacgagtaa

SEQ ID NO: 427070 - DNA, 672 bp, Serratia marcescens
atgcgagtactggttgttgaagataatggtttgctgcgccaccacctttccgttcagatgcgcgagatgggccatcaggtcgacgcggccgaagacgccaaggaagccgattacttcctgcaggaacacgcgccggatatcgccatcgtcgatctcggcctgccgggtgaagacggcctgagcctgatccgccgctggcgcgcgcaccagaccaagctgccgatcctggtgctgaccgcccgcgaaagctggcaggacaaagtggcggtgctggaagccggcgccgacgactatgtcaccaagccgttccacctggaagaagtgatcgcccgcatgcaggcgctgatgcgccgcaacagcggcctggcttcgcaggtgatcgtgctgccgccgttccagatcgatctgtcgcgccgcgaactgagcgttaacgatcggcaaatcaagctgaccgcttttgaatacaccatcatcgagaccctgatccgcaacgccggcaaggtggtgagcaaggattcgttgatgctgcaactctacccggacgccgaactgcgcgaaagccacaccatcgacgtgctgatgggccgcttgcgtaaaaaggtgcaggcggaatacccgcatgaagtgatcaccacggtacgtggtcagggctatcgttttgacgcgaagtga

SEQ ID NO: 427071 - DNA, 444 bp, Serratia marcescens
atgaaaataacgcattcaggctacaaaaccggcatcgcgatactattggcggcgatgaccgcgctgacgttaacggggtgtgccaagagtactgcccccagccaaaacgatccggtgaataaagaggtcgatgatcttttcgccaaccttggcgccccaaagacgccggcgccgggaaaagagaaagaacgctatatcgcccagttgcaggccgcgattcaaagccatttgaaagatgctgaagcctactcaggcagaagttgtacattgagcatcaagctggcgccggatggtctgctgatcagcgttcgggttgatcaaggggaacctgaactttgccaggccgcgatcaaggcaatcgtcaatgcgcgtctgcctaaaccgccaacagctgcggtttacgaagcggtcaaaagcagcacgttggaatttcgccctcagtga

SEQ ID NO: 427072 - DNA, 903 bp, Serratia marcescens
atgcgttttttctgggtcaacatcggtggcagcgtcgcggaagttttgaagggcgaatttctgtgggcgccgcaatatggaataaataagactgggcacatgtttaagcctgccgggtgggaaacggtcaaaaaagtcaaagagggtgacctgattttttgccacaagggtaggaagattatcggcgtggcgacagcggtacgcgatgcttactctgcaccgcggcctgagcatcgggtcgcgggaccgcggcatattgcgggtacccaagtcgatttggaactgacgcgtcttgaactacctattgatgtttccctttttaatcaggcgttcatgcgcatgcacaacccgacttgccttccgcgcgtttttaataagacaggcggatgcaccgaaaactatatgtgcgagatccccgcaccggcagccgcgttgatcgccagttttatctcggaaaatctctctatcaacttccatgcggataccgtcgaaatcaccaaagagatcggtggtgagcaagcaacggtgattcaggcgcggattgggcatggcccctatcgcgataaaatgtttaagcggtggggaaaccggtgcgccgtcacggggattgcggagccgtctattctcattgcctctcacatcgttgcctggtcgattgcgacctcagaagaaaaagtggatccgcacaatggtctgccgttaatccccaatctggacaagctgttcgatcgcggcatgatcagttttgccgatgatggacgtttgctgtattcacggacgatgagcggtttgttatgcgagctaaggatcccgttggacgccaacattagcgggttgtctgaaaagaacagagcttacctgcggcggcatcgagcgagatgggggtttgaagtagagccctga

SEQ ID NO: 427073 - DNA, 213 bp, Serratia marcescens
atgcttattttttacgccacgctggctatcgccttcactctgctgtgcctgatggcctttctctattgcgcttatcagctgtcgaagcacggcgacgtcaagtttttggcctcgctttccgtgctgctcttcgcgctgctggccttctatgccgcttatggctacgtcagcacctggctgcaacagcaggcggtcgatgtccggctgtattag

SEQ ID NO: 427074 - DNA, 1212 bp, Serratia marcescens
atgaccgcgattaaaccggacgccatcgaccgcgttctccccaccgccacgccctggttagccgtcgtcaacgtgctgttcgccggcatcgccgcggcgctgcacgtgggcaaggccaccatcgcgctgccggcgctgcaggccgagttcggccgttcgctggaggcgctgagctgggtgatttcggcctttcccttcgtcggcgtgttcggcggcatcgccgccgggctactggtgcgccgctggggcgaccggcgcctgctggcagtagggttattgatcatcagcgccgccagcttcaccggcgccacgctgcacgacttcagcggattgatcgtcagccgctttgtcgaaggcctcggcttcgtgatcgtggtggtcgcttcgccggcggtgctgaaccgcatcgtcgccccggcgcagcgcagcctggtgttcggcatctggagcaccttcatgccggcgggcatcgccatttcgctgtttttcggcccccatctcgccgactggcaacagagttggcaggccggtgcggcgctgacgctgctggccgccctgctgctgccgttgaccacctcccgacgcaccgccgaggcgcacgctccaccgttacagctgcggcaagcgctgggtgcgatgctgcgggcgcgccggccgctgttgctggcgctgatgttcaccacttacaacctgcagtttttctcggtgatgaccttcctgccgatcttcctgatgcagcgcatcggcctgtcgctggcggccgccggcggcatcagcgcggcggcggtggcggcgaacatcatcggcaacctcgccgccggcgtactgctgtcacgcggtctgcccgccagaacgctgctcgcggccaccagtctggttatcggcatcttcggcatcggcattttcctgccgatgacgcccaacggcctgctgatcccgctgtgtttcctgttctgcgccatcgccggcatgctgcccgccaccattctggccgccacgccggcggcgacgccggaaccgacgctgctgccgctgagtctggggctggtgatgcaggggaactatctcggccaggtgatcggcccggtcgcgctgagcgccatcgtggccgcggccggttgggcggccccggcgtggctggtgctggcggcggcggtatcaggagcgctgttggcgctggcttttctcagccggcggcatcatgcggggtga

SEQ ID NO: 427075 - DNA, 618 bp, Serratia marcescens
atggtcgatatgtccgccgtgcttgccgttttcaccgtgtatattgtcggcgtggtgatccccggccccaattttgtcgccgtcgcccacaaagccgtttccgcacgccgggccgaggcttttgccttggtggccggcatcgtgctggtcaatctgttctgggcgagcagcgccctgctgggcatcggcgtggttttcgccctgttcccctggttggcactggcggtaaaagtggccggcgccggctatttaatgtggttcggctatcggcttatcgcccaggcggcgccttcttcaggccccccaacggccaccgggaaaagcggttttcgtgccgcctttttgcagggcatcgccaccaacatcgccaatcccaaatccattgcgttttacgccgccgtcttctcgtcagcggcgcccgcccatgtttctacgccgacctttctcgccatgctgctggaagtggcggtgatagccagcttgtggtacgggctggtggccctggtgctgtcacacgcccctgtcgccggcgcctaccgccgcagcaaggcttggatcgatcgcgcctgcggcacgttgatcatcgcgctgggactgcggcagttgctcagccgataa

SEQ ID NO: 427076 - DNA, 756 bp, Serratia marcescens
gtggctgaacaacagaccgtgttacaactggcggctgcaatgagcgatgcccccgccccgatctaccaacgggtcaaacaggcgatcgtgaatcaaatccgtgcggggcattggcaaccgcaccagcgcgtgccctccgaaagtgaactggtggcggaactgggcgtcagccgcatgaccatcaaccgcgcgctgcgcgagctgaccagcgaaggttttttgattcgcatgcagggcgtcggcaccttcgtcgccgaagccaaagcgcataccgcgctgctggaagtgcacaacatcgccgatgagatcgccgcgcgcggccatcgccacagcagcaagatcctcgagctgaaggcccgagcggccagcgaagaagaagcgacggcgctgggcattcaacccggccaacggctgttctactcgcagatcgtgcattacgaaaacgatgtgccggtgcaggtggaagaccgctgcgtcaacccgctggtggcgccggattacctgaagcaggatttcgaccgcgtcacgccttacacctatctgacgcaggccgcgccgctgaccgccggcgaacacatcgtcgaagcggtgatccccacccggcgcgagcgcgagctgctgcagctggaagaccacgaacccggcctgctgattcatcgccgcacctggtccggcaaaaccgtggtgacctcggcccggctgctgtaccccggcagccgttatcaactgttcggccgcttcaccagcgaagtctaa

SEQ ID NO: 427077 - DNA, 180 bp, Serratia marcescens
atggcgcgcattcaggaatttttggcggtcaccggcaagtttctggcgcgacggccactagttgtatatacatatacatacgccgacatcaacagtaaactggtgttattatttttttatttgacgaggttaacgtcgtggctgaacaacagaccgtgttacaactggcggctgcaatga

SEQ ID NO: 427078 - DNA, 387 bp, Serratia marcescens
atggaaaaccccagctatagcggcggctgcctgtgcgggcatattcgctttcaggcacgcggcctgcctggcaatccgcacagctgttcctgcgatttttgccgccgccactccggcgcgccgacgctctgttgggtcgaatttccgcgtcaggccatcgagtggaacggcccgggtggcatgccggccctataccgttcttcaccctattccagccgcgccttttgcccacgctgcggcagcacgctgggggcgatcgacgacgagccgacggtggcactggccaccggcagcttcgatcgggccgatctgccggagctgcgcccgacctcacatgcgttcgccgatgtttgccccgaatggtggcgtatcgacggcatgcgctga

SEQ ID NO: 427079 - DNA, 699 bp, Serratia marcescens
atgacacatccttccctgctggcaccgtggggcgttaacgatatcaacgagttgctcaggcccgaaccgctgcggctggagatgggactgagccgcagcgccgacggcctgctgaccgtcgcggttcgcaccgacctgcacggctgcaaagggcgcatgctggactggtggttcaccttcttcgaaacgactcagcatatcaactggtggcacccgcacgatcacgtcgaacaccgcggctgggatcgccactggaaaaagggggaaagctacgtcggcgccagcatcgaagcggtcgagtggttggcggagctgccgccggtcgcggcgcgcctcaagtttcacgccgccgaggacttcttctcgccgcagccgctgcgccaggcgcgcgacgcgcaggcgctctccgccgccgtttgcgcgcgcatcggtttcggtgaccaggtggcgctggatgacaacggcgatccctgcgacggcgagatgctgcacctggtgcgcgacacgccctatggctgcgtgctgcgcagccgcttcctgctgggcaaagcctgcgccaacgcccacgacgagctgccggacgatatcggctttaacctgatgcgccactgctacaacgagttcagctatctggcgcagttcctgccgtcgctgtactacgccgaaaacggccgcgaaccggcgccgttgctctggtaa

SEQ ID NO: 427080 - DNA, 645 bp, Serratia marcescens
atggcaaacccgaatgaagaaccgctgcgtgctcgcggccggccggccacgccggaaacggcgctgcgcgcggcgctggttcaggcgacgttggcactgctgatcgacggtggctatgccgcggcgacggtggatgcggtggcgaaacgcgccggggtggctaaaaaaaccctgtatcgctttgccgccaaccgcgacgaactggtggcgcaggcggtaagcggttggactgaggcgtttcagccggccttcgcccaggatgccgggcagcgggcggcggttgcgccgctgttggaaaaagggctgcaggccatcgcgcagcaggtgctgagtgcggaagcggtgggcatgttccggctgctgcaaagcgaatttccggggcgcgaggggctgctggacagctaccagcgcaatggtattcagcgcggccgggtgacggtggcggactggctgcagcgccagcagcagtgcgggtggctgcgtgagcgcgactgggcgcaaaccagcgacctgctgttggcgatgaccatcgccgaaccgctgcggcagatgacgctggggctgttaccgccgggcagcgcgatcgacgagcgcatcgcggcggcggtggcgctggtgatgccgggtttgctggaagaggagtga

SEQ ID NO: 427081 - DNA, 249 bp, Serratia marcescens
atgccccaactggcggattgcctgaacggcagcggcccggtgttgaatcaatacggggatatcggtaatgcggtggcgccttccctcggcactctgaatgagaacgataatcccttaagagaaaagaatagacacattttcgccgagtacagaattttcttagataaagtacgactatgcatttgcgccatacgaatgattttcaagataatcatcagcattatcacgatgagcagaaaaaatgcataa

SEQ ID NO: 427082 - DNA, 933 bp, Serratia marcescens
atgtatcggcaagtgaaaattcttttggcggcgctgctgctgctgtgcgggcaacgcgcgctggcggactgcgccaccaccaacggcacggtgaccctgcccagcagcaactccttcgccgtctacaacggccagatcagcgcccagggtaccgccgggctcaactgtaccgggctggggctcaatctgttgacgcaaaacaccgtcacggtcaagatcgcctccaccaccaacaatatggccctgctgaacggcaacggctccggcgataaaatttcctatctcatctacccggatgccaactaccaatacccctacagcgtcggccagaccatcgactacagctcgctgaacctgctgtcgctgatcctgatctcttccaacgtcaactttccggtgtacatcaaaaccgtggcgggtgcgaacgtcagcgccggcacctataccgacaccatcaatctggtgtggaactaccatatttgcggcctgggcctgatagggctgtgtatctggtgggacggcaccaaccaacccagcaccgtgaccatcaccgcggtcatcaccaaaagctgcctgatcaataccgccaataacgtcaacttcggcagcatggcgctggtggggcaattcaacccgatcaaccagagcatcaccctgacctgcaccaaatcccagtcatacagctcctactttaccaacggcaacaaccccatcaccggttggcggcgaatgctcagcggcaccagcaacttcctgcagtatcagatctacctgcccaacaccagcaccgtgtggagcagcaccaacgcgcaaagcggcaccggcaccggcctggcgcaaagcattccctttaccgccgccatcaatccggcgcagaccgaagtgccggtcggtacctatcaggataacgtcagctatgtcgtgacctattag

SEQ ID NO: 427083 - DNA, 2481 bp, Serratia marcescens
gtgaagcggatctcgtcgccggccacgcgcggcatgcagctcaagccgctggccctggccgtactttgtatggcggtggagctgtggccgccgcacgccgccgccgacgaccttccaccgccgcccagcgccatcagcatgccggacaccacgctgtatctggagccggtggtgaacggccgccagaccggcaaagtggtgccagtcacctaccgcagcggccactactatttgacgccgcagcaactgagcgacgccggcctgccggtggcggacaagcaagcgaaagagatcgccgtcgatcaattggataaggtcgacgtcacctacagcggcgaaacgcagcagctgttgatctcggtacccaacgactggctgcccaaacaaaccctcggcgacgccaacccggaacagcggttgccggcgcaaagcagcctgggcttcttgctgaattacgacgcctacgtcagccagagcggcgggcgcggcaatccgggctatttttccgcttggagcgaacagcggctgttcgacggcttcggcgttatcgccaacaccggcattttccgcagcagcttcaacggcgagaccgccgcacagcagaacaatcgctatatccgctacgacagcagctggcgctacagcgacgacgacaccatgctcagctataccgccggcgatctcacgaccggctcgctgccctggaccagttcggtgcgcatcggcggcctgcaggtggcgcgcaacttcgccacgcggccggatctgattacctatccgctgccgcagttctccggccaggccgccgtgccgagcagcgtcgacctgtacatcaacagctacaagaatacctccgtcagcgtgaaccccggcccgttcaccctgaataccgtgccttacatcaacggcgccggccaggcgacggtggtcaccaccgacgcgctcggccgccagatcagcaccacggtgccgttctatgtcgccagctcgctgctgcaggccgggctaagcgatttcagcctgtcggcaggggcgctgcgtcaaaattacggctaccgctctgcagactacggccaatgggtggccagcggcagtgggcgttacggcgtcactgattggttgacgctcgaagggcgggcggaaggcgcggctgagctggcggtcaccggcgccggcgcgggcgtgcgcctggggcagttaggggtcctcaacgcctcctacagttacagccaggcgggcagcgatgccttcaacgccccgccggtcacgcccctttattacgatccgatcaccggccaaccggtacaacaaccggatgccgggccggtttatcagtacaccggccgccacggcgatcagaccagcctgagctatacctacagcaaccaatatttcagcctcaatgcccaacgggtactgcgcagcgcggacttcggcgacctctccacctacaagagcagctaccgcctgagccgccgcaccgatcaactgaccggcagcatcggcctgagccgcttcggcagcctgggcgctggttatttcgacgtgcgcgacgccatcggacaacgcacccgcctggtcaacctgtcgtacagcctgacgctgtggcgcaatatcagcctgtacgcctcggcgaaccgcgagatcggcggcgacggctacagctcgcagctgcagatcagcattccgttcgatgcctggggcaccgctaacgtcagtaccgcccgcgacaccggcaaccgctggagcgaacgcgtcgcgtacagccgcgccgcgccgaccgacggcggtttcggctggaacctggcctacgccggcggtcaaggcagcgccagcgattaccgccaggcggacctgacctggcgcacctcgctgttggaaacccgcgccgggctgtacggcaaccgtaacgattacacccgctggggcgaagtcagcggttcgctggtggcgatgaacggcggcgtatacgccaccaacaccatcaacgacgcctttgccctggtctcgaccaacggctatgccggcattccggtcagctacgagaaccagcgcatcggcgtcaccaatgacaaaggctacctgttggtgcccaccgtcacttcgtattaccacgccaaattccagattgatccgctcaatctgccggcggacgtcaatttgccgtcggtcgaaaaaaccgtcgccattcgcgatcacagcggctacctggtcgaattccccgtccagcgcctttccgccgccgacgtggagctggtcgatgcgcaaggcaaaccgctggccaacggcagccaggtggcggtgatcggcagcaatcaacaaagctatgtcgggtgggatggcatgacctatatcgacccggtgcagcagcacaaccggctgagcgtgatcccagccgacggcggcgcgccgtgccaggtcagcttcagcctggccaatccgcaggggctacagcgcgtcggtcccctcgtctgccaataa

SEQ ID NO: 427084 - DNA, 768 bp, Serratia marcescens
atgcgtagtactctgctccgcctgcccctgctggcaggattgctgttagccggtcaaccgcaggccttcgccgccgcctccattctgatttggcctatcgatccggcgattgaagacaaccagcaggcgacggccctgtggctggaaaaccgcgacagcaaaccggtctatatgcagatccgcgtgctcggctggcaacaaaccggcggtaaggacgactaccgcaaccagagcgaagtggtcgccagcccgccggtcgccaccattctccccggcaaacgccagctgattcgcctgatcaagcagaccccggtcgccgccgggcaagaacgggcttaccggatactggttgacgaagtgcccatcaaggataaagacggcgcagcgcccgacaagggtgcgcagatggggctgaaattccagatgcgttattcggtgccgctgttcgtcagcggcaaaggcgtctggaccaagcaagacttcgaacacccgcgcgactatgccaccgccaaccagccgaagctcagctaccggctgctgcagcaaaacagccagcgctggctcgacgtgcgcaacgacggcatcgtgcacgcccgcctgtcgcaggtcagcatccagggcaagccgctcaacaacgggctgctgggctatgtgctgccgggttcgcaaatgcgctttgccctgccgccttcgggcagtttcgccgccggcaagctgcaggcgatggtcaatgacaataagcaacccgtaaccattccgtcttactga

SEQ ID NO: 427085 - DNA, 540 bp, Serratia marcescens
gtgattaacggaacgctgcgcaccctgctgctggcggcgctgatcggcgccccgacggcccgtgccgacaccgtcagccagggcttcacggtcaacgcttcgatcatcaaaggctgcgtgctcggcagcggcgtcaccaacgttacctcgttcggcagcatgagcttcggccaggtggcgtccttgagcagcccgataaaaatcgtctctagcgccggcgcgggctccattttgatccgctgcaatcccgggctcagcgtcaccctgggattgaacgtcggcaataacgtcaccggctccatcgccggcgggcgaaaactgttgaactcggtgacctcggaaacgctggtttaccagctctaccaggatgccaactacgccgttttgtggggcgacggcggcaacggcggcgccgtccaaaccgtctcctccaccggcagtacgcaagaaataaaaatctacgccagtttaatggcgagcagcaccttgcccaccagcggcacctacaacgatacggtcttagtgacggtgagttattga

SEQ ID NO: 427086 - DNA, 504 bp, Serratia marcescens
atgacgcgcctggccgtcacctgcatgctgctgtcgttggcgggcatttgccgcgccgacgtcagcaccgcgacggtgggcgtcagcgccaccctagtcaagtcctgcgtcgccggcaccaccagcggcggcaacaccacgttcggcacctttaacttcggcacggtctatttcctcaatacggcgataaaggtgaccggccaggcgaacgccggcgcactgcagatcaactgcaacaacggcaccagttacacggtgctgctcagcggcggacagagcggcaataccgccgcgcgctatctgcaaagcgcagcgggcgcccgcgtgaactacaacctgtataccagccccagctacgccaccgtctgggataacgtcaccggcgtcacccagaccgccaccggccaaagcgtctggctgccggtgtacggcatgatcccggtacaaacgacgccggcgacgggcaactatacggatacggtgcaggtgacgataaattggtga

SEQ ID NO: 427087 - DNA, 537 bp, Serratia marcescens
atgaaaaagactctggcggcattaacctcggcagcgcttctgctgtgcgcctctggcacctcctacgcggcgggcaccattcagggcacgctgggcgtaaccctgaccatcggcgccggctgcgtggtcaccggcggcaccagctccggcaccaccaacagcttcggctccatcagcttcggcacctactcctcactggctaacgtcatcaccgccagcgccaccggcagcggcggcaccggcacgctggggctgaactgcactaccggcaccaactataccgtagcgctggacaacggcctcaatgccaccggcagccagcggcgcatggccagcagcgtaccggcctatatcagctataacctctaccaggacagcgcccacgccgtgccgtggaacagcaccaccggcgtgctgaccggtaccggcaccggttcggcggtgccactgatcgtttacggcctggtacctgcggcaggcaccaccccggcggccggtgcgtacagcgataccgtcaccatgaccgtcacctggtaa

SEQ ID NO: 427088 - DNA, 537 bp, Serratia marcescens
atgaataaaactctgatggttttgacctcggtagcacctctgctgtgcatcagtggcacagccaacgcagcgggcaccattcagggcacgctgggcgtgacgatcaccatcggcgccggctgtgtggtcaccggcggcaacagttccggcaccaccaacgactttggttcgatcagcttcgggacttactcgtcgctggccaacgtcatcaccgccagcgccaccggcagcggcggcaccggcacgctggggctgaactgcactaccggcaccaactataccgtagcgctggacaacggtctcaacgcctccggcagccagcggcgcatggccagcagcgtgccggcctacatcagctacaacctttatcaggacagcgctcacgccctgccgtggaacagcaccaccggcgtgctgaccggcaccggcaccggatcggcggtgccgctgatcgtttacggcctggtgcctgccgcgggaacgaccccggcggccggtgcgtacagcgacaccgtcaccatgaccgtcacctggtga

SEQ ID NO: 427089 - DNA, 846 bp, Serratia marcescens
atgaatcagggtgcgctgctggccattttcgcctcgctgattttcagcgtcatgaatgcgctggtcaaaaccatcgccgacgacatccccaccggggaaatcgtgttctttcgcagtagcatcggctgcctgctggttctgctgctgatgtatcgccacggcgtcgccttcagccgcgaggaccggccgctgctggtactgcgaggcactatgggtgggctgtatctcatctgttatttttacagcatcgcccacctcacgctggccgacgccagcatgctggcctacctgtcgccgtttttctccattctgctttccttgctggtgctgcgtgaacggatcagcgccaacaccgcattttggctggcgctggtcatcatcggcgccgtactgctggtgcggccgtggcatttctcaacgtataccctggcatcgctggtcggcgtgatgagcgcggtgttcgccgctatcgcctatctgtcggtcaacaagctcagcaaacgccaccacaactacgagatcgtgttctatttcctgtttatcgcgacgctgatctcgctgccgctgatgtggaacgccttcgtctggcccaacgtctaccagtttgccatcctgctcgccatcgccctggtatctctgttgggacaggttgtcttaacccaggccttttcctccgataacctgatcgtggtctcggtggtgcgctatatcggcatcgttttcaatattgcctggggctggctgttctggcacgaagtcccgctattgctgtcgctgatcggctgcctgttggtggtgatttcctgcatccagctcgggctgcgccaccgcaagaaagccgtctga

SEQ ID NO: 427090 - DNA, 1308 bp, Serratia marcescens
atgaataacgccttttctaccctgatcctcggcgccggtccggcggcgatccaattggctgtggatatccaggccacggccgacacgcgcatcggcctgtacaatcgccccagcgagaaagggcaacgcctgaaggcacatctggcgcacacgcccactctatctctggaaggcgtcggcaaggcgcggcagacccagcgcgatgcgcaggtggcagtagacagctattgcgacgatctgtcgctcgtcggcggcgactggcagcggctgatcctcgcggttcccgccgatcgctattacgacgtgctgcggcaggtgccgtgggccaccttaccccacctgcgttcgttgatcctgctttccccgtccatcggctccggtctgatggtgcaaaacctgctgcaggcggctggccaatcccacgtcgggatcatcagtctgtccagttattacgccgacaccaaatatcaggatgcggcgcagccctaccgcgcctataccaaggccttcaaacagcggatctatctcgcggcccaaagcccgatgccagactccgccgaactcgactggatcggctcggtgctggcgcgtcacactatcgacgcccggcgctgcgacagcctgctggccgccgagcgcttcagcatcaccaactatgttcatccgccgctggcgctggccgacaccacgctgcaggcgatattccagccgcaggcgccggtgcaatacctgtataaaacctatcccgaagggcccctctgtcccgaggttatcgccgatatgctcgaactgtcggaggattacaaaaggctgctcaaccatctcggcgtcgaagagatcaacctgctgcgctttttgaacgacgacagctacccggttccctcccgcatggtgagccgccgctggattgaccatttcccgcagctcgcgccggcggaacaacgctatgcgctgtttacgcgctataccgcgctgctggtcgatccctattccgaaccggacgcgcagggtcgctactatgatttttccgccgtcagggtcgcccgcgtctttcaggatgctcagggtctgtggtgcctgccgcgcgtgccgctggaagacgtgcgaaaactccgcacgctggtcttgctggcggagcggcttggtgtcgagatgcccaccgcccggtgcctgttggcacgctttcagcaggcgctgcagagcttcgtcacccggatcggcgccgagcattgccatcattcgctgctggacgatacctgcgacgaacaggcggccatcacctaccgtcagtggcgggggcaagcatga

SEQ ID NO: 427091 - DNA, 798 bp, Serratia marcescens
atgtacactctgaccaaggcggacatgctggcgcaactcgccggcttgcaacaggaaatccaccagcttcaccgttccgcccggcaagatcggcgccatttttccctgctggaacggcgcttcagccgcctgcaggcctttaacgacctgccgcagctgcaggcctatcgccgcaagttggaaaacgatcgctcgataacggcgcaaatcacccagctgcgagcggtggccaatgccgccttgtgcgattacgagaagcatcgcgtcgccacgctctgccgggagccggcgcagaccaacgcctacctgaacagtttcgatagcgccctgcagctggagatcgccgccgccgacatcaaacccggtgaacgggtgttgctggtgggcagcggcgccttgcccaccaccgcgctggcgctggtcgccaggctctccgccaccgtcatttgctacgattgcgacccggcggcccagcgttttgcccgccgcctcacgcgccatctggggctgtcacggcaaatcccctgcatcgataaattgaacggcctgaccgactgcgacatcgatcacatcatcatcgcctctctggtggcggacaagcagaccctgctgacgcagctgcggcctttactgcctcagcgcggcaaactgctgctgcgctacggtaacggccttaagtcgatcttcaactgcccttatcaccatctggctgcccgttcaccctggcgcgtcagcggtaaaccggttgccaccccgctgtacgacctcttgattttggagtctcatcgccatgaataa

SEQ ID NO: 427092 - DNA, 786 bp, Serratia marcescens
atgactcaactgaccctcaccggcgtcggcgtcacgctgcatcgacgtcagctgttagccgacgtttcattagcctggccggaggcaaagctcggcggcatcatcgggcccaacggcgccggcaaatcaacgctgctcaaagcgatcaatcgcatgctgccgcacagcggcgctatcgcctaccgcgagcacccgctcgatccgaaaaccagccgcatcgcctatgtgccgcagctcaatcgcagcgagtcggcgttgaccgcgtttgacatggtgctgctgggcaaggtacggcagttggggtggcgcgtcagcgccgcacaggccgacgcggtagaacaggcgctggcggaatgcggcatttccgcgcttgccgatcgccctttcaaccgcctcagcggcgggcagcggcagttggtgatgttggcgcaggccttcgtctctcagccgcagctcattttactcgacgagcccaccagcgcgctggacatccaccatcagctgcgcgtgctcaatcagatcgccgactacagccggcgtcatcgctgcatcacgctgctggtgatccacgatctggggttggcactgcgctactgccattctctcaccttgctcgagcacggacgcgtcatttgccacggcgacacccatcagatgatggggcacccgatgatgtcccgcgtatttggcgtcggtatcgaaagcggcattagcccccaaggctacccctttctgctgccgacacagctgttacacgcacacggagaaaccccatgtacactctga

SEQ ID NO: 427093 - DNA, 1041 bp, Serratia marcescens
gtggcccacacaggacgtgcgtttttacaacggcgcaggctgcgccgcgggctattgacgctggcgctgctcggcgcgctgctggcggccgccgccgtcgatctgaccgtcggcgccgcgcaccttagtctctcggatatcctgcccatgctctggcccggctccacgccaggcaacgagctgcatcaggtggttttctggtcgattcgcttgccgatgacgctcaccgcgttggtcgtcggcgccagcctggcgctggccggtctgttgatgcagaccgtgctggccaaccccctcgccagcccgtatacgctggggatctcggccgcggcgggatttggcgcggcgctgtcgatcatcaccggattcagcctgggcggcgcgctggcgctgggcacgccgctgctggcttcgctgatggcgctgttggcctgcgtgcctatctatctgctgggacagcgccgcggcatgacgccgcaaattttggtgctgagcggcatcgtggtgctgttcttctttcagtcgctgcaatccctgctgctgtttctggcctcgcccgaagccatgcagcaaatcgtcttctggctgttcggcagcctgctcaaagccaatatgcacggcgtggcgatcaccggcggcgtcctgttctgcgcgctggtcgtcagcctgcggctggcctggcgcctgaccgcactgtccgccggcgaagaacaggcccaggggctgggcatcaacgtcagcgcgctgcgcaagctggcctttctgctggcgaccttactgacggccgcctcggtctcgtttgtcggcaccatcgggttcgtcgggctgatcgccccgcatttcgcccgttttctggtgggcgaggatcaacgctatctgatctgcatttccgccctttgcggcagcctgctgctgctatgcgcgtcgatcgtcgccaaactggtgctgccgaacggcgtagtgcccatcggcatcgttatcgccttaatcggcgtgccggtgctgttctacttcgtcacccgacaggttaaacgcccatga

SEQ ID NO: 427094 - DNA, 1092 bp, Serratia marcescens
atgttacctcgcctcgtctgtatgctgactgcgtggctgctcttttgccacgtcgcgcaagctgaaatccacctcaccgacgcagaaggacgccaggtcaccctggccgcccccgcacaacgcgcctatatcggcttttactacgaagattttctggcggtgaacggcccggacagttttcaacaggtggccgccttctctaaaagcgactgggccttgcgcaccagccaatggccgcgttatcaggcggctctgccgcggctcgctcagctggtcgatgtcggttcgctctacaatcagagctttgacttcgaacgcctgctgaccacgcggccagacctgctgatcctggcgaagtggcagctcgacggcttcgccaactacctgccggtgctgcaacagctcaacattccttacatcgtcgtcgacttcaaccagggtgcggaggtcaaactcgccagcattcgggccatgggtcaggcgatgggccaccccgagcgggcagaacggctggccagcgagtatcggcagagccttgaagatactcagcggcgtattcgcgaggcgcagctgccgccaccgaccgcttatatcgaactcggcgacaaggggcccggcgaatacagcagcagctatggcgcctccgtctgggggccgctgttacagctggccggcgcccgcaatatcgccgccagcgtcgtcggtagccccgcgcctttacgcgccgactatgtactgacccaaaagccggacgtcattttcctcgccggcggtgactgggaaaacatgccaaacgccgtaccgatgggctacggcgcacaggcggccccccttcaggcacgcctcgctcagtacgcccagcgtgccggttggccgcagctgccggcgataaaagaccagcgcctctatgcgctctaccatggcggcgcgcgcacgatttacgattttatttttgttcagtatctggcgaaagccctctatccggccgcgtttgccgacgttgatcccccacgcaacctggcgcggttctaccgccaatacttaccgatagaggctgacggcgtcttcctgcaacgctggcaaggagagtag

SEQ ID NO: 427095 - DNA, 1338 bp, Serratia marcescens
atgaaagcatttgtaccggcactggttctcagtgcagtgagtttttccgtttgggcgcaggacgccaccgtcagcagcgagcttatcaagcgcggtgaatacctggcgcgcgccggcgactgcgtggcctgccacaccgacggcaagagcggcaaaaccttcgccggcggtctggcgatggagacgccgatcggcaccatctactccaccaacatcacgccggacaagaaaaccggcatcggcgattacagcttcgaggatttcgacaacgcggtgcgtaagggcgtagccaaaaacggcagcaccctgtacccagcgatgccgtacccgtcgttcgcgctggtgaaagaggaagacatgcgcgccatgtatgcctatttcatgcacggcgtgcagccggtggagcaggccaacaaggattccgacatcccgtggccgctgtcgatgcgctggccgctgagcatctggcgcggcatgtttgcgccgtcgccggcggacttcgtggctgacgccaaagccgatccggtgattgaacgcggtcgttatctggtggaaggcctgggccactgcggcgcttgccataccccgcgcagcatcaccatgcaggaaaaagcgttgagcaacagcgaaagcgacgactatctgtccggcagcaacgcgccgatcgacggctgggtggcttccagcttgcgcagcgaccgtaaggatggcctgggcagctggagcgaagccgagctgaccgagttcctgaaaaccggccgtaacgacaaggcgatcgtgtttggcggcatgagcgacgtggtggagcacagcctgcaatacctgagcgacgacgatctgaccgccatcgcacgctacctgaaatcgctgccgccgaaagacggcaagcagcaggcggcgccggtcgaagacagcgtggccaaggatctgtggcgcggcgacgacagcaagcccggcgcggcgctgtatgtcgataactgcgcggcctgccaccgcaccgacggcgtgggctacaagcgcgccttcccgtcgctgaagggcaacccggtggtgcagaccgaggacgcgacctcgctgatccacatcgtgctgaccggcaacactacgccggcggtgcagggggcggtgtccaacatcaccatgccgccgttcggctggcgtctgaacgatcagcaggtggcggacgtggtgaacttcatccgcaccagctggggcaacagcgccaaaccggtgagcgcctccgacgtggccgacgtgcgtaaagaccgctcgatgatccgcgacgagaaggagatgggcagcgccgtggtgccggaccacccggacgcgaaaaagtaa

SEQ ID NO: 427096 - DNA, 189 bp, Serratia marcescens
atgaaccggttactcgcagtcctcgtcgtgctatgcgcggtattagcgacgctgtatgggctggtgcattttggcgcgcgttcagtgccgcgagcgattgcggtcaatgaagcgccgctggggtgtgaggatgaaccggagctcgccggcgagtgcaatggtgaagaggaaacgccggccgacggttaa

SEQ ID NO: 427097 - DNA, 666 bp, Serratia marcescens
atgaaagaaaaggaacaatggtcccaggtcgatcgctatatcgcagacagcctggtagaacaagatgatgccctgttgcaggcgctggcgaccaatgccgccgccgggctgccggcgcatgatgtggcgccgaatcagggcaaactgctgcagctgttcgcccgcatggtgaacgccaaacgcattttggaaatcggcacgttgggcggctacagcaccatttggctggcgcgcgcgctaccggcggacggcaaattgatcacgctggaagcggatgaaaggcacgccgccgtcgcccgccagaatatcactcgcgccggtctcgacggcctggttgagctgcgcgtcggccccgccatgactcacctgccgacgcttcacaccctggccccctttgatctcatcttcatcgacgccgacaaacccagcaaccccgattacctgcgttgggcgcttaaactcgcgcgcccaggcacggtgattatcggtgacaacgtggtgcgcgatggcgcggtcaccgacgccgccagtacggacgcccgtgtacaaggcgtacgcgagttcttcacgatgatggcgcaggagccccgcttgaccgccaccgccttgcaaaccgtgggcagcaagggctgggacggattttctctggctatcgtcaatttttaa

SEQ ID NO: 427098 - DNA, 147 bp, Serratia marcescens
atgttgcaaatgttatgcagtattaactttcgggttttaatggtttgccgattttttgttttgattaaaagctatacggattttaaacagggatatattctgctgaattgctattttttagcgcatcagtgtatgtacggttattaa

SEQ ID NO: 427099 - DNA, 894 bp, Serratia marcescens
atgacaaatgaagacattttttttattgaagagctaattgagtgggtggagatacatctggagaaacggccaaacctggatgaagtcgcgcgtatttcgggctattccaagtggcatctgcagcgtaaattcaagcgtattaccggcattcaactcgccacctatatccgttcgcgcatcctgacgcgcgccgcggtggcgctgcgcatcacccgtcgctcgatcatcgacatttccgatgagctgggcttcgactcgcagcagacctttacccgcatgttcaagcagcgcttcaacatcacccccaatcgctaccgcgcgatggagcactgggacgtgaaaaacctgatgccgcgctttaacttcgaagccagctacggcgccggttattatccggaggtgaagcggctgacgctgcccgagatgcagctggtcggcttcacgcgccggctggatttcgcctccgagcaggagctggagtactcttcctgcatggcgatgaaggacgagattttcaacgacttcttcaagggactgcatgtcgactgccggcggatttacagcatctattccccccatgccggggaaggcgacgagctgtcatccacgctggtgatggcggtcgatcctgaacacaaaaagaatattctttccaaccatcagatagacaccttccatctgccgagccgcgagtttatctccatcaaccataagggcacggcgaaagagtgtctgcagtttttcgggtacctgatgtcgcatgtgatgccagggctgaaggatgaggtgcgcggcagtatggaaatggagatcattcaaaccaaagagtggaatccggaatctaaactgcgtcagattgaggtggattacacctacctgatttctatcgattaa

SEQ ID NO: 427100 - DNA, 666 bp, Serratia marcescens
atgacactgcaagacaaacttgatgccttcaaagcggagttcgaatccggccaactgccgttcacactcacagaacaagagcacgcgctgatgcgtaaggcgatccaaacgcagatcgctgccggcatcgccgaacgcgccctgaaggtcggcgacgccgcgcccggctttaccctgtcggacagcgaaagccggccatgttcttccgcggcgctgttggcgaagggcccgctggtcgtcagtttctatcgcgggatctggtgcccctactgtacgctcgatctgcaggccctgcaggccgcattgcccgccatcatgcagtacggtgcgcagctcgtggccgtttcgccgcagagcacggtgcataaccgccaggccatacgcgatcacgatctcacctttgcgctgctcagcgatgccggcaaccgtctggcggcccaattcggcctgcgttaccgcctgccggccgcgctgatcgccctgtatcaacagcggctcggcctcgatctggcgcagttcaaccaggatgatagctggacgctgccgctgccggcgcggttcgtcatcgcccgcgatggccgtatcgcctatgccgaagcgcacgccgattacacccggcggccggagccgcaggcgctgttgtcggtgctggaaagattggcttga

SEQ ID NO: 427101 - DNA, 891 bp, Serratia marcescens
atgggcaagtttgccgattacgaaacctatgcctgcgtttacgagagcggttcctttaccgcagcggcgcggcggctgcacgtggggcagccggcggtctcgaaagcggtggcgcggctggaacagcagctcggcacacgcctgatgctgcgttcgacccacggcctgcagccgacggatgcggggcagcagctgtatcaacgcacccggcgtatcctgaacgagctggcggagacggaagcgctggtgcagaacgccggcgaaacgctgagcggccggctgcgggtcgcctcggcggcagtgttcgcccgcatcgttcccttgcctgatctgacggcgtttatgcgcgccaatccgcgtttgagcgtcgatctgctgctggatgacggcaacctgtcgttgattgaagagggcatcgatattgccttgtgtatcggcgagctggaagattccggctttaccgcccgcaaactgggtgaggtaaagcaatgtgtgatcggcacgcccggctattttgccgccgccggcatgccgcagcggccggaagatctgttgcagcacgagctggtgatttaccaccgccgtggtggcggcgagcactggcgcttcagccgcgaaggagaacagcgcgcgctgcggctgccggggcgcatgcgggtcaatgcggcggagtgcgtgcgcgagctggtgctggcgggattcgggcctactatcgccagcgaaggcatgttccgcagcgagctgcaaagcggggcggcgatcgcggcattagcggactggcagctgccgccgctggcgctgtgggcggtgttcccctgcggtcatttcgtttcggccaaggcgcgggcctttgccgactttgtccaaaccgcgttatgcagggagccgtga

SEQ ID NO: 427102 - DNA, 522 bp, Serratia marcescens
atgaatcataatgacctttctcagtgccgcgtggacaccgaccgtttgttgattgccccttttaccgcagcagacgccgacgatgtttaccaggcgatcacccccactctgacgcgctttatgacctttgagccggaggcgtcgccggaagatttcgccaacgtctggcaaggctggctgccgctgatgcgcgaaggcgaagaagtgatcttcgtcgcccgccggcgcgaagaccgcctgttcgtcggcgtcggcggcgcgcacaacctgcgcagccacactccggagctgggtatctgggtcaaagagagcctgcatggccagggctacgggcgcgaaatcgtgcagggcatcgcgcgctgggtcagcgagcgctttcagcctcagcaccttatctacccggtggccgagcagaatgccgccagccgtcgcctcatcgagtcgctgggcggcgtgctggccgggcgttgcgaacgcgtcaagtatgacgccgtggtctatcacctgccgcctcagcgctaa

SEQ ID NO: 427103 - DNA, 1164 bp, Serratia marcescens
atgacacccacgagaaagctgacggcgatagcgctggtcatcgcctttattcagttcaccaacgcactggaatacatggtattcaacccgatattcctctacatggccgccgatttttccgtgcccgtcagcttcgccggctatgtcagcgcggcctatacgctggccgcggtgatttccggcatcggcgcatttttctggatcggcggcgttgagaagcggcgctttctgatgctcaacgtcacgctgctgggcgtgaccaccttattaatcgccacaacccagcagttttactggctgttggcactgcggctgttggccgggctgttgggcggcaccacgatgggcgttgggatcggcttgctgctcaacgccgcaccggccgcactgcacggcagaatgttggcgacggtgatcgcgtccttttctttggtgagcattgtcggcatgccgggcatgctgtacctgtgcgaagtggcaagctggcgcgccgcgctggtgactatcggcgggctgtgtctgctggcggccgtcttggtcgcgctgttcgttcccagggatgcgccgcagccacgggctaccgcgcccgtcgcgctcgatcgccgattgttgctgttcgccgccgccgccggcctgacgcagttcagcccgatgctgctgatcccggtgctggcgccgctgctcacccagcggctacaggtggcagacgcgcatttgccctggctgtttctcatcggcggcgtggccggctatctggcgaccgtgctggcgggccgctggctgcaacgctttagcgccgtgacgctgacggtgggcgccacgctgttgctgctgggcagcctgtggctggcggcgcgcggcggcgatcgcggcgagctgttcatggtcgcgtttctcgcggcggcctatgcgcggctggtggcgatctcctccctgagcatgcgctggccggacgctcggcagcgcgccgcctttggcgtactgcaaaccgccctgatacacctgagcgccacggcggccttcttgctctcctccgcgttgctgagcagcggcctcaccccgcttagcctgcaacgcctgttatggctgtgcgcgctgagcgcggtcgccgtcgcgccgctcagcgtttggctgcaggcgcggctgcgtcagcgcggcgcctga

SEQ ID NO: 427104 - DNA, 915 bp, Serratia marcescens
atgcgcgataaattggatttaaacctgttacgcatcttcgtggcggtggtggagcaaggcagcttcgtcggcgcggcgcgggcgctggcgatgccgacctccaacgtcagccgctatatctctcagctggagcgccagctcgagcagcgattgatagaacgcagcacccgctcaatgcggctgacgccgaacggccagctgttgcatgaacacacccagccgctgctggcgtcgctggaacacactgcgcaaaccctcagcgaacggcagcaacagctgcgcgggccgctgcgcctgtgcgtgcccaatgaagtggggccatacctgttgggcgagccgctggcggcgttcgccctgcagcatccgcagatcgaaatcagctgcgtcactaacttggcgggtatgacgtcgctgctcgacgatgtcgatctggcggtgatgatcagccggggcatgctggacgacagcgactatgtcgcgcagccgctggcgtctttcccctgcatcgtggtggccgctccggcgttgttggcgcagtggccgccgtcgttggagattgaacaattcacgcaattgccctgcatcagcacggtgaatgcgctgaaggggaggccgtggcagttcatccgcccggacggaaccttcgttaccgtcccggtcaatacgcgctatcgtgtcaacagcggagagatggcgctgaaggcggccttggccggcgtggggttcgccatgctttccgagctcggctgccggccgtttctggccgacggccgtttggttgaggtgccgctggcactgccgccggcgccgttgcagctgtatgccgtttaccccggccggcgttatctgccggccaaaacgcgcgcgttgctgacgttcctgatacagcaggttggcgaggcggctaacttctaa

SEQ ID NO: 427105 - DNA, 1311 bp, Serratia marcescens
atggccattgtcgacaccccgctggcggggaaagcggacgcagaatcgctgctgctgtaccgcaaaatcacctggaaactgatcccgtttctttgcctgtgttacctggcggcctacctcgatcgcatcaacgtcgggctggccaagctgcagatggccgatgcgctgcagctgagcgaagcggccttcggcctgggcgccgggctgtttttcgtcggctatattctgttcgaggtgccgagcaacctgatcctgcagcgcgtcggcgccaagatgtggatcgcccgcatcatgatcacctgggggctgctgtccaccgccaccatgttcgtcaccacgcccacccagttttacgtcatccgctttctgctcggcgtggcggaggccggttttctgcccggcgtgctcttttacctgacgctgtggttcccgacctatcgccgcggccgcatcatcgcgctgttcatgatcggcctgccgctgtccagcgtgatcggcgggccgctctccggctggatcatgggccatttcgacatgcgccacgggctgcacggctggcagtggctgtttttgctggagggcattcccagcgtgctgttgggcgtgctgaccttctggctgttgcctaacacttatcagcaggctaaatggctaacgcccgaggaaaaacagcgcatcgccgacgatttggcgcgtgacgacgccgaggccgatcacggcaagcacagcttccgcgacggcttcttcaacctgaaggtgtggatgctcggcggcatcgacttcgccattctgctcagcgcctacgccatgggcttttggatgccgaccttcatcaaaaccgccggcgttaccgacatcaccaccatcggctacctgacggcgatccccagcgtcgccgccctgctcggcatgttgctgatcggcagcagttccgaccgactgcgcgaacggcgctggcatatcatcgtgccgtttatcatcggcgcgctggcaatggccggcagcaccttcttcacccacaatgcgctggccacggtgctgctgttctccatcgcccaggcggcgatcatcggcgcggtgccagtattcttcagcctgccggccaccttcctgcgcggcacggcggcggcgaccggcttcgcgctggcctgttcgctggccaacatcgccgggctggtgagcaattcgctgatggggctggcgctggatctgaccggcaagagcggcggcgcgctctgggccttcgccggctgcctgctgctcagctcgctgctggtggtggccctgccggccaaggtggtgaaccgctga

SEQ ID NO: 427106 - DNA, 1059 bp, Serratia marcescens
atgacagacagccaggtgtttgaacaacaaagcctcgataatctgctgagctattggcggcgccatcgccgcctgccgggcgcgcgctatccggccgggccgaccgacagcctgtgcgacgtgccgggcgtcagcgtcgggcatcacactttggccgacggtgaatgccagaccggcgtcaccgccatcgtgccgccgggcgatctgttcaaccagccgctgccgtgcggcagcgcggtgctcaacggcttcgccaagccgctgggattggtgcaattgaatgagctgggcgagttgcagacgcctattctgctgagcaacaccttcgccgtcggcacgctgttcaacgccatggtgcggcgcagctgcctgcgctacccgcagatcggccgcggcagcgccaccatcaacccgctggtactggagtgcaacgacggctacctcaacgatattcaggcgatggcagtgcgtgaggagcacgtcttcagcgcgctggataaccattccacccgctttgcgcgcggcagcgtcggcgccgggcgcggcatgagcagcttcggcctgaagggcggcatcggcaccgcctcgcgctattgcccggggttaggcaccatgctcggcgtgctggtgctggccaacttcggcaccctcgactcgctgacgctgagcggcgtgcgcgttggcccggcgctgggcaagctgttggcggatccgccgccgcaggtggacgccggctcggtcattatcatcatcgcctgcgatcgcgcgctggacagtcgccagctgaaccgcatcgcccgcagagcgggcgcgggcctggggcgggtgggcagccattggggacacggctccggcgatatcgcgctggcgttttccacccggttgctgggggccacgctgccggacgaaaggctggagccgctgtttgcggcggcggcggacgccaccgaatacgcggtgctggatgcgttgctgagcgccgaaggcgtcagcggcttccagcagcatgcgcgcgcagcgctgggcccgctgctcgaccggctggcggcggcaaattaa

SEQ ID NO: 427107 - DNA, 492 bp, Serratia marcescens
atgtcggaacacaagaaatttcgtttgtatcggccgctgcaagggttaagccatacctttggcgatcaatggtttgccctgaaagccgaagcgttcgcccgcttcttcggcacgccgacttttttggtgggacaaacggtggtggtcggcgtgtggatctatctcaacctcgccggcttcaccaaatttgacccttaccccttcattctgctgaatctggcgttcagcctgcaggccgcctacgccgcgccattgatcctgctggcgcaaactcgccaggccgagcgcgaccaggcgcatgccttggccgatgcccggcaccgggaagatctggatgaggcgatggcgcagcggcaaaccctggccgaacggcagtccgaacagctgctcgagctgctgaagcaaaatacggaattaaccgccctgacgaagcagatggccgagcgcattgaaaatctcacccttcagctcgccaaccgcgagcgcctgtag

SEQ ID NO: 427108 - DNA, 459 bp, Serratia marcescens
atgattcaattaaccgtaaacgagcagccgctgaccttcgagggcgatccgcacatgccgctgctgtggtttttgcgtgacgaagccggcctgaccggcaccaagttcggctgcggcatcgccatgtgcggcgcctgtaccgtgcatctggacggtgtgccggtgcgatcgtgcatgacgccggtctccgccaccgtcggcaaaaaaatcaccaccatcgaagccgtgggcgccacgccggaaggcaaggcggtgcaggaagcctggcttgatctggatgtggtgcagtgcggctactgccagtccggccagatcatgagcgccagcgcgctgctggcgcaaagcaaggatccgagcgatgcggacatcgacgcggcgatgggcggcaacgtctgccgctgcgccacctatgtgcgcattcgcgccgccatccaccaggccgccaaggcgttgggttag

SEQ ID NO: 427109 - DNA, 912 bp, Serratia marcescens
atggatccttccctgcttccctcactggcgtggttcgcgcatatcgcgcagcaccgcagcttcaccaaagcggcggcccaaatgggcgtttcccgcgccgcgctgtcgcaaaatctaaaggcgctggaaaaacagctgaatctcaagctgctctaccgcaccacccgcgatatgtcgctcacggaggaagggcaacgcctgctcgaggctctggcgcccgccctcaacgcgatcgaacacgccgtcagcacgctggaagagagccgccacgagccggcggggctgctgcggataaacgcctcgcgcacggccgccaagcactttatcgaaccgcatattggcgaatttctggcgcgctatcccagactgaagcttgagctggtgatggacgacggcatggccagcatcatttccgaaggctacgacgccggcgtgcggctgggtgaaagcctcgccgagcatatggtggcgatccccatcaccccgcaggtggaactggtggtggtggccacgccgcaatacctcagccgttacggcacgcccgccacgccggcggatctggtcaaccacaactgcatcgcttttcgccacgcaaccagcggcgccatttatcaatgggagttttccacccttgagcggcacgcgcgccataccttttccgtcgagccgcaaggcagcatgattaccaacgacgacgacggcatgatccgcgccgcgttgcagcatgtcggcattattcagcactttgatttcgccgtgaaggcgctggtggaacgcggtgaactggtgcggatcctgcagccctggtcgcagccgtttcccggcttctacctgtatatcccctcccgtgagcacatgtcttccaaggtcagggcgctgctggactttctggtcgagaagcgcgcaggctaa

SEQ ID NO: 427110 - DNA, 924 bp, Serratia marcescens
atgatgaaaacggtcaaaatcaagcgtcagtattgggacatcgcggcggatatccatttcccaccggatttcgacgagcggaaaaagtacccgacgatcatcagcgcccacccgatcggcagctgcaaagagcagacctcgggcaatgtctatggcgcggcgctggcgaaagccggctttgtggtcatcgcattcgacgccagcttccagggtgagagcggtggcgaaccgcgctttatcgaagatcccgctcagcgcgtggaagattttcgcgtcgtgaccgattatctggtgacgctggactacgttgacgaccagcgtatcggcgtgctcggtatctgcggcggcggcggttacgccatcaacgctacgatgacggagcggcgcatcaaagcggtggcgaccatcaccggcgccaactatggccgggtgatgcgcgagggcgtgttggccaatggcgatccagtggcttttctggaggatattgcccggcagcgcaccgcagaggcgcgcggcgcggcgttgcgcgtggacgtaggcctgtacccgagcgttgaggcggcgcaacaagacggtgccgatatcgatctgcgcgaggcgacggaatactaccggacggcgcgcggcgagaagccgaacggcgtaaacaagacgctgtattcccataacgcggtggccgtgggttgggatgcgttccacctggcggaagtgctgctgacccagccgctgttggtgatcgtcggcagcaaacccggcctgttcggcgcgttgcgcgacggctatgagatcgtgcgccgcgccaaatcgcagcacaaagagctggtggtggtggaaggctggtcgcattacgatctctacgacaaaccggagccggtagcccaggcgctggagaagctggtgccgttttttaacgccacgctgtaa

SEQ ID NO: 427111 - DNA, 471 bp, Serratia marcescens
atgaataaactagagttttggggttgggaaaagaaaccaaggacaatgctcagatttattaaaccgggtgatgtattctgctttaagctaacagatgaaaagtatggttttgggcggattatatctaaggttagcattggccactcggcagaaatatttgatgtattctctaaagagccgaaagtgccagatggtctgttctcaaatccacaagtgggatcacacccaataattttggaggcatatagtctgtttgataagaaaatctctggtgagtggagaattataggtcatcaggaagggcaggttaaaaaattcgaaaatacctattttgtgtatggggctttaggaaatagaaagaaaatagatatgtatgggaatagtgaaaatgtttctgataaagactcggaacattatccgccatatatgcctagtaatgacatgcacgtgcgaaaattgctagccatttaa

SEQ ID NO: 427112 - DNA, 663 bp, Serratia marcescens
atggcaggccgcctgctgcaacaccgcgagcccaatcagggcaaaccgggcgcgcggctggtgtacgatctggcggataacctgctgggcgaacgcagcccgcagagcgacatcgacgcgcacctgccgctggcgccgatcgccgacaaccggctccgcggcccgcagggcgaattcgaggcgcagtaccattacgacgcgctgggccgccgcagccgcaaggcggtgcgctacaagggcaaaaccgaacagacgacccgtttcctgtggcagggctaccggttgctgcagcagcagcgcgacgacggcagccgccgcagctggagctacgatccggccagcccgtggagcccactggcggcgctggagcaggcgggcgacagccgctcggcagatatttactggtatcacaccgatctgaacagcgcgccgctggaagtgaccgacgcggcgggcaacctgtgctggtccgggcaatacgacaccttcggcaagctgcagggccagacggtggccggcgcagcgcgcagcggcagggcgcgcaatatcagcagccgctgcgctacgccgggcaatatcaggacgacgaaagcggcctgcactacaacctgttccgctactacgaacccgaggtggggagtttcaccacgcaggatccgatag

SEQ ID NO: 427113 - DNA, 438 bp, Serratia marcescens
atgacacttgatgaagaaattagaaataaaataggtgggaaatctattttttttaatatcgtagataattgggaagcgattgccgatgagttgtcagattctttcgaatggactggctctaagataagttggtctaaaacaaaagaacataagtttattaagttacatggagactatcagtcatggttatctcaggtgtcttcttttttagaggataatgcagtaaatagagaaattgccatgagcgatgagatttactacatcaatgattcttctctggatttctcagttaagatggactctggtaaacttcatgagtttcttgattttgccttaaaaaatatacctcagcatcattatttctttgaaataaataaaaagtggtgccttgtaattagttctgaaggttatgccgattttggtatttctggtaggtaa

SEQ ID NO: 427114 - DNA, 1926 bp, Serratia marcescens
atggccctgttaaaagaaaaaattcgcgaccactctgcggaagagaggctgtttatccgccgggccggcgtagcgctggcactggtggtggtctgtttcggcgtgctgatcgtcaatctctaccggctgcaaatccgccagcacggcttttaccagacgcgttccaaccagaacgacatcaagatgctgccgatcgcccccagccgcgggctgatcttcgatcgcaacggcattccgctggtgcgaaacgtgacactgtatcgtatcgaggtcacgcccagcaaaatcagcgacatggcggcgctgctgcaggcgctgacgccgatcgtcgacttgacgccggaggacatcagcgcgtttcgcgacgacatgcaccacaacagccgctacaaaccggtgacgctcaaagccgggctgagcgacaccgaggtggcgcgctttgccgtcaatcaataccgtttcgacggggtgacgatcgatacctatcaacagcgtgaatatccttacggcgcccagctggcgcacgtgctgggctatgtgtcgaagatcaacgacaacgatctcaaacgcctggacaaggccgggctgagcgagaactatgccgccgaccgcaacattggcaaacagggcatcgaggcctattacgagtccgaactgcacggcaccaccggctatcaggaggtggaggtggataaccacgggcgggtgatccgcctgctgaaggagcagccgccgaaggccggcaagaacatctacctgacgctggatttaccgctgcagcagtacatcgaatcggtgctgaaggggcagcgcgccgcggtggtggtggaagatccacgggacggcggcatcctggcgatggtctccagccccagctacgatcccaatcctttcgtcaaaggcatcggctatcaggcctataagaccttgctgaccaacccggatttgccgctgatcaatcgcgtcactcagggcttgtacccgccagcgtcgacggtgaagccctacatggccgtttcggcgctgttcgccggggtgatcacacccaccaccacctttttcggcgcgccgacctggacgctgcccggcaccgaacgccgctaccgcgactggctgaaaaccggccacggcatgctcaacgtcaccaaagcgatcgaggaatccgccgacaccttcttttatcaggtggcgtatgagatgggtatcgaccgtatccaccactggctgagccagttcggctacggccagtccaccggcatcgatctgaacgaagagtaccgcggcgtgctgccgagccgcgactggaagctgaaggtgcacaaaaagggctggtatcagggggatacggtttcggtgggcatcggccaggggtattgggtggcgacgccggtccagatggtaaaagcgctgaccacgctgatcaacaacggccaggtgaaaacgccgcacctgctgtattcgttgcagcagggcaaccgggtgacgcgctaccagccgccggcgcaagcggcgcagatcggcgatccccactcgccttactggggcatcgtgcgtaacggcatgtacggcatggccaacttgccgaacggcaccggttacaagctgttccacaccgcgccgtatcagatcgccgccaaatccggcacctcgcaggtgttcagcctgaagcaaaaccagacctacaacgccaaaatgatcccggtgcggctgcgcgatcacatcttctatacgctgttcgcgccttacaaaaccccccgggtggcgatggcgctgatcctggaaaacggcggcggcgacggcgtggtggcggggccgaccgcccgcgcgatcctcgaccatatttttgacccggccagcgcgccgcagcccggcgatccggcgcaaagtaaaccgcagttaaacgacagtgcggatgtgcagcggtga

SEQ ID NO: 427115 - DNA, 414 bp, Serratia marcescens
atgctgagcgcacaaacgctgcatgttgtcatcaaccgcccttgtgacgaggtgtatgcctttctcagccagcccgaaaacttccccttgtgggccaaagggttagccaacagcttgcggcgagaagatgaagactgggtggcggacaccccgcaggggcggatccgcattcgcttcagcacgccgaatgccttcggcgtgctggatcattgggtgacgctgccggacggcggtgtggtctacgtgccgctgcgcgcactcgccaaccggcgcggcaccgaggtgatcttcaccctgttccgccagccggatatggacgatgcgctgttcgcccgcgacgccgggctggtgaacgccgatctgcaggcgctgaagcgcctgctggaatctcactcgccctcggttaccccttga

SEQ ID NO: 427116 - DNA, 1623 bp, Serratia marcescens
atgaacataaaactgacactgggccgcagggtaaaatctgcggcggcgctgccgcgcgcgtttggcttcggcaagagcatgggcttattaagcggcgtaatttgcgttatcgcgctattttctctgttgcaactgttttccaccgtatttatttccaatattctgcgcgacgccaaggttaacctggtggcgggcgacggcttgcatcgccagcaggcgacgatggatcgcgccaggctgtcgctgctgacggccagcgacagtctgaaccgtgcgggcatctattacctgcaggacaaagccaccggctccgacggcagttggcacagcctgctggatgagtcgttggcggcgctgcaggcttcagagcaggccttcgcccagtacgagcgcttgagcgcggaggcgcccgaggcggcgggcgcgctgaaagacagctaccgcctgttttatgacggtctgaaagagcaggcgcaagggttgcagggcagcagcatcgatgcgtttttcgccgtgccgatccaggcatttcaggcggatttcaacgaaaagtatctcgcttaccagatgctgaacgagcggcgtggcgatgacgtcaacgtgcggcaattggcggcgctggagcaggccaagacctttgcgctcggcgcgctggccgcactggcgctgatcgccgtgggggtgtgggtcggcgtctctcgctgggtgatcgcaccgctgcggcgggcaatcgcacacctcaacgtgctggccgccggcgatctttcacggccgctgccgcctgagcgggcattcaaccgcgagatgcaccagctgcagaccagcattggccacatgcagggcggtctgcagcggctggtcagcgaggtgcgtgatgcggcgagcgggatcctgaacggcgtcgggcggctggcggacggcaatcgacagttgacggcgcagtcggcgaagcagaacggtgaattgcagttggcgaccgagcacgtgcagcagctggcggctcgggtggaggaaaacggccaatatgcgcagcaggccagccaacgaaccgaacaggcccggcagtgcgccggcgccggtgagcagatgatggaaaccgtcaatgtttcgatgcaagggatcgtcaaccaatcggccgaaatgcgcggcattgtcgcgctgatcgacagcgtggcgttccagaccaatattttggcgctgaatgcggcaatcgaggcggcgcacgccggcgttcatggccgcggctttgccatcgtggccaaagaggtggggctgctggcgcaaaaaagcagccattcgacgcgcgatattcagcagttgatcaaccgttcgctgcggcaaatcgatcaaggttcgcaggcggtggatctgctgacgggcaacctgcgccagattatcgatctggtgaacaaatgcagtgcgctgatgggggacatttccctggcgtcgctcaatcagggtgagagcattcaggacgtgacggcgcgcatctcggcgctgaatcaggtggcgcggcaaaccggcacggtggtgaacgcggtgaccgaggcttcgcagctgttgcagggcgagtcggaacggttagaaaaagcgatggcgcgtttcaggttgccggcgcaataa

SEQ ID NO: 427117 - DNA, 540 bp, Serratia marcescens
atgaaatgctcggtttacatcgccaccagcgtggacggtttcattgccggagcggacggcgacatcgactggctgctgcggcccgagtacgcggtttcattgctcaacgggctaagctatgaggcgtttatcgccgacatcgacgcgctggtgatggggcgccatacctatgagaaagtccgcgcctttcccgagtggccctatggcgaactgccggtggtggtgctgtcgacgcagccgccagcacaacaagataccgggcacgttcgctggatgactggcgaaccggcggccatcgtggcgcagttggccgatcaaggctgccgtcacctgtatatcgacggcggccagaccgtccagcgcttcctgcaggccgggttgatcgacgagctgactatcacgcgcgtgccgctgctgttgggcggcggcattcccttgttcggcgccgatggcccggaacaacggctgcgcctgctcgccgtcacccaatcggacaacggtttcgtgcaagaacgctacgcggttcagcgcgcgtcgtaa

SEQ ID NO: 427118 - DNA, 195 bp, Serratia marcescens
atggaaaagaaaacggcgcggctaacggtgctgattgacccggacaagaaaaaagccctggaagacctgtgcctgcagcaggacgtcacgccttcccaggtagtgcgccagctgatccgcgattacctgcacaagcatcaggtggactatcccagccagccgactcacgccaatccgcgcgtcgaaagcaactga

SEQ ID NO: 427119 - DNA, 1017 bp, Serratia marcescens
atgaaagctgccgtagtgacgaaaaaccataccgtagacattcaggataaagtgctgcgcccgctgaagcacggcgaggcggcgttgaaaatggagtgttgcggggtgtgccacaccgatttgcacgtgaaaaacggcgatttcggcgaggtgccgggcattacgttggggcatgaaggtatcggcgtggtctccgccgtcggtgagggcgtcacctcgttaaaagtgggtgaccgcgccagcgtcgcctggttttaccaagggtgcggccattgcgaatactgcgtcagcggcaacgaaaccttgtgccgctcggtgaaaaacgccggctacagcgtcgacggtggcatggcggaagagtgcatcgtggtggcggactacgcggtgaaagtgccggacgggctcgattctttcgccgccagcagcatcacctgcgccggcgtcaccacctacaaggcggtgaagatttccgatatcaagccggggcagtggatcgccatctacggcttgggcgggctgggcaacctggcgctgcaatatgccaagaacgtgtttaacgccaaggtgatcgccatcgacgttaacgacggccagctggagttcgccaaacagatcggcgccgatctgaccatcaactccaaaacgcaaaacgcggaggagatcattcaacagcaaaccggcggcgctcacgcggcggtggtgacggcggtggcgaaagcggccttcaactcggcggtgaatgcggtgcgcgccggcggtaaagtggtggccgtggggctgccgccggagagcatggatctaagtattccgcgtctggtgctggacggcatacaggtggtgggttcgctggtgggcacgcgcgaagatctgaaagaagcgttccagttcgccgccgaaggaaaagtgacgccgaaagtgaccaaacggccgctgggcgatatcaacgctatcttcgacgagatgaaggcgggcaccattcgcggtcgcatggtgatcgatctcggtatggcgaaataa

SEQ ID NO: 427120 - DNA, 999 bp, Serratia marcescens
atgaagaaacacagttcaactatcaattatgatccctaccgttacaacggtggcatagcgcctgaagcgggtctggtctggagcggtgaaagttggggatggccgactaccggcatcagcattggtggtgcggaagaaactctggttgtctggccaacaggtgacacatcactttccgaagaaaccaaagatctgttggataacgacatttgcttggtctgtggtaagaaaaactgcccctatatcaaaacggaaaagtcataccaattgttgcgcgatgcgataagggccggtgatatgaagactgcaaaaaaaatccacatgaccaaattcgcgcaatttagcggtatgaatcgagcaaatttcgccgatgcgttgaaaaaaaagcgagaagcccaagagaaaagagacaaagagtttttgttatctgcatcggctatcgttgccgactcagccaaagaaatcgctccgcatctcggcaagcgctatcaagacttcgcaaatgagatcgcgagcgatattaaaaacttccagggcaagagaatacgcacccttgatgacgcaatgaaatcactagaaaaagtgctggctaatcccaacatgaaggttaaacctgcagataaagaagcgttgctcaatgcctggcgaaatattaatgccaatgacatggcaagcaagctgagtaacgttggcaagtttttcaaagtggcagatgcagcaatgaaagtagagaaaattcgggagaaaagcctggtaggttatgccacgggcgactggaagcccctgctgcttgaagttgaatccatggccattagtggactggcttctggtgtcacgttagggatattggccacgactctctctttattttctttgtcaggattagtgctgacagcgctcacctttgccggcatcatcgcgattagcctgttaagttcgctcatcgacgacaagttggtggataaacttaatcgcgagctcattccttcggcttattaa

SEQ ID NO: 427121 - DNA, 1116 bp, Serratia marcescens
atggacgtttcctcggaaatgatccacagcctgctgccgctgtttatggcgacgacgctcggcgtcagcgtgattgtcatcgggctgatcgaagggctggcggaggcgacggcattgatcgtcaaggtgttctccggggtgctcagcggcaagcgtaaagggctggcgctgctgggctacgggctgggcgccatcagcaaaccgttttttgccgtcgcgtcgtcgtccggcatggtgatgagcgcgcgcctgttggatcgcgtgggcaaaggcatccgcggcgcgccgcgcgacgccctggtggccgatttgacgccgccggaaattcgcggcgcggcctttgggctgcgccagtcgctggataccgtcggcgcctttttagggccactgctggccgtcggcctgatgctgctgtggcacaacgattttcgcgccatcttttgggtggcggcgatcccggcggcgctggcgatcgcgctgctgttcttcggcctgaaagagccgaccgccgcgataaccgacaagcgaacccacccgattacccgcgccaatctgcggctgctggggcgcggctattggtgggtggtgggcatcggcgccgtcttcacgttggcgcgcttcagcgaggcgtttctggtgctgaaggcgcagcagggcggcacgccgctggcgttgatcccgctggtgatggtcgccatgaacctggtctacgcctgctcggcctatccgttcggtaaactttccgaccgtatgagccataaaggaatgttaaaagccggtttgctggtgctgatcgccgccgatgtggtgctggcgttgagcgatcattgggcgggcgtgctgtttggcgtggcgctgtggggcgtgcacatgggcatgacgcaggggctgttggcggcgatggtggcgcataccgcgccggcgcatctgcgcggcaccgcgttcggcatgttcaacctggtcagcggcgtggcgctgctgctggcgagtctcggggccggcatgctgtgggagctggccggttccgcctccaccttttacgccggcgcgatcgtctgcgtggtgacgcttatcggcatgcagttggcgccgttcgataaccggcagggcgtttaa

SEQ ID NO: 427122 - DNA, 2094 bp, Serratia marcescens
atgaccctgttgcccaagcagagcaataacaaaaatccgattgatctctatggcgaaatcgtagacgacttgcccggcctgatttgcttcggcaaccgccttggcggttacttcaataaacagtggcgcgactataccggcgctatcgccggtgaacacggcgccgccgactggctcgatgccctgcaccccgacgatcgcgagcggctggccgcgcagtggcgccaggcgatcgtggccctctcctcgttcgccggcgaggcccgcctgtgcgatcgcagcggcacctaccgttggtttatgctggcgtttaacgcccggcaggacggcatggcgctggagcccagctggtacctgacggcgaccgacattcatccgcaaatgctgcagcgccagcaaaacgttcaggcgctgtctatccagcaagacatgctggacgccagcgtggactgcattaaagtgatcaatcacgacggcacgctgcgccacatgaaccgctccggcagcctggcgctcggccttgatccggggcaaaaagagtttggcatgccctggctggggctgctgtcgcccgagatccggcgccgcggccgcaaggcgctgcgcagcgtcagagccggaaaaaatgcgcgcttcacggggttgagcgtgacgccgcagggcaaaaaacagcactgggacaacattctcacgccggtcagcgacgaacacggcaccgtggccgagatcttgtgcgtctcacgcgacgtgacttcgcaacgtgtgatggaacaacgcctgttgctcgccagcgaatatgacgaattgaccggcctgcccaaccggcgcctgttcaagaagaaactgaagcaagagatgaagcgggccctgcacggcaacaagtcgcttgggctgatgctgctggatcttgaccacttcaagctggtgaatgacacgctgggccacgcggcgggcgaccatctgctgcgggttttgggcaaaaggctcagcgcctgcatgaatacgcactcgttcgtctctcgcctcggcggcgatgagttcgccgtcgtgatcagcgacgtcgaaaacgagcaggatattttccgcatcgccaacaagtttctgctgcagctggagacgccgatcacccacggcggcaagacgctgcattgcggcatgagcatcggcggcgccatctaccccaaagacgcacgcgacgcttcggaactgatgaaatgcgccgacactgcgctgtatgagctgaaagacggcggccgcggcggcgtctatatgttcgaccgcaagatgatggacaaggcgcgcgcccgcgccagccagctcaactacgcgcgccagatcgtgcgcgacaactgcatccgccccagctaccaaccgaaggtcagcctgaccgacggcagcatcgtcggctttgaagccttactgcgctggcactgcccgatcaacggcgtgcagctgccggcgacggtgagcgaggcgttcaacgactacgagctggcgaccaagatcagcgaagccatgcagctgaaggtcttcgccgatatcgcccgctggcgcgcggccggcgtggcggtgcagcccatctcgctgaacgtgtcgccgatcgagtttttacgcgacaactacgccgaaactttcctgcagcgcctgctgaagttccacattccccaccacctgatcgaactggaggtgaccgaacacgcgttcaacaagcacggttcgaagtacgtgctgcgcgcgttgcaaatgctcaaggagatgggcatccgcatcgccctggacgatttcggcaccggtcactcctcgttcagccatatcatggattatccgctggactgcattaagctggactgcgacttcgttcaacgtatgaataccgaaccggcgatcctggcgatcgtggaaagcattggcattctcggtcaaaagctgtcgatcgatatcatcgccgagggggtggaaaccgagcagcagcggcaaacgctgtgcgaagccggtttccacatcggccaaggttttctgttcagccgggcggtggaatctcagcgggtacccgagctgctgcaggcagcaccgcagcctgtcgacggccgttaa

SEQ ID NO: 427123 - DNA, 3138 bp, Serratia marcescens
atgaaacttaataagaaattgaagttagcgtattgcgtttttctggggtgttatggcttatccattcattcttctcttgccgcttatcaggatcccggtcggttgggcgcgcctgacagctggaaaaccgctgagtttaatcgccaatgggggcttgaggctatttccgccgagtttgcctatgccagaggctatactggaaaaggcgtcaccatcggcattatcgacaacgccattctttcccattctgaattcgccggcaaactgacgcgattggataacggcagttataatttctcgtacgataaacaagataatatgtctttcggcgatcacggcacccatgtagccggtattgccgcagcgaaaagagacggcggcggcatgcacggcgtggctttcgacgcggatattatcggtaccaaattgaatgactacggtaaccgcaacggccgtgaggagttgattcagagcgcggctcgcgtcatcaacaacagctgggggattgcaccggacattcgccgtgacgccaaaggcgatatcatctggttgccgaacggcaggccggactacgtggcattcgtaaaaagcgacgtgatcggcgagatgatgcgcaacaaggccagtgtggaatggggcagcgaacaaccggtgcctaccggcgtgcacagcgcgatgccaacgctgctgcgggcggcccggcacggtaagctgatcgtcttctcggcaggcaattacaacaactacaatattcccgaagcgcaaaaatcgctgccttacgccttcccggacgtcttgaacaattacctgatcgtgaccaacctgagcgacgaaaacacgttaagcgtctcttcgaccagctgcgggcaaacggccagttattgcgtgtccgcaccgggctccgatatttacagcaccgtcggccggctggaatccaataccggtggcgccgttaatcgcgaagcttataataagggtgagctttcgctgaatcccggctacggcaataaatccggcacctcaatggctgcgccgcacgttaccggcgttgctgcggtattgatgcagcgcttcccttatatgagcgccgatcaaatatccgcggtaattaaaaccaccgccaccgatttgggtgtcgccggtattgataatctgttcggctgggggcgtgtcaatttgcgcgatgcgatcaacggcccgaaaatgtttattacccaagaggatatcccacaggaatattatgtgccgggctcctacagtgaaaaacagttcgtggtgaatatccccgggctggggaatatcgtcgaagcgggcaccccggttgagcggcgctgcacgtcgagcgaatgcgacttcgatgcgtggagtaacgacatcagcgggcacggcggcttgaccaaaacgggcgccgggacgctggcgttgttgggtaataacacctatcgcggtgatacctgggtgaaacagggcacgctggcgatcaatgggtctgtggcgtccaacgtctatatcgaaaatagcggcacgttggccggtgacggcaccgtgagtgctttccgggccgttcggggcggcagcgttgcgccgggcaacggcatcggcacgctgcacgtgttgcacgacgccatttttgatcgcggttcgcagtataacgtggaagtggcggacaatggccgcagcgacaagatcgacgcacgacgcgcgtttctcaacggcggcagcgtgaacgtcagcctggagcacagcaaaaacctgctgtcgcagaatgaggcgcaaagtttgttgggcaacaaatacaccatcctgacgacgacggacggcgtcaacggccggttcgaaaacgccaacccagcgtatccgtttgttaatgtgacgctggattatcagggaaatgacgtcggccttggcatcacccgcaccgccgcccgttttgacactctggccagcactgagaacgagaaagcggtggcccgcgcggtggaaacgctcaacgcgacggaaccggtcacggaaacggccaaacgcagcgtggcggcgcctagcgctgaggcgctgagcacactgcaaggtgatgaaggcaaagcgcaagccgtgaccgaagaagcgggcgtcgtcaccggccatccggtgtatgaaagcttcctcggcttcacgtcggccagagagctgcaacaggcgacccgccaactgtccggccaggtccatgcggatatggcttccgcccagattaacgaaagccgttacctacgcgatgccgccaccgagcgcttgcgccaggcggaaggccgtcgtatcgcttccgatatcaaagcggatgacaacggcgcctgggcgaaactgctgggcaactgggggcatgcttccggcaatgacaatgccactggttatcagacgtccacctatggcgtgctgctgggtctggatggcgagctgtttgacgacggccggcttggggtgatgaccgggtatacccgcacctcgctggacggcggttatcagtcagatgctcacagcgacaactaccatctggggctgtacggcgacaagcgcttcggtgcgttggcgctgcgggcggggggcacgtatacctggcatcgtatcgacacctcgcgctcggtgaactacggcgcgcagtcggatcgcgagaaggccagctataacgcgcgcaccggccagctgtttatcgaaagcggttacgactggacgaacgacacggtcaatcttgagccattcgccaacctggcgtacacccactatcgtaatgaggggatcaatgagcacggcggtgcggcggcgctgcgcggcgacaagcaaagtcaatcagccaccgcttcgacgctggggctgcgcgcagatacacagtggcaggccgatagcgtggcgatcgcgctgcgcggagaattgggctggcagcatcagtacggcaagttggagcgcaaaacgcagctgatgttcaaacgtaccgatgcggcgttcgacgtgaacagcgtgccggtttcccgcgatggcgcggtgctgaaggcgggcgtcgatgttgcggtcaacaaaaacgccgtcttgtccctcggctacggcgggctgctgtcgcctaaccatcaggacaacagcgtcaacgccggcctgacctggcgcttctga

SEQ ID NO: 427124 - DNA, 2322 bp, Serratia marcescens
atggcactcgccggcgcctcctggcagctcgacaacggtttggccgtcaaggcgataagcgaccccaccgctaccggcaccgccgcgctggtgcgcattgaagcgggcagttttcaggcgcccaccgcctggccgggcctggcgcatctgctggagcatatgttgtttcgcggcagcgcgaacttcagcgcgcaagatagtctgatgggctgggtaccgtcggtgggcggccgcctgaatgccaccactcaggcgacgcaaaccgcgtttttcttcgaggtgggcgccgatcatttggcgcaggggctggcgcggctgagcgatatgctcgccgccccacagctggcggcagaggcgatcgcacaggaggttgaagtcatcgacgccgaatatcgcctgctgcgcgccgaggtggaaacccgctgcgaagccgcacagcggcagatgttcgccggcctggacgccatgcaccgctttcatatcggcagccgcgccgctttcggcaacgacatttccgccctgcagcaggcgctgcggcagtttcaccggcgctattttcgcgcgccaaacctgacgctgtggctgcaaggcccacaatcgctggcgcagctgcatgttctggcccagcgttacggcagccgcttgccatcgggcagcgccataccgcacaaagcctcaccgccgctgaccgctgcgaaagattacactctgtctcttcccggcacgccgcagctgagactggtgtttgccctgtcgcgctcccatgcgcgcggttggctgcggcggctggagcgcctgctgctggacgaagcccccggcgggctgctggcgcggctgcgcgctcaggcgtggtgcgatgcggttcggcttgattattcgcgctgcagcgagaacaacgcgctgctgagttttatctttaccgtcaatcacggttcagccgctgaagctgcccacatcgaaagcgcgttgttggcgtggctgcaggcgctgcaggtgctggcaccggctcagcttgcgcattacgaacggctggccaatcgcgatctccaccgtttggcgccgctcgatcaactacgcgccagagcgtttgggttgccgccggcggagccgaacgacgattggccacggcatattgcggcgctgattagcgcgccgcgccgccgcctggccgtgcggcccgatggcggcggcgaaacccgtgaaattcaagggctgccgctggcgcttggccccttcgtcggcgccgcgctgacgcccgcagcggaatcttttcgctttttcaccgcctcggcggcgctgccgagtccgaccttgccttctggcctggcgccgctgcggcatctgctccctggcgaagcgcagccggtgctgttgctgcggccggcgccgtccagccccttcagcgatgaacaggcctgcggcatacaggcggcgctgcgcgccggggcggccgaactggcgcatcaggagggacatttaagcttcgaacgccaccagggcgtgtggctgctgcagttggcgggcagccactcgctgatctgccatgggctgagcgtagtaaaccgcgcgctggcggtgttgtcgccggccgtgctcaacgaggcggcgagaaacctgcgccatacgcagcggaaagcgcaaaacgatatcgccattcgccgtctgttagcccaattgccggcggcgctcagcgcgccaaccgcagcggcgcaatggcatgccaccttgatcggcggcgatggcgagttaaaacggcagctgtcgcacctgctgtacggtttcccctattccgtggccgcggagccgccgctgccgacacatcaccatcatcgccccgtcacgctgacggaaagcggcgccgaaagcgccttactgcagttttacccgctgccgaacggcgaagtcgaaggccgttgggcgctgcgcgtgctggctcagctttacgccccgcgttattttcagcggttgcgcgtggatcgcaacgtgggctatgtggtgcaatgcgctttccaccgctgtgccgatgccgaaggcctgctgtttgcgctgcaatcccccacgttcaacgttgaacagctgcggcagttaaccgacgaattcttactgcagatgcgccatgagctggcacacgttggcactggcgagctggagcaaacgcaacaagcgctgcggcaaagcttgcagcgcctcagcgccgcgccgctgcagcgcgcgcgggaaatcgcactggagaatcgccccgcagtggcgcgggtggctacaatgacggcggtgcagctgcgaagctggcagcaacggattttccggatcgagagcgtttaa

SEQ ID NO: 427125 - DNA, 1137 bp, Serratia marcescens
gtgactgaagcacgcgcgccggcggtgaacccgccgctctggctgctggcggagctgacctaccgctgcccgctgcagtgcccctattgctccaacccgctcgattttgccgcgcaggaaaaagagctgaccaccgcgcagtggattgaggtgtttcgccaggcgcgggcgatgggcagcgtgcagctcggtttttccggcggcgagccgctggtgcgtaaagacctgcccgagctgatcgccgccgcgcgcgatctcggtttctacaccaacctgatcacttccggcatcggcctgacagagaagaagctgcagaccttcgccgatgccgggctggaccatatccagatcagttttcaggccagcgacgaaacgctgaacgccgcgctggcgggctccgccaaggcgtttcagcagaagctggccatggccagggcggtcaaggcgctcggctatccgatggtgctcaacttcgtgttgcatcgccacaatatcggccagatcgatcgcattatcgaactggcgatccagctggacgccgacgacgtcgagctggcgacctgccagttctacggctgggcacacctcaaccgcgagggcctgttgccgacccgcgagcagatcgccgacgcggaagcggtggtaaaacgctaccgcgaacgcatggccgccgacggcaagctggccaacctgctgttcgtcacgccggactactacgaggatcgccccaaaggctgcatgggcggctggggtgcgatcttcatgagcgtaacgccggaaggcatggcgttaccctgtcatagcgcccgtcagttgccaatcgccttcccgtcggtgctggagcacgatctgcagcatatctggtaccactcgttcggttttaaccgctatcgcggctatgactggatgccggagccctgccgttcctgctcggagaaagagaaagactacggtggctgccgctgccaggcgttcatgctgaccggcaacgccgacaacgccgacccggtatgcggcaaatcgccgcaccacggcaccattctggcggcgcgggaagcggcgaatcgttcgcagatcggtatcgatcagctgcgttttcgcaatcaaaccaactcccgtctgattttcaagggttga

SEQ ID NO: 427126 - DNA, 1539 bp, Serratia marcescens
atgaatgctctaattcgggtgttattttacacctttttattcatattcagcgtcccggttaccctcgccgggcaactgatattaaagaacacgtcatcctcgcccgtcacgtgcacggtagacggttggactaaaacgtctggtagcagctttgactggtatattaccgtgccggcggggcaatcattttatgtggggcagaataccagcagaccgaagtcgccggtgattaattgggcaaactgcaatcaactgcagacccggcaaatgactatcacacccagcggccccaatcagacgctggtgctgaacgggttacaaactcaggtattgaacgtttcgctttatccctatttgcctacgctaccgacggacaatttcgaaaacctggttgcctacgtggtgcagacctatcaggcgcagcatccgcaagtgctgctgaatgcggttcttaatcagcaggtcaatatttacagctttgtcgatctgcctcagttgctcggtcaggacgggtttgacgtcatggaactggacgttctttatttgggatttctggcggagcagcgtttgattaaccctgcgcagatcgccggagaaacgccctgggccgtggcgttggccggtgctacgtatcaggggcagttgtggggtatccccagctggttatgcatgaatttcatctatgcgtttgactcggggataaaacagcaaaacggcctagcgcagatgctgaattatttaagttcgcagtcaaaagccgtcaccgaattggtgggcagttttaatggcagctgggccattccttccgactacattaatgcatatgttcaaacttatggttatggcgccctacaacaagcgatgcagatgccacccaacaatgccgttattcaacagttggtttccctgtccgatacctgtgctttcaacggggtaaataaatgcaccaacaatacctaccacaatagcgcaaatggcaacaccgaacaggtcttcgcttccgggcaagccagcaccgacatgggattctctgaacagtcattctttgtgaacctttattcctccacgcaaaaaccgctgtacgtcgttccgactccctggggggaacaccctcaaccgctgttgtttgaagatgcgtttgtctctaacgcggcaacctgtcccccggcgagccagtgcgcggcaaacgcccaggcctttactacgctgatgaccggcacggcgatgaagaattacatcgtgcagtcaaaggatctgccggcaggttccccgtggcgtaccttgctggttgccacgcaagctttctggcaacagccgagtattaccggcaatagctactatcagcagttggcgccaatattttcgactgcgcaagcgttccccaataattttactccacaaagtcaggtcgatatggccaatggtatctgcgccgctttaaaacaacagcaacccaattttgtgtgtaccagtagtaattccacccgcatgttggcgccggcccatggcagtgccatcaccgaacgaaccacccgttaa

SEQ ID NO: 427127 - DNA, 402 bp, Serratia marcescens
atgagtgtaggtcctgtatcaggtaatggcatcgccattaacttgccgataggcaaaacgctattctggacggcaaacgtccaggcatcctattcacaatatattgaggtgcgcgactccaacaataatgtcgttatgcaaagcagcggttcatccacgggtggacattcgcctactcaaataggacaaggctcgtttattaccgcaggcaacggggcttataccgtttttctcggttataacaatggccaggcctggtcgcaggtcatgtgggatgaaataacgctgaatataggcagtcaaatatattccagctgtttcaatttcattaccgaagacggtgcagaccaggacttcaatgatacctgcctgacactgacctggtttaacagcataggatga

SEQ ID NO: 427128 - DNA, 405 bp, Serratia marcescens
atggcgattggaccggtaagcggcggcggtattgccgtcaatattcccgtcgggaaagtggttttctggtcggctttggttcaaagctcggccaatcagttcattcaactgaaagacagcggtgctaatgttatcttcactacacagggcgcaagctcgagtggcggtacacccacgcaaattgggcagggtttctttcaggctgccgacccctccggcaattacactatctggattggcactaacggggggcaaaagtattcacaggtgatctgggcacaggacgtgattacccgtggcgccacggtctattttggtaagtatgtcttcgcgagcgaagactacaccgataatgatttcaatgactccttccttcaactgcaatggttccaatttgtcggctag

SEQ ID NO: 427129 - DNA, 1224 bp, Serratia marcescens
atgtttaccccactgacgctgcccaacggcagccgcctgaccaaccgtctggccaaggcggcgatggaagaaaatctggccgccccaggccaactgcccggcccggcgctgtggcgcttataccgctattgggccgaaggcggcgccggcttgatcatcaccggcaacgtgatgatcgacggccgcgccatgaccggccccggcggcgtggtgctggaacaagacacgctgctcgccccgttcgaaacctgggccaaggccgcgcgccagggcggcgcgcaggtgtggatacagcttaaccatccgggccggcaggtgatggcgaacatgggcggcaacgcatgggcgccctccgccatcccgctcgcgatgggcaagcacagcaagctgttcgcccagccgcaggcgatggatgaagcgcagatcgccgaggttatcgcgcgcttcgccgccagcgcgcacgctgccgaacgggccggttttaccggcgtggagatccacgcggcgcacggctatctgatttcccagtttctctcgccgctgaccaaccaacgcaacgatcgctggggcggcgagttggcgaaccgcgcccgcctgctgctggaggtggtgcgtgcggtgcgcgagcgcgtctcgccgggcttttgcgtggcggtcaaactcaactccgccgattttcagcgcggcggtttttcatcggacgatgcccgccaggtggtgctgatgctgaacgatctgccggtcgatctgatcgaactgtcgggcggcagctacgaaagcccggcgatgcaaggcgaaacggcggacggccgcaccctggcgcgagaagcctatttcctgtccttcgcccgcgatcttgccgcggtggcccgcatgccggtgatgaccaccggcggcatcgcccgtccttcggtggcacagcaggtgctggacagcggcgtcgcggttgccggcatcgccaccgccatggcggaagtacccgatctgccgcggcgctggcaaaccggcgaggctccccatgcgctgcccgccccggtcacctggcgcagcaaagcgatggcgtcgctcgcccgcatggcgttggtcaagcgccggatgcgagcgctgagtgacaatcggccgcgcagcgtgcgctattccccgctgttcacgctgctcgtcgatcagtggcgtacccgccgcatcctgcagcgttatcatgcatggttgagaacacacagctaa

SEQ ID NO: 427130 - DNA, 966 bp, Serratia marcescens
atgaatgaaatctcacgttttacctcttttccacgccagcccgatgccgtcgcgcgggaaatgcctctgtacgttttcggccataaaaatcccgacagcgacagcatctgcagcgcgctggtggtcgcggactggctcaatcacctcggcaaaccggccgtggctttccgcctaggcgagctgacgccggaaacccgctacatactggctgccgccggcgtacaagcacctgcgctgctgacagacgatctccgtgaccgcaaagtctggctggtcgactttaccgatatcgaacaaggcccggcctcattgcccgacagcgacgtggtcggcgttatcgaccatcaccgcctgggcaccttgatcacccgcaacccgcccgatgtctgggtgcgcgccgtcggctgttgcgccaccgtgatcctgcaaatcctgacgacagaaaagccgatgccacttaacgccgcgcaggccacgctgctgctgggcgccatcttgagcgacaccgtcgcgctcagtgcgccgaccaccacggaacaggatcggctggcggtcacccggttgcgcgcaatctctcacgtcgactatgacgccttcatcgccgggctgctggccgccaaaaccgatctctccgggcaatccgccccgcagttgctgcagcgcgacgccaagaattaccgcatccatactgtttcgctgctgctgtcgcagatagaagtgcgggccatgagcgacatcgatccgctgctgcccgcgctgcaacaggcgcttgagcaggcgaagcaggaggccgggctggagatgaccgcactcctggttaccgatatcacccaccgccgttccaccctgtatttctcgtcgaaccgggtgctcgccattcagcaggtgtcgctgcccggtatgacgagccgaaaaaaagaggttttaccgtggttaaccctacagattgctcacgcagggagataa

SEQ ID NO: 427131 - DNA, 408 bp, Serratia marcescens
atgtttgatactaaaatagcgtttatcgtacgtgacgatctgccaacctggcagcggctgaacgtggtggcctttctggcgacgggtatcgccgccgcggccccggagatcatcggagagtgttacgtagatgcgcagggcagacgctacggcggtatttccgggcagccgatgctgattttcgccgcagatttgccgggcctgcaacatgtgcatcgcaaagggttggagcgggaattgacgttgatcccctatgtgcacgccatgttctcgaccgggcacgatgaagccaaccgccaggtttttcttgctgaagacgcggacaatctggatttggtcggtctggcgctgcgcgggccgaagaaagcggtggacaaggcgataaaaggcctggcgctccacggctaa

SEQ ID NO: 427132 - DNA, 1086 bp, Serratia marcescens
atgcgcatgatgaaagccgccgcctttatcgaaagggggagaatagaactcattgaaaaaccgatcccttctcccggccccaatgatgccttgcttaaaataaccacgacgacaatttgcggtaccgatattcatattctcaagggcgaatatgccgtgcctcacgggttgaccgtgggccatgaaccggtcgggattatcgaaaagctcgggagcaatgttaaaggctttaaagaagggcagcgggcgctggccggcgccatttgcccctcgtttacgtcctatgcctgccaggatggttttcctgctcaggacggtgcctatttgccggaatgccgttgccacggatacaaagcgacggcggggtggcgttttggcaatgttatcgatggcacgcaggctgagtatgtgttggtacccgatgccgaagcaaatctggcgttaatccctgatgcgctgaccgacgagcaggtgctgatgtgtccggatgtgatgtctaccggatttaaaggtgcggaaaatgccaacattaaaattggcgatacggtagccattttcgcccaggggccgatcggattatgtgccaccgccggggcgcgtttgcaaggcgccagcctgatcattgccgtcagcagttcccccgaaaagctgaaaatggcgggcgagatgggggcaaacgtcctgctgaattacaaggaacacgatgcggttgatgagatcttcaggcttaccggcgggcggggtgtggacgccagcatagagtgtttgggaacgcaaaccacctttaatcaggcgctgcgggtgttaaaacccggcggcaccttatccagccttggcgtttatagcgaagacctccatctgccggtgagtgcgcttgcctatgggctgggcgatcatactattcgcacggcattgtgcccgggcggtaaggagcggatgcgcagaatgatgaacgtgatccagcatggcgggttggatctcacgccgttcgtgacgcatcgctttcggctggagaatatcgcagatgcctactcgttgttcgcggagaaacgcgatggcgtgattaagttggccatcacgccataa

SEQ ID NO: 427133 - DNA, 162 bp, Serratia marcescens
atgcaaaagctcactcgttttctggccctgctcggcgagctgatgattgaaaaagccgaagacgccgcgccgcaggctgctcagccagacgatcgcgacgacgcgttgccgccgcgcctcgaacgtggggttccgctggccgaccgcttcctgttcatgtaa

SEQ ID NO: 427134 - DNA, 894 bp, Serratia marcescens
atgaataatttaaggcggctggatctcaacctgctggtgacgctcgacgcgctgctggcggagcacaacgtcacgcgcgcggcgcagcggctcaatttctcccagccggcggtcagcgtgcatcttgccaaactgcgggcgatctttgacgatccgctgctgttgcccggcccgcgcggcatgcgcccgaccgccagagcggaacagctgcgggaaccgttacgtcaggcattggcggcgctcgagttggcggtaacgccggcgacgccgttcgatcccgccgtggcgaccgatacctggcgcgtggctgcctttgactacggcgaatccaccatcgtgctgccggcgctgaacggtttgcgcacggcagcgcccggcacccggctggcggtgttggagatcgccccggcgcgcctcgccaaacggatggagcaaggggaaatcgacctggcgtttcatacccgagaaggtgcgccatccggcctgcggcagcgcacgctgtttagcgaacgctatgtgctggtgggccgggtcggccaccccaagctgcatgccaagctgacgccggcgcaattttgccaattggagcaggtgatggtctcgccggacggcggcgggttctatggcatgaccgacagggcgttggcagacgtggggctgacgcggcgggtggtgctttccgtgccacattttctgttcgttatctcggtgctgacgcagtccgatttggtggcgatgctgccggagcggctggtgcgcaaccagcctttattgcaacggctcgagccgccgctggcggtgccgggctttgaaatgaccatgctgtggcacgaacgatcgcaccgggatcccgctcaccgctggctgcgcgaacatatcgtgcgttcagtgtga

SEQ ID NO: 427135 - DNA, 777 bp, Serratia marcescens
atgaatgtgctgattgtttacgcccacccggagccgctgtcgctgaccggctcactgaaaaacttcgccgttgaacgcctgacgcaggccggccatcaggtacaggtgtccgacctgtacgccatgaagtggaaagcggcgctcgacgctgacgacagtctggaaggcccggcaacggctcgtttcgatccttcgctggattcgcagcgcgcgttcgccaacggcatgcagagcgccgatatcgaacgggagcagcaaaaattgcgctgggcggatgcggtgctgctgcagtttccgctgtggtggttctcgatgccggcgattctgaaaggctggttcgagcgtgtctatgcttacggttttgcctacggcgtaggtgagcattccgacacccattggggtgaccgttacggcgaggggaggctggcgggcaaacgggcgatgctgatcgtcaccgccggcggctgggagtctcattacgccccgcgcggcatcaacgggccgatcgacgatatcctgttcccgatccagcacggcatgctgcactacccagggttcgaggtgctgccgccgttcgtcacctaccgcgccggcaaaaccgatgaggcacgctttgccgccctgtgcgagcagctcgggcagcggctggataatctgtggaacgccgagccaatccgctttcggcggcagaacgccggtgactatctgatcccgcagctgacgctgaaagcgcatctcgcgccggggcaagacggtttcggcgttcacatcgagtag

SEQ ID NO: 427136 - DNA, 8511 bp, Serratia marcescens
atgtcagaaacgctttctttgccggatactcaggtcgagtatcgggagtatccgctggttgcagcgcaaccggggatctggatcgccgaccaaatcgcgctgcgccgcaacggcttcgccgtggcgcactacaccgaactgcacggcgctatcgatcgttcggcgctggagcgcgccatccgtcaagggctggccgaagcggatacgattcaggcgcgattctttgaggcgcaggacggccagccggtgcagcgtttgccgctgatagccgaccccgcacgcgtgcaggcgccggagtggctcgatttcagcgcacggccggacgccgaacaggcggcgctggcgctgatgaacgacgatctggcgcaggatctgccggcagacggcgagcggccgctttatcgccatgtggtgatccgcgtcagcgccgatcgctggttctggtaccagcgctttcatcatctgaccctggacggcttcagcttcgaagccatcacccgccggatcgccgatctctaccgcgcgctgcgccacgggctggcgccggcggcctcgccgtttaccccgttcggcaaggtggtggaagagtttcagcaatggcaaacgtcgcccgcacgtgagcgggcggccgaattctggcgccagcatctgcgcgatttgccgtcgccgctgtcgttatcgacggaaaaccgggaggttgaaccgggcgcccggccgctcaaacaggcgctggtgctgcctgaatcgctgtttgacgaagcgcggcgcgatgatgcgctgcagtcgctgcaaccggccgatatcgtcacggcggcgctggcgatgtatctggcgcgcatgagcggcgaaacccgcttctcaatcggttttcctttcatgcgccggatggggtcgcaggcgctggcggcggtcggcccggtggtcaacgtgctgccgctgctgctgaacgtgacgccggatctgtcgctggcggacgtctgccaggccaccgtggcggagatcaagcaggcgcgtcgccatcaacgctatgaggcggagcagatcaaacgcgatctcggcctggtcggcggccatcaggaactgtatggcccggtggtcaacgtcaaggtttaccacggcgccttgtcgttcgacggtcaggcggccgtcacccatacgctggcgatggggccggtcgacgatctggagtttgagatcggttttcgaagcggcgtgctgacgctgtctttggtcgccaacccggccaaatactcgccgcgcaccttgcatcatcacgcggagcgcatcggccattggctgcagcagctggcgcggcagccgcatcagccgcacggtcaactggcgttgatcggcgaaggggaactcagacaactcgcggcctgggggcgcggcgcagagctggcgccgccggcgggcatggtctcgatcatggatgcgttccaacgccaggttgagcgccagcccgaggcgttggcggtggcctgcggcgacgtgcgcctcagctaccggcagctctccgaacgggtgatgcagctggggcgagtgctgatcgaaagcggcatcggcgccgaagacgtggttgccatcggcattccgcgctcggtggacacgctggtcgcgctgttcggcgtgttggccagcggcgcagcctatatgccgctcgatctggactatccgcgtgaacgtttggcgctgatgtgcgacgacgcgcggccggtgatgttgctgacccaccgcgccacgcgggccaacatgccggatctgccgcaggtattgtgcctggacgacgccccgtgcctggcgcgctgcgcggccgccgagaacacgccgataacggatgcagagcggcgcgtgccgctgagcgaggcgcatctcgcctatatgatttacacctccggctcgaccggcaaacccaagggcgtcatgtccacccaccgcgggctgctgaacctgttcctgtcgcaccaggcctctctgttcggcccggcgatcgaaaaattccaggctcgccacgcgcgccgcttgcgcgccggccataccgcctcgttttctttcgactcctcctgggaaccgctgttctgcatgatgatgggcagcgaactggttatcttcgatgaggagctgcgccgcgacccctgggcgctgctggaacaaacccaacagacgccgatcgatctgctggacatcacgccgtcgttcttctcgcaactggtggactgcggcctactgaaggggcagtttccgctgccgtcgttcgtgatgatcggcggcgaggcggcgacgccgacgctgtggaacctgatgcagcagcatccggaggtggagatccacaactattacggcccgtccgaatacaccgtcgataccctcggcgcgccggtgacggccgcagaccagccggtaatcggccgtcccctcgccaatacctcagtttggctgctcgacagccgcctgcagccggtgccgatcggcgcggcgggcgagctgtacatttccggcaaaggcatcgcgcgcggttacctgcggcgcccggatctgacggcggcgcgctttgtcgccaacccgttcgccgaaggcgaggtgatgtaccgcagcggcgatctgatgcgctggagcgcggagggccagctggtgttcattggccggaccgatcaccaaatcaaggtgcgcggcttccgcgtcgagctgggggaggtggaaagcgccttggccgccttgccggacgtggggcgtgcggtggtgatcgccgagccgatcggcgccacctatcgcctgatcggctactgctcggtacaggatgacgcgcgccgcgcctcgccggcgctgcaaaacgagctgctgggccagctggcgcagcgtctgccggattatatggtgccggcgatcctggtggtgatgccggagctgccgctcaacgtcaacggcaagattgaccgccaggcgctgcccaaaccgcaggagacgctggcgcaaagcattcgcgaaccggccaccgagcaggaaaggctgatttgccgcgcgatggccaacttattggggatggagcgcgtcggcgccgacgacgatttctttgcgctcggcggcgacagcatctcggcgatggggctgggcaccgccctgcggcgcaacggttatctgctgcggccgcgcgagatcttcgcgctgcacacccccgcgcgcatggcgcaggcgatgcagccgctggccgtagactctcaggcctcacgcagcgtgcagcaaggcccgatcgacgggctgccgatcctgcactggttcgccgaaacgggcgatatgcatcgccgctttgcgcacggcgttttcctgcgcgtgcctgccgagctgcagccggaacagctgcgtgatgcgttggaccagctgcgcgcggcgcacccggcgctgggcgccaggatccgcgatggccagttggtggttgaagacgccgctagcgctgagctcatgcaggttcagaccgtatccggcgaactggagccggtggcggaacaggctttcgacgccgcacttgagcatctcgatccggcggccggcgccatgatgcaggcgatcctgttgcagcgcgacgggcagagcctggggctggtgctggcgatccaccacctggtggtcgacggcgtttcctggcgcatcctgctcgaggagctgcggcaagtggccgacagcgccatgcaggggcggccgatcacgctgccgccggaagaaacctcgctctatgagtggtccgcgcgtttacgcgccgacgtggaacgccgggaagccgagctgccgttctggcggcaaatgctggcggacggcgtgccgcgtttgggccggcgcgcgctggaaccgcagaccgatcgcatcgcctcggtgagcgagcggcgcacgctgctcgacagccggttgaccgccgcgctgctcggcacattgccgcagagctatcgcgcccaggttgaagagatcatgctgtgcgcgctggctcaggcctgccgccgccgtttccaggccgcttcgctgcgtttctctctggagtcgcacggccgcgccgaactggacgacggcctcgatctggcccgcaccgtcggctggctgacggcggagtatccgctgcgcatcgaactgcatgacgccgagcacaatgaggccgtgcgcacggtgaaacgggcgacgcgagcggtggccgatcgcggcgtcggttacggccaactgcgttatctgcatccgcagcgtgacgatctggcggcgctggcgcagcgcaacgccccggagattttattcaactacctcgggcgcttcagccaggatgaggggcactggacgccgcagcgcagccaaacccgcttccgcgacgccttcgccgtggcgcaggatgcgcagcaggcgccgtcttacgggctggaagtgaacatctttgtcgaagagcggcgcgacggcccctgcctggcgatcaactggagctggctggagggaatcttcagcgagagcgacattgcgcagctgcacagcggcatcgagcaagcggtgcgttcactgtgcgaatttgccgaacgccatcccgaacgcgcggcggcgacgttggtggcggccgagatcgcccagccgggcgccgacgatgaggcggtgcgcgcctgggagcgggagtgcgggccgttagccgcggcgctgccgctgttgccgctgcaacacggcctgctgttccatgcgcagacggcgcagcagggcggcagctataactcgctgacacgcctgagcctctgcggcaaactggacgcgcatcaactccagcaggcgctggatgccgtgatccgccgccatccgcaattggccgcccgattcaaccgcgagggcgagccgctgcagctgataccgcagcaaagccattggccgctggacagccacgcgctgccgccgctgacggaagaacaagaagcgcaggcactgcaccggctggagcagcaggaactgcagcgcgatctgttcaaccagcccggcgcgatgctgcacgcgctgtgggtcaaacacggtgatagcgaacgctacacgctgttccttaacgcgcaccacctgatcgtcgacggctggtcgacgccggtggtgctcaacgatctgatgctggccctgcgtgaaggcgagcaggcgttgccgccgctgcgttcgaactatgccgatatcgtgcgccgcctgaccgcgcgggatgccgaagcctcgcgccgcctgtggcgcgagacgctgcaggacgtgcgcccgacgttgctgttcggtgaaacgcaggacgaacgcgtgcatgagctggaaatgacgctgccgccggccgaggaaaggcgcttgctgaccctgtgccgcgaacgcgggttgacgctcaataccgtaatgcagggcatttgggcgctgcagctggccagctgttgcggccagcaggacgtggtgttcggctcgccggtttccggccgttttggccagatagaagggatcgaggaacacgtcggcctgttcagcaacacgctgccggtgcgggttcgtctgcagcacgatcgttcgttgacggagcagttgaccgacctgcagcaccggcagattgaactgctggagcacgatgatttggggttgggggaaattcagcacctggccggggcgggcacgctgttcgatacgctgttggtggtggagaactacccggacaacgacgctctgctgggcggcacaggatcgctgcgctgcgacgccatccgcaacaaaggctatacccactatccgctgacgctgttggtgctgccgggcgaacgtctgcgcctgctgatggagtaccgcgcctcggtgccgcagcctgagcgcttcgccgcgcggctgatggcgctgctgcaacagtggatcgcccagccggatctgccgctgccgtgctggcagttgcaaaccccgcaggagcaggcgctgatcgcggcggtcaaccgcaccgggcaggcggtggcggacaccaccttgcatcaggcgatcgccgatcaagcgcggcgcacgccggaacgcatcgcgctgcaggatgccgggcacagcctcagctaccgtgacatgcagcgccaggccgcgctgctggccgagcggctgacggcggccggcattcagccgggggatatcgtcgcggtggcgttgccgcgctccgtgcgtctcagcctggcgctgacggcgattgtgcagaccggcgccgcctggttgccgctggacaccggctacccggacgagcggctggcctacatggtggaggacgccaagccgcggctgattatcaccgaaagcgcgttggatacccgcttcgccgcgctggcgccgacgctgctgttcgatgcgctggacgagagcgtgcgcgaaccggcgccgcgccaaccggcggggaacggcgattatcccgcctacgtgctgtatacctccggctctaccgggcggccgaaaggcgtggtggtgaaccaccgggcgatcgtcaaccgcctgttctggatgcagcacgagtatgcgctcgatgcgcaggacgtggtattgcagaaaacgccgtgcagcttcgacgtttccgtctgggaatttttctggccgctgatggtcggcgcgcgcctggtgatggcgccgccggaggcgcaccgcgatccgcaggcgctgacgacgttgatcgacgactatggcgtgaccacgctgcatttcgttccgtccatgttggctatctgggtggaggcgctgaacgaacgggcgccacagcgcgccgccgccagcctgaaacgcgtgttctgcagcggcgaagcgctgtcgtgtgaactggcttcccgctaccaggcgttggttaccgcgccgctgcacaacctgtacggcccgacggaagcggcggtcgatgtcacctaccaaccggcgtccggcgcggcattggcggcggtgaacggcgccggcgtgccgatcggcaaaccggtctggaacacccagctgagcattctcgacgccatgctgcggccggtgcccgtcggctgcgccggcgatctctacctgcgcggcattcagctggccgatggctatctgcatcggccggggctgacggcgcagcggtttgtctccgatcccgccggcaacggcgcgcgcatgtatcgcaccggcgatatcgcccgctggctggaagacggcagcgtcgagtatttggggcgcagcgacgatcagctgaagatccgcggccagcgcatcgagctgggcgaaatcgagcaggcgctgctggcgcagccgggggtagcacaagcggcggtgcacgccatcgagctgggcgagggcgcgacggggctgggcggcgccgatatgcgccagctggtcgcctggctgatcgcccaaccgggcgtgacgctggacaccgccgtgctgcatcaggcgctggagcagcgtttgccggcgcacatgatgccggtcagctatgtcatgaccgaccgcttcccgctcagcgccagcggcaagctggatcgcaaggcgttgccacggccgcagttggccctgcaagccgggcgtgcaccgcagagcgacagcgagcgcctgctggcggcgctgttcggggaactgttggggcgcgagacggtgtatgccgacgacgacttcttcgcgctgggcggccattcgctgctggcaatgcgcctggcggcggagctgcgtcgccgcgtgcctcggccattgagcgtcgggcagatcatgttcgcccgcagcctggagaagatggcgcacctgctcgatgacgcacaggcagccaactcggccgagagccgcggcgtcggcgaatgcctgcagctgcgggccggccaaggcccggcgctgttctgcctgcatcccgcttccggtttcgcctggcagtactcggggctgagccgttatctgccggggagctaccccatcatcgggctgcagtcgccaagaccggatggcgccatcgccacctgcgaggatatcgagcagatggtcgatcgtcatctcgctaatctgcgccgcctgcagccacaggggccttactacctgctgggctattcgctcggcggcacgctggcgcattcgatggccgcgcgcctgcagcagcagggcgaagaggtggcgttccttgggatgctggatacctatccgccggaaggccaggattggaccggccccagcgaagaggaggcgcagaaagaggtggcgcaggagcaggccgagtttatggcggaagatcatggcgatccggcgctgatggcggagaaggcggcgatgttcgacagcatcgtcgccaactatcgcgacgcggtgcgcattctgtcccaggcgcgcagccggcgtttccacggcacggcaacgctgtttgtcgccgaccagacgctgccgccggagatggatatcgacgccgtgtgggcgccgtatctggatgggctgatctgccatcaccagcgctgcgaacacgcggacattctgtcgccggcttcgctggagacgctcggcccgctattgcacgagctgctgacgcggcaatacgggttggtataa

SEQ ID NO: 427137 - DNA, 1458 bp, Serratia marcescens
atgacaaaaaatcactgcgatcggctgaacccaggttcagccgaggggccaaactgtgcccaaaccctgcaacgtgggctgagcgcgcgccatattcaactgatttcgatcggcggcgccattggcaccgggctgtttatgggctccggcaagaccattgcgctgtcgggcacctccatcgtactgacttacgccatcgtcggctttttcatgttcatggtcatgagggcgatgggggaactgctgctcacgcggctcgattaccgctcgttcgccgatttcgtctccgaatacctggggccacgcgccagcttttttcttggctggtcctattggctgagctgggtcgttacctgcattgcggacgtggtggtgtgcggcggctacgtgcagtattggctgccgaacgtctcgccctggctgccggcgctgctgacgttgggctttctgtgcctgttcaacatgctgtcggtcaagatgttcggcgaagccgagttctggttcgcgatgatcaaggtggtggcgattgtcgcgctgatcgccaccggcgcctggatggtgttcagcggctggacttcgccggacggcgtgactgcttcgctgcataacgtcaccgatcccgccattttcatgccgcacggtatcttcggcttcttcgccggtttccagatcgccattttctcctgtaccggcatcgaactgctgggcacgatgtcggcggagactaaaaaccccgagaaggtgctgccgaaggcgatcaacgcgatcccggcgcgcatcatcgtcttctacgtgtgttcgatgctgaccattatcgccgtcacctcgtggagccacatctcgccggacagcagcccgttcgtgatgctgttcgatcgggcggggctgccggccgccgccgcggtgatcaacttcgtggtgctgacctcggcgatgtcttcggccaacagcggcgtctattccagcacccgcatgctgtacagtctgtcgatggaaaagcacgcccacggccagttccgcattctgtcccgcaccacggccattccgatccgcagcctgctgttttcctgcttctgcatggtggccggcaccttgctgctggtgctggtgccgaacgtgatgacgctgttcaccatcgtctctaccgtggcggcgatcctggtggtttacagctggggcatgattttggtcgcctacctggtgtatcgccagaagcggccggatttgcacgccgattccaacttcaaaatgccgggcgggatcgcgatggcctggctgacgttggcattcttcgcctttacgctggtgctgatggtgttcgatcgcgatacgctgatcgcgctgtgcagcatgccgctgtggtttaccacgctcggcctgatctggcgctatcgggtccgcgacagcgtgaagcgcgagagctacgtgttttatcagcgtggcgccgaggcggaataa

SEQ ID NO: 427138 - DNA, 3138 bp, Serratia marcescens
atggcgcagttctttatccggcggccggtattcgcctgggtgatcgccatcatcatcatgctgtgcggcctgatgtcgatcaattcgttgcccgtttcgcagtacccggacgtctcaccgccgcagatttccatctccgccacctacccgggtgcagacgcggaaacgctggaaaacagcgtcacgcaggtgattgagcagcagctcaccggcctggacggcctgctgtatttttcttcgaccagcagctccagcggctcggtcagtatcaacgtcacctttgatcagggcaccgatccggatatcgctcaggtgcaggtgcaaaacaaggtgcagcaggcggaaagccgtttgccgagcgcggttaccgcgcagggggtgacggtcaagaaatcccagagcagcttcctgctgatcgtcgggctgtatgacgaaagcgataaggcgacgatggccgatatctccgactatctggtcagcaacctgcaggatccgctgtcgcgcatcgagggcgtgggggacgtgcaggtgttcggctcggaatatgcgatgcgcatctggctggatccgaccaagctggcgagctatgcgctgatgccttccgacgtgcagacggcgatcgaagcgcaaaacacccaggtgtccgccggcaagatcggcgatctgccggccgccgccgatcagcagctgaccgccacggtaaaggcgcagtcgcggctgcaaacgccggaacagtttcgcaatatcatcctgaaaagcgacagcagcggcgcgctggtgcggttgggcgacgtggcgcgaattgagctgggcaacgaggactactccgccagcgcacacctcaacggccacccggcggcggggatcgcggtcaagctggcggcgggtgccaacgccctcaacaccgccaagctggtgaaggccaaggtggcggaataccaaagtgcgatgccgcagggctacaaggtggcctacccgaaagacagcaccgactttatcaacatctcgatcgaggaggtggtgaaaacgctgttcgaagcggtggcgttagtggtagtggtgatgttcgtgttcctgcaaaacctgcgcaccacgctgatcccgaccatcaccgtgccggtggtattgctgggcaccttcggcgtgctggcggcgttcggctattcaatcaataccctgacgctgttcggcatggtgttggcgatcgggctgttggtggacgacgccatcgtggtggtggaaaacgtcgaacgcgtgatgcgggaggataagctgccgccgcgcgaggcgacggagaaatcgatgcgcgaaatcaccggcgcattggtcggcatcgcgctggtgctgtcggcggtgtttctgccgatggcgttcttcggcggctccaccggggtgatctatcgccaattttcgatcaccgtcgtctcctcgatggtgctgtcggtggtgctggcgttgacgctggcgccggcattgtgcgccacgttgctgaagcccgcgcacgacgcacagaccgacaagggcttgctgggcaaattcaaccgcggctatgaccggctgcaggagaagtacgccgacaaggtcggtggggtaatccaccggccgacgcgctatctgctgctgtacggcctgctgttgatcgccgcggccgtgatgtacctgcgcttgccgaccggctttctgcccaacgaggatcagggcacggtgatggtacaatacaccttgccggcaggcgccaccaacgcgcgcacctcggcggtgagcgaggcggtgaccgcctatttcctcgaccaggaaaaggccaacgtcagcaccattttcaccatcaacggattcggcttcagcggcagcgggcaaaacgccggcatggcgttcgtcagcctcaaagactggagccagcgcagcggcagcgcgaacaccgccgacgccatcgccaaacgcgccatggcgcacttcgcctcgctgcgcgacgcccaggtcttctccatgagcccaccggcgatcgacggtttcggccagtccgacggcttcaccttcgagctgcaggccaaaggggcgaccacccgcgccgagctgcaggcgatgcgcgaccagatcgttgccgccgccggcaacaacccggcgctgctggcggtgcgcgccaacaccttgccggataccccgcagctgcaggtggagatcgacaacggcaagctgcaggcgctcggcctgagcgccgccgacgtcaacagcacactcagcagcgcgttcggtagcacctacgtcaacgactttatcgatcgcaaccgggtgaaaaaagtctatatgcagggcgatgtgcagtaccgcgccaagccggaagatctcgaccgctggtttgtgcgtggcaccaacgcgtcgggcgccagcagcatgacgccgttctccgcctttgcgtcttcgcactggatctacgggccggaaaacctgtcgcgctataacgggctgtcgtcgttcgagatcaccgggcagggcgccgctggcgtcagctccggtacggcgatgagcgagatggagaaactggcggcaacattctccgccggcagcagctattcctggagcgggctgtcctatcaggagcggctgaccagcggccaggcgtcgtcgctgtacgccatttcgctgatcgtggtgttcctgtgcctggcggcgctgtatgagagctggtcgattccgttcgcggtgatgttggtggtgccgatgggcgtggtgggatcgctgctggcgatcacgctacgcgggctggaaaacgacatctacttccaggtggcgctgctcaccatcatcggcctgtcggcgaagaacgccattttgatcgtcgagttcgccgaggagatgcatcagcgcggtgaaacgctgattggtgcggcggtccacgcggcgcgcatgcgcctgcggccgatcctgatgacctcgctggcgtttaccgccggggtgctgccgctggcggtatccagcggcgccggcgccaacagccgcatcgccatcggtaccggcatcatcggcggcaccatcaccgccaccgcattggccatctttttcgtcccgctgttttatgtgttggtgcgccgcatgtttacccgtcggcccgccaaggcgccgtcacaggcaggagaataa

SEQ ID NO: 427139 - DNA, 1515 bp, Serratia marcescens
atggagattgaaaacccgacaacccggcccgatcgcggcggggcaccagccaaggcgccttcgctcacgttgctgttttccgcgttgctgctggtgatgctgctggcggcgctggatcaaaccattgtctccaccgcgctgccgaccatcgtcggcgagtttggtgggcttgagaaactgtcgtgggtggtgacggcctatctgctgtcttccactatcgtagtgccgctgtacggcaaattcggcgatctcttcggccgcaagattgtgctgcaaatcgctattgtgctgtttttgcttgggtcggtactgtgtgggctggcgcaaaacatgacgcagctgattctgatgcgcgcgctgcaagggttgggcggcggcgggctgttggtggtcaccctggcggtggtcggcgacgtgatcccgccggcggaacgtggccgctatcaggggctgttcggtggggtattcggcttggccacggtggtggggccgctgatcggcggcctgctggtgcagcatttttcctggcgctggattttctacatcaatctgccgctgggcctgttcgccctgctggtgattggcgcggtgtttcagtcgcaggtcaatcgagtgcggcatgaaatcgacttcctcggcgccggttacctggcgatggcgctcacctgcatcatcctgttcaccagccagggcggcacggtcatggcctggtcggacggccagctgtggtgcattctggcctttggcctggtgtcgctgggcggctttatctatgaggaacggctggccggtgaaccgatcattccccttgggctgtttcgcaaccgcacctttgtgctgtgcggcctgatcggctttatcgtcggcatgtcgctgttcggctccgtgactttcctgccgctgtatctgcaggtggtgaaaggctcgacgccatcgcaggccgggatgcagctgctgccgttgatgggcggcattatggtcagctcgatcatcagcggccggatcatcagcaaacgcggtaaataccggctgtttccgatcgtcggcaccctgtgcgcattgggggcgatgacgttgctcggcaccctgaccaataacacgccggtgcagcaactgtacctgtacatttgcctgctggggttgggcttgggcatggtgatgcaagtgatgatcctggcggcgcagaacagcgtggagccccgacatatgggggtcgcgacctcgagcgccacgctgttccgctctatcggcggttcgataggcgtagcggtgttcggggcgattttcacgcaggtgctgcacacccgtttggcggcgctgttgccggaaggcgcgcagctgccgcgcgcgctcggtgcagaagcggtgcaccatttgccggcggcgctgcagcaggattacctgcaggccttcggcggggcgatccattcggtgtatcaaattgccgccggggtgatggcgttggcttttgcgctgacctggctcttgaaagacgtgccgctgcggcacaaataa

SEQ ID NO: 427140 - DNA, 669 bp, Serratia marcescens
atgacagcacgaaacgttcaaactcccgccaagcctcgccgccccggccggccgagcggcggcgccaaaggggcggacaaacgcgagcatttgcttgataccgcactgaacctgtttgcccgccaggggatcgtagacacctcgttgaacgccattgcgcgcgaggcaaacgtcaccccggccatgctgcactactactttcataaccgcgatcagttgctggacgtactgatcgaggagcgctttctgccggtgcgcaaaatggccggcgaggtgtttgacgccaacgcggacgatcccgtcaccgccttcaccctgctggcgcaacgttttatcgacatcgcgttggaacacccctggttcgccccgctgtggctgcgggaggtcatgagtgaaagcggcgtgctgaaacagcgcatggatgaacggttcggcgatgagcgccgccaaatcgcgctgcaatccatcgcgcgctggcaggcgcagggtaaactcaaccccgatctcgagccttccctgctgttcttcacgctgttcggcatcacgctgctgccgctggccaccgcgccgaaatggcggcgcgaacgggataaaggccagctgaacgccgaagatatcgcccgccacgccgtcgccctgctgcgttacggcatcggcccggcgcgttaa

SEQ ID NO: 427141 - DNA, 696 bp, Serratia marcescens
atgaacgactcacccttgagcattcccacctggtatcgcgatccgcacgcagaacaggccatggccgatggccatgcgcctatttggcgccatctgatcggtttggtgccggaaaatgaactctccggtatcagcgtgctggactttggctgtaatcagggcggctttctgcgtttgctgcatcaaattcgcccattccagcaggcggttggcgtcgatatcgcgcgacaatccgtcgatgaagccaaccggctaaaagggaatctgccggtggtttatcaaaccgacacgcggctgcacgggtgggatagccactttgatatcgccttcagccatgaagtcatctacctgatcgaagacattgcgcaacatgccgccgatatgctgcgggcgctgaagccgggcggcgtttactatgcggtgaccggttgccacaccggcaacccgctgtggccgcagtggcgtgaaagggtagctgagcagacgcataccgtggtgcaggatcgctcgctggccgactatgcgcgcattttctccgccgcggggttccaggtctctgcccgcaggctgggcttttccggcttcgtgccctatgagccaaacggctggatgccggatatcgcggcgtcgatcgattactattggcacaccaaaacggtattcaggttggtcaaaccttcagtgccgacgcgttaa

SEQ ID NO: 427142 - DNA, 1140 bp, Serratia marcescens
atgtcaactcgccgcgtgtttattaaacagctttccgccgtcgccgggggcggcctggcggcctcgctgggtgtttcgttacacggtcacgcagaagctgcgcttaatccggcctggcggatgcctgacgaaggagaaccgcagcagcgggcatttctcgccttcggcgcgcagcgggccatttggggcgaattcacggcggatgtgcaggcggcgcagggccgtatcgcccgcgccatcgccgagtttcagccggtgacggtattttgccgcgatcgtgaacggcaattggccgaggccacctgcggcagtcacaatgtcagctatgtcgtcaccgagctggatgacatctgggtgcgcgacttcggcgccaatttcgttgtcaacggcgccggcgaactcggggcggtggatttcaacttcaacggctggggcaataaacagcggtatgccaaggatgcgcggttggcggcgtttgccgccaagcgctacggtgccgcccaactgcgccgcagcgcactgataggcgaaggcggcggtatcgaagtggacgggcacggcaccggcatcatgaccgaaagcagctgggtgaatgcgaaccgtaatccgggctggagccgggaccgggtggagcaggagctgaaagcgatgctcggcctgcgcaaaattatctggctgccgggcattaaaggccgggacatcaccgacgcccacgtcgatttttacgcccgcttcgtgcgaccaggcgtggtggtggccaatctggacaccgatccggcctcttatgaccatgcggttacccagcaacatctggcgatcctcaaggcggcgaccgacgccgacggccgcaggctgcaggtgcatacgctttcgccgccgctggcgccgcgcgacagccgattcagccgcaacaacccggattttgcagcgggctacatcaactatttcgtcatcaacggcgcggtgatcgccccggagtttggcgacccacaggcggaccgggcggcgcttgagctgctgacggcgctctatccgcagcgcaaggtggtgcagctggagatcgacgccatcgcggccggcggcggcggcattcactgcgcaaccaaccaactgccggcgcatggcaagccggatcggtga

SEQ ID NO: 427143 - DNA, 1674 bp, Serratia marcescens
atgtctgccggtttattgaaaacgatagctctgagcgtggccctggcctgcaccgttcccaccgcctttgccgccgatctgaccgccggcgcggtcgccgccccggatcagtatggcgcaaaagtcgccgcacaaattctgcaggccggcggcaacgcggttgacgcggcggtcgccaccgcctttaccctggcggtcacctaccctgaagccggcaatatcggcggcggcggctttatgacgctgtatatcgacggcaaaccctatttcctcgactaccgcgaagtggcccccaaggccgccagcaaaaccctatacctgaacgagaaaggtgaagtgatcgaaaatctcagcctggtgggcagccgcgccgccggcgtgccgggcaccgtgctggggctgtgggaagcccacaagcgcttcggtaagctgccgtgggctgaactgctgacgccggcgatcggctacgcccggcaaggtttcaccgtggcggatcagcagtatcagtaccgtgaagacgccaacaagctgttcgccggtaaaaccaactttggcgactatttcggcgccatgaagcctggcacggtgttcaaacagccggagctggccgccaccctcgagcgcatcgccaagtcgggcgccgacgatttttatcacggtgaaaccgcacgcctgctggtggcgcaaatgcagcgcgacaacgggctgatcggcgcggcggatttggccgactatcgggtgaaatggcgtgaaccgatgcgcatcagctggcgcggcaacaccgtgtataccgccccgctgcccagctccggcggcatcgcgctggcgcagctgctagggataaaagaagatcgcgccgccgatttcaaaggggtgccgctgaactcggcgcgctatatccacctgctggcggaaatcgaaaagcgcgtgttcgccgatcgcgccgactacctcggcgacccggatttcactaaggtgccggaagcacagctgatcgcccccgactacctgcaaaaacgcgccgccgaaatcaacccgacggcgatctcgccgaccgaacaggtgcggccagggctggaaacccaccaaaccacccacttctcgattgtcgatgccgccggcaacgcagtcagcaacacctatacgctcaactgggacttcggcagcggcgtggtggtcaaaggcgccggcttcctgctcaacgacgagatggacgacttcagcgccaaacccggcgtcgccaacgccttcggcgtggtgggcagtgacgccaacgccatcgagccgggcaagcgcatgctctcctcgatgagcccgaccatcatcacccgcgacggcgaggtcagcctggtgatcggcacgccgggcggatcgcgcatcttcacgtcgatcttccaggtgatcaacaacctctacgattaccatctgccgctggcgcaggcggtggccgcccagcgcgtgcaccatcagctgttgccgaaggacaccctgtactatgacagctttgcgccgctgaccggcaaaccagcggaagagctgaaagccatgggctacaccctcgaagatcagggctggaacatgggggacattcaggctatccgcatcgatggccgcacgccggaaaccgcgtccgatccgcgcggccgcggcgtgggcctggtggtgaaaaagtaa

SEQ ID NO: 427144 - DNA, 2295 bp, Serratia marcescens
atggcgaaaagacgagcagtacccggggtacatccctacgatgggcccgccggcggttggggcgcgctgaaagcgacggccatcgccgtgcgcacgcagatggataccttagaagcgccggtgacgctgatgcgcaccaaccagcccgacgggtttgattgcccgggatgcgcatggccggataaagaacatcgatccaccttccagttctgtgaaaacggcgccaaagccgtgacctgggaagcgaccagcaagcgcgtgacgcccgaatttctggcgcaaaataccgtaacgtcgctgctgcagaaaaccgattatcagttggaagactatggccgcctgacaaccccgctgttctatgacgccgggacggacactctgcgcccgctgggctgggacgaggcgtttcaacgcatcgctgccgtcttgcagacgctgccgccggaacaggtagagttttacacctccggtcgggcgtccaatgaggcggcctatctgttccagctattcgcgcgggagttcggcagcaataatttccctgactgttccaacatgtgtcatgagccgaccagcgttggcctgccgcagtccattggcatcggcaaaggtaccgtctcgctggacgacttcgacagcgcggagctggttatctccatcgggcacaatccgggcaccaatcatccgcgcatgatgggcacgctgcatgagctggcgcgcaaaaaggtgccgatcatcgtgttcaacccgctgcgcgagcgggcgctcgaacgtttcaccgatccgcaaaacgtcatcgaaatggcgacctacagttcgacccctatcgcttcaacctactatcaggttaaagccggcggcgacgccgcagcgctgaaaggcatcgccaaggcgctgctgcagcaggatgaaacacagggcaatgccgtggatcacgcctttattgccgagcacacggaaggatttgccgctttcgccgccgatttggcggctacccgttgggaagctatcgaagcggagagcggcctggcgcgccaggatctggaacaggtcgccgccgcctacgcaaaatccaacgccaccatcgtgacctacggcatgggcattacccagcacaataaaggcaccgccaacgtgcgtctgatcgccgatctactgctgctgcgcggcaacatcggcaaaccgggcgccggcatctgcccgctgcgcggccattccaacgtgcagggcaaccgtaccgtcggcatcaccgaaaaaccctcggtcgattttctgacgaagctggaaacggtgtttggcttcacgccgcccaaagcccacggccatgatgccgtgaaatgcatgcaggcgatgatcgacggcacctcgaaggcgttgatctgcctgggcggtaacttcgccgtggcgctgccggaccccgagcagagtttcccggcgatgaaagcgctggaattaagcgtgcatatcggcaccaaactcaaccgcagccatctgttggtggcgaaacaaaccctcattctgccctgcctggggcgcaccgagctggatctgcaggccggcggacggcaatcggtgacggtggaggattcgatgtcgatggtgcatgcctcgtccggcaaactcaaaccggcgtcggaactgctgcgttcggaacccgccatcgtggccggcatggccaaagcggtgatgcccagcagcaaggtgccctgggatgaactgatcgaagattacgatgtgatccgcgatctgatcgaaaaaaccattccgggcttcgacgattacaacgcgcgcatccgccagccgggcggtttccgcatgccgttgccgccaaccgagcgccggtggccgacgccgacgggcaaagcgatgttttccgtgttcagcgggctgcatgaggatgagactgttgcagaccaagacacgctgcggctgattacgctgcgcagccacgatcagtacaacaccaccatctatgccctggatgatcgctaccgcggggttttcggccggcgcgacgtcttgttcatgaatgacagcgatctgcaacgtttagggctggagcatggcgacgtggtcgacctggaaacggcgctgcccggctgcactcaacgcctggagggcatcacggtgatcgcctacaacatttcagccggttcggtcggtgcctactatccggaggccaacgtgctggtgccgctgcattacatcgatgaggaaagcggcacaccttcgtacaaatcggtgccgatccgcgtgacgctgagatccaaagaggtgcgcgaggtcaacatcgcgtag

SEQ ID NO: 427145 - DNA, 2259 bp, Serratia marcescens
atgagccgcctcgaactgacccgccgccagctgctgcaggccggcggtgtggtaatggtcagcagcctgctgcccgcgccgtttaacgccttcgccgccgaggcggatgcatcgcccgccgagctgccgctggatcgggtggacagctttatcagcctcatcgccgacggccgggtgacggcgttcaatggccacgtcgatctgggcaccggcattcgcaccgcgctggcgcagatcgtcgccgatgaaatttgcgtgccgttcgagcaagtcacgatgatccttggcgatacgcaacgcacgccggatcaggggccgaccatcgccagcgccacccttcaggtgacgtcggtgccgctgcgacaggcggcggcacaggtgcggcacctgctgacggcgctggcggccaaagccttcgaactgccggccgaacagctgacggcggcggcggggcaggtatttgtgatcgggaacccagggcgctcgctgagctatgcgcagctggcgagcgggcaaaatctgcacgtgatgctggataaaaacgtgcagctgaacagcgaacagcagaaccagtatgtgggccgcgccgtgccccgggtcgatattccggccaaggtcagcggtgggctgacctacgtacacgacctgcgcttgcccggcatgctgcatggccgcgtggtgcgcccgccatacgcaggcgccgacagcagcgcgccgttgggcagtggcctgctgtcggtggataaaagctcgatcgcgcacctgccgggcatcgtgaaactggtggtgatcaacgatttcatcggcatcgtggccgagcgcgaggagcaggcgatcgccgccatgcgccaactgaaaaccacctggcaaccctgggccggattgccggatctgtcgccggaagcgctgcccgccgcgctggaggccaatccgaaaaccgaccgcgtgctgcgcgacgacgcgggcacggacgccgcgttggcattgctgcataccgaagtgcaggccgactatgtctggccttaccatcagcacgcctcgatcggcccttcctgcgcggtggcggaggtcaaagacgggcgggcgcaggtgtggtccggcacgcaaaacccgcacgatctgcgcaaagatatcgccaggctgctcgagctgccgcctgggcaggtgcacatcacccgcatggaggcttccggctgctatggccgcaactgcgccgacgacgtctcggcggacgcggcgctgctggcgcgggccaccggccgaccggtgcgcgtgcagctgatgcgcgaacaggaatccggttgggagccgaagggcaccggccagctgattcgggtgcgcggcggcctcgatgcgcaaaaccgggtggcggcctacgaactgaaaaccagctatccctccaacaatgccgtgaccttgccgctggtgttgaccggcaaagtggccaaccgggccgacgtgcagcagatgggcgatcgcaccgccattccgcaatacgagtatccgcacatgcgggtgatctgccaggacgccgcgccgatcgtgcgggcttcgtggatgcgcggcgtttcggcgctgcccaacgtgttcgcccatgagtcctggatcgacgagctggcctggcgcgccggtgaggatccgatcgcatttcgtttgcgctatctgaacgatccgcgtgcggtggccttgattgaatccctgaaacggcaggcgaactggcaagacggcccggcgcaccgggcgcgcgccgctggcgccgaagtggtgagcggccggggcttcgcctacgcgcgctatttccacagcaagttccccggcttcggcgccgcctgggcggcctgggtgtgcgatctcagcgtcaaccgccgctccgggcagatcacgctcgataaaatcttcgtggcgcatgactgcggccgcatgatcaacccggccggggtgcgccatcaggtgcacggcaacattatccagtccgccagccgggtgctgaaagagtttgtgaccttcaacgagacgggggtgacgtcattagactggggcggctatccgatcctgcgcttcgacgaactgccgcagatcgatatccagctgatcgaccgcccggaggaagcgccgatgggcgccggagagtccgcctcggtgccgagtgcggcggcgatcggcaacgcgctgtttgacgcgctcggcgtgcgcctgcgcgaggtgccgtttacgccggagcgggtgctcgccgcactgcgcgctcaggccggccattaa

SEQ ID NO: 427146 - DNA, 642 bp, Serratia marcescens
atgagcgaaaaaaatactgcggcgcgtttaacgcgtgaaaccgtcctgcgcggggcgctggcgttactggatgacatcggcatcgatgccctgagcacccgccgcctggcgcaacatctgggcgtgcaatcccccacgctctattggcacttcaaaaacaaggccgagctgctgaaggcgatggcggaaaccatcatgttggatcaccgcgaagaggtgcccgtcgatatcccctggcaggcctgggtgaccgccaatgcgatcaacttccgccgcgcgttgctggcttaccgcgacggggcgcgcctgcatgccggcacccggccgcaggaaccgcaattcgccatcatcgaggccaaggtggcgctgctgtgccgggcgggctttacgccggaacacgctgttaatctgctgttcgccgtcgggcgtttcgtggtgggttgggtgctggaagagcagcaaatgcagcccgatgatgcgctgaacgaagccgatcgccagcgctacccgctgctgtgtggaggctgggaaaagctgcaggggaagggggcagacgcgctattcgaagccggtctccggctgttggtcgagggcgccgaggccgcattgacgaacgccaataatcacggcgcgcaatcatag

SEQ ID NO: 427147 - DNA, 1170 bp, Serratia marcescens
atgctggttattttgttgacggtgttgctggatgcggtgggtatcggtctgatcatgcctattctgccggcgctgctgcgctcgctgggcggtctcgatgccggcagcgtgcattacggcgctctgctggcggcctatgcgttgatgcaattcctgttttcgccgatcctcggcgcgctgagcgatcgtttcgggcggcggccggtgctgttgatttcgctcgccggtgcggcggccgactacctgctgatggcgttcgcgccgacgctggcctggctctatctggggcggttgctggcgggcattaccggtgccaacatggcggtcgccaccgcttacgtcacagatattacccccgccggccagcgcgcgcggcgtttcggcctggtgggcgcggtgttcggcgtcggctttatcgtcggcccgctgctcggtggatcgctgggcgaatggcatctgcatgcgcccttcctggcggcggcgatgatgaataccctcaacttggtgatggcgtttttcctgctgcccgaatcgcgtaaatcccgcccccgcgccgccgagaaaattcgccttaatcccttctcgtcattgcgccggctgcacggcaagcctggcctgctgccgctggccggcatttatctggttatggcgctggtttcgcaggcgccggccacgctgtggattttatacggtcaggatcgtttcggctggagcatgatggtggcgggcctgtcgctggccggctacggcgcctgccacgcgctgtcgcaggcctttgccattggcccgctggtcgcgcggcttggcgagcgcaaggcgctgctgatcggcctggccgccgacgccatgggcctggcgctgttgtctgtcgccacgcgcggctgggcgccgttcgccctgctgccgttcttcgccgcgggcggcatggcgttgcccgcgctgcaggcgttgatggcgcacaaggtggacgacgatcatcagggcgagctgcaagggacgctcgccagcatgggcagcctgatcggcgtcgcggggccgctggtggcgacggcgctgtatgccaccacgcgcaatgtctggcccggcctggtgtgggcgttggccgccgccctgtacctggtggtgccgccgctgctggcgcgctcacgagccagggatgcggcgccataa

SEQ ID NO: 427148 - DNA, 735 bp, Serratia marcescens
atgtttacccataaagcaatcgccgagctcaacgccctggagctgatggtttataactacgtcagcaaacacaagaatcaagtgatgtacatgaccatccgcgagctggccgaggccgccggggtgtccaccaccaccgtgctgaggttttgcaagaaaatgggctgtgagggctattcggaatttcgcatccgtttcaagctgtacctggaacaaaccgatgcgccgccggccgattccggcatcggcgaaatcctcagcttttttaaaagcgtcagcaacgaagagtttaatcagctgatcgatcaggcggtgcaccatatcgccgccgccgagcgaattattttcgtcggtatcagcacctcaggcgcgttggggaaatatggcgcgcgtttcttttccaacgtcgggaaattcagcacccacatcgacgatccttattatccggtcaacagcgacatgtataaaaacgcggtggcgatcatgctgtcggtcaccggcgaaaccgaagagatcctgcggctggccagccagttcagcctgcaccactgcaagatcatcagcatcaccaacaacgaaacctcttcactgacacggctggcggacttcaacctctcctaccacgttccgcagcatttgatcggcgggcatcacaatatcaccacgcagatccccgtgctttacattattgaaaccatcggtaaacggctcgggcatattaattcggcaaaataa

SEQ ID NO: 427149 - DNA, 1431 bp, Serratia marcescens
atgaaacagttgccgaaggattttctgtgggggggcgcggttgccgcgcaccaggttgaaggcggttgggatcggggcggcaaagggccaagcatcgccgatgtgctgtccggcggctcgcacggcgtggatcgcgtgatgaccgacggcgtgctcgacggctatcgctaccccaaccacgaagcggtggatttctacggccgctataagcaggacgtggcgctgttcgccgagatgggcttcaaatgcttccgcacctcgatcgcctggacgcgcatcttcccgaacggcgatgaagcgacgccgaacgaggccggcctgcagttttacgacgatctgttcgacgaactgctgaaatacggcatccagccggtgatcaccctgtcccacttcgaaatgccttaccatctggtgaaggcctacggcggctggaaaaatcgccgggtggtggagttcttcgtgcgcttcagcgaggtggtgatgcgccgctaccgcgaaaaagtgaagtactggatgaccttcaacgagatcaataaccagagcaactaccgctatccgctgtttggctactgctgctccggcgtggactacacccaggaagacaacccggaacaggcgctgtaccaggtgctgcaccaccagttcgtcgccagcgcgcaggtggtcaaactcggccatcagatcaacccggaattcaagatcggctgcatgctggcctgcgtgccgttctacccgtattcctgcaagccggacgacgtgatgtacgccgtcgaggcgatgcaccaacgctatctgtataccgacgtgcagatgcgcggctactacccaagctacctgctgcgcgattgggaacgcaaagggctgaagatcgagatgcagccgcaggacgcgcagatcctgcgcgagggctgcaccgactacatcggcttcagctattacatgagcaacgccctgcaggctaacgcggtggacggcagcgacggtatgttcggcttcccgggcaacataccgaacccgcacgtcaaagcctccgactggggctggcagatcgatccggtcgggctgcgctattcgctgaacgtgctgtatgaacgctatcagaagccgctgtttatcgtggagaacggctttggtgccttcgacaaggtagaagcggacggccagatcaacgatgactatcgcatcgactatctgcgcgcccatatcgaagagatgaagaaagcggtgattgaagacggcgtagacctgatcggctatacgccgtggggctgcatcgactgcgtatcgttcaccaccggcgagtacagcaaacgttacggcttcatctacgtcgacaagcatgacgacggcaccggcacgctcgagcgttcgcgcaagaagagcttcgactggtaccgccgggtgatcgccagcaacggcgaacagctgtaa

SEQ ID NO: 427150 - DNA, 690 bp, Serratia marcescens
atgcatcgagagcggcacagtattgaacgcatcggctggctgcgggcggcggtgctcggcgcaaacgacggcatcgtctcaacggccagcctgctgctgggcgtagcggcggccagcgcctcgcattccgcactgatgatcgccggcgtcgccgggtgggtggcgggcgcgatgtcgatggccaccggcgagtacgtgtcggtgtcgtcgcaggcggacaccgagaaggccgcgctggccgaggaacaggcggagctgctcgaagactatccgggggagttccgcgaactgacgtctatctacgtgcatcgcgggctggacccggcgctggcccggcaggtggcggaaaagctgatggcgcatgatgcgctggaggcccacgcgcgcgacgaactgggcatttccgccgccacgcgcgcccggccgctgcaagccgcgttggcatcggccctcagtttctctctcggcgcgctgttgccgctgctggtggcgctgtgggtgccggttgcctggacgcggccggcgctggtgacatcggcgctgatttccctcggcattctcggcggtatcgccgctaaaaccgggggtgcgccgatcttgccgggcgtggcgcgtatcctgatctggagcgccctggcgatggcggtttcctccggcgttggcatgctgtttggcgtcgcggccggctag

SEQ ID NO: 427151 - DNA, 2139 bp, Serratia marcescens
atgcacctgtcagttcttcgccgccccaacaaaaacaaaaaaaatcacgttttccgctcgctgcccctggtcgccggcctgttccccgccctggcgatcgccgccgcgcccgacgcaaaaaaggaagacgccatcacggtgaccgccaccgccctgcctgccggcagctatagcgccgataccgcctcaaccggcagcaaaaccgccacgccaatcggtgaactgccgcaatcggtcagcgtcgtcacctcgcaggtgattgacgacttccaggtcaaaagcgtcaatgacgcgatgaaattcgtcagcggcgtcacccagggcaacacgctcggcggcaccgaggatggcttcgtcaaacgcggtttcggggttaactccgacggctcggtcttcatcgacggcgtgcgcagcaaccaggggctgagcatggacgccactaccgagcgcgtcgaggtgctgaaaggttccgcttcgctgctgtatggcatcctcagccccggcggcgtcatcaacctgatcagcaaaaaaccgcagtatgactggaacacccgcattagcggcgccaccaacagcttcggcggcggcagcggcagcgtcgatgtgaccggcccgctgggcggcggcttcgccttccgcctgatcgccgagcgccagcacgaggattactggcgtaacttcggcagcgacgaacatacgctgatcgctccttcactcagctggttcggcgaccaggcttcctttaacatcgcctacagcgagtacaaatacgacattccttacgatcgcggcaccgcgtttatcgacggcaaaccggtcgacgtgccctataaccgccggctggatgactacgccaaccgcgcctggggcaagaacaaacgcctgaacgcccattatgaatatgcgctggatccgatctggaccacccgcctcaactacgcctggctgcagcgccgttacgacagcaacgaagtgcgcgccaccgcgatcgacaccgcgaccggcatcgtttcgcgccgcgccgacgccaaccgcggcttcaatcaccagaccgattattattcctgggatgtgaccggttcgccggaggtgttcggcatgcaacacgacctgctgctgggcgtggactacgagaagaaccagacttacaaggcctactcctatcgcggcaaggtgtcgaaaacgttcaacatgtacgatccggcgtatggcgaagcgcccgtcaccgacagcaccacctacaacgacgcattgagcaacctgcgcacgacgctgttcagccgttccctgtatgccaaggacagcattcatctcaccgaccggtggattgcggtgctcggcgcacgctatcagtcgtattaccagaacaacagcaacggtttccagaagccgaaaaatacgctcaatgacaaagacaatcagtttttgccgcaggcggggctggtgtataagctgacgccgaacctgtctctgtacggtaactacagccgttccttcacgccgtccaccgccatcgacgataacggcaacgtcgccacgccggaaaccggcaccacctatgaggtgggcggcaaatggcagatcaccccggcgttcgacgccacgctggcgctctatcgtattgatgaaagcaatatgtcgatctttatcaacggcgtgacccgcagcattcccaaggcgcgatccaccggtgctgaactggagttgaacggcgaagtggcgcccaactgggatctcaccgccaattacagctacgacaaaaccgagatcgtcgaagacaacctcaatccggtcaacgtcggcaaccggctggtcaacgccccgaccaacatgggcggtctgtatctcagccaccgcatgacgctgccggtggtgcccggcgaggtgcgcgtgggcggcggcgcacgctatgtcggccgccgcgccggcgatccggagaacagtttcaccatgccggcctacaccgtggcggatgcctttgtcgcctgggacagcaagctgcttggcaaacatactcagctgaaactgaatgtgaaaaacctgtttaaccgcgaatactacgcctccagcgccggtaacctgcgcgtgattgaaggcgaaccgcgcagcctcagcctgcaggcgactgtcgatttttaa

SEQ ID NO: 427152 - DNA, 504 bp, Serratia marcescens
atgctggaggcggggcattttgacatcatcgaagaggacatcatgagtgaaagcatcatggtcaggccgctggaagcgcgggactacgccgcctggctggcgctgtggcaagggtataacgcattttacggccgtgagggggcaacggcgctgcccgacgaggtgacgcagaccacctggcggcgtttttttgacgcctatgaaccgatgtttgcgctggtcgcggagcatcagggtcaggtggtcgggttgacgcactatctcctgcaccgcagtacctctcagctgcagcctaactgttatctgcaggatctgttcactgcggagacggtgcgcggcaaaggggtggcgagggcgttgatcgcggcggtctatgaacgcgcgcagcagctggggttgccgcgtgtttactggaatacccacgaaaccaaccagaccgccatgcggctgtatgacaaggtggcggagcgccccggtttcgtgatgtaccgcaaggcgctttga

SEQ ID NO: 427153 - DNA, 816 bp, Serratia marcescens
atgcaaaccgacgacgagttgacccgctttgccgcgcagggcgcgccgccgttgccgcccacgtccaggcaggggtttgtcgaacatgacggggcgcgcatctggtatgccgcctatggcgtggcgccgacggtgatcctgctgcacggcggcctgggccacagcggcaactgggggtatcagctgccggcgctgctggccgccgggtatggcgtgctggtcatcgacagccgcgggcacgggcgcagcacgcgcgatgcccggctttaccgttacgaccggatggctgatgatctggtggcggtgatggatgcgttgcggatcccgcacgccgcgctggcgggctggagcgacggcgcctgcgtcgcgcttatcgccgcccatcgggcgccgcagcgggtggacggcgtctttttcttcggctgcaatatggatcccagcggcgttaaaccgccgaccgccaatccgatcgtcgagcgctgtttcgcccgccacatacaggactatgccgcgctgtcgccgacgccgcaggagttcgatgaattcgtcgccgccgtgagcctgatgatgagtagccagccgaactacaccgcgcaggaattggcggccattcgcgtgccggtgacggtcgttcacagcgaacacgatgagtttatccgcgccgaacatgccgcttacctaagcggcagcattcccggcgcccgtctggtgacgctgccgggcgtcagccacttcgcgccgctgcagcggccggcggtgttcaaccgcgcgctgctggattttctcgccaatgtgatgccgccgcctgcgcgctga

SEQ ID NO: 427154 - DNA, 2430 bp, Serratia marcescens
atgttaaagcctcgcccgttcctgctgttgttgttattgctgttgggtttgcagctgacgccgctcgccgccgtcgccgctacccaggatgatcccgccgccgaaagcgcgcccgatcccgctacgcagctgaaagccgcgcaaaagcagttggacagcatgaagcagctggtttccaaagcgaccaccgatacccagctcagcaaactgcggctggcgactgacgatctggtcgccggcatggaaaaacttgccaccgatctgcagcccgagcaggacaaactgaaagcgcagctggacgtcctggggccggccccggcggccggcgcgctgccggaaaccccggcggtggcgcagcagcgcaacgcgctgaacaacagcaaaaagcagctggatgacgcggtgaaacgcgcgcaggccatcaagagcagcgccttcgatctggggcagcagattggcgatctgcgccgggtggcgtttaaaacccagctggcgctgaataccggcagcattttgggtatcaaattctgggcgccggtgctgcagccgtcagaggatgacgtacagcggctggatcagtttaacgccgagatgaaagcggcctgggacgccagttggcaggacgaatggcggtacggcacgctggcgttgctggcgctggcggtgattgtctggtcctgggggcgctatttctccgagcgtttcctcgcctgggtcagcatccgttttctgccggacgggcgactgcgccgcagctttatggcgatcgttaccgtggcggtgacggtgatcaccacctccatcgcgctgaacctgctgtattacgtctttgtgcgcgtgcagccgctgccggtgacgctggaggatttcgcggaaggtttcaaccgtctggggattttctgcgcgctgatcgccgggctggggcgtgcggcgctgtctctgaatcgcccgtcgtggcgtctggcgtccatggataacgacgtggccgccgggctgcgttacttctcgccgctgctggccggcctggcgctggcgttcggcaccgtggagctgatcaacaacgtcgtcagcgcttcattggccactaccattttcggcaacggcctggtggcggggttgatcggcatggtactgctggcggcgccgctgcgcggccagcgcattcgtcgccgtctggaacagcagggcgcgcacctggaaaaacgcacgctggtcggcgggctggtgcacctcgtcaccctggtctgttcgatggtgatcctgttttccctgctcatcggctacatcgccttcgcccgcttcctgacctaccagctgatctgggtggtgctggtgctgatggcgttctattttatggtgctgttcgccaccgatttgtgcgccgcgctgttttcgccgcaaaccgtcagcggcaagatgctgaagaaaacgctcagcttcaaggatcgccatctggagcagatgtcgatcatcaccaccgcgctggccaaatgctccctgttgctgttgatgatcgtcgcgctgttcaacggctcgttcggcagcaccacgccgggatcgctgatggagaaaatcgtctccatcctgaccggtgaagggctgcagcgtttcaacatcgtgcccggcaacctgctcaacgccgtgatctgcctggcgatcggcatctatattttgcgtgcggtgcggcgctggctgggttctgaactgctgccgaaaaccatctcggacgtcggcatccgcgcctcgttggtgacgttgttcagcaatatcggctatgtgctggtgattctgatcaccctggcggcgctgggcatccagtggagcaacctggcgtggatcgtcagcgccctgtcggtcggtattggtttcggtttgcaggagatcgtgaagaactttatttccggcctgatcctattgaccgaacgcccggtgaaggtgggggatatgatcggcatcggcggcgtggaaggcgacgtacggcgcatcaacgtgcgcgccaccgaaattcagctcagcgaccgttccaccatgatcgtaccgaactcgcagctgatctcgcagaacgtgcgcaacgccaccatgggcaacgcgcagggcgtggtgaccatcgcgttgacgttcccgacctccatcgatccggagcaggtgcgcaatatcttgctcagcgcctataacgagtacgaaaccattctggaaacgccggcgccttatgtgcgcttcagccagctggggccggacggcattatcctgagcgtgaccggctacgtgccgagcccgcgcatggtcggcgccaccaagagcgaactgctgttcaatatcctcaagctgctgcgcgcgcaggaagtgagcctgtccagcccgcaggaagtggtgtttatgaagcagcaggcgacgcgatatcaggccaacgaagaggagcactcctcctag

SEQ ID NO: 427155 - DNA, 1731 bp, Serratia marcescens
atgagcacactactgtctgcacaatctgtcggttacgacaacgcgttcggcgtcctgctgagcgagatttccttcagcctgaaaaaaggcgatcgcatcggtttgatcggcgacaacggctgcggcaaaagcaccctgctgcaactgctcagcggcgccctgcccatccacagcggaacggtgacattgtcacaccaatgcctgatggcgcgcatcgaacaacacctgccgcctgagctgcacgccagcaccctgctggatgcggtactggcgcagttgcccgcgggccaacacctcagcgaacgctggcgatgtgaagcgctgcttgccgagctggggtttgaaccgacgagctggacgttgaccgccggcaccctcagcggcggccagcacacccgcctgctgctggcgcgcgcgctgatccgccagcccgatctgctgctgctcgacgaacccagcaaccacctggatctgcccacgctgctgtggctggagcagttcttgcgcagctggagcggcagcttcgtgctggtatcgcacgatcgctatctgctcgatcaggtgaccaactgcacctggatcctgcgcgacaaaacgctgcagttcttccgtttgccctgctccgctgcgcgcgccgcactggcggaacaggacgctgcggacgagcatcggcgccaggccgagcaaaaagagatagaccgggtggaaaaaagcgccaaacgcctggcgacctggggcaaggtctatgacaacgaagatctggcgcgcaaagccaagcaaatggaaaagcgcgtcgatcggttgaaggaagaacagaccaccctgaccgccggcagcccgtggcggctgcgattacagggagaggcgctggacgccgatcgcctgctggcgctgccgcaatgggccgtgcgcccggcgccggatgcgccggtgctgttcagcctggaacatctgcgcgtcaaaagcggcgatcgcatcgccatcgtcgggcgcaacggctgcgggaaatcgtcgctgctgcgcttgctgtggcaggcgtatcagcaccccgcggaacgcccggcgatcttccacccgcgcgtgcgcatcggctattacgatcagagcctgcaacagctgcgcgatgaagacacgttgagtgaagcgctggcgcagtttgcgccgctgaccgaggaacagcggaaaatggcgctgatcggcgccggtttcccttacctgcgccaccatcagcagatccgttcgctgagcggcggcgagcgttcgcggctgctgttcgtcggcctgacgctggccaaccattcgctgctgctgctggacgagcccaccaaccacctggacatggcaggcaaagaagagctggcggaaacgctgcgccagttcgccggcgccgtcatattggtcacccatgaccggatgctgatcgaacagagctgcaaccgcttttggctgatcgaccagcaaaaactagaggagtggcacgatctggcgccggtgtatcagcgcctggcgggcgaagcgccggcgctaccgacggcgggcaaggccaacgcaggcggcccgacgccagatgagcgactggaaggcgaagaagcgctgttgaccgccctgtttgccctcgaaagcaaactggaggatgacctggcgcgcaagccgaagcaccagaaaccggcgcttcaggcgcgctggcgccgcgagattgccgacatcaccgcccggttgaatctgggctaa

SEQ ID NO: 427156 - DNA, 441 bp, Serratia marcescens
atggcattttcccttgagcaggctacgcacgcgcagcggccgctgctggcggtcatgctgtccgattgccttcgcgagctgggcgccgatggcgattacccctatcttccgctctactggcgcgaggtcggccgctacccctatttgattttgagcgatcggcaaacggccggtttcgcgttggtccggcgcctggacagcgccaccgtcgaaatggcggagttctacatcaagcccgagtggcggcgcaccgggctggggcaacgggccgcccacgccttgttcacgcagcaccccggcagctggtcgctgtcgatcagcccggataatccgcgcgggctggcattttggcgcgcggtaataccggccggggccacgaccgaaccgctttcggcccccgatgccatgatgcagctgcgtttttcatccccgccgcgctga

SEQ ID NO: 427157 - DNA, 1434 bp, Serratia marcescens
atgtatccggatactcaactgtatatcgatggacaatggcgcaacgcgctggccgggaaaaccctgccggtcaccaaccccgccaccgaccagataatcggtcaagtggcgcacgccgccacagaggatctcgatctggcgctggccgccaccgagcgcggatttaacgtctggcgcgacaccgccgcgcaccagcgcgccaacctgatgcgcaaagcggcggcgctgctgcgcgaacgcgccaatgccatcgccgccgtcatgacgcaggaacagggcaaaccggtggcgcaggccaaaatcgaaattctcaacgccgccgacgtcatcgactggttcgccggcgaagccacccgcacctacgggcagatcattccgtcccgcgcccgcgacgtgcagcagcaaaccctcaagctgccggtcggcccggtggccgccttcacgccgtggaacttcccgatcaaccagatcgtgcgcaagctgtccgccgcgctggccgcagggtgttccatcatcgtcaaaggcccggaagaaacgccggcctcgccggctgagctgatcaaagccttcgccgacgccgggatcccggccggggtgatcgcgctggtgtacggcaccccggcggaaatctcggaatacctgatcccgcatccgaccattcgcaagatctccttcaccggctccacccgcgtgggcaagcatctggcggcgctggccggccagcatatgaaaaaggccaccatggagctgggcggccacgcgccggtgttgatcttcgacgacgccgatctcgacgcggcggccaaagagctggcgcagtccaagttccgcaacgccggccaagtctgtatcgccccgactcgcttcctgatccagcaaggcgtttatgaagccttcgtggagaaattcaccgccgccgtgcgtgagctcaagctcggcaacgggctggaagacggcgtgaccatggggccgatggtactgggccgcagcgtcgataatatcgaggcgctggtgcaagatgccgtcgcccacggggcaaaagcctgcaccggcggcaagcgcgtggcgggcaaaggcaacttcttcgagccgacggtgctgcgcgacgtgccgctgagcgcgcgcgccatgtcggaagagccgtttggcccggtcgccctgctgcgcccgttcgccacctataacgaggcgatcgccgaagccaaccgcctgccgtacgggctggccgcctacgcttacagccgcaacatcgccaccgtcaatgcgctggggcgcgacgtggagagcggcatgctgagcatcaaccacatcggtttcggcctgccggaaacgccgtttggcggcgtgaaagactccggtcacggcaccgaaggcggcagcgaagcgatcgagtcctacctggaaacccgcttcgtcaccgtcgccggccgttaa

SEQ ID NO: 427158 - DNA, 303 bp, Serratia marcescens
atgctgttcgatttaaacctgcaggcggccgaactgcctgaggcctggcgttctaccgtgctgggccgcgtcggtgcggccaatatcaaagtgctgcgcatggatgagcgcagcattgcggatgaagtgcatgattacagcgaagggctgctggtgatccgcgggcagctgcggctgcaggtggcgggggaaacgattgtggtgcaggccggccagctgtatcaggccgcggccggcgtgccgcaccgcgtgttgccgggcagcgaaggcacgctggtgattttcgatctgccggaagattaa

SEQ ID NO: 427159 - DNA, 1881 bp, Serratia marcescens
atgtctgtcggcaatgatacggaaacctcgaacaagaccggcctggcgccgttggcgctgggcgctttgggcgtggtgttcggcgatatcggcaccagcccgttgtacaccctgaaaaccgtgctgtttctctccggcgatgcgccgtcggcgccggtgatccttggcctgctgtcgctgattttctggacgctggtgatcgtcacctcgctcaaatacgccatgttcgccatgcgcatcggcaaccgcggcgagggcggcatcatggcgctgatgtcgctgctggtcagcaggcggaaatcccggccgctggtgctgttcgccggcctgttcggcgcggcgttgatctacggcgacggcgccatcacgccggccatctcggtgctctccgccctcgaggggctgaatatcgtgctgccggcgtcgcagccctacattctgccggcggcggtggtgattttgctcagcctgttcgccattcagccgctgggtaccgcacgtatcggccgcgtgttcgggccgatcatggcgctgtggtttctgtcgatcgccgcgctgggcgtgtggggcatcacccagcacccggcggtgctgctggcgctgaacccgatgtacggcattcatttcctgttctcgaacgggctgaccagtttcctggtgctgggcggcgtgtttctgtgcgtcaccggcgccgaagcgctgtacgccgacatggggcacttcggcaaacggccgatttggctggcctggttcggcatcgtttttcccagcctgttgctcaactacgccggccaggccgcgctgattttggccggcgccgacgtcacgcagaacatcttcttccgcctgtgcccgccggcgctgctgatcccgttggtgatcctggccacgctggcgacgatcatcgccagccaggcgatcatcagcggcgcgttttcgatgacccgccaggcaatccagctggggtggctgccgcggctgcgggttaaacaaaccaccgaggaaagctatgggcagatctacatcggcgccatcaactggctgctgatggtggtgacgctgttcctgacggtgttcttcaaatcctcggacaatctggccgccgcctacggcatcgccgtctcgttgaccatgatcatgaccaccggcttgctgttcgtggcgatgcgcgaggtgtggcgctgggggctggccgccagcctgttggtggcggggtgtttcttcgtggtcgatctgagcttcctgacggccaacctgaccaaggtgttgcagggcggttacatcccgctgctgctggccgccgcggtctataccgtgatgctgatctggcatcgcggggtgctggcggccgtgcgcaccctcggcgagacgacggtgccgatcgcggatttcctggcgaaaatccagcgtgaatccgtgccgcgggtgccgggcaccgcggtctttctcacccgcagcctgcagggcacgccgccggtaatgaaatggcacgtcaaacgcaacggctcgctgcacgccaacgtgctggcgctgaccattgccatcgtcaatgaaccgcgggtatcgaatgccgaacgcctggtgatgcgcgaactggcgccggggttttggtgcggcgtggccagctacggctttatggagcggccgaacatcccgcagctgctgcagcacgttgaggcgcaaaaatgcggcctgaacttcgacgaggcgacttactatctcggccatgaaaccgtggtgcgccgcgaggcgagcgaccggttgccgtactggcagcgcaacctgttcgcgctgatggtgcgtaacggcatgcacgtcacggattattattacctgcccagcgatcaggtggtggagatcagccgccgggtgccggtatag

SEQ ID NO: 427160 - DNA, 1740 bp, Serratia marcescens
atgaacgtccggctcaacacccatgtttccgcccggcgcctgctgcccaatggctgggacgtcatcgcctttccgctgatcatcggcctgatcgccatgatggccatcggcctgcatcaaaccctgcaaccgatcgtcacgctgaaaacgcaggcgatatcgctcgatcccgccaacctgccggaatacgccctgcgcaccacgctgcgcatgctggtggcgatggtggccgcactggcgttctcgctggtctatggcaccctggcggccaagagccggcgcgccgaaaaggtgctggtgccgatcctcgatatcctgcagtcggtgccggtactcggctacatctctttcaccgtcacctttttcatcgcgctgttccccggccgggtgctgggggtcgagctggcggcgatgttcgccatcttcaccagccaggcgtggaatatgaccttcagcttctatcagtcgctgcgcaccgtgccgcgcgatctgcaagaagtggcgcgcggcttccatctgagtccgtggcaacgtttctggaagctggacgcgccgttcgccatgccggggctgatctggaacatgatgatgtcgatgtccggcggctggttctttatcgtggcgtcggaagcgatcaccgtcggcaacaatacctttacgctgccgggcatcggcgcgtatctcgcgctggcgatcctcagccaggatctgcccgcgataggttgggtgctgctcaccatgacggtggtgatcctggcctacgatcagctgctgttccggccattggtggcatgggcggacaaattccgcatggaaaccacccgctcggcgagcgcccccacttcctggctgttgaacctgatgcgccgcacgcgcctgatccacctgctgctgacgccgctgggcgcgctgctggccaaaaccgcgcgcctgaaactgagcctgcccgcccggccgttgcgccgcggcaatagcgcccaacggcagcggcgttcgcgcatgctcgatcggggttggagcgccatcgtcatcctgctgacgctggcgatcgcctggcgcgtcattctctatgtacagaccggcgtgacgctcaatgacgtgggccatgtgatggtgctggggctgatcacgctgctgcgcgtggcggtgctgatcgccctgtcgtcgctgatctgggtgccgctcggcgtgctgatcggcctgcgcccgacgttggccggaaagatccagccgatcgcccagtttctggccgcgtttccggccaacctgctgttcccggtgttcgtcatcaccatcgtccacttccggctgaaccccgatatctggctgtcgccgctgatcgtgttgggcacccagtggtacattctgttcaacgtggtggccggcgccaccgcgttgcccaacgactaccgcgaggccgccgccaattttcacattcgcggttggcaatggtggcgccaggtgatgctgccgggcatcttcccctattacatcaccggcgccatcaccgcgtcgggcggcgcctggaacgccagcatcgtggcggagttcgtgcaatggggaagcacccaggtgaaggcgcacgggctgggtgcctacatcgccgaaaccaccgccgccggcgatttccccaagatcattttaggcatcgccgtgatgtcgctgttcgtcacgctattcaaccgtctgctgtggcgcccgctttacgcctacgccgaatcccgcttccgcatcgattaa

SEQ ID NO: 427161 - DNA, 1320 bp, Serratia marcescens
atgtcagaccttcacccaacgcaggcgacgcactcgcccggcgaggaaattttagcggtcaacgcggtcagccatggctatgacaaggcacatggcgagctgctgatcctcgacggggtcaatctgtcgctgcgggcgggcgagatcgtcgggttgctgggccgctccggctcgggcaaatcgacgctgctgcgcatcatcgccggcctggttacccccaccgccgggacggtgaactacctggggcagccgctgaacggccccgccaaaggcgtcgccatggtgtttcaaaccttcgcgctgttcccctggctgacggtgctgcaaaacgttgaggccggcctcgaggcgctgggcgtcgcccctgccgaacggcgcgagcgggcattggcggccatcgatcttatcggcctggacggcttcgaaaacgcctacccgcgcgaactttccggcggtatgcgccagcgcgtaggcttcgcgcgcgcgttggtggtggatccgacgctgctgctgatggatgagccgttctcggcgctggatgtgttgaccgccgaaacgctgcgtaccgacctgctggatctgtggaccgaggggcgaatgccgatcaaatcggtgctgatcgtcacgcacaacatcgaggaagcggtcttcatgtgcgatcgcattctgctgctctcttccaaccccggccgggtgatcgccgaaatcaaggtgccgttcagccacccgcgcaaccggctggatccgcagttccgccgcctggtggacgatgtgtacgccaagatgaccgcccgcccgaccgacggtaacgtcaagaaagggctgaagctcggcacccgactgccgcacgtgtccaccaacctgatcgccggcctgatcgaaaccctggccgccgcgccctatttcggccgcgccgacatgccggagatcgccctctcgctgcatctggaggtcgatgagctgttccccatcgccgaagtgctgcagtcgctgggcttcgccgacgtgcgcgagggcgacatcttccttacgccgccggcacgcgccttcgccgacggcgacgttcaggcgcgcaaagtgctgttcgcggagcatctgctgcgctatgtgccgctggccgcgctgatcaaaaacgtgttggacgagcggccggggcaccgcgcgccgcgcgtgcgtttcgagcaggagctggaggattcgctgtcggacagcgccgccaaagagacgctggatacggtgatcaactggggccgttacggcgaaatcttctcctacaacgatcaaacggcgtttttcagcctggaggacgtcgagttttaa

SEQ ID NO: 427162 - DNA, 588 bp, Serratia marcescens
atgaattaccaggtggtgccgttttggttttactccggcaaggttctgctggcggtagtggccgcgatcggattggggctgtgtggcgtcaacgcggcgattttttactgcctgctgttcgggattgcctggccggtcgccgtttcgatgcggttgcatcagtgggtggaaaagggcgtggcaatgaatccccggcaggcttcgcagtggatggtctatgtgcagggcattccggtacaggaaacccgccaggtgttaaccaatccctgttttgccttggaaaatcagatgcgcaccttttttctgcgcgcttttgccgggaaagcggtgctgcagatggcgctgttgctgctgttgatcgcgcagctggcggcggtggctaatccgtggatcgcctcggccggcgcaatgtttggcgcctggctggtgtaccgatccgtcgacggtacgcgcgccttgcgcgaagtggcccggcaaagctgggtcagcgagcggctggtcaccgcacatgacacggtctggtatcgggcgacgtttaacggccgtaaagggacgatggcggcgctggatcgtttgttggcatggtga

SEQ ID NO: 427163 - DNA, 837 bp, Serratia marcescens
atgcaacagacttcacccttacggtcaccgtccatcgacgtgatcagcattcaatctcaggtggtctacggcagcgtcggcaacggtatcgcctaccgcgccctgctgaaaaaggggctggaagcgctgcaggtgcccagcgtgctgttcggctgcccaccctattatggcaaaccgcacggtggcgtcatctccggtgagtggttcggcggctttctcgacgatctgatcgcccgcggcgtgatgaaacgcacccgggcggtgatcgtcggttacctgggcgacgtgatgcagtgccatattctggccaattggctgcagcgggtgcgcgccctcaatccgcagataaagatctatatcgatccggtgatgggcgattacggcgaagggatctacgtggatgaacgcatcgtcaactgctatcgctcgccgttcctgcgactggccaacggcctgacgccgaacggtttcgaactggagcagctgtgcggccgctctctgagcagccgggaacagacgcaacacgccgcgcaggcgctgttgaacgacactaccgaatgggtgctggtcaccagcgcgccgggcgtggcgcagcacgaagacgaggtgggattgatgttggtcacccggcaggaaacccagtgctttacccatccgaaggtcaaatcggcggtcaaaggcaccggcgatctgttcaccgcactgctggtgagccatctgctacacggcgccgcgctcgacgtagccgcagccggcggtgaggtgtgcgacgtactggccgaagcggcgcatttgggatgggaagagatcggcagcctgcgggcattaaaaccgtaa

SEQ ID NO: 427164 - DNA, 783 bp, Serratia marcescens
atgcctcactcgtttatcccgccgttattgtccgccgatgaaccctctgccgccgccgttgaaatcccgcatggcaaagcgccatttttgctgctgtgcgatcacgccggcaaggcgataccgcaagccctcggcgatctcggcttaccgcccggagagatcgaacgccacatcggctgggatatcggcgcgctgagcgtgtcgcgccatctaagccgccagttggacgcaacgctgatccatcagcgctattcgcggttggtgatcgactgcaaccgggcgcccggaatcgccagctcgatcccgcacttgtccgagctgacgccgatccccggcaatatcggtatcgacgccgaacacgcgctggcgcgcgagcgcgaggtgtttttgccgtatcaccacgccattgacgatcatttagggcaacgtcaactgcgtgaactgccgacggcggtgatcgccatgcacagctttacgccggtgttcaagggggaatcgcgcccctggcaggtggggctgttgtttaaccgctacccggagtttgcccatctgctggccgagctgctgcgcgaagagggggatttgcaggtgggcatcaacgaaccttatgcgatgacggacgccaccgactatacgctgccggttcatgcggaacgccgcggtttaccttatgtcggcatcgaaattcgccaggatctgatcgccgacgaacgcgggcagcaggcgtgggcgaaacgtttcgcgcgcctgttgccgcaggcctggcaacgctggcaaatttga

SEQ ID NO: 427165 - DNA, 1722 bp, Serratia marcescens
atgttcagcctggattctctgttgcaagatgcatttccacaccgcaatacccctgcctggcagcgcagcctgctaagaacccttctcttcgaaaaagaattcaaacagttcgccgccgactatccccacctgaaagggctcgatctgatcgagcaggtggtggactacttcaacctcagctgcgagctggtggatggcgatctggaaaacattccgagccaggggccggtggtgctcgtggccaatcacccgatcggttcgctcgacggcctggtgctgctgcgcgccgtcgcggcggtgcgcccggatgtgaaagtggtggccagccagctgctgacctacatcgaaccgctgcgcaacctgttcgtgccggtggataacgtcgcttataaaaccagccgcaagcagattgaaggcatgcagcagcagctggacaatcagggcgcgctgatcctgttcccggccggcgaagtgtcgcgcatgagtccgaagggtatccgcgacggccactggcataccggctttctgcgtctggccgccaaggcgcgcgcgccgatcgtgcctattcatatcagcgcgcgcaacagcaacctgttctactttacctcgctggtctaccggccgctgtcgacgctgttgctggtgcgcgaaatgttccagcagcggggcgggcgcatcaagatccgcatcggcggccgcgtgccgttcgccaactggcatgacggtcacaccagcgccaaggatctggcggagcgttttcgccgccatgtgtatcgcctgggccagggcaaaccggggctgttcgccagcgaatcgccgatcgcgctgccggaagagcgtttggagctgaaaaaggcgctggcgaactgcgaacgcttgggggtgacgccggacggtaaaaccatctacctctaccgccgccacgacgaagcgcgcacgccgatcctgcgtgagctggggcgcctgcgcgagatcgccttccgtgcggtaggggaaggctccggccgccgccgcgatctggacagctacgacgacgactattatcacctggtgctgtgggatgaggaggagctggagatcgtcggcgcctatcgctttatccccaccgccgaacaaatcgaacgcaaagggctggaaagcatctacagcaatagcctgttccactacgaccgcgatatggaaccgatcctggcgcagggcatcgagctggggcgcagcttcattcagcccgcctattggggcaaacgcgggctggactatttgtggctgggcatcggcgcctacctgtcgaaatacccgcagtaccgttatctgttcggcccggtgtcgatctccggcggcatgccgctggcggcgcgcgatctgctgatcgccttctatcggctctacttctcgccggatcatgccttcgcgcagtcgcgccggccttatccggcgtcgctgccgcaggtgctggcgcagtttgccggggataactaccaggaagatctggtgcggctgaagagcctgctcagcaacatcggctgttcgatcccgacgctgtacaaacagtacaccgagctgtgcgagccgggcggggtgcagtttatcgacttcggcaccgatccggcgttcaacaactgcatcgatgggctggtgctggtggacaccacgcggctcaagccgtcgcgctatcagcgttatattgcagtgcatcagccacagccagccgagacggcatga

SEQ ID NO: 427166 - DNA, 1671 bp, Serratia marcescens
atgcgcctgtctctggtatttactcattgcctggagaaagtatttcatcgccacagcgtgccacctatttccgtggaggaacggctgagcgggttaaataacgaggtgctttcctggcaggcggtgtactgtttgcaaacgcccggcaacgaaacccgccatgagctgtgttatcaactcgacgggccgctggcggagtatatcagcgtgcgccaggtgcaatcggtgccgagcagttttccctgttatcgcgagaccgacgagaattacctgacgaccgagccgggcttatttcccgatccgctgataccgctgccgcaacggcgttttttcgccgcctgccgctattatggcagcctgtggctgaccctgacgccgccggccgacgcgcaactggccggcgactttccgttgaccctgcggctgctggatgcccagagcggcgaggcgctggccgaggccacgctgacgctgcatctggtgccggcggcgttgccgccgcaaacgctgttgcacaccgagtggttgcacaccgactgcctggcggattactaccgtctggcggtgttcagcccggattactggcgcgcagtgcgccactttgtgcgctgtgcggtgcgcgccggggttaatatgctgctgacgccgctgtttacgccgccgctggataccgccgtcggcggcgaacgcaccacggtgcagctggtgagggtgacgcgttcggcgcagggatatggcttcgatttcagccgcctggcgcagtgggtggcgctggcgcaggaagagggcatcgagcacttcgaaatcgcgccgctgtttacccaatggggcgcggcgcatgcgccgaagatcgtggtggaggagcagggcgaggcgcgagcgcttttcggctggcacaccgatgcgcagggcgaaccgtatcagcgtttcctgcaggcgctgctgcccgaattgaccgcctggttccgcgaacgggggctggaacggcaggtgtggttccatgtttccgatgagccgacgctggacaacctggcggcctaccggcgcgccgccgccgcgctgcggccgctgctggacggctttcgcaccttcgacgcgctgtcagatttcgctttctatcagcaaggcctggtggaaatcccggtcgccgcgaccgatcatatcgatccctttatcgaacaccgggtgcccggcctgtgggcctattactgctgcgtgcagaagaccgaggtcgccaaccggttcttcgcccagccttcggcgcgcaaccgcatattgggcgtgcagctgtatctgtaccgcatcgccggcttcctgcattggggattcaacttctataacagcgcccattcgcgcgagcgcatcaatccgtacgcggtgaccgacagcggccatgcgtttccctccggcgatccgttcgtggtctatccgggcgaggatctgcagccggtggagtcgctgcgcctgcgggtgctgcaccaggggctgcaggacatgcgcgcgctgcagctgctggagagtctgaccgaccgggcgacggtggaggcgctgatcgaacgcgagctgggcatgcgcatcaccttcaagcgttatccgcaccaggccgggccgctgctgcgcctgcgagaagcagtgaaccgccgaatcgaagcgttgctggcgccgatgtga

SEQ ID NO: 427167 - DNA, 1254 bp, Serratia marcescens
atgtcaccgataaaaaataccggacgcctgctggcgcactctattctcgccagcgcattattattacccaccctgctccacgccgcagataaaataacattacgctatgccgtttgggacagaaaccaattacctgccgaacaggagatcgccaaacgttttgaacaggccaatccggatataaaaatagaaatagaattaacgccctctgcgcaatatttcgttaaattggattccgctgccgccggcggtgtggcgccggatatattctggatcaatatgccttattttgtacaatacgccaaaaacggcattatggagccgctggcgccctatattaaggacagcggccttaagctggacgacgtggtcgccagttcggtgaaagcctaccagtacgacggccaacagatggccattccgcgcgacgtcgactccatcgccgtgtggtacaacaaaaaactgttcgatcaggccggcgtcagctaccccaccagcgactggagctgggacgatctgaaaaacaaagccaccgccctgaaaaacgggctgaaaggcgccgccttcccgctggtgatggatctcagcatcgacggccaggacagctatatgaacctgctgttccaaaacggcaatcacatcgtgccgaaagacggccaacccaccgacatcgccaacgacaaatccatctgggtctaccagcagctgcagggcatgatgaaagacggcctgatgccgagcgcccagcaaatgagcgaagtcaaaaccgagaacatcttccagtccaaccgcgccgcgatggtctatgccggttcctggctggcggcgccgttcgccaacaacccgctgatcaacgatcacatcggcgtggtgatgatgccgaaaattgaacgccagtccggcgtagcgcacagcctggccttcgccatgtcggccaaaagcgcccacaaacaggccgcctggaaatatatcgccttcatgagcagcgaagcctcgcaggcggagctggccaaggtggtgatcccggccaacaagacggcggccaaggtctgggcgcagcagatccagaaagtcgacgtctcgccttacatccagacccttgaagtgacccaggcttaccccaccgccggcaccaatacgccgaaatggcagaacatgtggatcgccagcctgaagaaaatctttatgggcgcggacgccaagcaggaaatggacaagtcggtcaagaagatcgcgcgcgtcatggagcagtaa

SEQ ID NO: 427168 - DNA, 942 bp, Serratia marcescens
atgtcgctggcagaaacggctacggtcaccctgaaatcatcccggcgcaccgcccgtcccgcgctcaatcggctcgaacgcgccgaacgcttctggggctgggtgatgatcctgccgctgctgttaggggtcacggtgttttacctgatcccctttttgcagaacattttttacagctttaccgatctgaaccagttcatgcgctggagcagcatcagcgtcgataactatctcaacctgttcgaagacgacgacttctacaccgccgccgccaacaccctgttctacgtagtggtgtgcgtaccgatcagcctgagcctgtcgctactgttggcgatcggcctcaaccagagcatccgtggcaaaggcctgctgcgcaccctgctgttcctgccggcggtcaccatgcccgcggcggtggccatggtgtggcaatggctgttcaacaaggatttcggcctgatcaaccaggcgctgggcctgctgcacattgcgccggtcgcctggctgtccgatccggacgtggtgcgcatcagcgtgtccatcatcatcatctggtcgtcgctggcgctgaagatcatcattttgctggccgggctgcagagcattccgcgccagctgtacgaggcggcggatatcgacggcatcggcaccctgcggcgcttcttctgcatcacgctgccgatgatggtgccgacgctgttcttcgtgtcggtgatgagctttatcgagatcctgcaaatcttcgacgtggtgttcctgatgttcgaccgcgcgctggtggaaaacgacgtgatgaccgtcaccaacctgttctacaagtacgcattttacctgcaggaaaaaggctacgcctccgccatcaccgtggtgctgttcgccgtcacgctggtgatcaccctgattcaaatggcgatcggcaagcgcctgaaagtcagctga

SEQ ID NO: 427169 - DNA, 819 bp, Serratia marcescens
atgaacgcaagcaagaaaacgctggtgtacctgtttatggggctggcggcgctggcctcggtcgtgccctttatctggatgctggtgacctcgctgaaaacccaggccgagagcatccagatcccgctgacgctgctgccggcgcaccccagcctgcaggcctacggccgggtgatgcacgaaatcccgttcgccggtttttatctcaactcgctgctggcgaccttcttcaccgtcaccctgcagatggcgatcgccaccctggctgcctatggcttctcgcgcctgcattttcgcggccgcgacgcggtgttcctggtgtgcgtgtcgatcctgatggtgcccggccaggcgtttctgatcccgcaatttctggtggtacagaagctggggctggtcaacagcatcaccgggctggtgctgccgggcattttcagcgtctacgccaccttcctgctgcgccagttctttctggcggtgccgaaggagatggaagaagcggccttgatcgacggctacagctacttcgccatcttctggcgcatcatgctgccgctgatccggccgggcattatcgcctgcgtcatcatcaacggcctgtggagctggaacaacctgatgtggccgctgatcgtcaataccaccaccgagaagctgacgctgccggttggcctcgcctcgctctccagccgcgccggggtggaatacccgttgctgatggccggggcgctgatggcggtgatcccgatgctgatgctgttcattattttccaacgctatttcatccagggcatcgccagcgccggggtgaaaggctaa

SEQ ID NO: 427170 - DNA, 1113 bp, Serratia marcescens
atggccggaattcagttaaacagcgttaaaaaagtctaccccaacggtttccacgcgctgcacggcgtcaatctggacattgaggacggggaatttatggtgttcgtcggcccgtctggctgcgccaaatccaccctgttgcggatgatcgccgggctggagagcgtcagcgaggggcagatcctgatccacgatcgctgcgtcaacgacagcatgccgaaggatcgcggcgtcgccatggtgttccagaactatgcgctgtacccgcacatgacggtgtacaagaacatggcgttcggcctgatcggcaaagagagcaaggccgaaatcgaccgccgggtgcgcgacgcggcggaaaagctggagatcaccaacctgctgcagcgcaagccgggccagctctcaggcggccagtgccagcgggtggcggtcggccgcgccatcgtgcgcaaacccaaagtgttcctgttcgatgagccgctgtccaacctcgacgccaagctgcgggtgtcgatgcgcgtgcagctgatcgaactgcacaatcagctgaagcaggaaggcgccgccgccaccatggtgtacgttacccacgatcaggtcgaagcgatgaccatgggcgatcgcatttgcgtgatgaaccgcggcgccatcatgcaggtggataaaccgatcaacctgtaccaccaccccgccaaccgtttcgtcgccgagtttatcggcagcccgtcgatgaacctgcacgatctggcgatcgtgcgcgacggccaaacggtgcggctgcgcatcggcctgcagcacccgctcgatctgccgccggcgctgcaacggcagttggcggactatccgcatgcgcgggtgtgcctcggtatccggccggagtccctgcggctgtgcgcgcctggcagcgccaactgcttcccggcgcagatcgtcaccatcgagcgcatgggcaacgaagagctgctgcactgcgagctggccgacctgcgcttcgtgctgcgcatggcgtcgctgccggactgggagccgcgcctcggcgaaagcgttcatctggcattcgatctgacgcgcgcacatttgttcgacgagctcagcggccaaaacctcaaataa

SEQ ID NO: 427171 - DNA, 1284 bp, Serratia marcescens
atgtcgtcaacacaacccaacaacgttgcccagcgtccggtgcaggtgctggtggtcggcgccggcgcgcgcggtgaaatctactcgcgctatgcgctggcgcaccccgatttgatgcaggtggtggcggtggcggaaccgcgtgacgcctaccgcgagcagttcgtggcgcagcacgccatcgcgccggaaaacgtcttcaccgactggcgccaggccgccgatgccggcaagctggccgacgcggtgctgatctgcactcaggatcagatgcacctggaaccggcgctggccttcgcccgccagggctacgccatgctgctggaaaagccgctgtcgccggacgccgacgagtgccgcgccatcgtcgccgaggtggtgcgccaaaagctgatcttctcggtcggccacgtgctgcgctacacccgctatacccaaaagctcaagcagctgctgcgcgacggcgcgatcggcgacatcgtcagcctgcaacacctggagccggtcggctactggcatcaggcgcactccttcgtgcgcggcaactggcgcaacgatcggcaggccgcctttatgctgctgcagaaatcctgccacgacatcgactggatccgctacgtgatggagcagccctgcgaacaggtcagctccttcggcaacctgcgccacttccgccgggaaaaccaaccggccggcgcggcggacaactgcctggattgcgcggtggaggcgtcctgcccctattccgccaaacgcatctatctgggcgacgaccacaaggccacgcccggctttctgcgcgtgttgacgccagaacctgaccagacaacgctgcgggcggcgctgcgcgacgggccctatggtcgctgcgtttaccgctgcgacaataacgtggtcgatcatcaggtggtcaacatgcagttcgccggcggccgcaccgcgtcgttcaccatgacggcctttacccgccacgaagatcgccacacccgcatcttcggcagccgcggctgcctggagggcgacggccgccatatccgcatcacctcgttcctcgacgacggcgaaacacattacgacaccgacgtcggccaggatctgcacgccatggccggccacggcggcggcgactactacctgatgcagcactttatcgcggccattcgcaccaacgatccgagccaggtgttggccggcccggcggaagcgctggagagccacctgatggtgttcgccgccgaacgcgcgcgccgcgaagcggcggtgatcgccctgaacggagcctga

SEQ ID NO: 427172 - DNA, 921 bp, Serratia marcescens
atgagcacgagagagatgcgttacggcttcgacatcggcggcaccaagatcgaaatggccgcttacgatcgccggctcaatcgggtgctgctccagcgcgtgcgcaccccaaccggcgattatggcgaattcgtggcctgcatcgccgggctggtcgagcaggcggaccgcgagctgcatacgcgcggcagcatcggcatcggcctgccggggatcaccgatcccgtcagccgccgccagctggcggtcaacgtgccctgcctgaccgggcattgcctggcggatgatttgacgcaggcgctggcgcggccgatcgccatcgagaacgactgccgctgtttcgcgctgtcggaagccagcacgccgcaaaccgcccatctgccgctggtgttcggcgccatcatcggcaccggcgccggcggtggcctggtggtgaaccggcaactgcacaaggggcgcaacgggctggcgggcgaatggggccatatgccgatctccgcccagctggcgcagcgttacgatctgccgctgttcggctgcaactgcgggctgaccggctgctttgaacgctacgtctccggcagcgggctgctggcgctgagccgccactttgcccatccggccgccgacgtgccggcgctggtcgccagctatcgcgggggggatccgctcgcacagtggctgatgaccgtctacgtcgacattctggccagcgcgctggccggtttgcagctgctgctggacgtcgatgccttcgtgttgggcggtggattgtcgaacgtcggcgagctgtatcggctgctgccgacggcgatgcggcgctggctgctgccgggcgtggaaccggctgcggtattcccgccggtgcacggtgacagcagcggcgtgcgtggcgcggcgctattacaggcggcggcataa

SEQ ID NO: 427173 - DNA, 771 bp, Serratia marcescens
atgatcaataccgcaaaacgccgggaattaattatcgaccagctgtgccgcgaaggctcggtgcgcgtggaacagctcagccagcagttttcggtgtccagcgtcaccatccgcagcgatctgcgccagctggaaaaacacggctgcgcggtgcgcgcttacggcggcgccatgttgaacaaacagttcgccttcgatcgcccgctgcaggacaagggccgcatcaaccgcgacgtaaaacacgccatcgcctgcgcggcggcggcgctgattgaagacggcgacgccgtcatcctcgactccggctccaccaccagtcagatggcgccgcagctggcggggaaaaaggatctggtggtgatgaccaacgcgctgaacatcgccttcgagctggccaacaacgagcagatcgatctgatggtggtcggcggcagcgtacgccgcaaggcctggtcgctgtacggccccgccgccgaacagcagctgcgccagtaccggttcgacaagctgtttctcggcgtcgacggtttcgatctggcgggcggcatcaccacgccggatccgggcgaagcgcagctgaaccgcgtgatgtgcgaggtggcgcgtgaagtgatcgccatcgccgacgccagcaaatttggccgcaccagtttttgcatgatccgcgaaatcggccagatccaccgcctggtcaccgacggccgcattccggagcactacctgcaggcgctgcaccatttagggatcgacgtgattatcgccgaccgttaa

SEQ ID NO: 427174 - DNA, 528 bp, Serratia marcescens
atgagacactcttttgctttcccgatagtggcgctggccgggctgttggccggctgcgtctctgcgccttccgggcccggggtcaccgcgctgcccggcacggggaaaagttacgaacaattcaatcgcgatgaggccatgtgccgcggctatgcgcaaaacagccttggcggcggcgcgcaaacggcggccaattcggcgacgggaacggcggtggcgggaacggccgtcggcgcggcggcaggggcgttgattggcgccgcatccggtcatgccggccccggcgcgctgatcggcgcgggcggcgggttgctggtcggcagcgcgatggccaataactcggcctggcgcagcagcgatgacctgcaagaccgctatgataccgtgtatacgcagtgcatgtacgccaaaggtaacaaggtgccggtggcctacggttatggtgaggccacctcatcgccggtgccgccggactactatcccgccgccccggcggatggcgtcccgccggactatgtgccgcgctag

SEQ ID NO: 427175 - DNA, 336 bp, Serratia marcescens
atgaaaaagcgcatactgttgatggcggccgccgcggtgttgatgacggccagcgccgccgccttcgcccacggctattacggccacggctactaccggcacggttattactacggcgggccgcgcgtggtgatcggcgtgccctgggggccgccgccgctctattacccgccgccgccggtggtgtatgtcacgccgccgccgccgcagacctatatcgaaaagccgccgagctatgcctactactgccgccgcccggcgggctattacccccaggtgccgcgttgtcctgacggttggatgaaagtggtgccagacggtccgttctcccggtga

SEQ ID NO: 427176 - DNA, 765 bp, Serratia marcescens
atgatcccggaaaaacgcgtgattcgtcgtatccagtctggtggttgtgcgatccattgccaggactgcagcatcagccagctgtgcattcctttcacccttaatgcccacgagctggaccagctcgacaacattatcgagaggaaaaagcccatccagaaaggccagaccctgttcaaggccggcgacgagctgaaatcgctgtacgcgatccgttccgggaccatcaaaagctacaccattaccgagcaaggcgacgagcaaatcaccggtttccacctggcgggtgacctggtgggcttcgacgccatcggcggtctgaagcacccaagcttcgctcaggcgctggaaacctcgatggtgtgcgagatcccattcgaaaccctcgacgatctgtccggcaaaatgcctaacctgcgtcagcagatcatgcgattgatgagcggcgagatcaaaggcgaccaggacatgatcctgctgctgtcgaagaaaaacgccgaagagcgcctggcggcgttcgtttacaacctgtcgcgccgcttcgcggagcgtggcttctcgccgcgcgagttccggttgaccatgacccgcggcgacatcggcaactacctcggcctgacggtggaaaccatcagccgcctgctgggccgcttccagaaaagcgaaatcctcagcgtgaaaggcaaatacatcaccatcgaaaacgccgacgccctgtcggtgctggccggtacgccacgcatcaacgtgaccgtcaacgcctga

SEQ ID NO: 427177 - DNA, 486 bp, Serratia marcescens
atggctgaaaaactgctgcacgcactccccctgtttgccgcctgggaagcgctgatcgccgaaggcaacacggcgttcaatcagcaacgcgatcgcctggcaatggcgcactatcaacaggcgttggaagtcgctcaggcgatcctcgccgagaaaccctggttaaatgcggactataccgccagatttgaagcgctgaatattttcgagtcagcccttgccgcgctgatcgtcacgttcaacaacatgacccatctgcgcctgcggcaaaagcccctgcgcggcgttgagccgcacgtgcatcaggcccgactcgccatcgagcaggtgatggacgatacctcgctgtgcgaacagatgcagcaggtcgccgaacggcacctgctgcgtttccgaatagagacgctgcaggtgctgcgcgaacaccggctgccggaaaccagcgtctgcgcacccacggtaaaccattccgccaccgtgcattaa

SEQ ID NO: 427178 - DNA, 777 bp, Serratia marcescens
atggcgctgattcaacagcatcacccgttcgacccggatcggctgccggcgccggtgctcggcattgcggccgaactggcggagcacgactccgggctgcattggcatcagcgctcgcagctgctgtatgcgccgcaggggtgcatgacggtcacgttggcgcagcagtggctgattctgccgccgacgcgcagcgtctggataccgggcggcattgcgcatcgggtgcagctgcgcggccgcgtcgcgtatcgctcgctgtatttcgatccggcgctgaccgccgccatgccgccacaggctgcggtgttggcggtgaacccgctgttggcggcgatcgtcgagcgcatcgcgcactggccgctggactctgcgttggcgcagccccaggcgcgcgatttgctggcggtgctgatcaatgagctgagcgaggcgcagcgggaaaatacccagctgcggctgccgcaggataggcgtcttgccgcctggctggcgacgctgccggagagcgatgaattgccggggttggcggcgttggcgcagcgcttgaatctgcacgccaaaacgttgacgcggctgtttgtgcgggaaaccggcctgagctatcagcagtggtgccagcagtggcggttgatgcgcgcgatcgaactgctggcgacgttgccgtcggtcagcgcggtggcgcagcggttggggttttccagcgacagcgcgtttatcgcctttttccgccagttcaccagcaccacgccgcggcgctatatgcaaggggggtga

SEQ ID NO: 427179 - DNA, 1158 bp, Serratia marcescens
atgcaacgcttatctttaccgctgctcgtcaccgccatcatgacgccgcagatcctggaaacgctgtacagcccggcgcttaccgccatccgcagcgatttcggcatcagcgccgcgcaggccgggcagacgttatccatctatttcttcgccttcgccctcggcgtcgccttttggggagccttctgcgatcggttcggccgccgtccggcgatgctggccggcctggcgctctatctggtcggcgccggcatcgcgctgctgagcggcaacttcacgctgttgctggccgcccgtgcgctgatcgccttcggtgccgcggtcggttccatcgtcacgcaaaccatgctgcgtgacgtctatcaaggcccggcgctggggcgcatgttcgcgctggtcggcatcgcgctctccatcagcccgctgctgggaatgtttgccggcggcgcgctggtcgcctggggcggcagcgcggcgatcttcatcgcacaggcggtctgggcgctggcgctgctactgtggagctacggcacattgccggaaacgcggcagcggcagagcgcaacggccgccgcaccgggcattgccctgacgacgatgctgcgcgatcggcacatctggtgttcggcactgctggtcgccagcttcaatatcatggtgttcagctacttcagcctggcgccgttcatgttcgaaaggctggggttgagcagccagcagtttggctactcgggcgtgatgctggcgctgggtagcctggcgggagcgctgttgaaccgccacctgctggcgtgcggcgtcagcgccaagcgtcagatcctgctgggcgggttgctggcggtggccagcggcgtggcattgttctggtggcaacacagcctgtggatgctgcttccctgcgcgctggtgatgctggcgttcgggttggctatcccgaatgtgctgagccaggcgctgacccgctaccgggagcaactcggcactgccggcgcgttattcgggctgctgtactatctgctgatcggcctggggttgacgatcgcggcgcgcgggcaggatttggccaccacgctgctgctgtgcggcctgttgagcctgtggtgtgccggccgcttgccggccggcgcacctgagcttagcccgaaagctgttcgatag

SEQ ID NO: 427180 - DNA, 3657 bp, Serratia marcescens
ttgacgatttatcacccgccacacaaacacgataaagccacgttcaaaccctctgttagacttttttccattactgcgaaagtgcgctttcgcggctttgtgagcaatgaaaaggtaacgtcgatgataactacagatggtaataatgcagtcgcttccgtggcctatcgcaccaacgaagtgattgccatctaccctatcacgccgagttccaccatggcggaacaggcggatgcctggtccggcgatggccggcaaaacatctggggcgacatcccccgggtggtggaaatgcagtcggaaggcggcgcgatcgccaccgtgcacggcgccttgcaaaccggcgcgctgtcgacctcattcacctcatcgcagggtctgctgttgatgatcccgacgctgtacaaactggccggcgagctgacgccgtttgtgctgcacgtcgccgcgcgcaccgtggccacgcacgcgctgtctatcttcggcgaccattcggacgtgatggcggtgcgccagaccggttgcgccatgctgtgcgccggcagcgtgcaggaagcgcaggacttcgcgctgatctcgcagaccgccaccctcaacgcgcgcgtgccgttcatccatttcttcgacgggttccgcacctcgcacgaaatcaacaagatcgtaccgctcagcgacgatacgctgcggcaaatgctgccgcaggcggcgatcgacgctcaccgcagccgggcgctgtcgccggatcatccggtggtgcgcggcacttccgctaacccggacacctatttccagtcgcgtgaagccaccaacccgtggtatgacgccaccggccaacacgtgatcgacgccatggaggccttcgccgccctcaccggccgccactatcggccgttcgactattacggccacccgcaggccgagcgcgtggtggtggtgatgggatccgccgctggcacctgcgaagaggtgatcgacaccctgctgacccgcggcgagaaagtcggcgtgctgaaggtgcggctgttccggccattctccgcccaacatctgctcggcgcgctgccggacagcgtgcgcagcgtcgcggtactcgatcgcaccaaagaaccgggcgcgctggccgagccgctgtatctggacgtaatgaccgcgctggcggaagcctacagccggggtgaacgcgccacgctgccgcgggtgatcggcggccgttacgggctgtcgtcgaaagagttcggcccggactgcgcgctggcggtgttccacgagctggcccagccgcagccgcgcccgcgctttaccgtcggcatcttcgatgatgtcaccgggctttcactgccgctgagcgacgaaatcctgccgcagcgcgcctcgctggaagccctgttctacggtttgggcagcgacggctcggtctcggccaccaagaacaacatcaagatcatcggcaacgccacgccgctgtatgcccagggctatttcgtctacgactccaaaaaggccggcggcctgacggtgtcgcacctgcgcgtcagcgagcagccgatcaactcggcctacctggtcagccgcgcggacttcgtcggctgccaccagctgcaatttatcgataagtaccaaatggttgaacgcctgaagcccggcggcaccttcctgctcaataccccttacggcgccgacgaggtctggtcgcgcctgccgcaggaggttcaggcgctgttgcaccaacgccaggcgcgtttctatatcatcaacgccgccaagctggcgcgcgaatgccggctcggcgcgcgcatcaacaccgtaatgcagatggcgtttttccacctgacgcagatcctgccgagcgacgtggcgctgcaacagctgcaagacgccatcgcccgcagctacagcagcaagggtcaggagatcgtcgagcgcaactggcaggcgctgggtgccacccgcgccgcgctgaccgagatcccgctgcagccggtcgacgccagcagcccgatgcgcccgccggtggtctcggacgccgcgccggacttcgtcaaaaccgtcaccgccgcgatgctggccgggctgggcgatgcgctgccggtttccgccttcccgccggacggcacctggccggtgggcaccacccaatgggaaaagcgcaacatcgccgaagagatcccggtatggcagcccgacctgtgcacccagtgcaaccactgcgtcgccgcctgcccgcactccgccattcgcgccaaggtggttcagccggcggagatggagcacgcccccgcctccctgcagtcactggatgtcaaagcgcgcgatatgcgcggccagaaatacgtgctgcaggtagcgccggaagattgcaccggctgtaacctgtgcgtcgaggtctgcccggcgaaagatcgccagaacccggagatcaaggccatcaacatggcttcgcgcctcgataatctgactgcggagaaagacaactacgacttcttcctgcagctgccggaaatcgatccgacgcagctggagcgcatcgacattcgcacttcgcagctgatcacgccgctgttcgagtattccggcgcctgttccggctgcggcgaaacgccgtacatcaagctgttgacccagctctatggcgaccgtttgctgatcgccaacgccaccggctgttcgtcgatctacggcggcaacctgccgaccacgccgtacaccaccaacgccgaagggcgcgggccggcgtgggccaactcgctgttcgaagacaacgccgaatttggcctgggcttccgcctgacggtcgatcaacatcgtgcgcgggtgctgcgcctgctgaattcgctggcgccgcagctgccggatcggttggtcaatgccctgcagatggacgacgtggcgccggagccgcgccgtaagcagatcgccgaactgcgcacgctgttggcgagtctcgaaggcgaagacgcgcgccaactggcggccgacgccgactacctggtggataaatccatctggctaatcggcggtgatggttgggcctacgacatcggcttcggcggtttggatcacgtgctcagcctgacggaaaacgtcaacgtgctggtgctcgacacccaatgttactccaacaccggcggccagcagtcgaaggccacgccgctcggtgcggtgaccaagttcggtgaacacggcaagcgcaaggcgcgcaaggatttgggcgtcagcatgatgatgtacggccatgtctacgtcgcgcagatctcgctgggagcgcagcttaaccaaacggtgaaagcgattcaggaggccgaagcctatccgggcccgtcgctgatcatcgcctacagcccgtgcgaagagcacggctacgatctggcgctcagccacgatcagatgaaacagctgaccgccaccggcttctggccgctgtaccgcttcgatccgcgccgcagcgccgaaggcaaggccgcattggcgctggactcccggccaccgaacagcagcctgacggagacgctgctgaaagaacagcgtttccgtcgcctgaactcgcagcagccggaagtggccagcgcgctgtaccaagccgccgagaaagagctgaaggagaaatacgacttcctcagcctgctggccggcaaggcggaaaaatccgccaccgagtaa

SEQ ID NO: 427181 - DNA, 417 bp, Serratia marcescens
gtggatcaggcgctattaacgccgatccagctggctgatatttatttggagctgtttgagaagcgttggggagtcaaacccgataataagcaacaaatggtggatatgattacgtcgctgcgtgacatgatattcggctatgtgttgttttataacggccagccctgtgcattccagttcataaccagagcggacagccccaaatggatttgctttgactatgtcaacgggggatatgatcgcgaacaggatggtttttgtcctggaaccatcgtcacttggttaaacgttcgggccgcctatgaactatgcgagcgggaaggtaaagaaatgcgctattccttcggcaaaccaacggcgccgtataaagaccgctggtgcgagcgcgcgccgctgggacgcacgctggcggtgtaa

SEQ ID NO: 427182 - DNA, 1098 bp, Serratia marcescens
atggcgggaagtagtgaatcaggcgcaagacattttgcattgaacctggctgtgctgcggcgcctgttctgtaccatggcggcgctgttgctgttcgccagccaaccgctgcgcgcggagtcggcgctggaacgcatatctacccctttacgggtcacgacggccggcggcaatttttcttactatgtcgcccagaagcacagcgcccagccacgtaacgcactggtggtgatgcacggtcatccacgcgacgccgttaaaacgctgcaagcggcgatcgacgccgcgcaggcggcaggagcgggaggcgataccttactggccgccccgctgttccaggtgccggaaaaactcgccgtccactgccattccgccggtctgccccagccgcaagacggcgacgccctgtggcgctgcggctcctggatcgagggtggtttggataatgccgggaaaaccggctcattcaacgccatggataacctgctggccgatatgaaacggcgctggccgtcgctacagtcgataaccgtggccggtttctctgccggcgcgcagttcgtgcaacattatgtcggctttgcccatccgccaggcggggtgcggctgcgctatgtggtggccgaccccggcagctggctctattttgataatctgcgcccccaaccaataaacggggggagctgcggcagtgaaacagcctgccgtttccgttggcaaacgctgaacgccggccagtgcccacaggccaaccggtggaaatacggcctggaatcgctgcccgctcacctgcagcgcactgccgatgcggcccgcgggcgctatgccgctgcggatatctcctacctggccgccgccggtgataccggcaccgcgccgggcgcctactatcggatactcgacaaatcctgctctgcccagctgcagggcccctatcgattgcaacgtgccctagcctatgccgattatgaccggcgttacctagcgccggataagcctcatcggttaacgatcgttcccggctgcgggcacaacgtcacctgcgtctttcccgccccggcggccaagcaggcgcttttccccattaatgcagactaa

SEQ ID NO: 427183 - DNA, 1314 bp, Serratia marcescens
atgatgagtgaaaatacggctgaaacccagacggcaataatatcggccccgaaggccggcggcaaaaaagtcatattcgccgcctccttcggcaatgcgctggagtttttcgatttcggtatttataacttcttcgttatttacatcagcgtattgttctttccgccgtccagcgatccgcatctggcgttgctgttggcgtttgccacgttcggcgtcagcttcttcatgcggccgctgggtggcattctgattggcgcctatgccgatcgccatggccgcaagccggcgatgatcctgacgatttccttgatgagcctgggcacggcgatgatcggctttgcgccgacctacgccagcgccggctattggggaaccgtcacgctggtggcggcgcgcctgatccagggcgtggcggcgggcggcgaggtgggggcgtcgatgtcgttgctggtggagtcggcgccgcccaaccggcgcggcttctattccagctggtcgctggcgacgcagggcatcgccaccgtggttggcggcgtgaccgcgctggcactcagcgcggccttgccggtgctttccggcgagccgaacgccatggccgagtggggatggcgcattcctttctttatcggcgtggcgctggcgccgctcggttgctggctgcgcctcgggttggagagcgatcggccgtcggcggcgcgggctcacgagccgcctgcgcggttgcgtaagcactcgcgggcggtggtgctcggcgtgatgttgaccatcggcgccaccgtcgccacttacatctcgatgtattatctcggcacctacgcggtgaaatacctggggatggcgcaggcttacggctatgccgcgatgctgctggcggggctcgtcaccttcggcggcagtctgctggtcgggcactggtgcgatcgttacggccgtctgccgctgatccgcagctcgcggatcgcgattctgatcgtggccctaccggcgttttggtggctgagcgcggtaccgcatccggcggtgctgctgctgattgtcgcggtgctggtcgggttgaccacgctcggttcggtgccgaccatgctgatgatttcggagctgttcccgcagcgcattcgggcgctggggttcgccttggtctacagcctcggggtggcgatcttcggcggtttcgcccagtacatcgcttcgcaatcgatcgcgctgagcggttcgctgctggcgcccgccgtctatctgatgctggcgacgctggcttcgctggcggtgctgccgctgctgcgtgaaaccggcggcgagccgctgcgctag

SEQ ID NO: 427184 - DNA, 1164 bp, Serratia marcescens
atgataaataaaatcatcgaagggtatttaccgcagctcacggccattcggcacgatattcatcaacaccctgaactgggtttcgaagagtttcgcaccagcgatctggtggcggattatctgagttcgtggggctatgaggtgcaccgcggattggcgggcaccggcgtggtgggcacgctgcgggtgggtgacggcgttaagcgcctcgggctgcgtgccgatatggacgccttgccgatcgaggagaacaacggcaagccctggagcagcagcgtggccaaccgcatgcacgcctgtggccatgacggtcacaccaccatgctgctcggtgccgctcgttacctggcgcaaacgcgcaacttcaacggcacgctgcacctgattttccaaccggcggaagagatgctgaacggcggcgcgcgcatggtggaacaggggctattcgagcgcttcccctgcgacgccatcttcgccatgcacaacatgccgggaatgccgcttggcgagttcttcttccagcacggcccgtttatggcctcgatggatcagttcaacgtgcgggtgcaggggcgcggtggccacggtgccatcccgcagctgacggtcgatccggtgctggtggcttcgcatatcaccgtcgcgctgcagagcatcgtttcgcgcaatatcgatccgctggaggcggcggtgatcaccgtcggcagcatcaaggccggtgaggcggccaacgtgatcccggacagcgcggagatgaagctcagcgtgcgctcgctggatcgccaggcgcgcgccaccttgctggcgcgtattccggcgctgatcgaggcgcaggcggcaagcttcggcgcttacgcggtggtggaacacgttaacggcacgccggtactggtcaacgacgaagcgatgacccgtttcgcccaccgcgtggcgcagcagcagttcggcgccgcgcgcacgcactacggtgcccggccgctgatgggcagtgaagatttcgcctttatgctcgatgcgcatccgcagggctgctacctgatcatcggcaacggcgatggcgaaggcagctgcatggtgcataacccgggatatgactttaacgacggctgcctggcggccggcagccagtattggggagcgttggcggaagcgtatttaaaataa

SEQ ID NO: 427185 - DNA, 2067 bp, Serratia marcescens
atgaaaaacatcaggtcaggacttatctggctgctggtggcgttggtcggcgccttcgccttcgccatgctggcgctcagccgcggcgaacacgtcaacgccgtctggctggtggtcgccgccgtcgcctgctacagcatcgcctaccgcttctacagccggttcattgccgacaaggtctttgaactggacgaccgccgtctgaccccggcagagcgccacaacgacggcctggactacgtgcccaccaacaaatgggtgctgttcggccaccacttcgccgccatcgccggcgccgggccgctggtagggccgattctggccgcgcagatgggcttcctgccggggaccatctggatcctggtcggcgttatgctggccggcgcggtgcaggatttcctggtgctgttcatttccacgcgccgcgacgggcgttcgctgggggaaatggccaagcaagagctgggcgcgttcgccggggtgatcaccatgcttggcgcgctgggggtgatgatcatcatcctgtcggcgctggcgctggtggtggtaaaagccttggccgacagcccgtgggggctgttcaccatcgccgccaccatcccgatcgccctgttcatgggcatctacatgcgctttatccggccgggcaagatcgctgaaatctcggtgatcggcttcgtgctgatgctgctggcgatcatttacggcggcaacgtggcgcaagatccttactgggggccgttcttcacgctgcacggcaccaccctgacctgggtgctggtgatctacggcttcgtcgcttcggtgctgccggtgtggctgctgctggcgccgcgcgactacctttccacctttatgaaaatcggcgtcatcatcggcctggccatcggcatcgtcttcgccatgccggagatgaaaatgccggcggtctcgcgcttcatcgacggcagcggcccggtgttcgccggcgccctgttcccgttcctgttcatcaccatcgcctgcggcgccatttccggcttccacgcgctggtctccagcggcaccacgcccaagctggtggaacgcgaaagccacattcgctttatcggttacggcgccatgttgatggagtctttcgtcgccatcatggcgttgatctgcgcctcggtgctggatccaggcgtttacttcgccatgaactcaccggcggcgctaatcggcaccacggtagaaaatgcttcgcaggtcattaacagctggggctttatcgtcacgccggaaacgctggcgctgatcgccaaagaggtaggtgagaactccatcctgtcgcgcgccggcggtgccccaaccttcgccgtgggcatggcgcacatcatcagcgaggtgttcaacagccgggcgatgatggccttctggtaccacttcgccattctgttcgaagcgctgttcatcctgaccgccgtcgacgccggtacccgcgcctgccgctttatggtgcaggatctggtgggtgtggcggtgccgcagctggccaacaaccgttcctggttcggcaatctggcgggtaccacggtggcggtagccggctggggcttcttcgtgtatcaaggcgtggtcgatccgctcggcggcatcaataccctgtggccgctgttcggcatcggcaaccagatgctggcgtcaatggcgctgatcctcggcaccgtggtgctgttcaagatgaaaaaacagcgttacgcctgggttaccatcctgccgaccgcctggctgttcgtgacctccatgaccgccggctggcagaaaatattccatgagaaaccgagcatcggtttcctggcgcaggcgaagaaattctccaccggcattgagcaaggcacgatcattgcgccggccaaatcgctgaaagacatggaaaccatcgtattcagcaaccaaatcaacgccgcgctgtgcgggttctttatgctggtggcggtaaccatgctgatcgccgccttcttcgcgatccgccgggcgctgcgtgccgaacacccgacggcgcacgaggtgagcgccgcgcttagggaagaaaccggccgcagttaa

SEQ ID NO: 427186 - DNA, 396 bp, Serratia marcescens
atgtctctggctgatatgtcgaagtactttctgtatgcggggatcgccacccctgtcgtgatgggtattttcttttactgtatttttaaaaataacggcggtaactcgaccgagatgtccgcggttaaaaattatctcaacaaggacagctggcaaggcgagattatcgcctcgcacctcgagtcttgtcggcaaaccaacacccggtacggcaatgactttttctttgacgtcgatttttatctccccggcgacacccggctccacaccgccaaagccttggttcagcctggccagatgcatctactgcgcaaagggatgggcatcaaggtgaagaagggccgtaagaatcagctggcggttgtggagatggatctcaccgctgagccgttgtaa

SEQ ID NO: 427187 - DNA, 2310 bp, Serratia marcescens
atgaccagccgtatctctgtccaattgcccgttgagggtctgcttttttggaagctgacgggccgtgaagccctgtcagagccgtttgcgcttacgctgaccttgctgggccgggatgcccgtattaatcgcagcgagctgctggggcaaccggtcacggtgaatctgccgacggggctactgtcagcggatcgccatatcaatggtaaggtgacgcgcgttgccgtcagcgccgtcgaattaagtggcacgcgttatgccgtgtatacgctgacggtagaatcggatctatggccgatgaaacgggatcgcaatctgcgcatcttccagggccagacggtgccgcaaacggtgcgtgctttgctcagcgaatatcaggtgaacgtagaggacaaactcaccggccgctatcgggtgtgggattactgtgtccagtatcaggagagcagtctcgatttcatcagccgcctcatggagctggaggggatcgtttaccactttcgccatgaggctggccgtcacacgctggtgctgacggatgcggcagggcagtatcagccgtttagcggttacgagacgataccttaccatcagactccgtctggcggcagcactctcgagcaaggcatcgggcaatgggcgccggaagacagcgtgacgccgggcatttacggtctggacgactatgacttccgcaagccgaacgcctggctgttccaggcacgccaaaacccggcctcgccgatgccgggcagcatcgatgtctacgattggccggggcgctatgtcgagcacagcgatggggagttctacgcacgtgtgcgtcaggaacgctggcaggtggaacatcaacagatacacggcaccgcaacggcgatcggagtggcgccgggctatacctttaccctgatcaacgccccatttttcagcgataacggcgaatacctgacgacggccgccgattacacgttctccgagaaccgctacgccagcggcgaagacggggagacgattcatcgcatcgactttacggttatcccggccgccaccgtttttcgtccgatgacggtgacgccatggccgcgcacctatggcccgcaaacggccaaggtggtggggcccgccggcgagaatatctggacggacaaatacggccggataaaagtgaagtttcactgggatcgccgcgctaaaggggatgataccagttcgtgctgggtaagggtatcgagcgcctgggcgggacaagggttcggttcggtacaaatacctcgcgtcggcgatgaagtggtggtggactttatcaatggcgatccggatcggccgattgtcaccgggcgcgtctacaacgaggcgagcatgccgccgtgggtgctgccggcggcggccacgcaaatgggcttcatgactcgcagtaaggatggcagtcgggacaacgccagctatctgtttttcgaagataaggcgggcagcgaagccgtggagctgcattccgaaaaggacatgaaggtttcggtggaaaatgaccagcaggtcaatatcgacggtaaccggacgacaaccatcctcaagcaacagcaagacgaagtgacgggcaatgccaccttccactacaagggccagcgcaccaccacggtggatcaaaaagaaaccggctacttcaatgccggtgtcgctacggagatcaaagcggggcggacattcgacattaaagacggcggcgacaaggtaacgatcacaggcgaccgcaccagcgatatcgatgggaatgaaagccatcacgtcaccggaaaactgactgagactctggataaagggcgcgacgttacgatcggtgccggcggccacaaagaggacatcaccgggggcgtcactcgcgagatcaaaggcggtgtcactgaaacgatcaaagacggcgttaccactaacatcaatagcggtaactggacgcaaaacgtcaacgcgggaaccattacgatttacagcccgcagcagatcaaaattgtcagtgacgaaaagataagcctagaagcgccggagtccgtgttcaatcccaaggtgcatagcctgaccgtgaccgcctttagcgaaagcattaccggcaacagcgtctcggcatcggcgatcaccagcagcatcgttggcgtgtccaacagcctgacggggctgtcaaattcttataagcttaaagagttttcaaagacggcgtttaaaacggaaacgaacggcgtagtggtgaatgtcgaggtgaccaatatcagcaacagaacgctgaatgtaacgaataactcgttgtttataattacataa

SEQ ID NO: 427188 - DNA, 495 bp, Serratia marcescens
atgtcattgaaaaagcacttggagcaactgttcaattataagcaatgggcggatgcggaggccttcgccgccattcgaaaagtggacgccgatgcttggcctaagcagcgtcatttgatgcttcgcttgatgaatcatatctatgtcgtcgatcagatttttatcgccaatttgcaagggcaacgccatggctatacggcgttgaacacccaagaaaccccaacgttggaagcgctggaagaggcgatgttggccagcgatcgtcgctacctcgcgtatatcgcttcgctgagcgaagcgcaactggatgagcgcattcattttaccttcgtcgacggcggccctggggatatgctgcgacgggaaatgttggcgcacgttgaacaccatggctgctaccaccgtggtgcggtgggatggctgattactgaaagtgctgtcaaagcgccacaggatgttttgaccgtgtttgtacgcgatgggggtgtagcttaa

SEQ ID NO: 427189 - DNA, 441 bp, Serratia marcescens
atgatggtgacacggatagctttgctgttagtcgcgttctgctttgctagcagcgcaaatgctttatttacccctaatgaatacaatatttggcactatcaggaaggggtgctgtacggcgcgactcagaatgagttcagtgaaccggtactggttagcctcgccgggccagggacgccttgggcgaatatggtgatctctctcacccatcgtgaaccctgcgaagcatttcagtcgataaagacgttgctaatcaataaagatctcctggcggtgacgctgagttgcgttcaggtgggagaacacagcgtggtgagttatacgctgcatgagagtgaagtggtcaaccgcttgtatacgcatttgaaatcgggttttacgctggtgatcgatggccgcatcaagctgtgggccgccaatatcgcacatcccgcgcgttga

SEQ ID NO: 427190 - DNA, 264 bp, Serratia marcescens
atgaaggcaactaaatatctcttggcactgctggcgttcacctcattctcttccctggcggcaattgaaatcactcgggaagaggcggcgaaacataccgagatcggtccggtgaccatttcacaagacggcgacgacaccgtggggatcgaccatgcgcgtctgtcgaaagcggtagacgaaaaaggcggtaagtattacgtcattatcggccgcgaggggaaaaccaccttcgaaaccatcaatgcgatagcctataaataa

SEQ ID NO: 427191 - DNA, 1473 bp, Serratia marcescens
atgtacgccaagaaccgctggttgatcctgacgatggtcgccagcgcccttttcctgatcgtcatcgatatgacggtgttatataccgccctgccgcgcttaacccaggcgctggacgccagcgcctcgcaaaaactctggatcgtcaacgcctacccgctggtggtggccggcctgctgcccggcgccggcatgctgagcgatcgcatcggccataaacggctgtttctcgccgggctgccggtgtttgccgtcgcgtcactgtgcgccgcgttctcgcccaccgccgagtggctgatcgccgcccgcgtgttcctcgccgtgggcgcggcaatgatgatgcccgccacgctgtccatcgtgcgccacgtctttaccgacgaacgcgaacgcgcgttggcgatcggcatctgggcctcggtggcctccggcggcgcggccatcggcccggtggtcggcggcctgctgctggagtatttctggtgggggtcggtgttcctgatcaatgtaccggtcgtactgctggtctggccgctggcgtggaaactgatcccgcgctgcggtggcgataacccgcgcccttcggacatcgtcggttcggtgcagatcatgatgggtctggtcggcgccatctatgcgctgaaggagctgagcaaaccgacgcctgatgtgagcgccttgcttgtggcagccctgattggcgtgttgttcctggtgctgttcgtgcgtcgtcagcagcgcagcgcccacccgatgatcgatttctctctgttccgcaaccggctgttcgcaggcggcatcggcgtggccctgctgtcgatggtggcgctgatcggcgtcgagctggtgctcagccaacgcctacagctggtgctcggcctcagcccgctgcaggcggcgctgtttattttgccgatcccgctggcctcggcgctggcggggcccgtagccggcctgctgttgccgcgctacggcgaacgcagcatcatcctcggcggctttgtcctgaccaccctcggcatcgccggtcttgccgtgtggtaccagagcggcatggcgccgcaattggtcagcctggcgctggtgggctttggcctcggcggcgtgatcaccgccgcttctaccgccatcatgctgaacgcgccggaggagaagtccggcatggcggcgtccatcgaagacgtctcctacgaactcggtggcgtgctgggcgtgacgctgctcggcgggttgatgacagcggtttacagccacagcctggcgctgccggcggagctgccggtcagcgatttggcctacgacagcatcgacgaagccctgcggctggcggccgggctggcggccgatcgcgcgcagcagcttacgcagctggcgcgcttggcctttgatcgcgcgtttattacggtgctgatcgccgccgcgctgctaatggcgctgggcgccggcgcggtgaaactggcgctgcgcaagtaa

SEQ ID NO: 427192 - DNA, 876 bp, Serratia marcescens
atgaacgagaaaattttcgccctgcccgtttccgaacagatttcgccttacatcagccagcgtcaactcgatgagctgggcgtggttgtggtctcgcaccctaaagtccgtgcggccgtcgcgctgcaaggcgcccatttgctggcctggcagcccagcggtgagcagccggtgatttggctcagcaataacaccccattcgccaaaggcaaggccatccgcggcggcgtgccaatttgctggccgtggtttggcccggtagcgcaaccttctcacggttttgcccgcaaccagccctggagcctgacagcgcacgatgaagatgacaacggcgtcatcctgaccttcacgctgaaagacaatgagcagacccgcaaactgtggccacacgccttcacattgattgcccgtttcaagctgggtgaagagtgcgagatcgaactggaatcgcacggtgactatcaggccacggcggcgctgcacagctacttccaggtgggcgacatcgaccgggttagcgtggcgggcctgggcgagccttatatcgacaaggtagcgggtggcgcagaggcgcgccagacaggcgaagtgaccttcatcggccaaaccgatcgcgtctacacctgccccgaggccttcagcctgatccgcgatccggcgctcacgcgcaccatcgaggttcaccaccatcatatgagtgacgttatcgcctggaacccgggcgtagaactctcatgcagcatgggggatatgccgaacgacggctacaaaaccatggtctgcgttgagactgggcgcgtcagcaaaccgctggtcgccgccggtgaacaacctgctcgtttgggtgttaccttccgcagccgtaagcaggcttga

SEQ ID NO: 427193 - DNA, 690 bp, Serratia marcescens
atgagtacaaaacccactatcgtgctggtacacggattctggggcggcgccgcgcactggagtaaggtcatcctcgagttgtcgcgcaggggatattcggcgatccatgcggtggaaatgccgctgacctcgttggctgaggatgcggaacgcacgcgcaagatggtcgcgcagcaagcggggccggtattgttggtggggcactcttacggtggtgccgtgatcacggcaatgggcaacctgcctaacgtggtcggcctggtctacatcgccgcctttgcgccggacgccggagaaagccccgacggtattacgcaagcgcatcctcctgcggcggtggcgaatctggccccggacagcgacggctatctgtggatcaaagccgacaagtttcacgagagcttttgccaggatctgaccgccgacgaggcgctggtgatggcggtggcgcagaaggctccgctggccgataccttcggtaacaccatcggcgaacctgcctggaaacataaaccatcatggtatcaactctccagcgacgatcgcatgatagcgccggagaatcagcggcatatggcgcagcggctgcgggctaagaaagttatggtgctggatgccagtcatgcttcgctggtttcccatgccgcagaggtggcgggattgattgacgaagcggccggttatgaataa

SEQ ID NO: 427194 - DNA, 762 bp, Serratia marcescens
atgccggataccgcattgccccctgcatctcagcggcccctcctgcgccgcctgctgcttaaagccgggaaaagattcctgcgctggaacggcgaatttcagacccgtcattcgctaatctcgactacgccgcagatcggtaatcacgaatttaactgggtggccacgctggaagcccattggccggcaattcgggaggagttggatcggctgctggagcatccggaagatattcccgcgttccaccaaatatcgccggatcagaaacgcatctctaaaggggataactggaaaaccttcgggctgtttgtctacgggcagcgggttgatgagaactgcgccatttgcccgcgcaccgcacaggcggtcagcgagatccccggcatgcgcaccgcgatgttttcgattcttaaaccgcactatcacatcgtgccccacaagggcccgacccgtgccgtggtgcgtgcgcacctggggttgatcgtgccaaaggatcgggaaaagctgtggatccgcgttgacgatcagatcctgcactgggatgagggaaaggtgattctgtttgatgattcctacgagcacgaggttcgcaacgacaccgacgagctgcgtgcggtgctgtttctcgatatcgaccggccgatggacaaggtgggtacggcggtgaataaactgctgttcagcctgatcaaggccagcccttatgtgaagcagccgctgaaaaacctggctaactggcaccgccgcgacaaacaagcatga

SEQ ID NO: 427195 - DNA, 1023 bp, Serratia marcescens
atgacacgttcggcgagaaaaaccgtattggccgcctggctggcgctgggcagtgtgctgattccgggcgtaacgccggcggcgcaggagacgacgctggcggcgagcggccgggatccggcgcagttcccggcgtatgtcgagcaactcaagcgccgggcgcgggagcagggcatcagccaggccacccttgaccgcgcttttgcgcagatacattttgtcgaccgagtgatcaaggccgatcgcaatcagccggagcagaagatcaccctggacgactacctgcggcgtgtgatgtcacccgccaaggtgcgccaagggcgtgaactgtaccggcagcgccaggcgcaatggacgcacgcgagcgatcgctatcgagtaccggggcgctatatcatcgccttgtggggcatggagagcgcctacggaaagattcaggggcgggaagacgtggtgtctgcgctggcgacgctggcgtttgaagggcgccgcgaggcctttttcagccaggagctgatggctgcgttgcagatagttgaacaggggcacgttggcgatacgccattgaaaggctcctgggccggcgcgatggggcaatgccagtttatgccgagctcatttttgcgctacgcggcggacggcgacggtgacgggcgcatcgatatctggaataacattgatgatgtctttgcctctacggccagctatttgtccaaagagggctggcagcccggcatcggctgggggcgtgaggtcaaactgcctgccggtttcaatcaggccgagctgggattgaaagacgcacaggcgcgcagcgttaacgcatggcagcggcgcggggtgcgtcgcgcggatggcagtgcgttgccgcatgccgttcagcgcggttggatcatcgcgccggatgacctgcaagggcgggcgttcctggtctatgataatttccgtatcctcatgcactggaatcgctcttactatttcgccctcgccgtgggtatgatggcggacgcgatcgggcattga

SEQ ID NO: 427196 - DNA, 573 bp, Serratia marcescens
atgactactttaaatcaagctgtaaaaattgaatcacccgttgcaagtatcagccacctgttaccgttcgaacagaaacagcacattgaaaagctgtatttcccaaaggttcaacaggccactgaccgcatgagtaaagctgagtctgaatatcaggatgctgtagaatcccgctcagtgctgattaatcagaaagtcaccgaatacctagctaacccttcagagcgtcacggttttaaagttgttcaggtttacccaacgaaccagcagcaagttatccagtcaatggctgagcgggggtacatggttcaccgtgtatctgttgggatggttacctttattcgtatgccaaagaacgctaaagataatccccttcagggaattactgaaaaggcaaccgctgaagctgaattaactattgataagatgattgaacgtttgaaagtgaaagctgctgaggcaatccaccagcgaaacaagattgtgattgaagcccgtaaagctctggattcaattaaatcatttgaaagctatttaaacgtgattgtaactgactctgaaggggtagagtaa

SEQ ID NO: 427197 - DNA, 1005 bp, Serratia marcescens
atgagcctgaatcactctttcctcataggctcagatgaatcaagtgagcttatgctaaacatttctggtcttgatgctaacgctaaagaagtggattccttatgtgccaatttctttgcacactgtgctaagactggcacacccaaattcacatgtaagctgacaatacaaaatcttcaaaatctttatagtcatctatccagctatagcatggtatgtgatagcacttcatcaaagactggaagattcattgaggtcagagataattataatgagataatcagcattcttgaacacgctgataataattcattagttatggccttgcagcacctcgtaagcagtaagttaaccaataatgacatcaatacaatattagggagaaaggaatctctcgagacctacgaaaaaatgctcactgagcctgatagttataaggaggcagactggcaacgtttttttgaaaccaatgaatggatttttggttatggcttaaagtataaattcctaaaaattcttcaaagggaagctcacatatcaagaactgatttaaacggcggaaatgatgtaattgctgattttcttatatctgactcaagattcaccaagattgtggaattaaaaacaccaacaacaaaacttttcactaagcgacaagggcgctctgatacatggttcttatccagtgaattaaccgacgctgttagtcagatattggcgcaaaaggcaaattgggagattgaatctcagtctagaaattacactacagatggtgaacttatacatgaagatacatttgatacagaatgcattttaattataggttcattatcttcaattgagggtaatgagcgagaaaaactaattaaaagaaaaaccctcgagctttataggagaaatttgaaaaatatagatatcttgttttatgatgagttgcttgagaggtcgcgctacattgtcagaagtgctgaagtaatagaagataagcttctctcagcattgtag

SEQ ID NO: 427198 - DNA, 144 bp, Serratia marcescens
atgaacaagacaaaagcagtgcggattaaaaagacagataatcaactggtgaaactgaaagcggtaaatgctggagcaaccatcagaaagactctggaaagtatgattctaatgtcctatgtgaaacacattaatgttatttga

SEQ ID NO: 427199 - DNA, 585 bp, Serratia marcescens
atgtacaaagctaaagtattcaatggagtcaagactccggctggaaagccaatcacaggtaaaggcttcttctcagatgaccacgatttaatagatacccccgaataccgcgaatctcttaaaaacaccctcatcgaattaggttacaccagcttcaataacccattacccgcaagcaataaaccttaccgcagaaaaggaacaccccgtaaggctatggagaatacacttcagcaatattttattgataaagactcagtaagtaaccttccttcaaaagttgaggatgtattcacaggctgcgttaatagttgtccagataaactatccccatctttctgctttaatttattgaagcgattaagcgttattacagcagccgctgtagaggatgaaacaggctttagtaaaagctggtgtaatgacattactcaggcattgcagttagcaatcacaatgattgaacattgccatgataaaggcgaaattcaggtaatgtttaacagtgactatgaaaacgatagattcgattctgacagggaattagaagacatccttgatttacacattcaaaaggcagcataa

SEQ ID NO: 427200 - DNA, 555 bp, Serratia marcescens
atgtcatctgtaatcgcctacgtccgtgtatcaacttcagaccagactattgagaaccagaagaaacaaatcaatgaggctggctatcaggtaaacaagtggttctctgatgaggctgtatcaggtggcattaaggcaacagagcgtaaagggttcggtgacctgcttaactatgttcgtgaaggggatacgctggtagttattgggattgaccgcttaggccgtaacactattgatgttctctcaacggttgaacttcttcaggccaaaggagtgaaggttatcagtctccgtgaaggattcgacctgtctacaccagtgggtaaggctatgctcactatgatggctggattggcttctttagagaaagacttgatagcagagcgcagaacagcagggattaaacgtgctcagtctgagggtgttcactgtggaagaccaattaaagcaacctctgaacaggttcaggaacttctttcacagggaatgtcaccaaagcaggtgcagggtgagttacagattagtaaggcgactttctatcgactgaacaagtaa

SEQ ID NO: 427201 - DNA, 906 bp, Serratia marcescens
ttgatacattctccagttattgagcttcaggctcttgcgagtgacccaaattcagatatcgttgctgttctaatgaaagcaaagatgattgcgattaagttagaccttcaagaccttgttgaatggatagaattagagcttaatggataccctaatattgcctctgcgcctgactataggtctggacaaggtatattgaaagcattcaatcctgttaatggatggattcccgtagatttggggacatctgaccctaaaataacaaagcagttcacgacgtttgcgcttactgaatcagtctcatcaatggctcattcgaaggtcaaagatgcagggactgtcagtctcactgtacctgctccacttgctgagatgcttttatctggtcagcgttcaagatatgaaattcgttggtttttcagtgctggtaaaattcagcatataattaccactgtgaggaataaaattcttgattggtcgcttgagttagagaaaaagggaatactcggagaagggctaatatttactagagaagaaaaagaggttgcaccaatgacggttaacaatacgaatatctttcatggttcagtgaataacgctggagcaatcggagcgggcaacactggtgacattaatcagcaaaactctatatcagttggtgacattgcatctcttgaacgtgagctaaagagtcacggtcttgatgataatgatgttgctgaattgaaacagcttgttgagcagtcccctaaaccagcttcaaaagaagaggttgaaaaaggttttggggcgtggattggtaagatgactggtaaggcttttacaggtgcgttaaaggtcgctggtgcggcggctcctgccgttcttacaaacgcaatctgctgctacttcgggatccctgtttaa

SEQ ID NO: 427202 - DNA, 903 bp, Serratia marcescens
atgaaaacttcgccagttcatgagttgcagggtttggctgctgatgtcagtaatgacattgttggggttttaataaaggccaaaatgattgcagtgaagttgaatttgcccgaattggcagaatggtttgattgtgagcttgatggctatcctgatagtgttgttctccctgattatcgtatagggcaaggtgtagttagaggatggaatccctatcacggatggataaatgtccagtatcgtgatattaaaccagaaattataacaatgattcaagagtatggtttaagtgactcaatttcagcattgagaaatcttcgtgaagcagatgataacctgcgacttggaatgtcagccgaaaaaataaaaatgcttttcccttcaaatagtgctccttcggaagtttgctggtttatcaatgcttcaaagttggaatgtatagtaactactgtaaggaataggatattaacatgggctttggagttagaaagaaagggaatattgggtgaaggtgtagtctttagtgaaaaagaaaaagaaattgcacctgcaactttttacaacactaataatttttatggttcagttcataatttaggggcgataggggcaggtaatcacggtagcatttatcaaaataataaaaccactattaacgactttgagtctcttaatctggcgcttaaagaatatggtttagctgatgataatattagtgatttagcaagggttattagtgagtcgccacttcctaaaaacaaaaatgaggtgagagaatactttggtgattggattggagttatgacagcaaaagctttaaagggtggtcttgttatagagggagcgaacgtccctagcattttaatgaatgatttgtatagctacttcaatttacaaagataa

SEQ ID NO: 427203 - DNA, 1626 bp, Serratia marcescens
atgccaaaagcaatctcatacatacgattttctaggaagattcaatcagttggtgattctactaagcgtcaaagcaagtacattaacgattggttaaaacgaaatcccgattactatttagacgaatcattacgctttcaggatttaggtataagcggcttctctggtgctaatgctaagtcaggggcttttggtgaatttctagccgctgtggaatctagctacattgaagccggttcagtgctactcgtagagtcattagatagagtaagccgtcaggacatcgacacagccggagaacagcttagaaagattctcaggtctggcgttgaagtggtgacacttgtcgataacgagtggtacacgaaagaaagtctgaaagattcactgtccatgattaaagcgatgttggtcatggaaagagcacatgaagaatcagcgatgaagtctacccgtttaaggtctgtatgggctgctaagagggaacgggttgctaaaggtgaaatcatgtctaagcgttgtgcagcatggttaaaagtatctgaagaccgttcacactttgaattcatccctgagaatgtgaaagctgttcaacgtgtctttcagctacggttagagggcttgtctcacgtcaagatagccaaacaaatgaatgatgaaggtttttcaaccctgaaccagttcaaatccgttacaggtggctggtctcaatcgtcggtcactgagttactttcaaaccgttcagtgattggtttcaaagttccttctaaatcaatggctgtaaagggggtttcagagataccaaactattacccctcaataatcaccgatgagcaattctacgctgtacagcagcttaaacagggttcagggcgtaaaccttcctctgacctacctttgctaacaaatctcttcaagggcgttctcaggtgctctgagtgtggctttgttgtcgttgttgcgggtgtctctgctaagaggtctggtatatacaaatgctcgatgaaaagtgaagggcgctgtaacagcgttgggttcagcagattacagactgaccgcgcattggttcaggggctgctttacaacactaaccgtctttcactcaatcgtgataacggctctgctattggtggtcttcaagctgagttagaacaacttcagaaacagcgtgagaggctaatcaaactggcgatgctggcagatgataccgaatcaatggctaaagatttgaaagctctgaacagtcagattaaggacgctgaaaaggctgtctcagaggttcaccagcgagagcaatcaagccagcttgagacaatcagccaccttgatatgactgtgaagaaagaccggatagaggctcaaatcatcattaagcgtatcgttaaagagattagactaaacacggctggaaagaagtgtgatgtcttcttacacaacggcttgaagttgcttaactttccattagatagagtggtagacggtgctcaatggctggaagttttgccgctgattgacggtgatgaattcgactttgcagagttcaccactaagcctcgtcacatagccttagaagaggctccagagtgggtgaaagagatggaagagcaacctaatcagtcgctgtga

SEQ ID NO: 427204 - DNA, 393 bp, Serratia marcescens
atgatgagttatgaagagattgaacaagtgtatcataagaaaggtgtaatcctcgacagccgcccggtgcatcacgccgccccccataccgccgccgtgcgcgatgcgcagcagaaaaaaccgaagctgccggtgcatgccctggtcaccgccgaccagccgctggtgcgctttatcggcggcgatcagctggccgataacctgcgctggttcgaagcctggcagcaaaaactgccgctgtggcagcaacagcatcagccttatctgtttattcatacgccggacaacggcgattcgccccagcaggcgcaaaaaatttggcagcagctgcgcctggcgatccccgatttgcctgcgccgccggactggccggaacaggatgcgctgttttga

SEQ ID NO: 427205 - DNA, 1797 bp, Serratia marcescens
atgagtcctcgtacgagaaaggcgttgctgagcctgatgataccgctggcatttgtgccagcggtggccgcagcggatgacgatgtgccggcattattgcagtttgctgagcgttaccagcagcaggaggcaccggcagcggatgctgataccgtcgttacccccgccaaggaaactcaaaagccggcgtcccggtcggttcaaactcgtgaaacgatcgcgcagagaaagcaactggcgcagttgcaaaaaacgctgcgcgtgaaagagactcaattggagcaacagcaagccgctcttcaatccctgcagcaggagctgaccgcgttgcgggttgcgtcgtccctgaccgctgccgataaaccgacaccggcgcctgatttgagcgcgttgagcgacttcgccagcggtgtacgacaggcgctgaacctgacgccgcaggagcggaaggctagggcgcagatcgccgaagcgcaggcagcgttagcgcgggaaaagcagcaaaccgaagagcgcgatcggcgcatcgccttgctggaacaacggttggcggcgttgcctaaacagtctgatagcgcgcgccagcaagcctggcaggagaagctggcggcgacgcaggccgccagcgataaagcgcaccagcgttatgagcaggataaaaaagcggccaccgctgagttggaacaacagaaggcggaggctgccaggttgacgggtgaacttcagcagcagctgacgcagctgctgaaagagcgtgacggtcaacgccaacagtccgggcagcaagagaaaagcctgaagacggcgctggcgcagcaaaaggccgaagccgccaaggcggtgggtgaacttcagcagcagctggcgcagctgcagaaagagagtgatggtcaacgtcaacaggccgggcagcaagagaaaagcctgaaggcggcgctggcgcagctgcaggaaaaaaacaagacgcaaaccgaacaggctaaggcgttggaacaacgtttggcggtggtaacggccgaaagcgcgcaggctgcgcagcagcgggataaagcgacactgcaggcggataaaacggcaacggagctggcggccgctcatcaggcgcagcaagctttgcaagacgagctgagcgggctgagatcgcgggccaaatggctgccggatgcgcaggcgctcaagaaaaagccggagcagcagagctatgctgccggtgtcgctttgggacgcgatattcaaacgatgctggcggagcgtaaaaattggggcatcaatcccgataaaaccgtgctgctggcgggtgtgatcgataccttcaacggccattaccaactaagcgatgcacagttgagcaacgcgctggcggagtcggaaaaagcggtgaacgacgccagaaatcaggcggcgaagacgcagaccagcaaaggtgaggcattcgtcgccgagttcaaaaagaagaagggcacgcagaagtcgcctgccggtttctggtatcgcatcgattatgcgggtgatgaaaccattaaagataatgcgcgggtagacatcgtggtgaaagagagcttaaccgatggtagcgtgattcaggatatggatcgcagcgggaaggtgatgtcgcagccgctctccgcctatccgccgctgttccgcgaggcgatcggccatctgaaaaatcatggctcgctgacgatggtggtgccgccggagttggcgtacggtgaaacaggctatgcgccgcagatcccgccgaacgcgacgatggtgtatgaactgcggattgtcgatgtcagcaacgggtaa

SEQ ID NO: 427206 - DNA, 1821 bp, Serratia marcescens
atgaacaatatgattagtgttaataacatcagtgaattgcgtaatctgacgccagttacagatgaccagattgtctttttagtttctcacacccccggacatttcgccggcggcggcgaattctattatgcgaaaacggatacaaccagtgcggacaataacggtaccgtggtggttacaacgggaggagcccgctggaaacgactggatcagaaactgactttcgatcacttcggcgccgatcctagtggcacttccgcctctgacgcagcaatcagcgcgacattaaactatgccgcgagtttaaaaaacaaagtggtctatgcttcggaaaatgcccaatatctgctgaccagcactcaacctatcaacgtcgctaatggcgtcacagtcagaggatcccgccgcggtcttgctcaaggccctgcaagtcttacaaacaatggccctaatcgggcaggccttgcggacgatagtgctttcatcatcaaaaagccggcaggtgcggtttgtttcgcctgcgataagaacgttgtctttgatggttggtcgttcctctatccagatcagaaatatactgccacccagccggaggcgtttattccatacggagccaccattaccgcaaccggcgctctgtcagtcgccaactgccgttatgtaggcgcctatgattttgttgaagctcgtggagaagccaacaactttgagaatatctacggttgggcagtacgctgcgactacagggtttatgaaagcagggacatcaacagatttaccaatgttcacgtcaatgccaacgtcgtgcgcccgacagaaaacgcggtgactgcctctatcgctgtaaccggttcttgtgctttcaatctcgatcgccacgacaatacgtttatggtgaatgtgttctcttatggcaaaaagatctttattaaaactacaacacaaggaacctcctatttaggcggccttagcctgagcaatttcatggcagacagaaatggtaccggaattgatatcgactcggattcctccgccaatattcaaatcgccaacggttcttatattaatgactatggtgataccgttgggggcttcctggtattaagaaagtctactggccaatcaaatatcaccccagtgcaaatcagcaatgttaacttcgctaccgctaatggaccgaagggttcactctctcctcaggccgttcgcttcgaagcgaacggcgggtatcaactttcattcagcaacaccgttatgccaatgtggacgaacggcagtctgaacaatgaagcgggttacaacattcttagaggcacactgagcattgcgcaacgcagctaccagctacatgcggctccgctaaattgtttgacgaacagcaatatgatcgccatcggtgctgacaaacagcctgtaggctggtttattgacggaaatctgacggcggatagcaatatcctgaccgccaatggagataacccggcttataaaggtttaggtcaacgtattcatcggagcatgggactgagaacattctgggccatcgcatcctctatcggcgatcaatctaccgcgcaagcttcgactggcatttgggcccgctcgttcaacgataactataccgacactgtcgagagcaatgaagctattccctggatacgcatcggcaacctttactacgcgcgttttgtcatgaacaacaatcgcactatccacgatatcctggtcaatcccggaaatggcaataatgcggtgcgcgttttaaactgcggcattactccgggcgaagtcttcaacttctcgcccgatgcacagcactaa

SEQ ID NO: 427207 - DNA, 249 bp, Serratia marcescens
atgattgaagaagcgaagttaccgcaactgctcgaacatatgatactgaacctgcgcatgatttatgcgcgctctaccctggtggaaaaagcgctggcccatatcatcgccagcgacagcgcgctgaaaagcgacataatcaaacagctgcaggtcgtctccgccgccaacgagcgcgatcaggtcgatctggaacaggcccgcattcacctgatcgatgtgctcaactcggttccggccaagaaataa

SEQ ID NO: 427208 - DNA, 984 bp, Serratia marcescens
atgatcgatctactgcccctgacgctggaagggaacgaacctgtcgaatggcaaggtgaaaccccgcagctgcgctggcgctggcagggggaaggggtgctggagctcacgccgcggcagccctaccgccaggcgatggtgatgtcggcgggcgtgcacggcaacgaaaccgcgccgatcgaactgctcaatcagctggtcggcgacttgctgaccggccggttgttgctgagggtgcggctgttggtggtgctgggtaacccggcggcgatgcgggccggcaagcgttatctgcacagcgatatgaaccgcatgttcggcggccgctaccgcaacttcgccgccagcggcgaaaccgtgcgtgcgcagcagctggagcgtgcgctcgccgcctttttcgatggggaacaggcggcgcgtttccattacgatttgcacaccgccatccgtgaatcgcgtttgccacgctttggcattctgcctttccagaaacgcccgtacagcgagccgatgttgaagctgctggatgcggccgatctggatgcgctggtggtacacagcgcgccgggcggcacttttagccattattccagcgaacatctcaatgcggcgagctgtacgcttgagttgggcaaggcacggccgttcggtagcaacgatcttcagcagttcgccgccatcgatcgcgcgctgcgggcggcggtcagtgagggcgctttgccggtgcgcgtgggtgatgagattcgggttttccgcgtgatgcactcgttgatcaaacacagcgaagatttcaagctgcacctggacgatgacacggccaatttcaccgaactgaaaccgggcatgttgctgtgcgagcagccgcaggaggactatcgcgtgggccaagagggggcctggatactgttcccgaaccccagcgtggcattgggcctgcgtgccggtatgttgttgaaagaagtttcccgctctacgctgtattga

SEQ ID NO: 427209 - DNA, 1341 bp, Serratia marcescens
atgtcaggatatgaagtcaatttcgacggtttggtggggccgacgcaccactatgccgggctgtcgttcggcaacgaggcgtcgacgcagcatcaaaacagcgtatcgaacccgaagctggcggcgaaacaaggcttgctgaaaatgaaggcgttggccgatctcggtttccagcaaggggtattgccgccgcaggaacgtccgcatttgccgatgctgcgtcgcctgggcttcagcggcagcgatgaggcggtgctggcgcaggcgatgcgtcagtcgccgcggctgctgtcggcgctcagttcggcgtcgtgcatgtggaccgccaatgcggccaccgtgtcgccttcggcggacagcgccgacggcaaggtgcatttcaccgccgccaacctgaataacaaattccaccgcgccatcgaagcggaaaccaccaccgcagtattgcgggcgatgttcagcgacgatcggcatttcgcccaccatgaggcgctgccgcaggtggcgttgttcggtgacgaaggggcggccaaccacaaccgtttgggcggcgactacgccaggcgcagcgtgcaggtgttcgtctacggtcggcaggagttcggtggcgaaacggcgccggcgcgctatccggcgcgccagacgcgcgaagccggcgaggcgatcgctcgcctgcaccagctggacgagcagcatacggtcttcgtgcagcaaaacccggcggtgatcgatcagggcgtgttccataacgacgtgattgcggtcagcaaccagaacgtgctgttccaccaccagcaggcgttttaccgccagcaacaggcgctggatgaagtgcgccgcaagatggcgacgctggacagcgagctggtggcgatcgaggtgccgacagagcgcgtctcggtggcggacgcggtggcgacctacctgttcaacagccaaattcttaccaagccgaacggcaagatgatgatcgtcgtgccggaggagtcgcgtcagcatgccggcgtgtggcgttatctcaacgacatgatcggcagcggcggcccgatcgatgaaatccgcgtgttcgatctgcgcgaaagcatgcgcaacggcggcggcccggcctgtctgcggctgcgtgtggcgctcaacgaacaggaactgcgggcggttaacccgcgcgtgatgatgaacgaacggctgtttgcgacgctgaatgagtgggtggatcgccattatcgcgatcgccttacgcaggatgatctggccgatccgctgctgctgcgcgaagggcgcgaggcgctggattcgctgacgtcgatcctcggtctcggctccatctatccattccaacgctaa

SEQ ID NO: 427210 - DNA, 141 bp, Serratia marcescens
atgcaaaaaaaccgctgttcgaaactgactttcctggcggagaaaatgctgtccctcaccgctgatttagaaacaaatctgttacataaaatcggtttttcactatttatggcgtatatccggtccctgagcggggagtaa

SEQ ID NO: 427211 - DNA, 969 bp, Serratia marcescens
atgtcaactgaacctctggtggaagtgaaaggattaaagaaatatttcccgctgcgcgacgggctgttcgggcgaaccactggccagctgaaggcggtggacgacgtcagcttcagcattcgcaagggccgcattttcgggctggtgggcgagtccggcagcggcaaaaccaccgttggccgcacgctgctcggcctgcacgacaaaaccgccggcgaggtgatgttcaaagggcaggcgttggatagcctgagcaaagacgcgttgcgcgccctgcggccgaaaatgcagctggtgtttcaggatccgtacagttcgctgaacccgcgcctgcgcgtgggcgacgccatcggcgaagcgctgttgcagcacggcctggcgagcaaggcggaactgcgcgagcgggtgatcgacaccctggcggtctgcgggctgtctccacagcattacggacggtttccgcatgagttttccggcggccagcggcagcgcatcggcatcgcgcgcgcgctgatcctacagccggagtttatcgtcgcagacgaaccgatatcggcgctcgacgtgtcgattcaggcgcagatcatcaatctgttctccgatttgcaggaacggcagggggtgacgctgctgtttatttcacacgatctcggtgtggtagagcatctgtgtcaggacgtggcggtgatgtacctggggcagattgtcgagagcgccggccgcgatgcgttatttcgccggccgctgcatccctacacgcaggccttgctggcggcggtgccgacgctggatgcgcatcgctcgctgcctagggcagcaagcggcgagccgccgaatcccgccaacccgccgcacggctgccgttttcatccgcgctgcccgcaggccacggcgcagtgccgtgaacaggcgccgcgcctgcgcagcgtggcgcccggtcatcaggtggcgtgccacgtggtcggctag

SEQ ID NO: 427212 - DNA, 987 bp, Serratia marcescens
atgagtcaaccgctggtggcgttcgatcggctgtcggtgtcgtttcagggagagcaagggccggtgcgggcggtgcagcaggtcagccttgagctgcaggccgggcaaacgctggggatcgtcggcgagtcgggctgcggcaaaagcgtgaccgccatggcgctgatggggctgctgccgcagccgctggcgcaggtagacggcggtgaaattcgctttgaagggcagaacctgctgtcgctgcgggcttcaaagatggccgatctgcgcggcaaccggctggcgatgatctttcaggagccgatgagcgcgctcaatccggtgttgaccctcggtgaacagctggtggaaccgctgattcgccacctggccctgtcgccgaaagcggcctggcgtcaggcgattcaactcttgacggaagtggggttggcgcgcgcggaggcgctgatgcgctgctacccgcatcaactgtccggcggcatgctgcagcgcgtgatgatcgccatggcgatcggatgccgcccggcgctgctgatcgccgatgagccaaccacggcgcttgacgtcacggtacaggcgcagatcctggcgttgctgcgtgagcagagccggcgacacaacatggcgatgatcttgatcacccacgatctcggggtgatcgcccagatgacggaccggctggcggtgatgtacgccgggcgcgtcgtcgagcagggcacgacgcgggaagtgttggccgagccgcggcatccttatactcaggggctgatcgcctcgcggccggtgccgggccagcggctccgccgcctgtattccattcccggccaggtgccggatctggcgcgcttgcctgaacactgtgcgtttgccgagcgttgtgcgcaggcctccgctcgctgccgcgatggcatcccgccgctgtacggcacaccgcagcgccagtccgcctgtttcctcaacgccggagggcgcctgcatgtcaactga

SEQ ID NO: 427213 - DNA, 951 bp, Serratia marcescens
atgttggctacgttgtttttcggccgccgtcgccgctggcgccaggctcagctgccagcgctggcgcaactgtcgccgccgcccgccgcgcaggcctggcgacggctgcgccgccaccggccggcgatgatctcgctggcgttgctggtgctgttggcgttgctgtgcctgattgggccgtcgctgtcgccgtggcgcgacgacgccggcgacgtgctgaatatcaatcaggcgccgagcggcgcgcactggttgggcaccgactttctcggccgcgatatctgcacccggctgctgctggcggggcggatatcgctgaccatcggcctggtgtcgatgttgctgtcggtgacgctgggttatgtgctgggggcgcttgccggttatctgggcggcgtggcggacaggctgatcatgcgcttcgccgatctgctgatgaccattcccggcttgccgttgttgatcatcatgggggcgatgctgaccgagctcgacgtctcgccggattaccgcatctacatggtgatgatcatgctgagcctgctgggttggccgtcgctagcgcggctggtgcgcggccagatcctgtcgctgcgcgagcgggatttcatgctggccaccgaggtgctggggctctccacccggcggcgtctgttcggccatctgctgcccaacaccgtgccgattttggtggtggtggccaccatggcggtggccaacgccatcctcagcgaatcggcgttgagctatctcgggctgggcgtggtgccgccgacgccgtcgtggggcaacatgatggatgccgccaacagcctgatcgactttcagcgccgcccctggctgtggatgccgccggggctggcgatcttcgtcaccgtagtggcgatcaatatcttgggcgacggcctgcgggacgcgctcgatccgaaaatgaacggggtaacacgatga

SEQ ID NO: 427214 - DNA, 957 bp, Serratia marcescens
atgagaaattttatcctgcgccgtctgttgcagactatcccgatgctgctgttggcttccttgctgattttttgcatcttcgccctggcgcccggcgactttatcgacggcaacatcaacctgaccgtgcaacgcgccgccgagctgcgggcgctgtacgggttggatcagccgttgttcagccgctacctgcactggctcggccggctgctgcagggcgatctcggcttttcgctgcagtatcagatcccggtcagcacgctgctgaaccaatacatctggaactcgttcctgctggcggcggtggcgatggtactgtattggggcatcgcgctggcggtgggggtgatctcggcgatgaaaccctattcgctgttcgatcatctgatcaccgtggcggtgttcgccgccatgtcgtttccgacgttcttcctgtgtctgctgctgatcaaatggttcgccgtcgatctgcactggctaccggcgggcggcatgctgcgcaccggcagcgaagcgagcgggctggcctggacgctggaggtggcggcgcacctgctgctgccggtgctggcgctggtgatgctgcaggccggcagcctgacgcgctatttccgcgccagcatgctggacgtgatccgcatggactatatccgcaccgcgcgcgccaaggggctcagggagaaaacggtgatcctcaaacacgcgctgcgcaatgcactgttgccgatcgtcaccctgctggggttcgagctgccgggattgttctccggcgcgctgatcaccgaaaaaatcttcaactggccgggcgccgggcatatccatatcgattcgctggcggcgcgtgattacccggtattgatggggttcacgctgtttctggcggccctgaccattctcggcaatctgctggcggacattctgtacgcttatgccgatccgcgcattcgtttgaggtaa

SEQ ID NO: 427215 - DNA, 1689 bp, Serratia marcescens
gtgagcagaataaaaaataagttaaacaaactgttgcgttatcggctgacgccgctggcgttggtctgcgcgctggggctaagcgccgtcgcgcaggcggaaacgctggccgaaggcatcacgccggccagcgacgccgctcgggttccggccgccgccaagctgcgcaaagacaccgtggtggcgggtatctcggagccgcaggggattttcaacccgtatctgttcaccaacggctgggacgagaatgtgaccgacgtgatcttcagccgcgtgatcggcctggacagccagggcaagccagaagggcgattggcggagtcctggcaggtcagccccgataatctgacttacaccatcaagctgcgaccgaacctggtctacagcgacggctcgccgctgaaagccgacgatatcgcctttaccctgacgctgctgcacgatccggcctatgacggcgacaccgacatcacgccggcgcacatccagggtggcgccgagtataaaaacggcaccgctgccggcatcagcggcctgaaggtgatcgacgatcgcaccattcagatcgtcaccacccaaccgggcgcgactacgctgcagctgatcggcggcccggtgctgtcgcgggcttactacggcaaagactatcagcgcggcaagctcgacggcgtgcgcgccttcaacggtaagccgctcggcaacggcccctatatttacgacaagtatgtgccggggcaggagatccgcttccacgccaacccgaacttctatctcggtgcgccgccgatggcgcgctttatctaccgcgtcaccaacccggccaccaacttccagctgttccagaccggtgagaccgactacgatgcctttaccgccaagccggacgatatcgaacagctcaagctgctcggtttcgccaatatcaacctctacagctcaagcgattacagccgcatcgacttcaatctcaagcgcccggcgctgcaggacaaacgggtgcgtcaggcgttgatctacggcctggatcggcaaaggctgatcgccgtggtgtaccagggttacggcaaggttgccaaccaaccgatctcgccgatctcctgggcttatgacgcgaacggtatcaatccctacgcttacgatctcgataaggccgggaagctgttggacgaggccggttggcgagtgggcgcggacggcattcggcaaaaagacggtaagaagctggagctgacgctgctggtgaccaaaaagctgatcaacgatgcgctggtgccgatcgccaaggacaactaccgccggctcggcgtggtgctgaaaccgcaggtattggacttcaacgcactgctggcgcagcgcaaggcgggcaattacgacctggcgtcgctcagcaccagcacgttgaacgatccgcacgacggcgtgcgcgatttcatcagccgcgagagcgaaaccggttatcacaacccgcaggtagacgcgctgatcgccagggctaacgccacgctggatatcgctcagcgcaagccgctgtaccaccagctgtatcaggcgttggcggacgacccgccggtgatcctgctcggcaaccgcgagattttgagcgccagcagcgcgcgcgtcaccggctttaaaccggatatttacaacggcttggtcggcagcctgccgaacgtcaaaccggcgccgtaa

SEQ ID NO: 427216 - DNA, 222 bp, Serratia marcescens
atgtaccgctacctggcgatcgccaactatgaggatcgcttcgtggtaccgtcgagccaccgcgagctggcgcgcgaagccttcccggaaagcaaaggctgcggcttcagcttcggcgacggctgccacggcagcgacggcaagttcaacctgtttaacagccgccgtatcgacgccatcgacgtgaccgcgaaaaccgcgcggccggaggatgcctcatga

SEQ ID NO: 427217 - DNA, 3762 bp, Serratia marcescens
atgagcaaatttttagaccgtttccgctatttcaagcagttggcggagcctttttctggcgatcacggccagaccttgaacaccaaccgcgactgggaagacggctaccgcagccgttggcagcacgacaaagtggtgcgttccacccacggcgtgaactgtaccggttcctgcagttggaagatctacgtgaagaatggcctggtgacctgggaaacccagcaaaccgactacccgcgtacccggcccgatctgcccaaccatgaaccgcgcggctgcccgcgcggcgccagctactcctggtacctgtacagcgccaaccggctgaaatacccgctgatgcgcaagcgtctgctcaagctgtggcgcgaggcgaaagcgcagcacagcgatccggtcgcggcctggggctctatcgtcggcgatgcggaaaaagccaaaagctacaaggtggcgcgcggccgcggcggcttcgtccgctccagctggcaggaggtcaatgaactgatcgccgccgccaacgtctataccgccaaaaccttcggcccggaccgtatcatcggcttctcgccgatcccggcgatgtcgatggtgtcctacgccgccggcgcccgctacctgtcgctgatcggcggcgcctgcctgagcttctacgactggtattgcgatctgccgccggcctcgccgatgacctggggcgagcagaccgacgtgccggaatccgccgactggtacaactcttcctacattatcgcctggggctccaacgtgccgcagacgcgcaccccggacgcccacttctttaccgaagtgcgttacaagggcaccaaaaccgtggcggtgacgccggactacgccgaagtcgccaagctgtgcgaccactggctgaatccgaagcagggcaccgacagcgcgatggcgctggcgatgggccacgtgatgctgaaagagttccatctcgatcgcgaagtcggctacttccgcgactacgtgcgccgctataccgacatgccgatgctggtgctgctggaagcgcgtgaaggcggccattacgccgccggccgcctgctgcgcgccgccgatctggtggacgggctgggccaggaaaacaaccccgagtggaaaaccgtcgctatcgacagccgcagcggcgatctggtggcaccgcagggctccatcggcttccgctggggcgagaagggcaagtggaatctggaacagcgcgagggcaagttgcaacaggaagtcgagctgcagctcagcctgcttggcatgcatgacgacgttgccgaggtgggcttcccgtacttcggcggcgcggacagcgagcatttcaacagcgtggcgctggacgagatcctgctgcacaagctgccggtgaaacgcctgcagctggcggacggcagcgaagcgctggtgaccagcgtgtatgacctgacgctggccaattacggtctggaacgcgggctgggcgacgccaactgcgccgccgactatgacgaggtcaaggcttatagcccggcctgggccgagcagatcaccggcgtgtcgcgtcacaacatcatccgcattgcccgcgagttcgcggaaaacgccgagaaaacccacggccgttcgatgatcatcgtcggcgccggcgtcaaccactggtatcacatggacatgacctaccgcggcttgatcaacatgctgatcttctgcggttgcgtcggccagagcggcggcggctgggcgcactacgtcggccaggaaaaactgcggccgcaaaccggctggctgccgctggcgttcggcctcgactggcagcgcccaccgcgccacatgaacagcacctcgttcttctacaaccattccagccaatggcgctatgaaaccgtcggcaccgacgagctgctgtcgccgttggcggacaagtcgcgcttcggcggcagcctgatcgacttcaacgtgcgcgccgagcgcatgggctggctgccgtcggcgccgcagctgggcaccaacccgctgcgcctggcggagcaggcccgtgcggccggtcagtcgccggtcgagttcaccgtcgatagcctgaaaaacggcacgctgggcttcgccgccgagcagccggacaatccgcagaatttcccgcgcaacctgtttgtctggcgctccaacctgctgggctcctccggcaagggccatgagtacatgctcaaatacctgttgggcaccgaaaacggcattcaggggaaagatctcggccagcagggcggcgtgaagccgcaggaagtggaatggcgcgagcagggcggcgaaggcaagctggatctagtggtgacgctcgatttccgcatgtcgagcacctgcctgtactccgacgtggtgctgccgaccgccacctggtacgaaaaagacgacatgaacacctccgacatgcacccgttcatccatccgctgtcggcggcggtcgatccggcctgggattcgaagagcgactgggagatctacaagggcatcgccaaggccttctccgaagtgtgcgttggccatctgggccaggaaaccgacgtggtgaccctgcctatccagcacgactccgccgccgaactggcgcagccttacggcgtgcaagactggaagaaaggcgagtgcgatctgatcccgggcaaaactgcgccgcacatcatcacggtggaacgcgattacccggccacctatgagcgcttcacctcgctggggccgctgctggacaaactgggcaacggcggcaagggcatcagctggaacacccaaaccgaggtcgacttcctcaagcagcttaactacgtcaaggccgacggcccggcggcggggcggccgaagattgagagcgcaatagacgcggcggaagtgatcctgtcgctggcgccggaaaccaacggccaggtggcggtaaaagcctgggaggccctgagcaacgtcaccggccgcgatcaccggcatctggcgctgaacaaggaagacgagaaaattcgcttccgcgacattcaggcgcagccgcgcaaaatcatctccagcccgacctggtccggtctggaggacgaacacgtttcctacaacgcctgttacaccaacgtgcacgagctgatcccgtggcgcactatcagcggccgccagcagctgtatcaggaccacgagtggatgcgcgccttcggtgaaagcctgctggtataccggccgccgatcgacacccgcgccgcgcagccgttgctcaacagcaagccgaacggcaacaaggagaaggcgctgaacttcctgacgccgcaccaaaagtggggcatccactccacctacagcgacaacctgttgatgctgacgctgtcgcgcggcggcccgatcgtctggttgagtgaggaagacgccaaagatctgggcattgcggacaacgactggatcgaggccttcaacgccaacggcgcgctgacggcgcgcgcggtggtcagccagcgtatcccggccggcatgaccatgatgtaccacgcgcaggagcgcatcgtgaacctgccgggctcggagatcaccagccagcgtggcggcatccacaactcggtgacccgcgcctgtccgaagccgacccacatgatcggcggctatgcgcagctggcctacggcttcaactactacggcaccgtcggctccaaccgcgacgagttcgtggtggtgcgcaagatgaaccgcattgattggttggacgacgaaggcaacgactacgcgcagggcagtcagcaggagaacagcaaatga

SEQ ID NO: 427218 - DNA, 1395 bp, Serratia marcescens
atgtcgcaacttgcaacgccttcatcaaagaaaaccggtgcgctgattcaggactggcgtcctgaagacagcgccttttggcagcagcgtggccatcgtattgccacccgcaacctgtggatttccattccctgtctgctattggccttctgcgtctggatgctgttcagcgccgttgcggtcaatctgaacaaggtcggcttcaacttcaccaccgaccagctgttccttttgacggcgctgccgtcggtctcgggcgctattttacgcgtgccgtattcattcgtgatcccgctgtttggcggccgccgctggaccgctatcagcacctgcttcctgctggtgccgtgcctgtggttgggattcgcggtgcaggacagcagcacgccgtacagcgtgttcgtcatcatttccctgctgtgcggtttcgccggcgccaactttgcctccagcatggccaacatcagcttcttcttcccgaaagcgcgtcagggcggtgcactgggcctcaacggcgggttggggaatctgggcgtcagcgtcatgcagctggtcgcgccgctggcgatctctttcagcctgtttggcctgtttggcggcacggcgcaaaatcaggcagagggtggccagctgtggctggaaaatgccgcctggatctgggtgccattcctgctggttgccacgctggcggcctggttcggcatgaacgatctggcggcggccaaggcatcgttgcgtcagcaactgccggtgctcaagcgcgggcatctgtggatgctgagcctgctgtacctcgcaaccttcggatccttcatcggtttctccgccggtttcgccatgctgtcgaaaacgcagttcccggacgtggtgatcctgcattatgcgttcttcggcccattcctcggggcgctggcgcggccggttggcggtgcgctgtctgaccgtttcggcggcgtacgggtgacgttgatcaactttgtggtgatggccgttttcgctgcactgttgttcctgacgttgccgaatgcgggtgagggcggttcgttcatcgccttctacggtatctttatggtgctgttcctcaccgcgggcctcggcagcggctcgactttccaaatgattgccgtcattttccgtaaaatcactgtcgatcgcgttaaagcggccggtggcagcgatgagagcgcacagcgtgaagcggtgacagattccgccgctgcattgggctttatctcggcgattggcgccgccggcggcttcttcattcctcaggcgttcggcacctcgttggcgctgaccggttcgccggccggggcgatgaaggtgttcctggtgttttatatcctgtgcgtggtgatcacctgggcggtgtatggccgtaagaaaaaggcctga

SEQ ID NO: 427219 - DNA, 669 bp, Serratia marcescens
atgtttattcctttactgtggcacgcgctgtttttcaccgcgctgctgtcagcaggcatggttgccttctcgctcatcacctggctggaacgaacggaatacgttcgcgataacccgccgagattgcgccgcagcagcctgctgctgacggccttcggtttagcgttggcgacgttgcccttcgacctgccggcagcgcaccggctgtggctgccaccggccgcggcgctgctgatcgccctgagctggctcgactggcgccaccgatggctgccggaccggctcacccagccgctgctgtggagcgggctgctgtgtaaccttgacgcccgctgggcgccgctggacgatgcggttatcggcgctgcagccggttacggggcgctgtggctcctcaacgcgctttatcggcaggtgcggcggcgcaacggcatcggccagggcgatttcaaactgttggcggcactgggcgcctggctcggttggacgacgttgccgctgttggtctgtctggcggcagcgttcgggttaagcctggcggtagcgcacggcctgcttaaccgccgcggctggcgaacgccgcaacctttcggtatcgccctggcggcggccggttggctacagctcttgatgggcgccgaccaaagcgcgctgacgttgttcggttag

SEQ ID NO: 427220 - DNA, 1611 bp, Serratia marcescens
atggacaataacggaaacgcttcagtggagcgcgcagcaaccttgctcgccaccggtgaggttgtgacgccggaacagttttatcaggacagcgacggaagcaactgggggccggcgatcaacaaagcggcggcggcggcgctgcaagccggcggtacgttgtccctgggcaaacgggtgtatacggtcgctgggcacgtagtcattcagacgacaacggacatctacggcggcatcggtttgcgggtggtcggattggggcgggcgaccaaaatcgtcaagaccgcagacagcagctataccaatgaacaaggcgaaaccaagaaagcggtgatcgtggtgaaaggcttcgccaatctgacgctgcacggcttgacgttgcgggatgataccggcgcagacgatacccacggcgtgtggttcagcgatctcaatatgacgaagtttgatatccgtgacatctacaccaaggttggcggttattcgctgtttgtgtcgggcgacatgttcattaactggctggtgaacgtgcagatggaagctaacgccaatcgcccgggggatggggtgctgtggatgaacaaatccggcaccaccaattttatcgacgggctctacgccgctcgcgccaaaggcaccgcgttcagaatttcagggttttactctactgtcggctcgttggctgcagatgactgcatcggcgatatctacaatttcaaagactttaacggcacgatcaattcattgggctgcgagaaccgcaacacgcagcgtgccgccagcaccagcgtgctgtccaccaactttgcccagggcacgataggcaatatcaatatccaggacgcgcagaacgtggagagtgggggcgtgttgtgccgattcatcaacgaatcccgttgggatatcggtcagttgaatctttacagcggttcgaaaacgcctttcccggtggcgatcgccgcctgcaacaacaataccgaggtcactttcagtaacgtatacaacggcggcatcccggtggccggcaaaagcaccgtcgacgttacgtcgtttttaagcggggtcgaagcgatgtacagtctgggtgagcgggctattgccccttcctccaccagcaatcatttgccgcgcaatatctcaaaacagccatcgtggactttgttaggcaccctgaccgcgccggatcggcaacccacaacgcacattacgcttcagcagggcgtaagtaccaaggtgctggcgtgcgatttatatatcacgttcgacctgtcttcgcaggcgaccgcctttgtcgtcaatagaggcagctatagcgcgaaaagcgcctttatgttgcggcgcactgggccgttgagctgcgaaatatattatcgcgtcgagaaggatttcggctttggcagttatcaggtacagactacgcgcggcagttactggcggccggacggcgcttcgttgagcgcgcccccctccgatgcgttggaaatccgtagcgatgagatgttatccgcgacgaggctcacggcggtccagccactggccaatccgacaacggccagcacggcagaagtggccggattactcaatcggctgatcgaggcgctgaagacctaa

SEQ ID NO: 427221 - DNA, 843 bp, Serratia marcescens
atgggcactgataacaccttattgaacgtcgaacgcctggcgatcggcgtgccggggccacagccggtggcgctggtgaagaatatttcgttcagcatggggcgggagcggttggcgctggtcggtgagtccggctccggcaagtcgttgaccgcgcgtgcgctgatggggctattgccgccgccgttgcagctgcaggcgcagcgcctgacgttgggcgatgaagacttaacgcgcctgagcgagcgccagtggagccggctgcgcggcgaccgggtggcgatggtgatgcaagatcccaagcatgcgctgaatcccaatcagccgctcggccgtcaggtggaggagccgctggtgctgcatgcaaagctgagccgcgccgagcggcgtgaaaaagtgctggagatgttggcggcggtgggcttgcccgatccggcggcgctgtgccgccgctatccgcatcagctctccggcggcatggggcagcgggtgatgctggccattgcgttgattaacgatccgcagctgttgattgccgacgaaccgacttcggcgctggatcaccagatgcgcgatcaggtgctgcagctgatagacaatctggtggcgcaacgcaatatggggctgatcctgatcagccacgatttgcagcaggtggcgcaccactgcgagcgggtgctggtgatgtacaaaggcgagctgttggatcagctgccggcggcagagctggcgcaggccacgcatccttatacccgcacgctgtgggcgtgtcggccgagccgcgagacacgcggcaaaccgctgccggtgctggatcgcgcgctgttggagacgttgaaatga

SEQ ID NO: 427222 - DNA, 870 bp, Serratia marcescens
atgagccaatatctctctgaacacgaaccgcaaagcgagccggccgtcggttaccgccgcggccggcgcctgaccacgctgacgctgggcgcggcactggtggcgattttgatcgtcaccgcgctgctggccccgtggctggcgcctttcgatcccaatctgcagcatatcgagctgcgattattgccgccttccgccgcacattggctgggcaccgacggctttggccgcgatttgctctcccgcgtgatttacggcgcgcgaccaacgctgattctggtgtcgctgattttggtgttgaccattcccatcggcctgctggtcggcattggcgccggctaccttgggggctgggtagagcgcattttgatgcgcctgaccgacattttcctgtcgctgccgagtctggtgatcgcgctggcgttcgtggcggtcatggggccggggctgatgaacggcgcgctggcgctggcattgaccagctggccggcctttgcccgccaggcgcgggccgaaaccctggcgctgcgccgcagcgactatctggcggcggcgcgcatgcagggcatcaacgggctgcggctgatggtcggccacattttgcctttatgtctgccgagcgcggtggtgcgcgcggcgctgagtctggggggcatcatcttgtccgctgccggtctggggttcctcggcatgggcgtcgcgccgccgaccgccgaatggggctcgatggtggccgaaggcagtaaagtgattttcgaccaatggtgggtcgccgccgcaccgggcggggcgatcctgttcgccagcctggcgtttaacctgctgggcgatggcctgcgcgacaaaatggatcctcgtcatgggcactga

SEQ ID NO: 427223 - DNA, 1056 bp, Serratia marcescens
atggccgctgaactgtccgccagcgccggggcggcccggcggtattggcgttggggcgggcggctgctcggcggcgccttgtcgttggcgctgacgttgcttggcctgctgctgttcaccttcatgctgtcgcacctggcgccgatcgatccggcgctgcaggtggcgggcgatcacgccagtgaagccacctatgcgcaggtgcggcacgagctgggattggatcagccgttgccggtgcagttttggcgttatctggtgcacctggcgcacggcgatttgggcatttcgcgtatcaccgcccagccggtgttgagcgatctgctgcgtaccttcccggcgacggtggagctggccacctgcgccattatcctcggcgccctcggcggcattacgctggcgtttctggcggtgctcaaaccaggcagctggctggataacgcggcgcgtttgctgtcgctgatcggttattcggtgccgattttctggctgagcctgctcgggctgctgctgttctatgccacgctgcactggtcggcggggccggggcggcttgacgacatctacttgtacagcatggagccgcgcagcggtttcgtattgatcgacagctggctgtccggcgatcgcgacatgttctacaacgccatcggccacctgtggctgccggtcgtggcgttggcgctgctgtcgatggcgggtattacccgattgctgcgggcggcgatgctggaagagtgcaacaaggaatacgtgacgctggcgcgttccaagggggccgggcgcctgcgcattctgctgcgccatgtgtttcccaacgtgctgggcacgctgatcaccgtactgtctctctcctatgccagcctgctggaaggtgcggtattgaccgaaacggtgtttgcctggcccggcgtcgggcgttatctgacctcggcgctgtttgctgccgacacgccggcgatcctcggcgccacgttgctgatcggcacctgtttcgtgctgttgaatgcgctggccgacgccttgacctatttagtggatccgcgaacccgatga

SEQ ID NO: 427224 - DNA, 555 bp, Serratia marcescens
atggaaaaccatccaccagaaaatggcgtctcacaccggcatgagagagcgatagagcaaacactggcagacatgaacagcgtcctgcttgagtcggatctgtttatgactcgtctgacggtacaagaccggcgctggcaaaaaggcagaaaaaacggacatacgttaaattggcgctctctttttaaatatcatgcccaaacgccgatgagtttcgctttcgtctatcggcaaatggccagcccgctgagccgcgccggcttttgcctgtgccgttacctccaggcagagaacgttatcgatcttgtcgcattggagaatttctccctgcgtgaagcgcaacatccactgaaaggcaatatgctgcgtaactgcttgcaggtgctgtatctgtatggcctgaacctgcaagagcagaggctgacgccggagcctccgccggacatacttatcagccacgcaataaatcaccgcgtgttggcgctgtatactcgtcaggccgcctttgaggtaatacccggtaccatgacatgtaaaccagcttcaacgcactga

SEQ ID NO: 427225 - DNA, 192 bp, Serratia marcescens
atggaaaataaggatctgaccgcccctacgctctccattcaagagcaaaaacgcatcgccattgagattttgcgccaacaccatcgctgggagatggccaacccgcgtccgcctgaagaactcccggaatgggaagccatcggcccgttcagaaaaagcaaacgtcacctgatcgaacgtaccgacgactaa

SEQ ID NO: 427226 - DNA, 903 bp, Serratia marcescens
atgaaatatatcattctgattttgcttattttatgcgtcgtctatgtgcattaccgcgggcgggtacgctacaacgtgtggcgacagctgtctgaccattccacctttaccgcaccgctgaacgtctttatgtacctgttttcccgtgtgccgaccacgccgtacctgaagccggagcagttccctgagctggcggtactgcgggagaattgggaaaccatccgcgacgaaggacagaagctgatggagatccaacagattaaagcgtccgatcaattcaacgacgccgggttcaactcgttcttcaagaccggctggaaacgcttttatctgaaatggtatgaggacagccatccttccgccatgaccctgtgcccgcagaccacggaactgctgcgcagcctgccttcggtcaaggcggcgatgttcgccgaactgccggacggcagccggttgccgcgccaccgcgatccttatgccggttcgctgcgttatcacctggggctgataacccccaacgatgaccgctgcttcattgaggtggacggcgagcgctacagctggcgcgacggtgaaggcgtgatgttcgatgaaacctacctgcactacgcggaaaatcagagcgggcaaaatcgtctgatcctgttctgcgacatcgaacggccgatgcgctaccgttgggcgcaggcggtgaaccactggctggggcgcaatctgatgagcgccgccaccgcgcctaatgaagagggcgatcgcactggcggcgtcaacaagatgttcaaatacatctatgcgatacgccgggtggggaaacgcctgaaggcctggaaccgcaccggttattacatcatcaagtggattttgttcggggggatcgccgcggcgatattcttctcggtataa

SEQ ID NO: 427227 - DNA, 1284 bp, Serratia marcescens
atgagcaacaaggcaggcccgaataacgggcctcatccgcactctcagggggctgcatccccttcacgtcgccgtttgttgcaggggctggggctgagcgcgctggcgctgggcggcagccgcctggtgcaggcggcggacaaagcggcgccgcaggatgagcgctggcagaaacagccgttttatggtcgccatcaggccggggtgctgaccccgcaacaggcggcgatgatgctggtggcgttcgacgtgctggcgaccagcaaagcggacctggagcgcctgttccggctgctgaccgaccgcatcgcgttcctgacccacggcggcaaggcgccggaggtggacgccaaattgccgccgctcgattcggggatcatggggccggagatttacccggataacctgaccattaccgtctcggtcggcgcatcgctgttcgacgaacgctttggcctgcaggcgcaaaagccgctgcggttgcagaaaatggcccgcttccccaacgatgccctggacgccgggctttgccacggcgatctgctgctgcagatctgcgccaacaccaatgaaacggtgatccatgcactgcgcgacatcatcaagcattcgccggatttgctcagcgtgcgctggaagcgggaaggatttatctccgcgcatgcggcgcgcagcaaaggcaaagagacgccgatcaacctgctgggcttcaaagacggcaccgccaacccgaaaaccgacgacaaaccgctgatggataaggtggtgtgggtcggcgacaacgtcggcgagccggcgtggacggcgggcggcagctaccaggccgcgcgcattattcgcttccgcgtggagttttgggatcgcacgccgctgcaggagcaggaaaccattttcggccgcgaaaagcacagcggcgcgccgctcggcatgaagcatgaacatgacgagccgaactacgcgaacgatcccgacggcaaggtgatcccgatggatgcgcacatccggttggctaacccccgcacgccggaaagccaaagcaatctgatgctgcggcgtggctacagctattcccttggcgtttccaatgccgggcagctggaaatggggctgctgtttgtctgctatcaggccgatctggagaaagggttcctgacagtacaaaaaaggctcaacggcgaagcgctggaagaatacatcaagccgatcggcggcggatatttcttcgtattaccgggcgtgaaagagggtggcgactatttggccagcggcctgctcaaggcctga

SEQ ID NO: 427228 - DNA, 963 bp, Serratia marcescens
atgaagatatccgccatcgttccggcgtttaacacggaaaactacattagtgagtgcgttgaatctttattacagaacgaccaggataatattgaaatcattctggtcaacgatggttcaaccgacaaaacgggcacgatactggatagtttcgttgcaccttgcattaaagtgatccataccgaaaataaagggcaatcgtccgccagaaacacggggcttgctgcttcatcaggcgactatgtgatctttgtcgatagcgatgacaaactcgcggaaaatgcgctggatcgattagctggcatgctaaaagaaacccgggcggacgtggtctttttcgagtcttccgtgttcttcgacgatgaaagtctggctgagcgattcaaccctaagtatgaaagaaatggcttattaagtaacatcacctgttcaggaacggatttttttcagaaagcagtcaatgtcggtaactacatcgtcagcccttgcctgtatatatccagtagaaaagccttaaaaaacatccagttcaaaaacggtatcgtacacgaagacaacatattcactacgcgtcttctgcttgagaatgatattaccgttcattgtgtcaatgaaaaattttatttacgtcgagtgcgtcatggctccgtaatgacgcaaaggaaaggcgatggacatgtaaacggctactataactgcattaccgagctgattaatgatcccccaaccaatgccggccgggtacaggacgagtacaataagttcatttgccatatggtcgattgcttcaagtacaccaatggcgacatcattgccgatttgaaaggtgaacttgccgagaaaaacgacgtagttttaggtaagttagcggggttggagcgagaaatcgctgagctgcgcaactccacatcgtggaagataacctcaccattaagacgcatggtgactttattgaaaagataa

SEQ ID NO: 427229 - DNA, 3972 bp, Serratia marcescens
atgggcactaccacaatgggcgtgaaactcgacgaggcaacacgcgaccggatcaagagcgccgcgcagcgcatcgatcgcacgccgcactggctcatcaagcaggccatctttaattacctcgagcgtctcgagagcggttccgatattcctgaaattccagcgctggccgctgcgggccagcctgaagcggacgacattatgccgcaagcgcaggaagagtcacaccagccattcctcgatttcgccgaacaaattctgccgcagtcggtcacccgcgccgccatcaccgccgcctatcgtcgcccggagaccgaagcggtgccgatgttgctcgaacaggcgcgattacccgccgatcttgctcaggctactcacaaaatggcctacggcatcgccgagaagttgcgtaaccaaaaaagtgcaaacggccgcgccggcatggtgcaaggcctgctgcaagagttctccctctcttcgcaggaaggcgtggcgctgatgtgcctggcggaagcgctgctgcgcattccggacaaaccgacccgcgatgccctgatccgcgacaagatcagcaacggcaactggcactcgcacctggggcgcagcccgtcgctgttcgtcaacgccgccacctggggcctactgttcaccggcaagctggtgtccacgcataacgaagccaatctgtcccgttcgctgaaccgcattatcggcaagagcggcgagccgctgatccgcaaaggcgtggacatggcgatgcgcctgatgggcgaacagttcgtgaccggcgaaaccatcgccgaagcgctggccaacgcgcgcaagctcgaagaaaaaggcttccgctactcctacgacatgctgggcgaagccgccctgaccgaagccgacgcgcaggcctacctggtttcctaccagcaggcgatccatgccatcggcaaggcctctaacggccgtggcatctatgaaggccccggcatctccatcaagctgtccgccctgcacccgcgctacagccgcgcgcagtacgaacgcgtcatggaagagctctacccgcgcctgctgtcgctgaccctgcaggcacgccagtacgatatcggcatcaacatcgatgccgaagaggccgaccgtctggagatctcgctcgacctgctggagaagctgtgcttcgaaccgcagctggccggctggaacggcatcggcttcgtgatccaggcctaccaaaaacgttgtccgttcgccatcgacgcggtgatcgacatggcgcaacgcagccgccgtcgcctgatgatccgtctggtgaagggcgcctactgggacagcgaaatcaaacgcgcccagatggacggcctggaaggctacccggtctacacccgcaaggtctataccgacgtttcctacctggcctgcgcccgcaagctgctgtcggtgccgaacctgatttatccgcagttcgcgacccacaacgcccataccctgagcgccatctatcatctggccggcaacaactactaccctggccagtatgagttccagtgcctgcacggcatgggtgagccgctgtacgagcaggtggtgggtaaagtggccgacggcaaactgaaccgcccttgccgcatctatgcgccggtcggcacccatgaaacgctgctggcttacctggtgcgccgcctgctggaaaacggcgccaacacctcgttcgtcaaccgcatcgccgatgccaccctgccgctcgacgagctggtggccgatccggtcagcgccgtggaagcgctggcagccagcgaaggccagattggcctgccgcatccgcgcattccgctgccgcgcgagctgtacggcgagaaacgcaccaactccagcggtctggatctgtccaacgaacagcgtctggcctcgctctccagcgccctgctcaccagcgccagccatccgtggcgcgcggaaccgatcatcgacgccgaattggatcagggcgtggagcaaccggtgatcaacccggccgagccgggcgatgtggtcggctacgtgcgtgaagccaccgaaggcgaagtcagccgtgcgctcgacgccgccgcggccgccggcccaatctggttcgctacgccgccgacggagcgcgccgcgatcctcgaacgcgccgccgagttgatggagagtcagctgcaaagcctgctgggcattctggtgcgtgaagcgggtaaaaccttcaacaacgccatcgccgaagtgcgcgaagcggtggacttcctgcactactacgccggccaggtgcgcgacgatttcgccaacgacagccaccgtccgctgggcccagtggtctgcatcagcccgtggaacttcccgctggcgatcttcaccggccaaatcgccgccgcgctggcggcgggcaacagcgtgctggccaaaccggccgagcaaacgccgctggtggctgcgcaggcggtgcgtatcctgctggaagccggcattccgcaaggcgtgctgcaactgctgccgggccagggtgaaaccgtcggctcgacgctggtcaacgatgcccgcgtccgcggcgtgatgttcaccgggtctaccgacgtcgccggcattctgcagcgcagcatcgccggtcgcctggatccgcaaggccgtccgacgccgctgatcgccgaaaccggcggcctgaacgccatgatcgtcgactcttcggccctgaccgaacaggtcgtgaccgacgtggtggcctccgccttcgacagcgccggccagcgctgctccgcgctgcgtatcctgtgcattcaggaagacgtggccgagcacacgctgcaaatgctgcgcggcgcgatggccgaatgccgcatgggcaatcctgagcgcctgtctaccgacgtgggcccggtgatcgacgccgaagccaagaccggcatcgagcgccacattcaggcgatgcgcgccaaaggccgcaaggtgtaccaggccgccaaaggcagcgcgcaggatgagaaagagtgggcgcgcggcaccttcatcaaaccgacgctgatcgaactcgacagcttcgacgagctgcaaaaagagatctttggcccggtgctgcacgtggtgcgcttccagcgcaacaatctggacgcgctggtcgatcagatcaacgccgccggttatggcctgacgctgggcattcacacccgtatcgatgaaaccatcgcccgggtgaccgaacgcgccaaggtcggcaacctgtacgtcaaccgtaacatggttggcgcggtggtcggcgtacagccgttcggcggcgaaggcctgtcgggcaccggcccgaaagccggcggcccgctgtacctgtaccgtctgctggctaaccgtccggacgacgcgctgcagcgtacgctgcaccgtcaggacgaagagcgcccgatggaagccacggcgcggccgcagctgttgggcgcgctgcaatcgctggagaaatgggcggtcaccagccaacacggcgaactggcggcattggcgcagcgctatgcggaactgggccagggcggcaccgtacgcccgctgccgggcccgaccggcgagcgcaatacctatgccctgctgccgcgtgaacgcgtgctgtgcctggcggataacgaagccgacgcgctgatccagttggccgccgtgctggcggtcggcagcagcgcgctgtggccggaagcggagctgcagcgcaatctgttccgccgcttgccgaacgatgtgcaggcgcgcatcgccttcagcaaagactggcagcaggacaaggtcgagttcgacgccgccatctaccacggcgatgccgaccagctgcgcaccctgtgcgagcagatcgcgcagcgcggcggcgccatcgtctcggtgcagggcttcgctcacggtgaaaccaacatcctgttggaacgcctgctgatcgagcgttcgctgagcgtcaacaccgccgccgccggcggtaacgccagcctgatgaccatcggttaa

SEQ ID NO: 427230 - DNA, 414 bp, Serratia marcescens
atgttttatcccgcttatatccatacagaatcaaacggcagcgccagcggtttctttcccgacgtccctggctgctacttcgccggtgctagcctggacgacgcttttgccgatgcccaaagcgcactggatgcgcactttgagttgttgagcgaagacaatcagccgataccgcgcccgcatgccgtcgcggcccatcttgccaaaggtgcggaatccttcgagggtggacaatggttattagtcgctatcaacatggataaatttgacggccgggccgaacggattaacatcaccttgccccatcgcctgttaagtcgcattgactctcgggttcggcaacatccgggatacggtagccgcagcgggtttctcgccgccgccgcacgaaacgagttgttgaaaacggagtga

SEQ ID NO: 427231 - DNA, 1281 bp, Serratia marcescens
atggcacaagtaatcaacactaacagcctgtcgctgatggcgcagaacaacctgaacaaatctcagtcttctttgggtactgcgattgagcgtctgtcttccggtctgcgtatcaacagcgcgaaagacgacgctgcgggtcaggcgatctctaaccgtttcaccgcgaacatcaaaggcctgactcaggcttctcgcaacgccaacgacggtatctccctggcgcagaccaccgaaggtgcactgaacgaagttaacgacaacctgcagaacatccgtcgtctgaccgtacaggcacagaacggttctaactctgatagcgatctgaaatctatccaagatgagatcacccagcgtttgtctgaaatcgaccgtatctcccaacaaactgatttcaacggtgtaaaagttctgagcaaggatcagtctctgactattcaggttggcgctaacgacggcgaaaccatcagcatcgatctgaaaaacatcaacaaagataccctgaatcttactactttcgatgtttccgacaaaaacaataaaattggcgctgtagttaacagcgtaccaggaaccaaatctgtacccgctaccgtaggtaaagacgcgtcgggcgcagatatcgccgataagacaaaagcttcagtagttagctataccgatggcggcacaactaagtatgcgattaaagatactactggtaccgctaagtactacgaagcaacaaaacaagctgatggttcattcaactatgataccgcttcagatgttactactgcagcagcagccggtacccctacagcagtgactaatgtcgacgtaaaatctgacaaaaatgtgacagttaagggattggcttcaggtgaagaactgcactcctttactgacagcactggtgcatccaaatacgttgttaaaactaccggtactgatggtaaaacaatgtataaagatgcaaccgtagctgctgacgggactgtgaccgcaacaactgaaaacaagaatgtgatcaacccgctgaaacaactggacgacgcactgtctcaagttgacggcctgcgttcttccctgggtgcggtacagaaccgtttcgattctgttatcaacaacctgaacagcaccgttaacaacctgtctgcttctcagtcccgtattcaggatgctgactatgcgaccgaagtgtccaacatgagccgtgccaacatcctgcaacaggctggcacctctgttctggcacaggctaaccagtctactcagaacgtgctgtccctgctgcgttaa

SEQ ID NO: 427232 - DNA, 372 bp, Serratia marcescens
atgaccgacatttatctcacaaaagccttccagacatttgccggcgacgaacgcatcagtgacgccacgatagtgaaagcggcgcgagagatgcaaaatcagttgtacgacgccaatctcggtggttacgtttacaaaaaacgcatcgcccggatggggggtggaaaacggcgcgggtatcgggtattaatcgcaacggcagatgaaggaaggatctttttcatgtatggctttgccaaaaacgaaagagacaacatcaatcaggatgagttaatttcctggcggcatttggcggcgctgtatctggattattcaccattcagactgtatcagctggtcaactgcggggaattaataaggttacaactatga

SEQ ID NO: 427233 - DNA, 399 bp, Serratia marcescens
atgttcagtcatatgctggacaccaacattgttatctatgtcattaagcgccggccgctggaagtactagaggcgttcaatcgctatgcaggtaaaatggtcatttcgtcgatcacctatggcgaattggttcacggggtggagaaaagctcacgcccggtagtgaacgccagggtggttgaggattttgtctcccgattggacattctcgattacggcgctaaagcggcatcgcactacggcaacatccgggctgcgctggaacgccagggaacgcctattggcgtaaacgatctacatatcgccgggcatgcgcgcagcgaaggattgattctggtgaccaataatcgacgcgaatttgagcgcgttgagggtttgcggctggaaaattggttgtaa

SEQ ID NO: 427234 - DNA, 234 bp, Serratia marcescens
atgacgttaggttctgtctttaccaataatcggacacaggccgtgcgcttgcctgcagaggtgcgttttcctgataccgtttctaaagtgaccgtccgcgtagtgggcaaagagcgcattcttgcccccctggagaatacctgggacagtttcttctgtgcggaaaatgaggtgagcgatgatttcctcaatgaacgtgccgaacagcaccagcgcgagcgggaagatttttga

SEQ ID NO: 427235 - DNA, 1050 bp, Serratia marcescens
atgagtaaaatcagagtgttatgcgtagacgattcggcactgatgcgccagctgatgacggaaatcgtgaacggccacgccgacatggagatggtggcgaccgcgccggatccgttggtggcgcgcgatctgatcaaaaaatttaatcctcaggtgctgacgctggacgtcgagatgccgcgcatggacgggctggatttcctcgagaagctgatgcgcctgcggccgatgccggtggtgatggtctcttcgctgaccggcaaaggctcggaaatcacgctgcgcgcgctggaactgggcgcggtggacttcgtgaccaaaccgcagctcggcattcgcgagggcatgttggcctacagcgagctgattgccgagaagatccgcaccgcctccagagcacgcctgccgcagcgttccagcagcccggcgccggcgatcctcagccatgcgccgctgctgagcagtgaaaaactgatcgccatcggcgcttccaccggcggcaccgaagcgatccgccaggtgctgcagccgttgccggcaaccagcccggcgctgctgatcacccagcacatgccgccgggtttcacccgttcgttcgccgagcggctgaacaagctgtgccagatcacggtgaaagaagcggaggacggcgagcgcgtactgccgggccacgcctacatcgcaccgggggatcgtcacctggagctgacgcgcagcggcgctaactatcaggtgaagctgcatgacggcccggcggtcaatcgccatcgcccctcggtcgacgtgctgttccgctcggtggcgcaatacgccggccgcaatgcggtgggggtgatcctcaccggcatgggcaacgacggggcggcggggatgctggagatgcaccgcgccggggcatataccctggcgcagaacgaggcgagctgcgtggtgttcggcatgccgcgcgaggcgatcgccagcggcggcgtcagcgaagtggtcgagctggacaggatgagccagcgcatgctggcgcagatcgccggcggccaggcattgcgcatttga

SEQ ID NO: 427236 - DNA, 831 bp, Serratia marcescens
atgttgacgcaaatggtgcagcgcctgccgctgtcggacgtgcattttcgccgcatcagccagttgatttatcaacgcgccggcattgtgctggcggagcataagcgcgagatggtttacaaccgcctggtgcgccgtttgcggctgttgggattgcacgatttcggcgattacctggcgctgctggaaagcgatccgaacagcgcggaatggcaggcgtttatcaacgcgctgaccaccaacctgacggcattcttccgtgaggcgcatcacttcccgatcctggcagagcacgcgcgctcgcggccgaacggctacagcgtctggagcaccgcggcctcgaccggcgaagaaccgtattcgatcgccatcacgctgagcgatgcattgggccaacgggccggcagttgccaggtttgggccagcgatatcgatacgcaggtgctggaaaaagcggaggcgggcgtttaccgccaggaagatctgcgcaccctgacgccgacccaaatgcagcgctattttctgcgcggcaccgggccgcatcaggggctggtgcgcgtgcggccggagctggcggcgcgggtgaactttcagccgctgaacctgctggcgccggagtgggctctgccggggcaattcgacgccattttttgccgcaacgtcatgatctatttcgataaggcgacgcaggagcgcatcctgcgccgcttcgttcccttgcttaagccgggggggctgatgtttgccggccactccgagaatttcagccagatcagccgggatttctacttgcgtgggcagaccgtgtatgggctgaccaaggagaggtaa

SEQ ID NO: 427237 - DNA, 2655 bp, Serratia marcescens
atgtctgaaatcagccgctcggtattatttggcaaactggatagcctgttattcacctctctggaaagtgcgacggcgttttgcaagctgcgcggtaacccctacgtcgaactggcgcactggctgcatcagctgatgcaatcgccggacggcgatctgcagcagatcgtccgccacttcgcgctggacgaggcgcagctggcgcgcgacatcgtcgaggcgctcgatcgcctgccgcgcggcgccagcgctatctcggatctgtccgagcacatcgacagcgcggtagaacgcgcctgggtctatggctcattgaaattcggcgcggcgcgcatccgcggcggccacctgctgctcggcatcctgaaaacctacagcctgcgccatctattgaaggccatttccccgcagttcgagcgcatcaacgccgatctgttgatggatcagttcgccgccatcaccgctcactcggcggaaaacgcccaggatgcgccggcggaaagcagcgccgagaacgtatccggcgcgccgcgcagcggtgaaagcgtgctggcgcagtatgcccaggatctgaccgccagagcgcgcaacggcgagatcgatccggtggccggccgcgatgaagagatccggcaaatcatcgatatcctgatgcgccgccgccaaaacaacccgctgctgaccggcgaggccggcgtcgggaaaaccgcggtggtggaaggcctggcgctgcgcatcgtggccggcgacgtgccgccgcagctgcgcgacgtgaaactgtgcctgctggacatcggcatgctgcaagccggcgccggcgtcaaaggcgagtttgaaaaacggctgcaggcggtgatcgacgaagtgcagtccagcccgacgccgatcatcctgtttatcgacgaaattcacaccctgatcggcgccggcggcgcccagggcaccggcgacgccgccaacctgctgaaaccagcgctggcgcgcggccagctgcgcaccctcggcgccaccacctggtcggagtacaaaaaatacatcgagaaggatccggcgctcacccgccgtttccaggtggtgcaggtacacgagccaagcgaagacaaagcgctgctgatgctgcgcagcaccgtcagcccgctggaacaacaccaccgcgtgctgctgctggatgaagcggtagacgctgcggtgcggctgtcgcatcgctatattccggcccgccagctgccggacaaggcggtggcgctgctggataccgcctgcgcgcgcgtggcggtcagccaacacgccgagcctgcccaggtcgaagactgccgccaccgcatcgatgcgctgcagatagagttggatatcgcccgccgcgaggccaaggtgggcatcggcgatcccctgcgcccgcaggagattgaagcccaactgaccgcgctgagccaggagttggaacagttgaccgaccgctggcagcaggagctggcgctgatccaagagatcatcacactgcgcgcccagctgcaccggcaggaagaagagtctactgaagaagagacgcaggcgcgccctgacgccgacgcgctgcgcgcccatctgggcgaactgcagcagcagctgagcgcgctgcagggcgaggcgccgctgatcttcgccgccgtcgacgccaacatcgtggcggcagtagtggccgactggaccggcatcccgctgggccgcatggtgaaaaacgagattgaggcggtgctgcaactctccgacaccctgaaccagcgcgtgatcggccaacgccatgcgctggatctgatcgcccgccgggtgcgcacctcacgggcgcggctggacgatcccaacaagccggtcggggtgttcctgctggccgggccatccggcgtcggcaagaccgaaaccgcgctggcgctggcggaaaccctgtacggcggcgagcagaacgtcatcaccatcaacatgagcgaattccaggagtcgcacaccgtttcgacgctgaaaggcgcgcccccgggctatgtcggctacggcgaaggcggcgtgctgaccgaggcggtacgccgccgtccttacagcgtggtgctgctggacgaaatcgagaaggcgcacccggacgtgcatgagatcttcttccaggtgttcgacaaaggctggatggaggacggcgaaggccgccatatcgatttccgcaacaccatcatcatcctgacctccaacgtcggcaccgatctgatcgccggactgtgcagcgatccggagctgctgccggaaccggaggcgctgagcggcgcgctgcgccagccgttgctgtcggtgttcccggccgccttgctcggccgcctgctggtggtgccgtattacccgctgaccgacgccacgctgggcaacatcgtgcgcctgcagctgggccgcattcaacgtcgcctggcggagaatcacgacatcgtctgcaccttcgacgacgcggtcatcgagcagatcgtcagccgctgcaccgaggtggagtccggcggccgcatggtcgacgccatcctgaccaacaccctgctgccgcagatcagccacaccctgctgaccggcagcgccaacgaccagcgctatcgccagctgcatatcgcgctgcagaaccacgaattcatttgtcaatttcaggcataa

SEQ ID NO: 427238 - DNA, 447 bp, Serratia marcescens
atggattaccttttccaggaaggatatttcaccctccccgccatcgcctggcaggactgcacggtcaatattctcaaaaacccgcaaaccggcgcctcgctggtcatcacccgcggcatcattccgcaaggtgccacgctggaggacgaattcgagaagcagtggcaagcactgctgccacagatcagcgatttgcaacagtcgccgcgccggcgcatcagcgccgggccgcagggccatctcaaggcgattgaagtcaccagtctctttatccgcgccggacaccaccatcatcagcatcagttggcggtgcagccggacgagagccagacgttactgatcgtcacctatgccgccatgcgccccttcacccccgaggatgacgctcactggcagcaggtgaaagcgtcgctggtcttgaacacagtgaacaatagccatggctga

SEQ ID NO: 427239 - DNA, 4422 bp, Serratia marcescens
atggctgagatctgggcagcaagaaaggatgacgaactgatccacaccagcgcgttggcggacatcgccagcgccgtcgccgaagtcgcggtgtatgcggtggcgaccgccgccgtgtccgccgccgcggcagccgcagcgccggcattggcaggggtggcggtgctcggcgcagcggcgacggcggcctccggttgcgttggcgccgggctgatcgtcggttttgccaccagcctgaccggcgtcggggaacatatcagcaacggctgcgacgccgtggccaactggctcttcccgccttccgtctccggcgtcattctcacgggttcccccaatgtcttcaccaacgccaaaccggcggcacgcgccgccggtcgcttactcacgcccgcagagatcaaagcgttaccggcgccacagccgccacaaagcttctgggattatggcgccgagctgctggccaccggcggtaatatcctctcgcagctgtggcagcccagcgtcgccggccccagccagcccagccaaccgctggaagaagataaaatcagctgtgacaaacatccgcttccgcaatacctggcggaaggctccagtaaagtatttatcaacggccaaccggccgtacgcagtaatgaccgttcaacctgcgaggcgaaagtctcgaccgacgtctccaaaaatgtgcagatcggcggcggagcggtggtggtacgcgacatcaagagcggcaaactgccgggtatcggtttagcgttgaccgtactgccgctgctgctcggtaatccggccaaactggttaagaacctgccttgcatgatcggcggcgggctggcggcggcgggcgttaacgccctcggtgaagctatccacgccgcctttaacccggtgcatgccgccaccggcgccaaggtgttgaacggcgaagaagatctggacctgttgctgccggcacgctttccgctggtctggcagcgcaattacaacagccgcaatgactatcagggactgtttggccacggctggcgcacgccttttgaaacctgggtcgatcttggcgaccgggacggcggcgttgagtgttgcctgcatgatgaaaccggtcgtgagctacgcttcccgctgcctggggtgaaccagccgagcttcagcgccggtgaagggctgatgttccgccgcggtgaagagggacagctgctgatcgccgacaccgacggcagcgtctggcggctgttcgtgccgctgccgcagaacccttcccgcctgcggctggtgtcgttgagcgatgagtacgataacgcgctgctgctgaactacgacgaacgacagcgcctgagccgcatcgtcgacagcgccggcgccatgacattgcggctggaatacggcgatccgcgctttgacgatcgcgtcaccgccttgcggcataacgacgaaccacgcgtgcgctaccgttatgacgacggcggcaatctgcatcaggtgatcgacgccggcggcttggtcacgcgtgaatttcactataacgcccaacatctgttgacccgccaccaacaggccggtgggcccagcttcgaatatcgatgggcgatgttcgacgactggcgcgtggtggaacaccgcgacagcgccggcggcggctgtacaatcgactacgatttggccgccgggttaacgacggtcaccgagtacgacggcttgcggcaccagcaccgctggaacgcccaacggctgatcgtcgaatataccgacgagcgtggtgaggtctggcattaccaatggaatgacgaggacatgctgatcgccacgcgcgatccgctcggccacggctggcatttccgctacgatgaagtcggcaatctggtcgaggaagaagatccgctcggccatatccgcctcaccggttggctaccacagcgcgcgctgccgatcagcgtcaaggagcccaacggcgccacgcagcatttctactacgacgagcgccatgccttgattgccgagatcggtgcgctcggccatagccagcgctacctgcgcgatggctatggtcaggtggtgcaagccgtcgacgccaacggcggcatcagccatttcgcttatgatgagcacgggcaattattgcgcgcccgcgattgctccggcaaacaaaccctctacaaatatacggctcaaggctggctccgcgaggtgaccgacgcctccggcgaacgcgttcattaccgctacgatgccgccggccgcctgacacagctgcagcgcgccgagggctggcaggagacgctgagctggaacgcgcagggccagctggatcgctatcagggggccgatgggcgcctgacgcattatcgctatgacgaagccggccgcctgctggccacgcgcaatccgctcgatggcgaagtggtgcgccactacgacgcccgcggccgattaacggcgctgcgcaacgagaatgcggaaagctacctgttccattggacggcctgcaacctgttgcaggaagaaatcgggttggacggcgtcagcacccgctatcgttacgacgaatgccgccgggtcgtcgagcgccgcttcgccgccaatacctccgccgccttctcgcactatttcagccatgacggcgccggccaactggtgagcaaacagacgcccgatggagaaacccgctaccgctacagtccgctcggccaactgctgcatgccgccagctaccgcggcaacgcttggcatgacgagccgacagcggctcagaacgaggtcagttttgactatgacttgctggggcgggtgacccgtgagcaaggtgccaacggtacgctacgctatgattacgatccgatgggtaaccgcacgcaaaccaccttgcccgacggacgcacgctgcgcgcactgtactacggcagcggccacctgctgcagctggcgctggacgatatcaccctcagcgagttcgagcgcgacaatctgcaccgcgaactgagccgtacgcagggtcgcctgaccagccgagtgcattatgatcggctggggcgcaaagaccggcgggagatcttcaatgacaaccgccagcgcccggcgccggccagcagctcgcgccagtggtcttacgactatcaaaacaacctgacgcgcgaagaacacaacgccaacccgttctcctaccagcgttatcagtacgatgccaccggtcgattgctgagccgagacggcacgctgccggataccgagcgctaccgttacgatccggcatccaacctgctggatgaggggcaattccgccagcggcacaaccgcgtactgcattatcaggggattgattatcggtacgatgtctttggccgcacggtggaaaaacgcaaaggccactaccgttggcaatatctctacgacgccgatcatcgcctctgcgaggtggtgcgctacagccagcatcgcagcgaagcccaacagcatgtgcagttccactatgatccgctcgggcggcgcacgcaaaagcgagtgtggcatcaaagtcaggatctgcgccagccggtcggaaaatgccaaaccaccacttttttgtgggaaggtttccggctgctgcaggaaactcgcgacggcatgcccctcacctacgcctatgccgatcagggcagctatgaacctttggcgcgcatcgacggccactcgccggcccaggtgttttacttccacacggcaccgaacggcgaaccggaaagcctgaccgacagcgacggaacgctgcgctggcagagccacagcagcgcctggggccgcacaaagtatgaggaatatcagcaagatctggattactcccaaaacctgcgcctgcagggtcaatacctggatcgggaaacgggattgcactacaatttgttccgctattacgatccggatatcggcagatttacccagcacgatccgataggtttggccggcgggatcaacctgtaccaatacgcgccgaacccgctgggttgggtggatccttggggatggaagccacgatgcgcagcaaccaaagccaacgatcataatcaggcagcttttggtcgacaatggcaaggtcgaggtatctacaaaggacgagactcttggtcaaatatcatgttgaaagaaggtgacattgtttatggcggcgctccagggcaatctggtttttacttcaacaaggcgacgctagatgctgcaggtggcagtagagccaagctatgggaaagtttgcaggtgcttccacatgaaaaatttggttatagatctaaaatacaagcatatagagtaaaaagagaaacgattgcaggaacaggtaaagcgatatctcaagacccaacgagattcggcgaaggcggaggaactcaatttttcctttctaactataaaactgttcttgagccaattgataagccttttgaaattggattgtaa

SEQ ID NO: 427240 - DNA, 1338 bp, Serratia marcescens
atgtacgattatcaggcgattatcatcggttttggcaaggccggcaaaacgctggcggcctttctggccgggcagggatggcgcgtggcgatggtggaggcgtcggcgcagatgtatggcggcacctgcatcaacatcggctgcatcccgaccaaaacgctggtgcacgatgccgagcttcacgggccgggcgaacaggcgttcagccaggcgatggcgcgcaagcggcaggtgacgggcctgctgcgggagaaaaactaccaaaacctggcggggcttgaacaggtctcggtgatcgacggacgggcggagtttatcgatccgcaccgcatcagtgtgcagggtgcggcgggaacgcaggtgctgagcggcgagcgcatcttcatcaacaccggggccgtcagccgctggccggcgatcgacgggttggatcgttcgcagcggagttacgacagcaccggcctgctgcagttgacgcagcggcccgcgcgcttgggtattatcggcggtggttatatcgggctggagttcgcttcgatgttcgcgcagttcggtagcgccgtgacggtattcgaagaggcgaacgcgttgctcggccgggaagaccgcgatatggcgcaggcgatacagcaaatcctgagcgacgccggggtcagcttcacgtttaacgccggcgtgaagcaggtgcgcgatgtggaagggggcgttgaggtggtgcatcagggcggcgtgcagccgttcgatgcgctgctggtggcggccgggcgcgtgccgaacaccgccggtttgcagctggcgcgcgccggcgttgagacggatgaacgcggcgccgtacgggtagacgcgcagctgcgcagcagcgtgccgcacatctgggcgctgggggacgtcaacggcgggccgcagtttacctatatctcgctggacgatttccgcattgtgcgcgacagcctgttcggcgcgggtaaacgcagcacggccgatcgcggcgcagtgccttactcggtgttcatcacacccagcttttcgcgcattggcctcagcgaaaatcaggctcggcagcaggggcgcgacattaaggtcgccacgctgccggcggcggcgcttccgcgcgcccgcgtgctgggcgacacgcgcggcctgctgaaggcggtggtcgatgcgcagaccggccagatcctcggcgtggcgctgctgtgccgcgatgcccacgagatgatcaacatcgtcaaaacggcgatggacgccgagctgccctatacccggctacgcgatcagctgttcacccatccgaccatgagcgagtcgctcaacgatctgtttgggctgatagggtaa

SEQ ID NO: 427241 - DNA, 1083 bp, Serratia marcescens
atgtcgccagaacgtataacaatgcccgtcgccgcagccggtaccctaacgctggccgaggcctgtatccgcaggatggccaccgcttaccagcaaaccggcgccgcgtatccctcttccgaggcctggacggcgcaagccctgggcgaacttaacgccagcggcgacatctggcttatcgacggcagaaggcgcgccgagccgccgagctcccgctacgccacggcctggccactctggtttggccatcaatcagagcgttatgagaagccgctattttacttcgtcaacacgccctcggtggacatgttgcgcgggcttgagccggaaaccaatcgcaaggggattttcatcagcgatgcggataccggcagtgccgatttgccgaaaggcgtgcaggcctggttcccacttcagctcacggccatgccggactggttgcctttcgatccggccaatgcccgggaaaccggcgcgatactccatcacgccctgcgcgcgctctatctggagggagcgaggaagatggtttaccttgcaaccaacgaagacaatggcaccttctcttcagaggaaccgtttgtcgcagaacaggcgttcaagggaatgtatcgcgttgccaccgccgcggattcgccgttgcaggttcgtctgtgcggcgccggccgagcgctcgcccgcgttcagcaggcggccgaggtgttgaaaaactgggggattgcgtctgaaatctggagctgccccagctacacgcggttggcgcaggacgccgaactcgccgacatgcggcgccaggacagcggcggcgaatgccatctgaaaacgtgcctgggcaccgggaatgtccccgtcgtcgccgtcaccgactactcgcacctggttgccaaccagctcaggcgattcattcccgcgcgctttgccgcggtgggctcagattcacgggtgcgcggcgaaatccactacccgcaggcggaatggattgcgctctgtgccctcaaactgctggccgacgagcagaaaatcccttcggcgctgatcgccgatgcgctgcgcgttctgcacatcaccacgcccgatgcctga

SEQ ID NO: 427242 - DNA, 540 bp, Serratia marcescens
gtgaattgcaaatgcaagaattgcaaatgcaacaatagcgaaagccactctatccctttacaattgcaattgcaactcaccggttttgacgagaaaaatgacatgacagataaacaacccgacctgtggttctcctttgtgcgcgcgcatcgggcgattatcagaaagatagagacgaagttgtcggaagcggggctgccggtttacgcctggtatgacgtgttatggggattggaaagcggggaaaacggcacgcgccgcatgcatgagctggcggacgtgttggtgattgagcgttacaacctgacccgcctgatggatcgcctggaaaaagagcggctggtcacgcgttttcgatcggatgacgatcgtcgggcctccttcgccaccatcaccgaggaaggcaaggccctgcggaaaaagatgtgggagatctaccgcacggtggtcaaaacccactttctcaaccagttcagcgaagaagagatcgcacgcttctccgacgcgttggacaacgcgatgcagctggccagagagtga

SEQ ID NO: 427243 - DNA, 2676 bp, Serratia marcescens
atgaaccaacccgcggtaaaagcagatcttgacccacaagagacggctgaatggcttgaggcatttgaaggtgtcaccgacatcgacggccgtgaacgcgcgcattttttgttggaaagaatggccgaagccgatcagcgaaagcacggtgatttcttcagcatggtcaccacgccctacgtgaatacgatcccagcctataagcaaccgacgtatcccggcgatctggccgctgaagcgcgcatcaatgcatttattcgctggaacgccatggcgatggtgctgcgcgccggcaaacactccaacgtcggcggacatatcgccacctaccagtcggccgcggtgctttacgatgtggggttcacgcacttcttccgcgggcgcaccgatgatttcgccggcgacatggtgtatatccagggccattccgcccccggcatttatggccgcgcctatctcgaaggccgcatcgacgaggagcagctcgacaactttcgccgcgaatccacacgccgcggcctctcctcctacccgcacccgcggctaatgccagatttctggcaatatcccaccgtgtcgatggggctggggccgctgaccgccgcctaccaggcgcgctacatgcgctatctggaataccgcgaactgaaaccgcaccaggggagaaaggtgtgggcgtttctcggcgacggcgagatggatcaaccggaatcgctggcggcgattgcgctgggcgggcgagaaaaactcgataacctgatcttcgtcgtgaactgcaatctgcagcggctggatggccccgtgcgcggcaacggcaagatcattcaggagctggaaggcactttcaaagccgccggctggcaggtgatcaaggtgatctggggcagcggctgggacaaactgctgcaaaaagaccgctccgggctgctgatgcagcgcatgatggagtgcgtcgacggcgattaccaaaccttcaagtcgcaaagcggcgcctatgtgcgggagcatttcttcggcaagtacccggcattgctcgagctggtcgccgacctgagcgacgaggagatctgggcgctgcaccgcggcggccacgatccgcaaaaggtgtacgccgcctaccatcaggcggtgcataccacgggcaggccgacggtggtgctggccaagaccgtcaaagggtttggcatgggggaagccggtgaagggcagaacatcaaccaccagctgaaaaaaatgagccaggatgcggtgaaagccttccgcgaccgtttagggctgacaatctccgacgcccaactggcagagatcccttacctgaagcccgagcccgacagcgcggcggcgaagtacatcaccgcgacgcgcaccgcgctgggcggctacatccctgcccgcttcggccaaaccgccccgctggcgataccggagctatcgcgcttcgacggcctcctgaagggcagcggcgaacgtaacatgtcgaccaccatggccttcgttaatatcctcggcacgctgctcaaagacgccaacatcggcaaactgatcgtgcccatcgtgccggacgagtcgcgcacgttcggtatggaaggcctgttccgccaaattggcatccactcctggctcggtcagctgtataccccgcaagacgccgggcagctcagctactacaaagaggctaaagacggccagattttgcaggaaggcatcaacgaatccggcgcgatatcgacctggatcgccgccggcaccgcctacagcaaccacgatgtcgcgacgatcccgttctatatcttctactccatgttcgggctgcagcgggtgggcgatctcgcctgggcggcggccgacgcgcgcaccaagggcttcctgctcggcgccacctccggcagaaccactctgatgggcgaaggcttgcagcatgacgacggccacagccacgtgctgtcttccgtcattcccagctgcgtctcctacgatccgacctacgcctatgaactcgcggcgatcgtccagagcggcatgcgcaggatgttcgttgaacaagaggatatttactactacatcaccttgcttaacgagagctatccgcagccgccgatgccggcgggcgtggaggatgggattatccagggggcatatttgctcaagcagagcgaaacggcaaaccaagagagcccgcgcgctcagctggtcgccagcggcgccatcatgcgcgaggcactggcggcggcggagctgttggcggcggactttggcgtcgccagcgatatctggagcgccaccagcctgagcgagctgcgccgcaacggcatggcggccgaacgctggaacctgctgcatccggaagatccgccgaaagttccttatatccagagcctgctggcgacgcaccccggcccggtggtggtggtgacggactatatgaagatcgtcggcgatcagatcaagccgttcttgcccgaccgtccctttatcgccttgggcaccgacggctttggccgatcggacacccgcgaggcgctgcgtgagttcttcgaggtcaaccgccatttcatcgcgctcgccgcgttgaaactgctggctgacgaaggccgtatcgcccgcagcgaggtcaaccgcgccatggtgctgtatggcatcgcccccgataagccggatccggcggcggtgaagtaa

SEQ ID NO: 427244 - DNA, 2538 bp, Serratia marcescens
atggccataaaaaacaagaacggcgcagggcgtacgttcacatcagccaaacgcatgaccgggaaacgcgtcgctatcgggataggatgcgcactatcgggcatgctcacctccgcgatggcggcgcccggtgcatcggcaacaccctcggcggtcgaacagcccgctatcctttccttcgccattcccgccggtgatctggcgcccgccttgcagacggcggccgctaaggccggcgtgatagtgattttcacgcccgaacagacgcgtggaaaaagcaccgcgggcctgcagggacattaccgcctcaccgacgcgttcaatacgctgttggcgggcagcggattgcgcgctcagcaaaccgcacagggatatcggttggtcgacgccgggccggttcagcctttgacgataccggaactgtcggtggtcggcggtttgtccgacagcgtcgccgccggccgttcggtactggataaagaagacatcgaacgcgtacaggccgataacatcgccagtttgcttgatcgcttgcccggcgtagggatggcgggatcgccgcgcccgggcggccaaagcctgaatatctggggcatgggcgacatggaagatgtgaaggtggtgctggacggcgcgccgaagggatttgagaaatatcggcagggttcggtattcatcgaacccgaactgctgaaaaaggttgaggtcgataaggggccgcacaatctgttgaacggcaatggcggctttggcgggaccattacgctggagaccaaagatgccggggatatgctgctgccgggcgaagattttggcggcttgctgaaatacagctaccacaccaacgatcgccagggcatttacagcggcgcgttgtacggtcgtacgccggaaggattcgccgacggtttgatctacatgagcaagcgtgacggcggcaacctgaagcggccggacggcacgcgctttgcctattccgccaacgatcaggcttcctacctgttaaaaaccaatatttatctgagcgaggcgcagaccctgacgctgtcggcgatgcgctccgattccgatggctggcagccttttgccgccaagcgggacgatatcgccgcgcccaaccaggcggatatcgataaatatggccgggaagaagcgtggcgccgcattctggtgtatcgcgaccagacagacaccaattactctctgaaatggaatctggcgccggaagcgcagccgttgctgaatctgacgctgtcttatgcctattcgaagacagaacagcatgacaagcggccggattccgcttcaaagtccagctatctcggtacgctgggcaatgaaagctgggtgaactataccgatcggcagtttgacgtcagcaatgaaagccgtttcgccagcgggccgctggatcacaagctgttgctcggcgcacgttggcataaacatcagcgcgataccctgatgtattaccccccgcaggtgaaaaacgccagttacaactacggttatttccagccgtactacatgccggcgggcgaacaggaaacccgcagcgtttatctgcaggatgcggtcagcttcggcagcctgaccgtgacgccgggcgtgcgttacgatcacgtgaccaataccgggcaaccgaaccgggcaccgcgctataacgacagcgatccgagcgcgggccatgattacagcagcgtgacctataccggctggtcgccgcatttgggcgtgatgtggaaagcgacgtcgaatctgtccctgtttgccgacgtcagccgcacctggcgcgcaccggtgatcgacgaacagtatgaagtgcaatccgccgcatccagcgtgcccggtaccagccgcggcctgcaggtggaacgcatgacgggcgttcgtctcggtgcggtgctggacttcaacgatgtgttgatggcgcgagacagcctgcagatccgcactacgctgttccgcaatcgcggcaaggacgagattttctatcgtcgtggcgtgttgtgcgatgccgcacggcacgggggccaatgtgggcaaccgttgtcgaactatcgcaacttgccgggctataccattgagggcgtggagctcgaatcgttttatgacagcgaaagcctgttcggcagcctgtcgttctcctcgattcgcggcaaacgcgacgcttcaccacgcgatccgtggggcagcgaaacctggattgccgaaattccacccgttacggcacacgcgatgctgggcatgaaagtgccgcagtgggacatggccttcggctggaccggcgattttgtgcgtaaacaggatcgttcaccggccgacggcgatccgatggccgttgtctgggcgctgccgaaaacgtcgggttatgcattgcacggcctgttcgcctcgtggcagcccagcggtttacagggcttcgaagctcgcgtcgcggtggacaacctgttcaaccgcgattattacccttacctgggcgaatcggtgtccggcgtagggcgcaacatcaagtttagcgttagccaacgtttctga

SEQ ID NO: 427245 - DNA, 951 bp, Serratia marcescens
atgggtaattacgccaatcaatctcactggcaggacattcagcgattcctgccggaaagcttccggctgcagccgggggaagaaccgacagagacgtggtggtcctggcggcagtatcgcattcatctcgattgctaccgccgccccgaggcgccggtgaaggtgatcctgtttcatggcgtcggtaccaacggccggcagatgtcgaccatcctgggggcgccgctggcgcaccggggaatagagacgatcgccgtagacatgccgggatatggcatgacgcagacgggcggacaacggcggcgcgtgcgctacgacgactgggtgcagattggcagcgatctgatcgacgcggaacgggcgagggatgcgcgccccattgtgctgtacggcctgagcgccggtgggatggagacctatcatgtggcagcgctgaaccggcaggtgaaaggcattgtcggcatgacgtttctcgatcagcgtgaacaacaggtgcgcgacgagacggcgttgaatcgaatgatgagccgcctgggcattcccctggcgcggctggtggccgctacgccgctggccgggatggcgatgccgatggcattggcgagcaagatgcatgcgctggtcaatgacaaggcggcgcttaaggcatgtctggcggacgacacgtcggcgggggcctgggtgacgatgcgctttttagcctcgtacgcggcgtacgcgcctgccattgagccggaagatttcgacgtttgcccgatcctgctgacgcagccggcgcaggatcgctggacgccgttgcacctgagcgaactgttcctccgccgcgttcggcgggtaccggtgagcaccgtgatgctcgagaacgccgggcattatcccctcgagcaaccgggcctcgatcagatggttgaagcggtataccgtttttgcatcgccgcagcggcgcagtag

SEQ ID NO: 427246 - DNA, 618 bp, Serratia marcescens
atgccgcaagtaaaaaaaaatgcgcgcgtgccggttcaggaacgcgcggcggcgcgcatggccaaagtgctgagcgccgccgaacagatgctcgccaccctcgggccggaaaaaacctccattcccgccctggcggaagcggccgaagtgccgcgcgccgcgatttacccgttcttcccggacaagtacgcgctgttttcgcatctggctcagacccatatggagcaactgacgcaggcgctgcgcgcgtcggggctcgagaccgccggcagcttgcaggattgggtggatgccgccgtgttggccacggcccgctactacaatgcgcatccggcggcgagcgtcttgctgctgcgcggtgcgttcgccgaacccgaaaaccaggcccacgccgccaaaaacctgacgatcggcgagatgttccgggcaaaagtgcgagacctgcccgaactcgagacgctgccgtcggagcccgacgtcgttctgatcgccatagaattggcgtttgcctgcatgaaatatggttacgcgcgggaaggcaccgtctctgcggccatttgccgcgaagcgacgcgggcggtcatcgcctatctaggccagtggcgcaccgcgccgtaa

SEQ ID NO: 427247 - DNA, 918 bp, Serratia marcescens
atgattattcgcccgaaccagaactggttttttcgcctgttcgcctggcacggctccgtgctgtcaaagatcacctttcgtctgtcgttgaacgtgctgatgtcgatagtggcggtgatcagctatcaatggtacgagcagctcggcgtgcatttgaccatcgcgccgttcagcctgctgggtatcgccatcgcgatttttctcggctttcgcaataacgccggctacagccgctttgtcgaagcgcgcaacctgtggggctcgctgctgatcaccgagcgatcgctgctgcgccagatcaaaagcctgctgcctgatgaaccggcggtgcatcagaaggtcgccaagctgctgatcgccttcagctggagtctgaagcatcagctgcgcgccaccgatccgaccgccgacctgtaccacaatctcagcagcaaggaactggccgaagtgatcgccagcccgatgccgaccaaccgcatcttgctgatgctgggccaggagatcggcaagctgcgccgccaggggctgctgagcgacatcactttcgagctgctcgacaataaactgagcgaactgtcccacgccctcggcggctgcgaacggctcgccagcacgccggtgccgttcgcctataccctgatcctgcagcgcaccgtttacctgttctgcagcctgctaccttttgccctggtgaccgacctgcattacatgacaccgtttgtttcggtgttcgtttcctataccttcttatcctgggactcactggccgaagagctggaggatccgttcggcgtgtcggccaaccatctgccgttaaacgccatctgtaacaccatcgagcgtaacctgctggaaatgaacgaccaaagcccgctgccgccgccgatgaaacccgacgagcactttaatttgatttga

SEQ ID NO: 427248 - DNA, 378 bp, Serratia marcescens
atgccgagatggctcacattaccggccgccagcgttaccgccctgctggcctttgccgcttgcagcgccccgctggccgcgctggagctgaattatcagcccccagagcctggcattgccccgcccccaaaaccggtggctccgccggggccggcccccaaggcggcgaaaccgccgattacctgggcagaggcacgcgacaagaacggttttcgcgtcgatatcgaatgcgatcatccaggctgcagcaagccgcgcgccaaaccttatcccgcctatgaaggcccggtgaagaaaaccgatcgccgccgccaatccgatccttactccaccaatcaggatcccgattacaacattcagttgggctatgagtggtag

SEQ ID NO: 427249 - DNA, 372 bp, Serratia marcescens
atgcaccccctctcggtacagctgcccggcttttacgtcgccggccaaacggtcagaaccaccaatcaggacgaaactcggcccgagacggctaaaatccccgcgctgtggtcagactttttcgccacctcgcccaccacgccggtctatggggtctactctaactacgcctccgacgccggcgggccgtttgacgttaccgccggcaacgcggcagagaatggtttgcacatccaacccggccgccatctggtgttccaggcccgtggcgccatgccggcagcggtcatcgcaggctggcaagccatctgggccgacttcgaagcctataccggccccgaggcggtcgatatccatatcggctgccgctaa

SEQ ID NO: 427250 - DNA, 990 bp, Serratia marcescens
atgcaaacacgcaagttggggcgcgaagggctggaagtttcggcgttggggttgggctgcatggggctgagctttggctacggcccggccactgacaaacggcaggcgctagaactgatccgcgccgcggttgacgagggggtgacgctcttcgataccgccgagatttatggtccgttcacgaacgaggaactgctgggcgaagcgctggcgccggtgcgcgatcgggtcgtcatcgccaccaaattcggtttcgatctgccgcagccggcggggcaacaggtgttgaacagccgtccggagcatattcgccgggcggtggaaggttcgctgaagcgcctgcggatagagactatcgatttgctgtatcagcaccgtgtcgatcccgaggtgcctatcgaggaggtggccggtacggtgcagcaactgattcgcgaagggaaagtgaagtacttcggcctgtcggaagccggcgcgcaaaccattcggcgtgcccacgccgtgcagccggtcacggcgctgcaaagcgaatattcgctgtggtggcgcgagccggagcgtgaaatcttgccgacgctggcagagctgggcatcggcctggtaccgttcagcccgctcggcaagggctttctcaccggcgccattaccgcgaacaccaccttcgacagcggcgattttcgcaacgtggtgccgcgcttcagcgccgaagcgcgccgggccaaccaggcgctggtggatgtgctggggcagatagcgcagcgcaagggcgtgacgccggcgcagatcgctctggcctggctgctggcgcagcagccgtggatcgtgccgatcccgggaaccaccaagcgtcaccggctggaagaaaacctcgcggcggcggcggtcgcgttggcggcggacgaactgggcgagattgagcgcgcgctctccgcgatcgacgtgatcggcgatcgctatccggcgcatctgcagaaaaacgtcgggcgttaa

SEQ ID NO: 427251 - DNA, 186 bp, Serratia marcescens
atggtcgaccacacgcaaagacaccaaaagaagatcctgcaagcggcggtgaagacgcggcgcgccggcctgccgttcgagccggctccccccgtccattcgccctttgtcgggcttccccttcaaacagaggccgtgctggtgcacctgatcggccaagatgacccacaggagccgccggaatga

SEQ ID NO: 427252 - DNA, 1617 bp, Serratia marcescens
atgtcggtattgatgatgttgtttcgtatggtgcgcggttggctactgctcgccgtggtcgccggtgtcgtcagcgggctgtgcaatgcctctttgctggcgatgatcaatcacggtctgacgcaatccaatgaggcttcatggctgagtccgggaggcgattttgcgttactgacgctgttgatgctggcggcgcgcgtggtttctcaaaccacgtttatggcgctgggacaaaaggtgaaggcgcgcttgcgcagcgaactggtgcaagacgtcagcgaaacgcgctggctgctgttggagaaagcggggatggcaagaacgctgtccgtgctgacacaggatctcgatacgctggtggtgtttttcgtcaacctgcccaatctgctgattttcggcgccgttatcgttggctgcctgatttaccttggcagcctgtcattgagcgtactggcgctggcattggcggtgattgcctgcggcagcctgggctaccgcgccgcgcacggccccgcgatgcgtttgttgcgccgatcgcgtcagcgggaagatacgctgattcagcaatgcaaaaaattgtttgacggtgcgagggagtttcggcttaacgcggtgcgccgccgtcaattcgtcagcggtgaactggcgcaaaatattgacgcggttcgccgggagagaacccgcggttatgtgttgtacggtttggcgagcagttggggaagcgcgttgtttttcgctttcatcggcctggtgttgttcagcttgcgcgacgggctggctttggacgagcgggcgcttaccggctatatcatggtgtttctgtatatgattgtgccggtcgaagggctgttatccgcgctgcccaccctggccggtgcgcgggtggccatgcagcgggtacagtcgctgcgcgcgcaactcaggcccgaagttccacagcgccattttacgccccctccttttgcttcgttggcgttggataatgtccgttaccaatatcagaacgaagaaggggagcatttcacccttggcccgctgaatatgcacattgcgcccggtgaactcatttttatcgtcggtggcaatggcagcggcaagacgacgctggcgaatctgctggtgggaatttatcctcccgataacggcgcgattttgcttaacggcgagccggtcagcgacgatcttctggaaatataccgtcggcatttttcggtggtgttcaacgacttctttctttttgacgatgtggcgttcgtcactgagcgcacgccaaagcaggtcgaacatctgctgcgcctgctgaagttaagccataaagtcagttttgcccacggccgtttttcaacaattgcgctctctcaagggcagagaaaacggctggctttactgcaggcgtggttggaagagcgcccggtttatctgtttgatgagtgggccgccgatcaggatccggagtttaaggcggtgttttaccttgaactcttgccgatgctgaaggccgaaggcaaaacggttatcgcgattactcacgacgatcgctatttctacctggcggatcgcatcatcaagctggaatcggggctggtggtcccatcgacgcatggcgtgccgtcatga

SEQ ID NO: 427253 - DNA, 1986 bp, Serratia marcescens
atgcatgagtctttctcccgccgtctttcctggggggtaatcgccgcgttgtggctgacgtcgttgccgttggcgctggccgatattcatcggcagggaggcattgtcgcgttgttctccgatcataatctcgacccggcggccattatcctgcatagcatgtggttgccgcgtcagggtatggcgatggtggggggcgcgacgctggggctgtgcggctggttaatgcagcgtgcgctgcgcaatccgttggcggagccgatgacgctcggcatgaccgccggggcgacgttggcgatggggctggcatcgttgtggctgccgtcgctgctggtcggcgcgcgtaccgccgtggtgattgccggtgagattacggcgctggcgtgcgtgttggcgctcagctggcgtcagcgcatgtcgccgctggcgatggtgcaggcgggcatcatgatcaatttgtggtgcggggcactgactttgctgatcgccattatcaacgatcgctttttacttcaggtgctgatgtggggaggcggttcgctggcggtggaaaacgggcaaattctgctgcggatgttgccgtggctcgccgtctgcgtagtgggcctgttgttcttgctgcgcccgcttgaactgctgcaactgccggaaaccgtggtcagcagcctcggtgcatcgccggtgcgcatccgcgccgccgcggtgctgctggcgctgaccatgagcgccctcatcattaacgcggtcggcgtcatcgggtttttggggctcgcagcgccccatctggcgcgctttggcggcgcgcgaacatcccggcaaatggtgctgcatacggcgctcatcggtgcgggcctgctgtggctgaccgatctttgcgtctctcgcgtgtcgctggagagcggccagctgctgcccgtcggcatgctgaccgcccttaccggcggcccgttgctgatgctgctggcgcgttttgcacggcagcaaagcatcgatcttgcgccgccgtttccggtgtcgcagacctcgcatcaacgacggttcatctggttgtcggccggcattctggctgcggggatcgtggtctctttatgtttcggccatggattgcagcattggcactgggcggaaagaggggagctggcgaacctgctgccattgcgattgccacgactgctggcggcggtgagcgccggtgcgctgctggcgggggctggcgtgttgatgcagcgggtgagcgggaacccgctcgccagcccggaagtgctgggtatcggcggtggcgcggccatgggggttacggccttcgtgtttttgcttcccgcaggcggcagtggctggctgttggcgagtagcctggggggcgcgctgataagcctgttgctgacgttgtggaacagccgtcgaagcgactttaatccgcagcgggtattgctcaatggtttggcgctgaatgcactatgccaggccgcggtcagcatcgtgatgctcaacaatcttgccgcaagtgcggtgttgttgccgctgatgacgggcagcacctattacgtcggcgcgtcgttggcccaaggcgtgtttgtcatcacgctggttctcctggcgttgatgccgctgtttcgccgctggctggtgctgttgccgatgggcaacgtcgccagcgcgctcggtgtgccagtgccgcgcgcacgtttcagcgtgttggcgatggcggcagtcatgaccgggctggcgacgttgctggtcggcccggtgtcttttatcggcctgctggggccgcatctggcgcgcaagatgggcgcgaaagggccgctgatgcagctctataccgccgcgctgttgtcatccgccatcatgaccgttgctgactggctggggcgcaatgcgctctatccacgccagctgccggtcgggttggtggcgtcgctgatcggcgtccccctgctggtatggccgttaattcgtaataagacatcccggtcaaaaccataa

SEQ ID NO: 427254 - DNA, 858 bp, Serratia marcescens
atgctgtcgcgacgcaggttgttgaccgctctcctgttggccccgctttacgcgcgggccgacgcgggccggccgccgcaaaagctggccgtgttggattggggactgacggaaattctgttggcgctgggggtgactccggcgggcgtttcggcgccggattggtatcgcaagctgatcccgacgcctgcgctgcccgcgtcggtgttggatctcggcctgctgtttcagcccaatctggaaacgctttacgcactgcggccggacgcaattgtcatcacgccgcagcatgcgttgctgaagccggcgcttgaacgcatcgcgccgacgatcgcgctgccgacccatgggctggcggaattcatcagcgccgcccggcaattgggcaaacggcttcagcgtcagcctcaggccgcgcagatattggccagcctgaacggcaagctgagccgcgcctcgctgctggcgcggcaggttgaacgtccggcgctgctcgccgccccggtagatacgctgcacctgcgggtctacaccgcaggcagccttcccggcgacgtattggccgcctgcggactgcgcaatggatggcatggcggcgcgggagtggaaggcagcgtgctggtggagctgacccgcatcgccgatctgaatgcgcggctgatgctgttgacgcctgacgatcagcgggagtcggtgtctcaatggcgccaaagcccgctgtggcaacgtctgccgctgaccgctgcgcacaacctgaacctgatagaagaaaacatcagcgatgccggcgccctgataaccgccgggcgctttgccgatatttttaccgggatgatgatgaggtggcgtgatgcatga

SEQ ID NO: 427255 - DNA, 2133 bp, Serratia marcescens
atgagacagatgggcaaatttttcagggaaaaaccgttgaaagtgctggtatatacgataatcgcaggctatagcgggcaagcctttaccgcggatggcgggcagaataccacaaaagaagagacgctggtggtgagcgcggcggcgtctcaggatcaggatgacgagagcacgctggtggcgcacggcgccgcctccgcgacgaagtcaaaccagccgattagccgcacttcgcagagcatctcggtggtgacgcaagcggagattgacgcgcaagcggcgaaaaacgtcccgcaggcgctgcgctatgtttccggcgtcaactcggagagcgccgggccggatacccgtttcgacaccatcatcgtgcgcggttttgaagccgacgaataccttgatggcctgcggctgccgcgcgaagcgtggtggagccgtccggcgtgggatccgttcctgctgtcgcgcatcgaagtggccaaaggcccttcctcggtactgtatgggcaggcgaatcccggcgggatcgtcaacctggtcagcaaaacgccgcaggcgaccccgtccggtgaggtttatgtcagcgcgggcaacgaaaaccagtttggcgccggcgtagacgctaccgggccgctgaacgataacggcacgctgttggggcgcgtggcggggaccttttttgataccgaaacccaggtcgatcatacccgctatcagcattatgacatcgcgccgtcgctgacgtggcagccggatgcgcacaccagcctgacgattatttcgcagctgcgcaaagatccggacagcggattctacaaccagatgccgctttccggcaccttgacgcccaacccgtacggccacatctcgacccgtttttacggcggccagccgggcttcgacaagtacgaacgccagcagggcagcatcggttaccagttccggcacgatttcaacgatacggtgactttccgccagaatctgcgttacctcagcagcaccggcgactatctgatggtctatccatggggtgtgcatgcggatgcgccgctcatcgatcgctattcgatgaacctgaaggagagcatgaccaacttcgcggtggataaccaggctgaattccactttgataccggtcgggtgaaacatacgctgctgaccgggattgatcgcatgcatacctcggtgcgcagccagtcgggctacggcgacgccagcccgattaacttcctcaacccggactatagcgtgccggtggccataccgccgctcgatagcagtacgcacaatacgctcgatcaaaccgggctctatctccaggaccaactcgaactggggagctggatactgaacctggccggccgttacgacgcggcgaaaaccaaaagtatcgatctgctgaacgacgctcgtaccgagcgcaatgactatgcaacgaccgggcgcgccgggctgctgtaccacttcgataacggattggcgccttacatcagctattccacgtcgtttgtgccgagcagcagcaatgacttttacggccacgcctttaaaccgaccgaaggcaagcagacggaagtgggggtgaaatacgatccggtcgggctggatgccttgtttaccctggcgttgtacgacctgcgggaaaccaacgtggcgaccgccgatcccgatcacccgaacttcagcgtgcagaccggcgaagtgcgctcgcgcggagttgagcttgatggccgcatcaatatcacgccggcgtggtcggtgctggcgtcgtacaacctgaccgatccgaaagtgctgagtgccaacgacgatacgcagggcaagcgtccggtgggcattgcgcgcaataccgccaagctctggagccagtatgccttcgacggcgcgcttgacggtgtgacgctgggcggcggcgtgcgctatgtcggcaccagctacgccaccacggacaacggcctgaaggtgccggcggccacggtctacgatgcgcgcgtcggctatcaatggcgccaatggcagctggcgctgaatgccgccaatctcggcaacaaaacctacctggcttcctgctccaacaatggctgcgagtatgcgctgaaacgccagtacatcgcgaccctcagctataagtggtga

SEQ ID NO: 427256 - DNA, 750 bp, Serratia marcescens
atgacatcccatcacggtattgaaggcctgcgtcagctgcgctacagccccggcagccaagagcccgttcatcagcatgagcaggggcagctgattttgccgctgcgcggcgtggcgaaaatcgccaccgcgcagcatatctggctgctctcgccgggccgcgccatttggctccccagcggcacaccgcacggtttggaagccatcaatgacgtcgtgacgcacaacatctattttacgccgcccttttctcgtcgctatagcgcacgtccccaggggttgagcgccactcctctgctacatcccctgattgccgccgggcttgaaaacgccatttccgccgaacggcttacgctcattcaaaatctgctgagcgatgagtttcaacgcatgcaaagcggccaactgtgtcacgtggccctgccgagcgaccggcgcctgcgccaggtatgcgatgctttgtgccgcgaattgggccatggcgaaacgcttgcctggtgggggaaaaaggtcggcgccagcgaacgcaccctggcgcggctgtttcgcgaagagaccgcgctgagcttttccgaatggcgccagcaaattcgcctgctggaggcgatatgcaatctggcgcgcggcgtggccgtgggtcaactggcccacgaactgggttacgccagccctagcgcgttcatcgccatgtttcgcaaaaaactgggcgtatcgccgcaacgttatattcacagctcgctggaagcgtga

SEQ ID NO: 427257 - DNA, 1464 bp, Serratia marcescens
atgagctatgccccacctcgcagcggcctcagcgccgatcaggcactcgatcaactggaagccctgtatgacgccgcggtagacgcgctgcgtcaggcggtcggcgactttatcagccacggcacgctgccggatgcgcaggcgcgcgccgccgggctgttcgtgtatcccgaactgcgcgtcagctgggacgggcagcaatccggcccgagcaaaacccgcgccttcggccgcttcacccatcccggcagctacagcaccaccgtgacccggccgcagctgttccgccactatctggccgaacagctggcgatgctggagcacgactacgccgcccatatcgaagtggcgccgtcgcagcaggagatcccgttcccttacgtgatcgacggctccagcctggcgctcgatcgctcgatgagcgccggcatcgcgcagcatttccccaccaccgagctggcgcagatcggtgacgaaaccgccgacggcctgtaccacaccaccgacaaccatttcccgctgtcgcatttcgatgcgctgcgcgcggatttctcgctggcgcggctgcggcactacaccggcacgccggtggagcacttccagccgttcgtgctgttcaccaactacacccgctatgtggatgagttcgtgcgctgggcctgcgcccagatcgccgatccggccagcccatacatcgcgctctccagcgctggcggcacctacatcacgccggaaaccagcgccccggagcaggcggtgtccgatctggcgtggaaaaaccaccagatgccggcctatcacctgatttcgcgcaccggccagggcatcacgctgatcaacatcggcgtcggcccgtccaatgccaagactatctgcgatcacctggcggtgctgcgcccgagcgcctggctgatgatcggccactgcggcggcctgcgcgaaagccagtcgatcggcgattatgtgctggcccacgcctatctgcgcgacgatcacgtgctggatgcggtgctgccgccggatatcccgatcccgagcatcgccgaagtgcagcgcgccctgtacgacgccaccaagatggtcagcggcatgcccggcgaagaggtcaaacagcgcctgcgcaccggcaccgtggtcaccaccgacgaccgcaactgggagctgcgctattccgcttcggcccggcgcttcaacctcagccgcgcggtggcggtcgacatggagagcgccaccatcgccgctcagggttaccgcttccgggtgccgtacggcacgctgttgtgcgtctctgacaaaccgctgcacggcgaaataaaactgccgggccaggccaaccgcttctatgaaggggcgatctccgagcacctgcagatcggcatctgcgccatcgatctgctgcgcgccgagggcgatcgcctgcactcgcgcaagctgcgcaccttcaacgaaccgccgttccggtaa

SEQ ID NO: 427258 - DNA, 864 bp, Serratia marcescens
atgaaaaaattattgttgttgtgcctgccggttatttattcgtgtaatgtctattcaagcgaaaagacctgttctgaatcttcctcttccgttaatactttcaataacatgatcttggcgcaagatgcctccaccaagcaaacgcccaaaaaagtcagcatgcgcatagaaagcaaagacgattatataaaggccgatacgcagatggaatttgatgaatgcggtgcattgttacgctcacgcagtaataaaaccatcaggtcgcggattaataacaatgacttgctgacccagctcaatggtgccatagataaaaatcataagaactgggattacaacatgaccttcaagatgtcgatgattgaacatggcgatgcccagtctgaactgatcgcacaaaaaatgagcggtttattcctgacagacagcaatggaaaaataatccgttctgaggacacatccgatatttctgccggaaaaaatcaacagtccggcaaagcgataaccacattctcaacggatgaggcaggcaggctctccggttcaagccggatgagcacattgggcaatgacagtggcaacaccgtttatagttatggcgctaaaaatcttttaataagaacaaaatcaggtacaaccaccgcagattttacttatgataatgacgatagagagttaaccagcaaagaagtgatgaagtccttcaccacagaaacgaccacaaccacctgtaaaagctggaataagtttggaagatgtattaatgctcagcaaaatatttcaattttgattaaagacgtgaagaaaaaccgggataacgtctacgaccacgttgcagaaataaagtatgactatgtttactag

SEQ ID NO: 427259 - DNA, 1071 bp, Serratia marcescens
atgttaggcgatgccgtatttaatcgggtaaagcgatcggatcataaagcgatttcggaaataagcgccttcttgcgcagtaacgatctgaatatcgacaccacggttgaaatatttattaccgttacccagcacgacaaattggtcgcctgcggcggcatcgccgacaatattatcaaatgcgtcgccatcagcccgctgatgcgcggcgaagggttggcgctggcgctggcgaccgagctggtgaacctggcctacgagcgccaccacactcagctgtttatctacaccaaggtgcagaacgagccgctgttccgccaatgcggtttctacccgatcgccaccgtgccgggcatcgtggtgctgatggaaaacagcccgtgccgcctgaagcgctacgccgctcagctggcgagccagcgccggccgggcgacaccatcggcagcatcgtgatgaacgccaaccccttcacccgcgggcatcagtatctggtgcgtcaggcggccaaacgctgcgactggctgcacctgtttttagtgaaggaaaacacctcgcgcttcagctatgaagaccgccgccggctggtgctggccggcaccgccgatatccccaacctcacggtacacgaaggctcgcagtacgtgatctcgcgcgccaccttcccctgttacttcatcaaggatcagggcgtggccgacgactgttacaccgaaatcgatctgaagatcttccgccagtatctggcgcccgcgctgggcattacccaccgcttcgtcggcaacgagccgttctgcgcggtgaccgcgaaatacaaccgcgacatgcgctactggctggaaacgccggcgctgcccagtccgccgatcgcgctggtggaaatcgagcgtttgcaatatcagggcacggcgatctccgcctcctgggtgcgcaagctgctggcggcgggggacttccacgccgccgcgccgctggtgccgccggacaccctgtactacctgcaggatctgcaaacgcagcgccgggccaaggcggccccgcatccttttgagtccgcacaatcaggtgaatga

SEQ ID NO: 427260 - DNA, 687 bp, Serratia marcescens
atggaatggctgaacatcctgatcgttgaagacgaaacgccgctggcggaaatgcacgcggagtttatccgccagaacggcggctgccgccagatttggctggccggcactctggcgcaggcgcgctccatgaccgagcgcttcaagccggacctgatcctgctggacaactttctgcccgacggccagggaatcaccctgctgcgcgaactgacgctgagcgggtatcgcggcggcatcgtgttcatcaccgccgccagcgacatggccaccgtggccgaggcgttgcgttacggcgtgttcgactacctgataaaaccgctggcctatgaccggttgagccagaccctgcagcgcttcagccaacgccgcgaagcgctgaaggacaaagcgcgcctcaaccagcgccgcatcgacgagatgttcaacacctacgcccgcggcgaacagcaggcggcgctgcccgccggcatcgacgagctgacgctgggcaaggtccgcgcgctgtttgccgaacccgccgcgcgccacaccgctgaaagcgttgcgcaaaaaatggggctcagccgcaccaccgcgcgccgttatctggagttttgcaccgccgcgcagcagctgcgcgccgagatcatttacggcaaggtcggccgcccacagcggatctaccgcgccggcgaaccgcattaa

SEQ ID NO: 427261 - DNA, 3090 bp, Serratia marcescens
atgcccgctgcgccccttgcttccctgaccgagatcctcgcccgccgtgactggcaaaacccggcctgcacccactcccgccggctggacgcccacccgccgttcgccagctggcgcacggtggaagacgcgcgcgacgatgcccccagcgccagccacaggtcgctgaacggcgagtggcgcttcagctatttcccgcgcccagaggcggcgccggaaggctggctgcagcaggacctgccggacgccgccccgctggcggtgccgggcaactggcagctcgccggctacgatgcgccgatctataccaacgtgcgctacccgttcccggtcgatccgccgcgcgtgccggaagacaacccaaccggctgctactcgcgcaccttcagcgtcgatccggcctggctggccgctggccagacgcgcgtcatcttcgacggcgtcaactcggcgttctatttgtggtgcaacggccactgggtgggctattcgcaggacagccgcctgccggcggagttcgatctcagcccgtggctgcagccgggagaaaaccggctggcggtgatggtgctgcgctggtgcgacggcagctatctcgaagatcaggacatgtggcgcatgagcggcatcttccgcgacgtcagcctactgcacaaacccgccgcgcacctgagcgatgtgcgcatcaccacgccgctgcatgaccgctttacccgcggcgaactggtggtgacggcgcgcgccagccggcccggcccgctgcaggtgcaggttcagctgtggcgcgatggcgcgcgggtggccgaacgcacccagccgctcggcagcgagatcgtggacgagcgcggcgcctatgacgatcgcgtcacgctgcgcctgccggtagaacgcccggcgctgtggagcgccgaaacgcccgcgctgtatcgcgccaccgtcgccctgctctcacctgagggggagattatcgaggtggaggcctatgacgtcggcttccgccaggtggaaatcagcggcgggttgctgaagctcaacgggcagccgctgctgatccgcggcgttaaccgccacgagcatcatccgcgccacggccaggtgatggacgaggcgacgatgcgccacgacatcctgctgatgaagcagcacaacttcaacgcggtgcgctgttcccattaccccaaccatccgctgtggtaccggctgtgcgaccgctatgggctttacgtggtggacgaagccaatatcgagacccacggcatgcagccgatgaaccgcctggctgacgatccgctgtggctgccggcgatgagcgagcgcgtcacccgcatggtgcagcgcgatcgcaaccatccctgcatcattatctggtcgttgggcaacgagtccggccacggcgtgaaccacgacgcgctgtaccgctgggtgaaaagccaggatccaacccgcccggtgcaatatgaaggcggcggcgccgacaccgccgctaccgacatcatctgcccgatgtatgcgcgggtggatcaggatcagccgttcccggcggtgcccaaatgggcgctcggcaagtggatcggcctgccggaggaacagcggccgctgatcctgtgcgaatacgcccatgcgatgggcaacagcttcggcggctttgagcgttactggcgcgcgttccaccactatccgcgcctgcagggcggctttgtctgggactgggtcgatcaggcgctgatcaggcgcgacgcccagggcgaagagtactgggcctacggcggcgacttcggcgatacccccaacgatcgccagttctgcctgaacgggctggtgttcgcggatcgcaccccgcacccggcgctgttcgaagcgcagcgggcgcagcagctgttccgcttcgccttcgacgccgcctcgctgacgctgaccgtcaccagcgattacctgttccgccacaccgacaacgagcagctcaactggcggctggagctggacggcgtggagcgcgccagcggcagcttcgatctggcgctgccgccgcagggcagcgctagcttcaccctgctcgatcgcctgccgatgctgcaccagcccggcgagctgtggctgaacgtggaggtggtgcagccgcaggccaccgactggtccgaagcgcaccaccgctgcgcctgggatcagtggcgggtgccgcgcgcgctgcatcccgccccgccgccgccgcagggcgtgccgcccacgctgattgaagacgatcaggggctgaccctcacccacggcgaccagcactggcgcttcgagcgcagcagcggccacctgacgcagtggtggcagaatgagcagccgcagctgctgacgccgctgcgcgacggctttgcgcgcgcgccgatcgataacgacatcggcgtcagcgaggcggaccatatcgatcccaacgcctgggtcgaacgctggaagctggcgggcctgtaccggctggaggaacgctgcacgcggctgcaggccgatgcgctgcaaaacggcgtgcaggtggtgagcgaacaccagttcggcgtggacgggcaaattttgctgcttagccgcaaacagtggctgttcgatgcgctgggcgcggtgaacgtgagcgtggaggtcgaggtggccgatactctgccgccgccggcgcgcatcggcctgcactgccaactggcgacggtgcaaccgcaggcggaatggctgggcctgggcccgcacgagaactacccggatcgccgcctggccgcgcagcacgggcgctggcgcctgccgctggcggatctgcacacgccgtatattttccccggcgagaacggcctgcgctgcgacacccgcagcctgcgctacggcggctggcgcatcgacggccgcttccacttctcgctcagccgctacggcctgcaacagctgatggcctgcagccaccagcacctgctgcagccggaagcgggcacctggctgcatctggacggcttccacatgggggtgggcggcgacgattcctggagcccgagcgtgcaccgggattacctgctcaccgccggcgtttaccgctatcagctgcgcctgcttcgggcgcccgagagctaa

SEQ ID NO: 427262 - DNA, 834 bp, Serratia marcescens
atggcatctgcaaaaacgattttaattaccggcgtcagcagtggctttggccaggcgctggcgcgggaagccctcgccgtagggcatcgggttgtagggacggtgcgcaacagcgaagcactgcaggctttcgccgcgctcgatacgcagcgggcttttggctatctgcttgatgtcacggacgttgagcgtattgatgaggtggttggagagattgagtccgccgtcggcccgatagatgtgctggtgaacaatgccggttacggccacgaaggcattctggaagaatccccgcttgcagagctgcgccgccagtttgacgtcaatgtgtttggcgcggtggcgatgatcaaagccgtgctgccgggcatgcgccagcgccgtcgcggccagattatcaatatcacctcaatgggtagcttcattaccttgcccggtatcagctattactgcggcagcaaatttgcactggaagggatatcagaaaccttaagtaaagagcttgccccgttcaacctacacgtgaccgccgtggcgccgggctcgtttcggacggactgggccgggcgttcaatggtacgcagccctcgctgtctcccggactatgacgcgttatttgaacctgttcgtcaggcgcgtcaggaaaaaagcggcaagcaactgggcgatcccgtgaaggcggctcacgccatgctggcattgatcgagagccggaatccacccacgcatctgttgttaggcagtgacgcattaagtttggtgcggcaaaagctcgaggcgttaggcaaggaaattgaacaatgggagaaacttacccgttcaacggatggctga

SEQ ID NO: 427263 - DNA, 2952 bp, Serratia marcescens
atgtacagtagtattgatgtcacgtttctacagacccttatggcaagaagtaacagcactcagtatgtgcagatcaaagacatacactccaaacaagcaagaaactatttacgtggcgttgattcaacaagctacaacatggtgaataatgctttaaaaaaaataaaattaaactgctcatataatgattttaaaaaagcagtagactatgttaaggccagtccagattatgaagccaatgatatagggcaattgttcaacacaaaaatacctaagggtttactagacagtgttgaatattcattgggtgatattttaaagaaaatggatagctatgccaatgagttaagcacactaatagaatgttgcatacaaatatataaaagcctcagtgaaaacaaattacaagacgcattgggattttgcgatgaaatgattgacaatcgaggggcgtcagtttttattatcagaatggtgtcatttataactaatagataccaaatttttgatatggatgataagctaattttaggtaagattgacggccttaaaaatagaatcgtaatttcaaacaacccttcgctagaaggtgttgttgttcaattaagtaatttaagaacctcgcacttagctatatgcaaaaggattaatgaattaaaagatgattcatacgttagttttatcgctaaatcttttataaatcctatcccacgtgactatgagagctttataaagacattaaactcttattactccatatctttaattgatgcttttttatattatcaagttgtaagcgatctaaatcttccatatgtaaaaaaattcaaattcaataaagatcttgaattgatttataatgaactttcacaaattgaatttgacccatccgtaatatacagtgaagtagatgaagacactgggtattattatctccgtgaatcattcttgtttgcggagcaatccaatgctttgaagtttctggttattcacggccattactatggagattttagtacaaaacgtatattgcctgaatattctcaaaaattaataaatcaatattttgaggggttggacaatttatctcaacttaaatgttcaaaaatggataatgttcaaataaattggaaggaatatgattcttcaaattgcggcatgttggaaaattcctctgcattactccatttaatcagtaagaaacagggaagacttcatgaaaaagaacaaacactatttgtaaaactaatgacatactctcgagatgttggcgaagcatgtccatttgagtatttagagactatttctgaggaagctaatgactccttgctaaagctagttgttcaatgccttattactataaatactaagtctcactatactgagtatcaactgcgctccactattcaagagtattgtatttctcattatgaaggtgatctaataaaacttttagaacatctttatgaggtatcaccagctgtaacagaacatcttattttaatttgcaatgaaacatttttgagtacgttatttatattaatggatagacctgtagatgctctgcaggcacgagctgatatgttacattggttcggcgaaatcactggtgaagaacgatatttagaccgtgccaaaaccttacggattgatattgccattaacaaggaacgagggactattgatgattctagaatttatgttgaccccctgaaattttcacaatggtttgaggataatatggtaagcaagcttacaatgtccatagataacctattaatcagtaactcatccactatgaaacttgactggggcaataaaaatcttggagcaagcattggtgatgatgtaatagaaaacctgctgatatgttatagtgagttttgcgaaaatagagtttttggtatagcgtcttatcttggccgtagaattcgccatggtacgttcaaaggtacggccataactgaattatatgatattccaaagagagaagaatataaatcactttttgaagataaagaattcaaacgtaggttcgaagaatggatgagtcgctatgaaggaatgatcgaagatttagttaaaacttctttgcagataaaaagcaagaaaaaacccatggggttaataactacagaaattgattctcaagtgaaaattgctattgcaaaacagttagttgtcaacatacttgccatttactctaaacgtagtggtgtgttaaggttacccagtttaataattgactatctatggcgccttgcagagactgatttacataaaacaaaaaaattacttagtgagaaaaaatccacatatggagtgtttaattttaatgctaaacatcactcacaaaatatgaggaaaacaatttcgaaattcacccaagaaataaactcattgacgggacaaaagtttggattaatgtcctcttggtttaacaaaccgaactatgcttcgccaagcacagacatatatctattattcaacactgtagtctcggaagtaaaagatagagttagccattttgacccatttgttgatttaggcgagagtagtttttcaataaatggtggcacttattatgttatttatgattctttatacgttcttattcataatgctgcgattcatggaaaacctaatgggcaaattcattttcatgtttcaccttatagtgatagaaacgcattgaaaatcaaccttaaaacagaagtttcaagtgtatatgatttaaataaagctaaagaaagagtattatctttactgcatgaaaatgatgatgatgcacatgtagtcgagggaaatagtggcatcaaaaaactgaaaaaactagagagggaaggtagcattagcaacattagatttatagccaatgagaatgacttgactttatgttttgaatatttatttgagttaaatagtcgaggtgattatgatcttgatagttga

SEQ ID NO: 427264 - DNA, 1158 bp, Serratia marcescens
atgaaaattttgataatagaagataattttgaaaaacgctgtgaaattgagaaagtgattaattcagagatttataaaagtagcaataaaccctcatacacctatgctgaaaacttggtctttgcacgtaggcatctacaaacacaagtttatgaccttataatatttgatatgtttttacctttaaacatcaattcagataaagaagtagactgctcggaagaattaatctccgagttttcattaagtaaaaactatcaagtagaagcaattgcactaacacaatttgaaatcagtgaaattgataactttcagtcttttaatagtgctggcattacagtagtgcactttaattcgagttcaaattgggtttctgccctcactcagaaagtaatccgtgcatcacaaaaaattaaatgtgattttttgatattttgtgctttgagtaaggagcgaacggcttatacgcatgctgaatgcaaattaggaaattcaaaaaatattttcggcatgaactgtttagaggtatcaatcggaaattatagtggatttatcataaagcctcataatatggggttggtaaatatggcaatcatcgcggccaaagcaattgagctatttcaacccaaaattgtgtctatgagtggtatttgtgctggcgtaaaaggtgaatcaaactatttagatatagtcattggaaaatcttgctgggaatatcaaacaggtaaatggaaggatggatatttcaagcaagaaccttatcaatctccattatcacgcaacttagaagtggatttagaacaatctacggaggatagcgaaatacgcgaacttataaggaaaaatctctttaaggatgaattatcatccatgcgaatcatccttgcgcctatttcctctggttcagcagttatcgccgatgaaaaaattatggaaacaattggtatgcaacataggaaaatggcagctctcgaaatggagatgtattctctttatgaagcggcggcacaatctctatgccaacctctttactttggtgccaaagcagtggttgatttaggggacaataataaaggtgatagttatcatgaagctgcatgtataattactgcacgttatgtaacactgatgattcaacgtcaactcaatactctttga

SEQ ID NO: 427265 - DNA, 831 bp, Serratia marcescens
atgggttacgtaacaaccagcgatggcgtcgagattttctacaaggattggggccccaaaaacggcaaggttatctacttccaccacggctggccgctgtcctgcgatgactgggatgcccagatgctgttcttcgtgaacaaagggttccgcgtggtggcgcacgatcgccgcggccacggccgctccagccaggtgtcggaagggcacgacatggaccactacgccgatgacgtcgccgcggtggtaaaacacctgggcgtgcagggcgcgatgcatgtgggccactcgacgggcggcggcgaagtggtgcgctatattgtgcgccacggcgaggacaaggtgtccaaagcggtgctgatcagcgcggtgccgccgctgatggtaaaaaccgacgccaatccgcagggcacccccaaagcggtgttcgatgatttccaggcgcagctggccgccaatcgggcacagttctattacgacgtaccggccggcccgttttacggctataaccgcccgggcgccaaaccctctgaggcgattatctggaactggtggcgccagggcatgatgggcggcgccaaggcgcactacgacggcattgtcgccttctcgcagaccgatttcaccgaggatctcaagaagattgccattccggtgctagtgatccacggcgacgacgatcaggtggtgccttatcaggactccggcgtgctgtcggccaagctggtgaaaaacggcacgctccatacctataagggcgcgccgcacggcatcccgaccacccatgccgatcaggtcaacgccgatctgctggcgttcgtgaacagctaa

SEQ ID NO: 427266 - DNA, 1425 bp, Serratia marcescens
gtgcagggagatgacatcctcatgacgatggagcaacggcttgccgcccagcgtcacgccttcctgcgcgacggcgcaccgacgatcgctcagcgcaaaaccgccctgcgccgcctgcggagcgccattttagcccagcgcggtgcgctgacggcggccgtcagcgcggacttcggccaccgctcgccttacgaaaccgaaattctggagatcctggtcaccgtgcaggcgatcgattatctgctgcgccacctgaagcgctttatgcagccggaacgccgccacgtcgccctgccgtaccaggccgggcgcgcctacgtgcaataccaacctaaaggcgtgattggcgtcatggcgccgtggaactatcccttctcgttgaccttcatcccgctggctaccgccctggccgccggcaaccgcgtgatgctgaaaccttcggagctcacgccgcgcaccagccaactcatcgaaacgatgctggcggcgctgtttcccgccgatgaggtcgcggtggtgaccggcgggccggacgtcggggccgggttcagcacactggcgttcgatcacctggtgttcaccggcagcacggcgatcggccgccagatcatgcaggcggccggtaaaaatctggtgcccttgacgctcgagctgggcggcaaaagccccgccgtcgtggcgcccggcgcgctcaccgccagaaccgttagcagcctggcgttcggtaagctgtcgaacgcgggccaaacctgcatcgcacccgattacctgttgatccatcaggacgatgtggaaaacttcatcgcgctctacgacgcggcggtcaaagcgttttaccctgacgggccgacgagccatgactacggcgccatcatcaacgacaggcactaccaccgtttgcaggatctgctcgccgacgcccaggcgcgcggcgcgcggatcgttccggtgggccaccgcccggactcggcggcggaacggccgaaaaccctcgcccccactctgatcgtcggcgcccccgacgacagccggatcatgcaagaggagatcttcgggccgctgctgccgatacgcacctacaccgcctttgatgaagcgatcgacgttatcaacgccgggccgcgcccgctggcgctgtactactttggcccaggcggcacgctgcaggacaggctgctggcgcgcaccacctccggcaacgtcagcgtcaacgccaccctgctgcattttgcccaggacgatctgccgttcggcggcatcggccccagcggcatgggggcctatcacggcattgaaggattccgggcgttgagccacgccaagggcgtcttcatccaaagccgctggcacttcaccgatctgctgcgcgcaccgttcggcaagctggcagacgcggtgctcaaggtgatgctgcggcgccgataa

SEQ ID NO: 427267 - DNA, 2196 bp, Serratia marcescens
atgacaactgaaagcaaatgcccgttttcgggcggcaagcagcccgcaccgcaagacggccccaccaatcaggattggtggcctaatcagctcagcctgaaaccgctgcatcagcactcccccctgtccgatccaatggacaaagacttcaactacaccgatgccttcaacagtctcgatctggcggcggtcaaacaggatctgcacgccctgatgaccgattcgcagacatggtggccggcggatttcggccactacggcggcctgttcatccgcatggcctggcacagcgccggcacctaccgcatcggcgacggccgcggcggcgcgggcgaaggccagcagcgcttcgccccgctcaacagctggccggacaacgtcagcctcgacaaggcgcgccgcctgctgtggccaatcaaacagaaatacggccgcaatatctcctgggccgacctgattatcctgaccggcaacgtggcgctagaatcgatgggcttcaaaaccttcggctatgccggcggccgcgccgacacctgggagccggacgacgtctactggggttcggagaagatctggctggagctgagcggcgggccaaacagccgctactcgggcgaccgtgacctggaagacccgctggcggcggtgcagatgggcctgatctacgtcaacccggaaggcccggacggcaaccccgatccggtggccgccgcgcgcgacatccgtgaaaccttcgcccgcatggcgatgaacgacgaagaaaccgtggcgttgatcgccggcggccacaccttcggcaagacccacggcgccggcccggcgtctaacgtcggcgccgatcctgaagcggccgggctggagtcgcagggcctcggctggcacagcaccttcggcaccggcgtcggcaaagacgccatcaccagcggcctggaagtcacctggaccaccaccccaacccagtggaaccacgacttcttccgccacctgttcgaatacgaatgggagctgagccaaagcccggccggcgcgcatcagtgggtggcgaaagacatcggtgaaaccattcccgacgccttcgatccgaacaaaaaacgccgcccgaccatgctgaccaccgacctgtcgctgcgcttcgatccggcctacgagaagatttcgcgccgcttctatgagcacccggaagagctggccgacgccttcgcccgcgcttggttcaagctgacccaccgcgatatggggccgcgcgcgcgctacctcggcccggaagtgccgcaggaagagctgatttggcaggatccgatcccggcggtcgatcatccgctgatcgacgagcaggatatcgccgcgctgaaaaacgccgtgctggcttccggcctgccggtgtcggcgctggtctccaccgcctgggcgtcggcctcgagcttccgcggctccgacaaacgcggcggcgccaacggtgcgcgcattcgtctggcgccgcaaaaagactgggcggtcaaccagcctgcgcagctcgccgcgacgctggccaagctggagagcatccaacgcgccttcaacgatgcccagaccggcggcaagcgcatctcgctagcggatttaatcgtgctggccggcaccgcgggcgtggaacaggcggcgaagaatgccggtttggccctgacggtgccgttcgcgccgggccgcatggacgcttcgcaggagcagaccgacgtggactccttcgaagcgatggagccgctcgccgacggattccgcaacttcctgaagggcaaataccgcgtgccggccgaaacgctgctggtcgacaaggcgcagctgctgaccctgaccgcgccggaaatgacggtgctggtcggcgggctgcgggtgctcggcgccaacgtcggcggcacgcagcacggcgtgttcacccagcggccgcaggcgctgaccaacgacttcttcgtcaacctgctcgacatgggcaccacctggcacccggtcggtgaagacggcctgttcgaagggtgcgatcgccgcagcggcgcggtcaagtggaccggcagccgcgtcgatctggtgttcggttcgcacgcgcagctgcgcgcgctggccgaagtctacggcagcgccgacgcgcaggagaagttcgcccacgacttcgtcgccgcctggaacaaagtgatgaacctcgatcgtttcgacctggcgtaa

SEQ ID NO: 427268 - DNA, 1395 bp, Serratia marcescens
gtgagtgactctgtagcggcgtcgccgatccatgcgcgggatttggcggccagaatcgacgccttgcccgcgtcggccggcctgtggcgctttatcattctgctgtcgctgggcggctttttcgaactctacgatctgtttcagaccggctatatcagcaccggtcttatcgccgacggtattttccacaccggcgcgcagggcgtcttcggcgtctcggaccaggcggccttcgcctccgccacctttctcggcctgttcgtcggcgccagcctgctgagcccgtacgccgatcgcttcggccgccgcgccacctttatgttcgccctgatctggtatggcgccttctctctgctgctggcgtttcaacagcaggcggagtgggtgatctttctgcgctttctggtgggcgttgggctcggcattgagctggtgaccatcgatacctacctgacggagtgggtgcccgcgcatctgcgcacccgggctttcgccttcgcgttcttcgtgcagttcctgtcggtgccggcggtggcgctgatgtcctggtggctggtgccgcagacgatttggggcctgagcggctggcgctacgtggtgatcgccggcgcgctggcttcgcttgtgatctggctggtgcgcaaggggctgccggagtcgccgcgctggctggtgcagcagcggcgctatgcgcaggcccggcaggtgatgcgggatatggagcggcgctgcggcgtggcggccacggacttcccgtcgcgcccggctgacgatgccgagggcgcgccgctgcgcggccgctttcgcgacatctgggcgccgcagtatcgcgatcgcacgctgatgctggtggtgatgaacttctttcaggccatcggcttcttcggcttcggcaactggctgccggcgctgctgtcgggcaagggcgcttcggtcacccacagcctgctgtacgctttcttcatcacgctggcctacccgctgggctcgctgctgtgcagcttctacgccgataagatggagaataagtggcagatcgtgttgtcttgcctggtgacggtgatcttcggctcgctgttcgcgctgcagaacaacccgctgtggctgatcctgtgcggcttcttcatcacctggtccaacgcctggctgacctacagctaccactcctatcaatccgagatcttcccgacccacatccgcgcccgcgccgtcggtttctgctactccttcagccggctgtcgacggtgttcagcagcatcatcatcggcattatcttgcagtacggcggctcgctgggggtaatcgcgtttatcgtcgccagcatgctgatcgtgatgctggtgatcgggctgttcggcccgaaaacgcgcggtatcgatctggaaaacatctga

SEQ ID NO: 427269 - DNA, 204 bp, Serratia marcescens
atggagcggctgttattaatcatctgcagtttcctgctattggtggtggagctgcttaatacggcgattgaaaccgtggtcgatcgcatttcgctggaattacatccgttatccaaacgcgccaaagatctgggcggcgcagcacagctggtggcggtggtgctgaccatcgtggtttgggcaacggtgctgctggggcgatag

SEQ ID NO: 427270 - DNA, 1707 bp, Serratia marcescens
atgcgttatgcagacttccccactttagtggacgctttggattatgcggcgctgggcaatacgggaatgaatttttatgaccgtcgcaatcaacttgtgaccgtgctcgaataccgcacgctgcagcaaaaagcgatcgcgggcgcgcggcgtttattgtccctgaaactcaagaaaggcgatcgcgtggcgcttatcgccgaaaccagcgcgggattcgtcgaagcctttttcgcctgccaatatgccggcctggtggcggtgccattggcgatcccgatgggcgtgggccaacgcgactcttacaccaccaagctgaaagggctgatcgccagctgtaaccccgcggcgatcatcagtagcgaagagtggacgccgctgattgcctcggccacggaaaaggcgccgtcgttgcacatcctcagcgatgcggactttaacgcgttgccagagccggagatcacgctgccggcgccttcgcccgacgatatcgcttatctccaatacacctcgggcagtacccgctttccgcgcggcgtgatcatcacccagcgggcggccatggcgaacctgaacgcgatcagccgcgacggaatcaagctgcgcgcgggtgaccgctgcgtctcctggctgcccttctatcacgatatgggcctggtcggtttcctgctgaccccggtggcgacccaactgtccgtcgactatctgcgcacgcaagatttcgccatgcgcccgatgcagtggctgaaactgatcgccaagaaccgcggcacggtctccgtcgccccgccgttcggctacgacctgtgtctgcgccgcagcaacgccagagagctggccgatctggatctctccagctggcgagtcgcgggcgtgggcgccgagcctattccggccgagttgctcagccagtttggcgaacacttcagcagcatcaacttcgacagcaaagccttcatgccctgctacggcctggccgagaacaccctggcggtgagcttttccgatccttgctccggcccgcaaaccaacgcggtcgaccgcgatattttggagtacgaaggtaaagcggtcgcgcccggcaagaagacccgcgccatctcgaccttcgtcaactgcggcagagcgctgcccggccaccgcatcgagatccgcagcgaaaccgggcaaccgctgccggaacgccaggtcggccatatcacgatttccggccccagcctgatgaacggctatttctgcgacgatgaatcccagcagcagatccaggtgaccggctggatggacaccggcgatctcggctacctgctggacggctatctgtacgtcaccggccgcaagaaggatctgatcatcattcgcggccgcaatatctggccgcaggatatcgagtacgtcgcggaatccgaaccggaaatccgttccggcgatgcgattgccttcgtgaccgaagagcacgacgaagcggccaggattattttgcaaatccagtgccgagtcagctcggaagaacgtcgggagcaaatcgtgcattcgctgagcgcgcgcattcaaagcgagttcggcatcgcggtggacatcgagctgctgccaccgcacagcataccccgcacgtcgtcgggcaaacccgcccgcgccgaggccaaaaaacgctggctgagcgcttcgctctatccgcaaatgccgcagctggccggtttcgcgcaatga

SEQ ID NO: 427271 - DNA, 744 bp, Serratia marcescens
atggcgcctgaggcatatcgacggcaggactatgcttcggcctttaaattggctgctgagcattctggggcagacataagaagccaacgcctccttgccacgctttactttgaaggcaaaggagttcagcacaacccacaaaaagccatcgatattcttaccccgctggcagatggcggtgatgctaaagcgcagacattgctggctgccatttttattgcgcctgggccacagaaaaatacgaaaagggcgctctattacaacgaaaaagccatcgaacaaggtagcgcacaggcgaattataatcttggggtaatatacctccacggtttgacgggagaaaaaaatgtggtattggctacacgttatctcaccgcttccagtgatctcggttctgccgatgcccctcttttattgggatcgttactgtctgctcccgtagaacgttgccaacaattttctcttgctgcatcacgggggaactcgcaaggcgccttggggtatgctcgttgtctggttcaaggcgatgctaaaaacggcaaagattttgtcagcgcagcatattggtatcgtgtcgccgccagtcagggcaatcgtctggcgcaggctaacttgggatatctcgctgaaaaagggttaggtacagcggtaaacctggctgaggcaaagaaatggtactgtctggcgaaagacgaagttccatcggcggctatccgtttaaaagaacgccacttatcttgttag

SEQ ID NO: 427272 - DNA, 1242 bp, Serratia marcescens
atggcggttttctctcgcggcatactatgttctttggcagtttgtctccttcttgttgaaagtgctatggcggaggtgcctcactcattgttgataggaaaggtagataagctacaatccagattattggacggacaaggcatcaaaccttggggggatgggagagatgagcgcgctttctatgagttggccattcaacgtcagtcattaaaccgcgttgatataaatcctctgacatgccgaaaattcgtcaagcaagagtacaaggttgcctgccagttgatggtactgggtgataagttttctctgtatgattggccaacctacagtacgctttaccaacgaatgcaacggcagcatgctgatgttgtagacgcatttctcccgccaatagataacgttgagatactcacccggttacctgcgttcaagcatactgctggaaaaaaagaatacatacatcagtttcacgctgttgataacaattttctgactcccttcgaagcactggatgtgcctattaccattaatggtgtgaaaagccaggcttggtttgatacgggggcaggaatgaccttgatttctgaggcgctggcaaaaagcagtcatgccaggttcttgcctatcaaggcgaacatggtcggtttttatgggaaagcctccgcggtgaaatttgctttcgtctcagagttaaaaattggtgatgatgtttttaataatatcattgtcgctgttaagggggcggaaaaccttcttggctttgacataatatcaaaatttaagggcgtctctttgagtcatgacagacttgtcttaaaccctaaagacgcgatggttcttaaggattgtcttgcgccattgacattaagatccaatctggcgaggactgaccaaacgctggctgcccccatttttctaaatacgggttatcgggaggtcaatatagatacgggaagctcgagctatctcacgcatttcatttcaaaaaatgactaccagtcatggacgacggttggggcgaatcgagatgtgatgggcaatcgtggattggtgaaatttgaaagtcaaagaatgagagcaggtgtgttaccgggccatgaggttcgggttagcaacgttgtgggggataaaaatacgattgaaaaaggtcgggagtatattctgggtgcttatttgctaaaggattataaccttcacgtagaccttaaaaagggttgggggtgtctttaccatgcgttgtga

SEQ ID NO: 427273 - DNA, 789 bp, Serratia marcescens
atggaagccgatatgtttaacatcaagttagagcattttactccacctaagctaaatgatttactgccaagtacgcgtgaaaaattacgtgcgtccgagagttcattcttttcctatcatgcagatgatatagataaatcatctgcagtaaaaaatgctttggcaaatatccccagcgggtacttggtgaagctgaagcatcgattaagcgaaaattatatggcgcgtcagattgataggaaaactccggaaagaacaagcgatgaagtgaagttaatatcgggtttctccatgagttataaggaagtaataacacgcggagacttcaatgcatttttggcgtttttaatagattggtctggggtgataaacaatcgaaacatgggtatcagaaatgtacccatgaaatcatcacctgatagcgaagggtgttacgttaaatacattgaacatgaacaccttgttgatggcatgagaaaagtgtgggggattatgctgaacgctccctaccactgtttgttttcggcagtagtgagttctgtgatgcttcttgcctaccacccatttattgatggaaatggccggtttagccgcctgttaatgaatgccatgttgagcagggataaagaaagctacattccattttacgacgtttatcaccagtctcaaggtgggtattttatccggttaaggcaagcacaactgtttttagagtgggatgaaatcatcgtattccactgtcacattttggatttcctgacatcaggttattcaaatagcagccaataa

SEQ ID NO: 427274 - DNA, 1113 bp, Serratia marcescens
gtgagtggcgagatcacatcctatcctcgcgccgtcaatatttcatcagggttccaagggtttattattaaaaaattcgtcaccgaagggcaagtggtgaagaaaggcgaccctatttatcaaatagatatcagtaaaagcacgcataatggcgtggtcagcgataatcagagaaaagatattgagagccagattgctagaattgatcgcattatctctcggttagagtcaaacaaaacagtaacgctctccacgttaaaaaaccagcgattacagtatggtaaagccttcgagcgctcgactgaaatcctaaaacgagccgaggaagggataacaatcatgaaaaggaacatggataattaccgtagttaccaaacaaaaggactgattagcaacgatcaacttatcaatcaggtcgcacgttactatcaacagcagaataaccttctaagcttaagcgggcaaaatgagcaaaactcactgcaaatcactaacctggacaatcagattcagacccaggctgctgagtttgataaccgtatttatcaaatggaactccaacgatatgacctgaaaaaagagttgttaaataccgatctcagcggcgaagtcattattcgctcgttgtccgacgggaagattgactctctcagcgttaccgtcgggcagatggtgaatgtaggcgatagtttactccaggtgatacctcaatccatcacccattactacttggtcatttgggtacctaacgaagctattccttatatcacgattggcgataggctcaatgtccgctatgaagctttccccgcagagaaattcgggcaattctccgccaccgtagaaattatctcaaaaacgcccgcaagcaaacaagaaatgcttacttatcagggagcgccaagaaacacgcaatcctctgctattccgtattacaaagtcattgtaaaacctgaaaaacaggtcatagcctatcacaacaagaccatgtctcttgaaaacgggatgaaagcacaaagcactttgtttttggaagaacgaaaaatttatcaatggatgatttcccccttctacgacatgaaaaacagcgcattgggccccgtcaatgaataa

SEQ ID NO: 427275 - DNA, 2100 bp, Serratia marcescens
atgaataaaggtagaatcaaaaaaatcctggaaaaactcgatattgggcttaaccaccgtgttccggttatacatcaaacagagtcttccgaatgcgggttagcgtgcctggcgatggtttgcggctactatggcaaaaatatcgatttaatctcgctgagacagcgattcaacctgtctgctcgcggcgccaccctcgcaggcctcaatagtatcgccatgcaactggggatggctgcccgggccgtttccttaaaccttgaagaaatcgaggcgctcaaaacgccatgtatcctgcattggaattttaaccattttgtggtgctggtcagcataagacataaacgcttcgttctgcacgatccggcgcgcggacgcagaaccgttagcctcgacgaaatatcgcaatactttaccggcgtggctctggaagtatctcccaatagtgaatttacagccgaaacggttaagaatcgccttcaactgagaacgttgctcaacagtattcacggcattaaaggtgcgctaggtaaaatattccttttgtcgttagtgatcgagaccatcaatcttgtcatgccgatcgggactcaactggtcatggatcatgccattcccgccagcgatcgcgggctactgacccttatctgtataggcctgttcttctttattctgctacgaaccgcagtcagcatggtacgtgcctggtcatctttaatcatgagcacgttaataaatgtccagtggcaatcagggttgttcaaccacttgctgcgcttgcccttaggctattttgaacgacgcaaactgggtgacattcagtcgcgattcagttcattagacaccctgcgtacaacgtttacgaccagtgttgtcggtgccatcatggacggcatcatggtcgttggcgtcctcgtaatgatggtcttgtacggcggctatctgagttgggtcgtattaggatttactgcgttatatattctcatccgcctgttaacttacggttattatcggcaactgtcggaagaaactttggtgaaaggaggcagggccagctcatatttcatggaaacgctctatgggatagccaccgtcaagatacagggaatgggcgctcgacgaagtgccaactggctgaatctgcaaatagacacgatcaacagtgggattaaagtcaccaaaatgaacttttttttcaatggggtaaatacgtttattaccgcttgcgaccaggtcgtcattttatggttaggcagcagcctggttattgataatcaaatgacgataggtatgtttgtcgccttcggcgcattccgcgggcagttctctgaacgggtggcctcattaacgagctttttgctgcaattgagaatgatgagcctgcataatgaacgtatagcagacattgcactgtatgaacgtgatgctcaaaaaccggacatcccatatcaggcaacaatgcaacccatatcgctggagagtcgaggtttgagctatcgctatgacagccaatctccccccctattttgcgatctcaatatccatattgccccaggtgaaagcgttgcaatcacaggcccttctggagccggaaaaacaacgttaatgaaagtgttgtgcggcctattcgaacccgatgctggcatggtcatcgctgatgggatggatatccaacaattgggattaaataatttccacaaaatgattgcttgtgtgatgcaggatgacaaactgttttccggctcaatacgcgaaaacatctgtgggttcgaagaggatatcgacgaggagtggatggtcaaatgtacccgcgccagctatatccatgatgtcattgtaaaaatgccaatgggttatgaaacgttagtcggagaattgggtgagggactttcagggggacaaaaacagcgtctttttatcgcccgtgcgctctatagaaaaccagggattttatttatggacgaggccacaagctcactggacaaagacagtgagtattatgttaacgaggccatcaaacagatgaacatcacccgagtgattatcgcccacagagaaaccactatcgccactgccgaccgcgtgatttcactggcttaa

SEQ ID NO: 427276 - DNA, 273 bp, Serratia marcescens
gtgtcggcggcgcatcctaacggcatctacggcttccagtggtggaacaacgaagtgccggtgaatgcggccaacgttgagcctactccgcaggcctccctgaaacattccctgtgggcgctggggatcttcggccagatgattatggtcaatcaggcggagaatctggtgatcgtccagtggtctacctggccgcaggcggagccgtccttcagcgcgcaaccgctggaggcatcgctgatgtttagtgcgatagcgaaggaattgcgttaa

SEQ ID NO: 427277 - DNA, 690 bp, Serratia marcescens
atggaatatgaaccacaggatttttttgaaggccgtcaattggaagtcgcacagctgatttatgatggcgacgaagtgaaactgaatgagaagcttccttcaataagcaaggaagaactgaatcgaccggtgaaagcagacatgaccctgctgttttggtcggtgttgaactcaatctatgataaaaacacgccggaaaggctgaaaataataaccgacctggtaaaagctggcgcagacccgttgcagcccagaccggagggcgggagcagcccggcggaattcgtcatgaaagccgacaaggggatttgggtcaaagccatgctcgacggcggtttaccgccaaacgcaaaagataaggtattcaatgagcccattgtattccaaacaatcaaagccaaaaaccctgaaacattaaaggtgatgctggattatggcgtggatataaacatcagagactccttgcaacaaaccttattaatggatgctttttttagctcagcctttgagcatatgaccttactgctcaatcggggtgcgaatcctaacccggtaaatataaacaatctttcgctgttaacagcagtgaatcggcaaataaaagacagccaagatggctcagaatacaatgtacagtgtaagaaaatactcgagctcatgcttttgaaaggagcaaaggaaacacagtaa

SEQ ID NO: 427278 - DNA, 774 bp, Serratia marcescens
atgagaaaattgataatggcaatagtgctactgtttactgttctcatgatgcaaggatgcaacaaaagcatggaatatgagccacaggatttttttgaaggccggcagctggacatcgcacagctgatttatgatggcgacgaagtgaaactgaatgagaagcttccttcaataagcaaggaagaactgaatcgaccggtgaaagcagacatgaccctgctgttttggtcggtgctaaacgcaatctatgataaaaatacgccggaaaggctgaaaataataacagacctggttaaagcgggcgcagacccgttgcagcccagaccggaagggggaagcagcccggcggaatttgtcatgaaagccgacaagggaatttggatcaaggccatgctcgacggaggtttaccgccaaatgcaaaagataaggtattcaatcaacccattatattcgaagctttagaagcgaaaaaccctgaaacgttaaagatgatgctggattatggcgcggatataaatacaatggattcattggggaataccatattaataagctctcttgattctcgttcgtttgatcatactatacttctgttggagagaggtgcagataataaaatcaagggtaagtttggttggactatgggcaatcagctccaacgctttatagatagagggataggcgatgccgaggataaagagaaaattaacaagataaaagagttattaattaaaaacggtggagactggcctcctctacctgtaaagaattga

SEQ ID NO: 427279 - DNA, 1308 bp, Serratia marcescens
atgaaaagcaaagtgtttaaccgcagcctgctggcgggcgttgtcatcagtctctgcagcggcctgttggcgcccgccgcgctggccgcttgcgcgggcaccgaactcagcgcctgtccggcgcctttcgatgcgcaattgccggatacgcacaagatgctcacctggagccagagcgaccgggtgattggctttcgtaacgactaccgcaactatgccggggatgtgttccaccacggcaaggccacgccgctggtggctgccgctaaacagctaacgaatgccagctatcgggtgaatggcaaaacctacagcctgcaggattacctgcagcgtcagaacgtcagcggcatgctggtattgaaagacggcaaaatcgcctggaaatacctgggggagggtaattccgacaccaccctgtggacgtcgcgctccgtgggcaaatccgtggtcgccacgctggtgggcgtggcgattaaacagggcaagatccgctcgctcgacgatctcatcacgcaatacgaacccgatctgaaaggcaccgcgtgggacggcgtgaccctcaggcagctgatcacccatacctctggcgtggcgtggaatgaggattacaccaacccgaaatcggacttcgcgcagctgaccgagtgtgaggccaagcctggcacttacgcctgcgtgcgcaagctggtagccggcttacgccgcgcgcacccggctgggcagaactggtcttactcctccggcggcgcgtggctgctgggcgacgtgctggagcgcgccaccggcatgccgctggcggcctatctgcagcaaagtatctggcagccctacggcatggcgagcgacggggtgtggcatgcctacgccaaaggccagcacgacgtgggtgcgcatggattcaacgccacgctggaagactgggggcgcttcggcgaattcattctgcataacgggacgctgccgaacggcaaacagatcttgccggctgattgggtagcccagtcgtccaactggactcgggcggcgggttcggtatcagcggcgcatcctaacggtatttacggcttccaatggtggaacaacgaagtgccagtgaatgcggccaacgttgggcctactccgcaggcctccctgaaacattccctgtgggcgctggggatcttcggccagatgattatggtcaatcaggcggagaatctggtgattgtccagtggtccacctggccgcaggcggagccgtccttcagcgcgcaaccgctggaggcatcgctgatgtttagtgcgatagcgaaggaattgcgttaa

SEQ ID NO: 427280 - DNA, 909 bp, Serratia marcescens
gtgccgagcctgatttattcctttgcccaactggaagccttcaccgccgtggccgagcacggcagcctggcgaaagccgcgctcaagctgggcaaagaccgcacgacgctgcgcgatttgattgattttctcgaggatggcttgggctatgcgctgttcctgcgcgaggggcgcagcctgcacctgacgccggagggcgaacagctgcagcgccaggcgcacctgctgatgcgccaggtgaaagcgtttgaggcgtttgccaaagacgtgccaaagagcgcggcgcaggaaatctcgctggtctacgatcccttcacaccccgcgcgctactgcaggcgttgattgccaccatggcccaacgcaacacgcgcctgagcctgattaacgcctcgcgcgacgaagcggaaagcctgctggcaagcggccaggccgatctgggcatctgccaggcgcgccatcgcagcgtgggcgacgccatggagtggcgcgccttaggggcgatagagatggatttctacgccgccgaaacgcttttccccggcgcggaacagccgctttcgctgctggaactttcgctcacgccgcaggtgatcatgcacccggactctgatgaacccgtggctcgccgcctgcaaatttccgggcataccattttcaccaacgaactggagatgctgcgcgccctgctcgaacagggctgcggctggggattcctgccgacgcatatgcatgccgaacagtggaaaaacgtcagcacgctgcgcaccgaagtgggcagccaggggatcagccaaaccatggtgaccatctggaaaccgggcaatgaccggcgggcgctgattgatgagacgttggggttgttgccggggttgtggagggaggttgggggggtgaaaagtcgcgtctag

SEQ ID NO: 427281 - DNA, 1038 bp, Serratia marcescens
atgaaaaaaatattgaaatcattaaatcttggtatcactcatttcttattattctatatggcaatactcgtcatcatgcctcagagagaccttttatacccaattgttatttggctggggatgattatcctaagctggctagttatacattattattggaataaaaaatcgtccaatcagttgaccactcgacttcggaaaagtcataggaaaacgcaaagtgcggcattgttttcatcgttactgttcttattaacatgtatttcatttaaaattattgatcatatcagttacataattccgaatgtattaattttcatgaccagtgcgttcgttatatatacaatcctatcccacttaaaatcttttgataataaagagaaaaacatagttgcaaaagcaaaactaggcgttaaatattcatgggtaatagtatcattgatttcatattatcttgctcgttcgctagtctctaactcatttgatattccttttgacatcacatttaacaaactcgtgacagcagtcacggccttgctttttatttttatcttctattatgctatttattttatgtgcaccatttatttaactcttattattcaacaagtgaaaaaggtaaaggcagcaccctattgtgatattaactattcaatgtctgtttttgctccattatttgttattggttacatttcatatattgcatttaatgttcagacattctccatcatcaaattcggctacggaattgccatggagtatgacacacgagatactttcttttgcaagaataaatatatgtggctcaacgaacatcctaaagctcgatttatgtttatctctgaaggaaactatcgtgcattaatacctcatcatgatgactatacaatatcacgcttaacctgtacaaatagtgagccgtactattcactggttaccgtaaaagatagaaaatacttcatgttagatgctttgaatcagcgagcagagatgcttgctagcgacctaaagacagcaatatccccgaatgcccaatga

SEQ ID NO: 427282 - DNA, 864 bp, Serratia marcescens
atgtgccaacatcattcgacagaatgtcgtaacttcacggcatttcgccaccgctgggaaatgcccatgatctggctatcggcgataataacgcttctcggttttttatttggcatcgccgctatcgtcgcgtcctcggacgagacgattctaggattaggcacggaagccaaagaaacattggatacgctcagcctgttcgccttattaccgctgatccctatcgctttctatatttatcgtttctatctcgccgcccaggcgaaatccaacgccttgcgcgtcgggccggcacaatttcccgagctgttcgcgctgtatcaggatattggccgccgcctggagctcaagacgctgccgaagctctacctgaccaacggcaacggcgtggtcaacgccttcgcactggaatgcaaccgccgtcagcgctatgtggtgatccacgctgaaatcgccatgctgatgcccaccgcgccggagatcgtggagttcgtgctggcgcacgagctggcccaccacaagctgcgccacgtgtcgctgtggcgcctggcgatcggcgtcgtaccgcaatcgctggtgctgcccggcctggcgaccacccgcgcacaggagtattccgcagaccgcgtggcgctcgccgtctgcccgaattacgccgacacggtgcggctgctggccgtcggcccctggatgcagcacggcgtgaacccgcaggcctggctggaacagtgcgaagaagagaacaaggagctgtttgtccgcatcagcaacctgctttcggatcatgcggtgatggtcaaacgcttcaaggcgctcaaagacattgagatgcacggcttcgagcgccacggcagcatgttttaa

SEQ ID NO: 427283 - DNA, 807 bp, Serratia marcescens
gtggatactaaactgggaacctctgtcgccgcgctgttatttttgtttcctttcgccactcaggcgcaggacggcgaggcctctttaacgctcgccggcggccttgccgttgcccccgcctatgaaggctcctctttttacagcattgaacccttgtatcaggtgaacgccggctatcaaaacgccagctggggggagttcagcgcaggcagcgagggggcacgctggcaattcccgctcgccggccccgtcggcatcgcgttattgctcaactatgacgccggccgtgacgaggaaatcagaaccttacgcgggcgcaacacccgactcaagggcatgggcaagctgggtggcgcactggaggccggcgccgagctgagctaccaactcgatcccttccgcgcctacgtaaaaggcatgcaggcaacgcgcaagcgcagctacggtggggaagaactgggccacacggcctatgtggaaaccgggctcaccgggcaatatccactcagcgaacagctgacgttgatcggcaacctttccaccacctgggccaacagcggctatcagcgcggctatttcggcgtgacgtcgcagcaggcacagcgcagcgctttcagcgcttatcggccgggcagcggcttcaaggacgcgaccctcaccgccgcgctcaattaccaatggcgaccgaacgtggccttccaggccggggtcggtgtgacccgtctgctgggcgatgcggccgacagccctatcgtcgaaaaaaccacgtcgggtatggccttcactagcgccagctacagcttctga

SEQ ID NO: 427284 - DNA, 3939 bp, Serratia marcescens
gtgtccgcttattccctgacgaccgtgcaacaagccgtgtggctagaccaatctttaaaccccgatatccccttatataacattgggtgtttgtggcgcgtagagcgcgagatttcgttgccactgtttcaagaggccatacggcaaatacagcaacaacatgatgcgctgcaaaccacgctgaaagaaacgccgcaaggcattactcaggaaacccgcgaccgggcctatatcgacttgcactaccatgatttttcgcgcagacaagatgccgtcggccaggcggaagcacaccttcgttctcaattcctgcagccttattcactgtatgacagccagctctggcgctgtcacctggccaaagtcggcgaatccagcacgctatggctgcttgcttcccatcacctgattgcggacggcacctcaatttccctgctgagcaaaatgatcatggagcgttataagcaattaaaaatagggaaaaaaaacgaagtcacccgctcacgttaccaagacttcgtcaccagcgatcgaacctatcagcaatcgccacgctacgagcgcgatcgtgatttttggttggaacgtttcaccaacgcccccccctccatgctggagcgccgccaaaatcactgtgagcagcaaacctaccccagcagccagataatcaagcggttgccacgcgagcgtttccttcagttggagcaatacgccgccgcacagggcggttctgcgatgcattttttgagcgctctgctcgccacgtggttctcccggatttggcaaaccgatcaattcacgctgggcgtgccggtacataaccgcagtaccgccgagcataagcaaacgctgggcatgttttcctcgatgatcccactgcgcatcacggtcgattcgcagcaacccttcggtcacttactgcggcaaatcggcagcgagctgcgtaagtgttatcgccaccaacgtttccccattgccgaactcaaccgccatctgaatctgcatcagcaggggcggcgccagctgttcgacatcagcttttcgctggaggtttttccgactgacatcgaactggaaggctgccagttcaaggttgaaaacctgcaccacggtcaggaacagctgcccctcggcatctacctgcgccattaccatccgaatgacgatccgctgctggagttcaacctcaatcaggcctggttcagtcaagaagacggtgaacgcatcgccgcacgcatactgcacctactggacacgctgctggacggcgatccggcgctgccgctggcgcagttaccgctgctgttgccgcaggaaagagagcaaatcttccatcaatggaatgacacccgacaaacatgggcagacatgccgcaaggcatacatcaattcctggaacggcaggctgtgctgacgccgcaggcgccggcgctgtgctacgaaaaccacgaaatcagttatcaacagctgaatcagcgggccaatcgattggccgcctttctacggctgcagggcttacagcctgacgatcgcatcgcagtatgcgtcagccgcagcccgaagatggtgattgccctgtacgccatcctaaaggcgggcgccgcctatgttccgctcgatcccgactatccacaggaccgcctgcgccacatgctggaagattgcggcgccaaattcgttttaatcgacgatggtggcgaacaggcgctgcatccgttgcgggatatcgccgtgccacggttacatctgcagcgtgaaagctacctgtggcgacaagcgtcggatgataacccaccgccgctgaccgccgagctgcagcgctgcctggcttacgtgatctacacttccggttcaacgggaaaacccaaaggggtaatgaacgaacaccgcggggtgatcaaccgtttactgtggatgcagcaggcttacccgttgacgccggaggatgtcgtgctgcagaaaacgccgttcagcttcgacgtctcggtctgggagtttttctggccgatgatggtcggcgcccggctggccatcgccaaaccgggcggtcaccaggaaccggattatctcagcgcctgcatcgcacaacatggcgtcaccacgctgcatttcgtcccctcgatgttgcagctgtttttacgtcacggtgatatggcgcaatgtgcctccctgaaacgcattatgtgcagcggcgaagcattgccgctcgccacggtacaacgctgcctgcagcagttgccgcaggcagaactgcacaatctctacggcccgacagaagcagccgttgacgtttccagctggcaatgcctgcccgatgatccacgtcccttggtaccgatcggtaaaccgattgccaatacccagctccacattctggatgatcaactgcagccattaccgcctggcatcgccggcgaattgcatatcggcggtattcaggttgctcgcggctatctgaaccgcgcagagctgagcgccgagcgatttatcgccgatcccttcagccctgagccgcaggctcgcctgtataaaaccggcgatctggcccgctggctgccggatggcaacattgagtatctgggcagaaacgatttccaggtcaaaatccacggcctgcgtattgaattaggcgaaatcgaacagcagctcagacaatgtccgggcgttgaagatgcggccattctggcgcgggaagatgagagcggcggcaagcgcctgatagcctatgtcgtcgcccctgtgcagggtgccggcgccaccgaatggcgtcggcagttgcagcagcacctgccggactttatggtgccgtcctgctttgtccggctggatactttcccgctgtcccccaacgggaagctggatcgcaaggctttaccggcacctgccaacatgcaggaaaccgccgcttatgaggccccgcaaggcgagctggaactgcagcttgccgaactgtggagcgaactgctcggcacaacgcgcattggccgtgacgatgacttcttcgcgctgggcggccattcgctgcatgccattcagctgctggtcaaactcaagcgatatgggcattcgttaggcattaaaacgctgtttgctcacccgacgctgcgcggccaagcccgtgttatcaccgacggcgtacccgcaatggctcctgtcacctccgagcccctgcagcagctgttgacgcgtctgaatcaggccagtttcacctttaaacaggtagagcgcctgaaccatgctatcagccccgacagcgtctggatgatccaccctgccgtcaccggttgcgatgtttaccgcgatttggcgaactatttggagaaggatttccaagtcttaggcatcaacaattacaacctgttccagcagccgcacatcacctcactgcgcgagctggcgtcgtattacctcggccatatgcggctgtcgccggcgcgccccgtgcgtctgttgggttggtcgctaggagggctgatcgccctggagatggcagctcaactggaaagccaaggctatcgcgacatccagctgttcctgcttgacactttctaccgaaccccgttccaaatccgcagcgagccgggcatgctggcggcgatgctggccatgctgggcattgacggcgaggccgcagagcgggcgttaaaggcagagccgacggagctggcattggcgaagcaaacgctcagcgcaccgttgcaacatgcccgcatcacgctgttcaaagcgaccgaagatgcaaacctgaatatcaccggcctgggcgatgaacgggaactgctggcgattgccgacaatggcctgtcggcaatcagccaacatctgcaggtgcatccgctggcctgcaaccatcactctattatcttcagccacgaggaaatagggcgcgccttgcgacagtcgtcgcgcacaccggcgatgctcggcaatcttccctga

SEQ ID NO: 427285 - DNA, 231 bp, Serratia marcescens
atgaggccctattgggtaaggcgtttatttacaccctcaccaacctggacaggcagagcatcggttatcttgggtctgctggtgtttgtggtgttgagcgggctggatagcctgggtgtggagttggacgggtggaagcgctacgtgatgatcgcgggcgtggcgggtatgtgctatttcattgccggatatattgataagcgcattccgcgtaaagccccgtcaatgtag

SEQ ID NO: 427286 - DNA, 1224 bp, Serratia marcescens
atggctggtggaacaaacaaactgagcgacgcaacgttgcggaaaatggttgggcgtgagagtccgggcgataatttttatgctgacggtgatggtctgagcatcaaggtgacaaagtcaggtgtcatgacttggttctttgcctatcgtatcggtggccgtgaagctaaaccgcagcgtctgaagttgggtaactacccagaaatgagcctcaagctggccagagagaaaagggaacagtgccgcgcttggctcgccgacagcaaagatcccaagcaccagttaaacctaactgcagcagaaaccctcaaacctgtgaccgtgaaggatgctcttcagtactggataactgagtacgctgaagacaaccgtgccaatgtcgaacgccacaaagcccagcttgaaaaacacatatatccctatattggctccctaccgctttctcagtgcgaaacccgccattggttagaatgtttcgataggatgaaaaaaaatacaccggtggccgccggctacgtttttcagatgtgtaagcaggctctcaagttctgtcgagtgcgtcgctatgccatcagcaacgctttggacgacctaaccatacctgatgtgggaagtaagcagcaaaaaggcgatagggaccacactgatgacgagattggtcagatctggcaggcttgccagcaactgaaatttaaaccctactatgccgccatgttgcgtctgctggtggtatttggatgccgatctcaagaagtaagactttccacctgggtggagtgggatcttaaaaagtgggtgtggaccgtaccaaaagaacatagcaaggctgggacaaagatagttcgccccgtaccggaagaattgaagccgtttattgaagaactccaccgccgctatttcgatagcggcctgctgcttggtgaggtgaaggattcctcggctgttagtcagtggggccgtatggtctggaaacggttagggcatatcgaaccatggtctttacacgatattcgccgcacgttcgctacaaagttgaatgattttggtgtggctccgcacgtggtcgaacagctattgggacataccatgcccggcgtgatggccgtatacaaccgtagccagtacttgccggagaagctggacgcgcttaataaatggatggaacgcttagacgttctgtctgatgaaaattcgaatgttactattttgaaggtgacgaaatga

SEQ ID NO: 427287 - DNA, 960 bp, Serratia marcescens
atgaaattacctgaccgtttatattattcattagataaagctgcacatggactagggtgtgatttttctgatattatacattacgctgcaaatggctatattaacttatgtttaaaggtatatagctcgcccatcggcattgaggaagttagtgatgagtggagtgctagtttattagtaaatgagaaatatttaaatgaaattgtcgctgagtattatcgtccttattttaaagatggtagatatgaagaaacagaacaaggcatttttttagcaaaagataatacgaactttgatttcgttaactcctatgtcagattgcaaggtcgaatagatttttgggttgagaaagaaacaggtcaggttgaggattattcgactgagttatatggtatatatgggttgttgcaaatagacaccagagctatctatgccaatgaagaggctttagtaaacggtcagtcgattgaggctagttcattctctcttccgattgatgatacacatcaattggctaatggatactttaaacgtcatgttagtgagtttgctcatgatggctgggtttctgattatattaataaagattcagaatttctcaggaatgaatctgtagaaaatatggtttcaaggaatgatgataaactaattgttagtgcaagcaatatgtatgtgactttggatgaaatatctagaattaaaaacaatgttccaaaacctctaaatagagggccggctattcctatcgagtcagcaaagaccgcttcaaaaaaaggtgagataatacatgctttattggggttaattcctgaattcgataatgtggaattagaatcaatgccagttgcaaaaattaaagaaattatagaggtattagcagcagagaaaggtgttgttttccctgaaacccacgcgcaaacatgggctagatatttaggaagagaaagaaaggcaagatga

SEQ ID NO: 427288 - DNA, 891 bp, Serratia marcescens
atgaaagctgaaaatatggcgatttcaccagggcaatctgttgtaaaaattccggagagcaatattagttctttcgaattcaagtccgtagatggtgcgttattagcaagggtgggagtagccactattgatggtcagccttggtttatcgcctcagacgttgctgctgctctcgagtacagccagactcaggggcttacccggctagtggatggtgaggataaaaattcggcgatcatccaaaatggatgtaactatcaaaatcaatcgcttatcaacgaatccggtctatataccgctgtgattgggagtaacaaaccagaagcgaagaggttcaagcgttggatcactgctgaggtgttgccggaaattcgcaagaccggcagctatctccttcccgcgattaaggccgaactacctgatttttcggatgaagtggccgctgcccgtgcttgggctgatgctcgtgaagaggggcgcagggccctggcactgacctaccagcaggctgaatatattcaccatctggaaagcctgtttgctgaaggcttgacccctgttcagttctgcaagcggttaaacggtgttaacaccagccgtatcaatacttggctctctggtaagaattggcttttcgatgaaaatcctaacggacgcaatgcacgctggcgtgtgtatgggtatgcgcgggatagatatctgactgagaaaaacacccgggtagagcatggtgatggctttactaccttcacgccagttcttctacacaaaggtgctgtgtggatttatcgacattacctgaaaggcgaattacccatgaaggcaagctggaacggggaatatacgcacgataaggaactggcagggggtgacaatgcaggggccgaataa

SEQ ID NO: 427289 - DNA, 834 bp, Serratia marcescens
atgcaggggccgaataaaacaaaagcggccttgccgggccgccaatgtcaaagcacaaaacttaagccaatccagaatagcacgctggtggatctggtcaatatgaccgaggggggaattcctccctcgcctaactatcgtacggttactgcaactgctgggggtatttctacagatctgcatggggtatatccaaaactcgatacaccccaaaaatacaaggtatgcgagattttccgcacacctcatcagccctttggctcgataccacgttgctgtagttccttacgcagtatgcgtttgatccaggtggcgagggatgaatcaccatctttgcgcatttcatcttcgagctgtgaacgtaattcgtgcgccaatcttatttggtactggtcagtttttgtcttttcacttgacattgtaattacaaaattcctatcatcgatacgtggatgtaattacaacgcaattacgtggtgttttgcaaccattaaaatagtgaggccccggggtacgcccatacgcccgaggcctctgaccaaaccgttatacgaggtaacgatcatggctgacatcaagtctacccaaactcgctctaaatttacattcctgttcctggctaccccagaccatacacccgaatgtgcaccggttgtgctgcgctttgatgccgatacagaagcggccgcgcgtaatgcattccctggttgggatctgatatttgccgcaaaaatccgcactcaacccccttgtcgtgttgccttctttgactatgccacccgcagtggttgggaattcgatagcgcatcagttcaggaggtgaaccatgtgtga

SEQ ID NO: 427290 - DNA, 174 bp, Serratia marcescens
atgtgtgagcaaaaacgccttgaggctattgatgcccttaacaagatagccgcacttaccagtgcagccttatatctccatagtagtgaagtggaagaagatcttgctctacatctgatggatatcgttttgcaaacagctcgtaaatgcgtggaggagcgtaaccatgcataa

SEQ ID NO: 427291 - DNA, 288 bp, Serratia marcescens
atgcataaagacgcttactggttgatcaacgattgcacaaagatgactttggctgaagcagcagagttgaagatagcagcagcggggacctcagaaaccatccttgaaggggttgatgccattggcaacatcatgttttgggctgcggaaaacgagaattacacccctgagcaatccaagaaggacatgctcaaactaggcgacatgctaagcacgatttcccggttggcgttgggagcaaaacacgcagaggcatcgatctcttaccggattcgggagggaaaataa

SEQ ID NO: 427292 - DNA, 339 bp, Serratia marcescens
atgatcagccaagtgaagttcaacgaactggaaaagcgcgtagaagcgcttgagctggcattgtcggcgatgcagcgtaaaggtgatatgccggaaggcatggcgccactaacaacgctggcggcagaaatgggcctatctaccagcaaggcggaagaactggcgcgtaactgtggcgtgatgattgtgaagcaggggagcggtcacattgtgcatgaagccaaattccgcgaggcagcgttgttagtgatccgcggtgcaaagcgcaaatacggcagtaaatactggttccacccgttgatcggtaaattcattatggtcaagggggcgcaggcatga

SEQ ID NO: 427293 - DNA, 1731 bp, Serratia marcescens
atgagcaacgcgaagaaggtgaatatcaatcagtggcctgatgccctgttttcttgtgtttaccgttgggtagttggtagaccgattgaaatggaagaggcggaagctgcgcagctacgttcccaggataatactgctattagcaatctagctgtcaaattgcgttcatttgctgtcggtaatgtaacgcctgagtggttgaccgataacggcttctattctgctaaggcccccgaggcagccagagaaaagcgtgaagcagttgtgctggaatttatcagccgggaagagctggtgggcgtgctggcggatgccgctcgtattaaccgtatcttcaacgctatccccccagctgttgagccggcggtaacaccagctttaaatcaaatgggcgccagccagcgcggtgaggttttattggctcgctatgatggggctttggccatacatggcgattctgacactgttcaccattacgatggcgtgatctggaagccagtacctgacaaagaactgcagagggaaatggccgccatcttcatcgagtctgagatctcctactctcagaacggcattaagtcggccgtagatacgatgaaactgagcctgccgctgatgggtaatactgctcgcaacttgatcgggttcagcaatggtgtatttgataccaaagttggggagttccgatcgcatcgccgtgaagattggttgctgatcgccagtggtgtcgagttcaaccaggcggaggcaggggaaacactggcaagtcatgcgtcgaacttctggaagtggctcactcgttccactggcggtaattctcgaaaggccgatcgggtgctatcggcgctgtatatggtgatggccaaccgttatgactggcagctattccttgagataacaggtcctggtggtagcggtaagagcgtgctggcggagatctgcaccatgcttgctggcaaggctaataccgtttcggccagcatggcggcattggagaacccaagggagagggcgctggtggtgggttactcgctgatcatcatgccggatatgtctcgttatgctggtgacggggcaggtatcaaggcgatcactggcggcgataaggttgccatcgatcccaaacacaaagcaccttactccactcgcatccctgcggtaattttggcagtcaacaacaatgccatgagttttagcgaccgcagcggggggatcagcaggaggcgggttatcttcaattttgccgaggttgtgccggagaatgaccgtgatccgatgttggcagagaagattgaagaggagctggccgtcatcattcgtcacctgttgacccggtttgctgaccagggcgaggccaaacggctgctgttcgagcagcagaaatcagaagaggcattggctatcaagcgtgagggtgattcgctggtggacttctgcggctatctgatggcctctgtgcagtgtgatggcatgtttgtcggtaacgccagcgtgatcccgttcagcccccgcaagtatctttatcacgcctacatggcgtatatgcagagcaacgggctgaacaaacctgtgtccttaacccgatttggtacggatatgcctggcgcaatggctgagtatgggaaggagtatctcaggaagaaaagcaccaaggggaacattcggtccaatgtcagtttgagcgatgatgcggaggaatggctgccagcagcaacagggggtacggagtag

SEQ ID NO: 427294 - DNA, 1023 bp, Serratia marcescens
atgtctacacctcaaatccataattttatcgtccatcaaattgtccgagatagctcaaaggctgcgtttctcaaaagtagaaaagaagagaacactgttgatgaaatgacaactcaagttgttacgagtcttttaacattatttaataaaaccggattacaaacgggttctttttcacaacagggtggaaaaccaaaatttgaacaagtgttaataaaaaactgctcaaaaattagctctgaatttaaatttgataatttcactcaaatgacggttgacctagcaagactccttgagggagagatgaacaaaggggcagggaaagcggcaagacctaattatgttgtgttttttcatcactcctccaaagggaaaagttacttatcagtaattactcttttggaaacgaaaagttttacactgcaagaactatcgtttaagtacattgagagattggatctagacaagcttcatcttgctgcaaggataagattagatgattgggttgatgagatggaaactgataggtatatctcattccgcatagggcgcaatagtgaaatgcgggattacttcaaagattttatcggttgtgaggagtttacagaagctaaattagaaactaaggagttagtcgatgcaattaaaaaatgttgtgcggaattgttttctcttgagccaattaagataactgaagctttagaattggcagcaaaatattgcaaagaaaacaaagaccatgacggtaaggttagccttatatcacttgggaagcatttattccctgaccatgatgattaccttttaaaaaccgctcaaggagaaccgtttaatctcagtgaaagagttagcattgataatagagggttaggtgcgttagtacggtatagggggagcaacaaaaaaatgagtataagttttgacgcggatttgttaaaatcaaagaaggtagaatatattgatgggaagttaattttcaatgaaatacctaaggatttaaaatctagcttagacaaagactga

SEQ ID NO: 427295 - DNA, 1209 bp, Serratia marcescens
atggcaattttgcaaaaaataaaagaactattcgatttgtcctcgggttttgctcgcgggggcgatggggtggttaatattgaatttgccattaagcatgatgtttatgaatttttggtggagtgttctaagagtgaactgattagctctatattccaatttccatacaataacgatacaaaaaatcgaacttttcaaacatgggatacgttacctgagcccttgaaaaatgggactatagcaagtatttttgttgaaatgaacttgaaggagttaaggaaagatgggattcatgtgtactatgatgagcgagagcttgttgagctttgccccatatcccccaagaattttataatattagccttatctttaaatggtgggaagtgtactgtttgtcccgatgaatacaataaaaacgaaatactcagatatagccaaattaaaagaatttgggagttgttaacttcttgttcagatgatgaaaggggtggtgagcttatatttttatacaagcagaaaatctcaatagaattgaaatacactatagaggacttaggttttgattttgatgggcttgcaaagttagagaggatattttctgacggtcttcattccacagaaaagaaaaatatcatgcagaataccctgcgctcatttttatggagggagaggaaagaaaatgggctgagaaagttgcttagggattttaccttattttcacttagtttcgaggaagactatcgttcgttttctgtgggttttagctttgataagataagaaaggaatatactgaaaaatttagagactacttatctaagttaaattcaatattgtacgatacattaactcgctcgctttcaattcctgtttcaggcttaataagttttgtagccatgaaagagggtgatagccaaaatatcattgttaattgcgcagctattatgctgactatctttacttctgtcagtattcattaccttgtgttttttcagaagaaaatggtgatgatatctaaaaaggaatataaagagttgtttaaaacaatacgcattgaacttaaagatttagaactgttagagttgaatgaaaaggaattatcgctaaatacacaatcaaataaaattattaatattttaaatttcatttatgcaactgctatttcaagtttaatccttaatggcgtaatgtttataatgaaaagcttttaa

SEQ ID NO: 427296 - DNA, 687 bp, Serratia marcescens
atgttcaacttttcacaccttttcgatagcgctaaagccaaaggcgcaaacggcggtgacgacaccgagatcaagtttgttgacgatgagccggtcaaagtagccaaacccgctcagcacagccgtgaacataacgtagcggtttctgacgaagcgaaagctaacccggtgctggccatccggctgctgaaggatactgacctctcatccaagaaaattaaggcgaaactggcttcggcgccacaggcactctccaagttcacgcagaacttcatggaagagaacgatcctacctgggaattccagagcgatgaagagaaggcccgaactgcgctgacttattctgtgcagaacagcgataagaacggttacagtgctgccagtatcagcgctaccaaggcactgaagaaaatggaagagccactcaccgaggacgaagttaaggcactggcagagcgcacgactcaactgctaaacgactccaaccctaacactccagataacgttaatgctcgccgacaggctgatgaggattataagcaggaagtggcacaggcaatggctcgtcgcaatgatcgtattcgcgccactggtcagatgttgcctggtgatgccaagcgcgtaaacggcaaggtagaaggtcccgcaggcgaaattgaccgccttaagtcgcagatctccctctaa

SEQ ID NO: 427297 - DNA, 465 bp, Serratia marcescens
atgaactatcaacatctatgttcaatccaaccaaaagcatacgggactggctcgctgggacgtcatatgcagcgtctggagcggttgtcacaggcagaggttgatgttattccggcggtcgatagtcattctgacgcccacaagatagcggtaagccaagaggccaagagcaatcctgtgctggcgttgcggcttattcagcaaggtaagccatatcagcaagtcatgcagaagctccagtccagcactcgtcaccttagccgattcactcagcggatcatggcaaaaagctatccaggctgggagtgtctcgacaccgaagatcaaaacgtggcggccttccaatacagcatgctgcataacgacggtaatggttatcaggccgggctcaaggcggcgctggtggccctggataaattcgtagagccgctaacgctggaagatatcacgcgcctggccaattag

SEQ ID NO: 427298 - DNA, 1821 bp, Serratia marcescens
atgggtaattcatttgattttgagctgacagcaaaagacgaagcctcggcttctatccagcgaattgaggaggtagtaaagaaccttaatccactgctgaataagacacgtgatggtttggcgctgggtggacaggagtccagagacaagttagaggaactaggtggccagtttgacgtgttggcccggaatgcccgcactggtgtgcaatttgtcggtgatctggtcccgccgctgaaaatggtcggtggcttaacattggggcttggtggtgctgctgccgcggttaatgtcgttagaaataatctgactgaattcgccaatgctggctatcgcatcgatacgatagccaaaaacgtcagtatgacggctgatgcctttcaggagctgactggcgcgatgattgaaaacggcagcgcccgtgaagctgcagagagctctgttgtcgatttgttcgagaaagcaaatgacgcagcccatgggcgcaataaaccatttcttgccctccttaaaacgaatgacatagatatcagcctgacgaaagaaggcctggcggatgttgaaaaattaaccgaagacattaaccgcaaaatgcagaccttatcaccaggactgcaagcgttgtttagcaataagttaaatatgtcgccggagttgctcagctatctgcgcaacaccactaatgaagtgcagcgactgaaggatcaggctcgccgtgatggccttgtttggagtggcaaggatctgcagaacgcggcggcgtttaagcagcaactgaaccagatcagtgccgcctatgacggtatgctgatgaagggtcaggcgtggttgggacagtcggaaaccataaaggcgtctgttgatcaggtaacgcagatcatgtctcacggcctggacagcgctacggtaggttcaatatttacgctcaattcaggaggtaaacaggctgatctgctccgtaaggcgaaggatgacaaacaatttaaagacacactgtcatggaaagagcagatggatttaaatattggttacgcctcggaagacctaatcaaaaaactcaacgggtattacaagccggtttggcgggcggatcaactgaggaccgatttagagggaatgtcactcccaacacctcaaaatgttatcaaccctcttgaccgtgcgttgggcaatactcctgaacagcagcgtttgtcccagctagagacacgacacaatctcccaccaggcttgctggataaagtttgggatactgaatcttcacgggggaaaaaacttttttcaccagcgggtgcagaaggtccattccaattcatgcctgccactggcagggattatgggcttaataatcgttctgatcgaatggacttcaacaagtccagcgatgcggcagcaaggtatctatccgaccaattgaaaagatttggcggcgatgtaaggaaagccgttgcagcatataactgggggccagaccgggttgataaactgggattggatagagctccgcgtgaaactcgcaactatttacagcgaattatgcctgggttaccagctttctacccacaaggtgagacattcgatgccaacaatcctcagcagtcaaaggaaaatcctaactcgctcttcagcgggcccgccaatcatggcgatacagttggattaaaccaggaccttgtgtcagctatgacatcgctcaatcagacaatgcaggacagtaagatgcagatagaactaacgctgattgatagcaagacaggtgaacgcaagaccattgttggtggcggtggggggcgagtatcaacttcaatgccgttttcttag

SEQ ID NO: 427299 - DNA, 585 bp, Serratia marcescens
atgggtctgatgagcgtaagccagtatgcaaaacacgccggtatgagccgccaggcgttgtacagctgggaggccaagcagggtttcccggcccgagtggagggcaagatcgatcaggtggccagcgacgcttacttggctcgatatcgggatagtcatgatctgcgcacgaaaaatgcgaagggcaaactggcgccaaccagaggtaaagctaaagcgggtaacgagctgatggaaatgagcgtaaccgatatcaagcagcatttggcttcatgtgtcggtcaggcggcagagatggagcagggcgagcgcgtgaagctggcggccaaggctgtgggtctctttttgagtgaggggcctgataaccctcctgtgacgtttgggggctatcgcctctcgatcgttgaaactccaacatgtgaagttgggcagatcatcgctggcggcgcttttgggctatctgatgatgaggtgatttttgagtgtcgggattacaccctgatgctgatgagcgatgaggcagaggacagcgccatgcgcgaagtgatcccttcgctgctgtatgtactgtctgacgataactag

SEQ ID NO: 427300 - DNA, 189 bp, Serratia marcescens
atgttaagccgtgatgctattgagaaagccattatcagtgccgcaagacttcaaggtctggaactaaacggcaaagatctgctggacctacgcactggtgtagcggccaccctggcgagcaacgggcgataccggcaacgcatgaatgcgccggactaccagtggaagaaaccagagtcgaaacggtag

SEQ ID NO: 427301 - DNA, 777 bp, Serratia marcescens
atgcaggatattctcaatgattttcaagatgatgcagaaagagcaaggtatcttgaaggaatgcttgtcaaccaagcaactggcggtgcagttaataacattgaatatcaaaagcttaggcaatacttcatccaatcaccgtcactttcgcctcttctacctagttttgttcgaacctgtagggatatcactcagttctggcagtttataaaaagaaaatttgatacctacgccgagcgtagagagtttctttgggaagaattttccgcactactcgactttcttgaaggtaggctttctacgcctgcggacagtgctatatctgatgggctgaaaacattcgattcagatggagttcacttagtttggcaaaaggctatcgacagaagacataccgatccggaaggggcgataacaatagccagaactctacttgaaacagtctgtaaacacatattggatgacttgcaaatcccctacaactcaaaaaatgctgagatgcatgaactatataaactcgtagccaaagaactcaatctctctacagatcaacactctgagagtatttttaaacagatccttggagggtgttctgcaattattaatggccttggaacattacgaaataaacttggtgatgcacacggacaagggaaatctcccatcaagccagctccacggcatgcggaattagcagtgaacttatcaggtacgatggctatatttctgataaatacttgggataataagaagaatcacgataaaacctccgtttaa

SEQ ID NO: 427302 - DNA, 882 bp, Serratia marcescens
atgccttggatccaactcaaactgaacaccaccggcagccaggcggaagacctgagcgatgcgctggtggaaagcggcgccgtgtcggtgaccttccaggacacccacgacaacccggtgttcgagccgctgccgggtgaaaccctgctgtggggcgataccgacgtgatcggcctgtacgacgcggaaaccgatatggccgaagtggtggcgatgctggaacagcacccactgctgggcgccggtttccgccacaagatagaacagctggaagacaaagactgggagcgcgagtggatggacaacttccacccgatgcgcttcggcgagcgcttgtggatctgcccgagctggcgtgacgtgccggatcccgacgcggtcaacgtgatgctcgatccgggcctggcgttcggcaccggcacccacccgaccacggcgctgtgcctgcagtggctggacggcctcgatctggccggcaaaaccgttatcgacttcggttgcggttccggcatcctggcaatcgccgccctgaagctgggtgcagcgcgcgctatcggcatcgacatcgatccccaggccattcaggccagccgcgacaacgcgcagcgtaacggcgtttcagagcgtctggagctgtatctgccaaaagaccagccggcggacctgctggctgacgtggtggtcgccaacatcctgaccggcccgctgcgcgagctggcgccgctgatcggctgcctgccgaaggccggtggtcatctggggctgtccggcgtgctggccagccaggccagcagcgttgcgcaagcctacgaagagaagttcacgctcgacctggtcgccgagcgtgaagagtggtgtcgtatcaccggccgccgcaagtaa

SEQ ID NO: 427303 - DNA, 249 bp, Serratia marcescens
atgaaaaagactcacctgctcatcgccggatcgctgtttttcctctccgcattatcacaggcggccgtaacgattaacggcgaatccgtcgctcccggcagccacaccgtcgacagttcaggtaaaattacccaaaccggcacaaccgacggccagggcaacgccgccggcgttatcgttggcgacggcgcaaattcaacgttgtgcgccaatccgttcttcaaaaaagtgctgcctcagtgccgttaa

SEQ ID NO: 427304 - DNA, 609 bp, Serratia marcescens
atgaaagaagaaatcaacattttcattcaagacaacaacgttttttttgccaatggcattaaattcgcgctgatggactatttccgccagcaagaaaggaaaataaaatttatccgccagaacgactatggtgctcggatagatttcgcctttatctcggcgccgctggccaaacgaacctgttactgccatacgttgccgcacgccgtccatcatgacacccggttttttaccatcagggagcggcaacatcacagcctggataatcttccgaaatgcgcactggaatgtggcaccttataccgtcgggagcccggcgatgccattgttcaactgctggaaaacgtggtggataagcctttcaccggcaggcgtgagcagtgcaaaacgtgttccggcaagcggttgacgcggcgggaaagggaagtgctttcctatctgtgcaccggagcaagccaaagcaaaaccgccgaatatatgcatatcagcgtgaaaaccgtgcatgcccataagcaggcgatgatgaaaaagatggatctgagacgaaaacaggactttatctattgggtgctaaaaaaccggactcatggcgcatttcagcttgaatag

SEQ ID NO: 427305 - DNA, 825 bp, Serratia marcescens
atgaaagctggaatcctatcaataatactttatttatgcattggcgttagcaataacgctttcgcttactatagcatgtacccttcccctcctctatacaacgttaataacgagacaatacgtcaaagtttcactttgggttattgggatcccaaggaccctcgcttatttccatgcggaccacggcctaccggcaacccagaattattctgtgacttcagattaattatttccacttcaagaggagagacaatagaaactgtagaaaaccaggggtttgttgtcgtcgccaactcaggtttcaagacgtttggtgagcttgccgctaacaatctgaatataaacactcagaatgtttttgtggtctatcgacgcaatctatgggagcctgggctatgtgccagactcatggtgaataaggttcctatcgagggaaacagctgtgtacagcttcccccagtagacagcggggtttgtgattttaaaaccagttatatcacattgccgcataatattgtttatcgcgatgcgattgatggtaacaaagctgcggcaacgataacgatagactgtgaacataaaccgtccaatatacgcatcaagttatttgaagccatgacaaaaagcaacgaagtcaaactgcgtccggatggcagcctgttttctaaattaaagataaacggtgttgatggtgagacgggcattagcatttccaatgccataggctctcatacgtttgagataagctcgacactacgcagcgtcgggcagcccgcaactggcgccttctccggcagtggcgttgccgttatggagtattactag

SEQ ID NO: 427306 - DNA, 522 bp, Serratia marcescens
atgcgctcatgtagctataacccagccaaccgccggagaaaaatacatcccgcgttgttcacggcacttctgacttgctgttttttcgctcgggcagacattgcagtatatatctctgggactatcacggctcccccttgtgtgattaatgctgatcaaatgatcaacgtagactttggtgacagccttgtcaccacccggatcgatgaagacgccgccactgggcagcagaacgtaaaaaccattgtctatacgctgcaatgcgaccggaatatcaaggcaagaatgaaaattttgggtccgccagccccctttgatccacgtttgttagctgccggacaagataatttaggcattgcgatacgcatagataacaaggtgatagaggtaaacaacaccgagtatgaatttacctatccgaactcccccaagctggtcgcgttgccggttaaagcagcgaatacagtactggaaggaggtaggtttgatgtcggtgcaactatggtactgagcttcccgtaa

SEQ ID NO: 427307 - DNA, 534 bp, Serratia marcescens
atgggcaacaatatgatttcgctgggcggtttgctcatcaccctgctggtggcctcttacggcgccactgcggcggagaattttaagctgcatggcgcgttggtgactgaaccctgctcgctcgaagccggtgacgagaatatcgagctggatttcggcagcgtggtggataaatacctgtatcagcaccagcgcaccaacagcaaatctttcaccctgcgcctgatggattgcgatatcagcctgggtaacacggtgcaaatcagctttagcggggcagaaaatcctgcactcccgggattgctggccctggccggcggcagtggggcgcaaggggtggcgataggattcgaaaccgcttcggggcacgcgctgccgctcgacgcctggagtgcgcaagaggcgctgagcgacggtgacaatatgatggcgttaaaggcttatattcaggcagaacccaatgccattgccaataaaaacatccagctgggtgagttccatgccgtcgccaccttcagcctgcgatatgaataa

SEQ ID NO: 427308 - DNA, 489 bp, Serratia marcescens
atgaagcggtcgcggttggcattattactcctgccgttcatcggcggcatgattgcacaggcaacagccgccgagaacatgcgcttctccggcaccctgatcgccccaccgccctgcaccatcaacaacgggcagatggtggatgtggattttggccagcgcgtcggggtgaagaaggtggacggcaaaaactacctgcaggaagtgaaatacgagattaagtgtgaggatggcatcagtgggctggtattggggctgacggtcatcggcacgcctgcgggttttgacgatgcggcgttgaaaacggatatcaccgatctggggatccggatactgcgtgacgggcagccgttcaagctgaatcaacgcgttgccattgatgccgaaaacctgccggtgctgcaggccgtaccggtgaaaaaacccggcgtggaactcaataccggggcattcgtcgctttggcaacgctgctggcggactatcagtag

SEQ ID NO: 427309 - DNA, 648 bp, Serratia marcescens
atgcaagatacaaacaacaaactgggttgcctcgactggcagtactacctgacgctggcggcgctggttgtgatgatccccctcagcaccgttaccgcactgtggctgctgcccgaagcgcggggccagacgccggatggccactatgccgacggcagcagcggcgtgttgtacgtgcgcggcgcgctgaccgaaagcgcctgccggctggaaatggccagtgcgcggcaggaaatccggctgggcgacgtcgccaccgggcggttgcagcaaatgggcgatcgcggcacaccggtgacattccggctgcagctgcaggattgcctgcgcagcccggtgggcgggcgggattaccgtaccggcgcactggcctggaccccacagcagccggcggttgcagtgagcttcagcgcgccggcggatgcggataacccgcaattggtgcgggtcaacggcgccggtggcctggggctgcgcctgttggacgccgccgggcaggacgtgcgcctgggcagccgcgggcggccgctgctgctgacgccggggcaaaacagcctgaactatacggtagcggcggaaagaacggcggcgctgctcacccccggcgcctatcgcgccacggtcgattttcggttgagctatgactga

SEQ ID NO: 427310 - DNA, 765 bp, Serratia marcescens
atgaagatgaaatcggtaatgcccccctgcaacctggccctgctctctgtgctgggcgccctattgacgccccaagcgcaggccgcgattgcgctggatcgcacccgcgtggtgttcgacggcgggcaaaactcggtgagcctgaacatcagcaaccagaacaaacagctgccatacctggcgcagggctggttggaagatgaacagggcaacaaaatccagagcccgctggtggtgttgccgccagtgcagcgggtagagccgggcaagccgagtcaggtgaagatccaggcgctgccggccgcgaagcaactgccgcaggaccgcgagacgctgtactacttcaacctgcgcgaaatcccgccgcgcagcgacaaaccgaacaccctgcagatcgcgctgcagacgcgcatcaagctgttttaccgcccggcggggatcatgccgacccaggcgcagatggccgtgccgtggcaggagcagctgacgctgagcaagcagggcgacaagtatcaggtaaacaacccgacgccgtactacgtcacgctggtggatgcgggcagtaaaaaaggcgttccgggcgtgaaagactttgcgccgctgatggtgccgccaaagggttctgcggcgctcggcgtcaatgcggctgcactcggcgccagcccggtgctgacctatatcaacgactacggcggccggccacagctgacttttaactgcagcggcagcgcctgccgggtcgcgccggaaaagagcaagtcctga

SEQ ID NO: 427311 - DNA, 2541 bp, Serratia marcescens
atggtgttttctttcacagggaagcggtttcgcatacgtttattaaatgtctgcctccttctggcatacggcggtgttttatcgccggcttatgccgaagacggcattcagtttaataccgacgtgttggacgttaacgatcggaaaaacatcgatctgagccagtttacccgtagcggttacatcatgccgggggcttacaccatggcggtgcatctgaacaaaaacgaattgccagagcaaagcatctacttttatccgccggataacgatgcacagggtagtcaggcctgtttgcccgtggcgctggtggaaaaattgggtctgaagcccggtatgcgggacaaattgacctggtggcacaacggcgaatgcctggatccctccagcctgaagggcatggaagcgcgcggcgatctagcgacgtctgcgctatacctgagcatcccgcaggcttacctggagtacaccgcggaaaactgggacccgccctcacgctgggatgaaggcatccccgggctgttgtttgactacaacctcaacggccaggcccagcgccaacagcataacggtacccgcagctacaacctcagcggcaacggcaccgccggcgccaacctgggcgcctggcgattgcgcgccgactggcaaggccggattgaacaccaaaccggttccggccaaggcaccgagcagcggctggactggagccgttactacgcctaccgcgcgctgccggcgctgcgttcgcggctgacgctgggggaggattacctcaactcgggcctgttcgacagtttccgtttcagcggcgccagcctggtctcggacgacaacatgttgccacccaacctgcgcggctatgcgcccgaggtggtggggatcgccaaaagcaacgcgcgggtcattatcagccagcaggggcgggtgatctacgaaacccaggtggcgacggggccgttccgcattcaggacatcagcgaagcggtatccggcgaactggacgtgcgggtggaagagcaagacggcagcgtgcaggcgttcaagataaacaccgccagcatcccgtacctgacgcgccccggatcgctgcgctataagctggccggcggccagccgacggattggcgccaccgcagctacggccccatgtttggcaccggagaattttcctggggggtgagcaacggctggtcgctgtacggtggcgccctgttcggcggcgattacaacgcgctgtcgctggggattggccgcgacctgatggcgctgggcgcgctgtcgttcgatgccacccaatcgcgggcgcgcctgccgcatcaggacggcacactcagcggcggttcatatcgtctgagctattccaaacgcttcgacgactacgacagtcaggtgacgttcgccggctatcgcttctcggagcgggaatttatgagcatgagcgaatacctggatgcgcgcaaacaaaactatcgaaacggcaacagcaaagagatgtacaccgtcacctttaaccagcagttccggaatatcgacctgagcatgtatctgaactacgaccaccagacctactgggatcggccggtgaacgatcgttacagcctgacgttgtcgcgctatttcgatatcgggcgcttcaggaacctgagcgtgtcgttgatggggtaccgcaacaagtactacggcaccaacgacgatggcgtcacgctgtcgctgtcgatgccgtggggcaacaatgccaccctgagctacaacgcgacggccaaccggcgcgacaacagtcaccgggtcggctattacgaccggattgacgagcacaacaactatcagctgagcgcaggcaccgcacgccagggcgtcaacatgaacggttattacacccacgaaggggatatggcccaggtcagcgccaacgccagctaccaggaaggcagctatcgatcgctcggcttcaccgcccagggcggcatgacggtcactccggaaggtggcgcgctgcaccgcaacggcatgccgggcggcacccgcctgctgctggacaccgacggcgtggccggcgtgccggtgcgcggctatggcagcaccgtggaaaccaaccgtttcggcaaggcggtggtgagcgacgtcagcagctattaccgcaacagcgccagtatcgacgtgaacaagctgcgagacaacgccgaagccaccaagtccgtggtgcaggctaccctgaccgaaggggctatcggctaccgcaagttcgatgtgattgccggggagaaggcgatggcggtcatcaggctggcggacggcagcacgccgccgttcggcgccacggtgatgaacgcgaaaaaacaggacacagggatcgtcaacgacggcggcagcgtctacctgagcggcatccagccaggtgaaagcatgacggtgcactggaacggcgcggcgcagtgcgccatcaagctgccgaacacgctgccggaaggcgaattgaacagcctgctgctgccgtgccgtacgcagccggaaaacataaaccctaatttgaatcagtaa

SEQ ID NO: 427312 - DNA, 546 bp, Serratia marcescens
atgaactattttccgggaaaaacagtactcccctgcatattgatttctgtatcgctaaatcacgccgcgttagcagccgacttcaccccattccaggggcacgtcaatatgcaagggactattttggatgccgcctgcgccattgccgccggaagcagagagcaggttatcgacctggacatatttccgacggcggaaatcgtgcgtaatggccagggcatctctcatccgttctcgattgagctgattaattgcctgctcactgcgtcagaaattgaatcacagaattcacagcgttttcaaatgaccttcgatggcgaaacggacggtaagtcatttagcgttcagggtgaagcaaaagggattgcattacaaattatcgacgaccgcggaaatatcgccacaccaggggcaccattatcgcatgaagggttttcgctaaacgagatgcaactgagttatagcctgaggttaatcagcaataaccagccgctgcatgccggtgcttattcatccgccgtacgttttaaattggattattactga

SEQ ID NO: 427313 - DNA, 558 bp, Serratia marcescens
atgaaactgaacaaaattatgatggcagcggtattggctttcggcgcgacctccatgatggtgaacgctgcacctaaagatcagggtcacggcaccgtgacttttaaaggttccattatcgaagctccttgttccattaccccggaaaccgtggaccagaccgtcaacctgggccaggtgtccaatgtcgtgttgaaagatggcggccagtcttcgcctaaatctttccagatcaaactggaaaactgtgatctgatcactgacgatcaagatccgggtaaaaacaataccgtttccattaccttcaccggcgcagcttctgctaccgacgccaaactgctgggtatgacgggtactgcgaaaggcgccggcattgcgattaccgacggttccggcagcctggtcgaactgggcaaagcctccagcgcgcagaccctgggcagcggcaacaacaccctgagcttctccgcttacctgcagggcagcacagcctctggcgccaccatcaccccaggtgatttccagtccgtcgccgactttaccctggcttaccagtaa

SEQ ID NO: 427314 - DNA, 777 bp, Serratia marcescens
atgaaatttataataaatgaaaccattgtttataatgagggggagggcacgcttgagcgggtaaatgatgacggcagcaaggctttgctgcaaaatccaacccgccgtctgctgtccatttttgttcgtaacaatggggagattgttcaccgggaaaaactgttgagtgatgtttgggaagagtacggtcttaaagcgtcaaacaataacctaaatacctatgcctccagtttgagacgttcgtttgccaaattgggggaagacgatattttaattacctatccaaggcaggggtttaaattttctgccgacagcatcagggaagagaacgctcccgtgaatgctgatgatgagagtgcaagtgatcctgtacaacgcttcggatggcgtaaaggtgggtttagaggtgataagaaaggcatgggtgttgttgtgtgtgccttgacgatttttattctgttggcgttgctgttgatggaaatcttcctctttatgggtagaatgagccaacaatcggcggcaacgatgaacattgctcgaaaaggtttttataaacgctgtgagatttacattatcaagaatgagagtgcggacctgggtgagataggcaaagcgatttctcaggcgggttttgattgcagtcagagcgcgaatgtctattactatggcagagtcgaaggacagagaatgatgctggcctattgcccagtagatgtgctttcaccctgtaaaaactcgggtgctgaactacaacccaagaatgggcgtagaaattaa

SEQ ID NO: 427315 - DNA, 270 bp, Serratia marcescens
atgttgtttagcggcaagatgcaagagggagaaaaatcgtataccgtctccagagagctgcttatgcaatatgattacaacgatacgtattaccccatgacagtggaacaaagcatcaccagggccagagataccctttcacaaactcagctggataagctctttccacgagaagggcaatacctgcatatcaagatcgaccgccttgacgaaaatacttacgctttttcagacaatcattcccctatgttcgtctgcaccacaaattaa

SEQ ID NO: 427316 - DNA, 780 bp, Serratia marcescens
atgaaatttatcattaataagagaatcaggtatcacgaggataattccagcatagacacgctggacgactcggcggaaccgattattctgacggctacgctcaaccggctattggcgctgttcgtcaaaaacaacaatcaggtactttccagagaacacgtgttggcgaaagtttgggaagaacacgggcaggtcgcctccgacaataacctgaataactcgatgtcggtactacgcaaaattctggctgcgctcggtgaagaagatattctggtcacgctgccccgacaaggtttctcattcactgcaaaagaaatcaatacgatagatgatcaaacgatcattaatgagcaagcaagtcccttccaggccgccgccgccccatcttctcatcctcgactcaaggctgcgctattgctgctaacgctcttgctcagcggatggctggcatttctgttgctgacctataaaaataacgccggtatctctccggatgactctttggaacttggcacgattgaccactgccaggtctacatcatgtcgccgcatcataaggtttcccgcaatcagctggatattgaaaaggtggcggacaaagcccgacagttcgggctggactgccacatagccgccaaactctactattacgacgtcggcctgctcaccagagggaacggcggcaaagttcaaactcgttttatcgcctattgtccgctgacacctggcaccggcaagatcttccgctgcgaaaattattatgaaaatgaaacgatttaa

SEQ ID NO: 427317 - DNA, 942 bp, Serratia marcescens
atgaaaaaaatcatactggactgtgacccggggcatgacgacgccatcgccctgctgctggcctggggcaatccgcagatcgacctgctggcggtcaccaccgtggtgggtaaccagacgctggacaaagtgacacgcaatgcgctggcggtggcgcgcatcgccaatatcaccggcgtgcccttcgccgccggctgcccgcgcccgctggtgcgcaatatcgaagtggcgcccgacattcacggcgattccggcctcgatggcccggtgctgccggaaccccacctgcagctggactcgcgccacgcggtggatctgatcatcgataccgtgatggcccacccgcccggcagcgtgacgctggtgccgaccggcggcctgaccaatatcgccatggcggtgcgcaaagagccgcgcattgccgagcgggtcaaggaagtggtgctgatgggcggtggctatcacgtgggcaactggagcgcggtagcggagttcaatatcaaaatcgaccccgaggcggcgcatatcgtgtttaacgaaaaatggccgctgaccatggtcggcctcgatcttacccatcaggcgctggccacgccggcagtctgcgagcgcatcgccgctctcggcacccggccggccgccttcgtcggcgaactgctggcattctttggccgtatgtaccaacaggctcagggtttcagcgccccgccggtgcacgatccttgcgcggtggcttacgtgatcgatccgagcgtgatgacagtgcgcaaagcgccggtggatatcgaactgaccggcaccttgacgctgggtatgacggtcgcggactttcgcgcgccgccgccgccggattgccacacccaggtcgcggtcaagttggatcaggataaattctgggatctggtggtggatgcgctggaacgaattggcgaggtggagtga

SEQ ID NO: 427318 - DNA, 783 bp, Serratia marcescens
atgcgcaatgtccgcattgatgacatcgaccacgtaacgcgcgcggtgatcgccatcggcaccgactacccgccggggcatctgttgccgatgcacaaccaccggcgcgcgcagttgctgtacggcgccaccggcgtcatgcacgtattcacccagcaaggcaattgggtcgtcccgccgcagcatgcggtgtggctgccgccgcagatgccgcacgcggtaaggatggtcggcgtcaccacccgcagcctatacctcgaacccggcgcgttgcccgccgaacggccgcaggtctgccaggtggtcagcgtcaccccgctgatgcgccagctgttgatggcggcggtggatatgccgctggagtatgagcaagacgggcgcgacggggcgttggcggcgctgctgctgcacgagctggcccggctgcaacccttgccgttgcacatcccgctgcccgccgatcctcggctgggcgagctgtgccacgcctttttgcagcaccccgacgcccacgactccgcgcagcggtgggcgcctcgtctgtacatgagcattcgcaccttcagccgcttctttcgcgcgcagaccggcctgccgttttcgcaatggcgccagcgcgcctgcgtggtgctggcgctggcgctgctggccgaagggcgcagcgtaacgcaggtggcgatggaaatgggatatgacagcagcgcggcgttttcaaccatgtttcgccgcgtgctggggcaagcgccctcctcctatctgacggaagacgggcgcgacggttga

SEQ ID NO: 427319 - DNA, 480 bp, Serratia marcescens
atgaaatgctccatttccctgttggccggcgcactgctggccgtcagtttcagcgcttcagccatggcgctggattcgcaggaggtcggttacaatatcgaagcgcgcggcgcgcggccggtcgtggcacagttgggcaaggccgggcagttcagcgccgtggaaaacagcatccggctgggggacgacagctggattgccctggcgcccaagctggccggcggcggcaatgccggctttaccgccggtatcaaatcggcgctctccgcagccctgatttacaatccggcggcggtgttgcaggcgctcaacaaaggtaacgatctgccgctcaatgacatttgcaccgcgccgccggaagtgcaaggcgacaccgccatcaccagtttccgccagcgcgcaacccgcgccttgtccaccgtacgcgtaggcgatctcagcgcaccgcgcgatgcctgcattgccgccttgaaaggctga

SEQ ID NO: 427320 - DNA, 1062 bp, Serratia marcescens
atgtcgataaaaaaacaacctgacggcaagtggctgttagacttttatcccgaaggcaaacccaaaggtaaaagcagtaagcgtatacgcaaaacgttctccaccaagggagaggccacagcctatcaaaaccacatattagaaaatgttcacatcaagccttggctcgatggaaaagaagatcgccgcaaactgaaagaccttgtggtgcaatggtttgatgagcatggcgttacgctagatgacggtgaaaaacgcaaaggcgcaatggagtttgcctgtgacagcatgggtgatcctttcgctcatgagtttgactcaaccatgttttctatttatcgaaaaaagcggttgtccggcgagatagtcagaacagcacgggtaaagcaggtttcaccgcgcacgatgaatctcgaactggcatattttcgcgccgtatttaatgagctaaaacgtctgggtcattggaaacttgataaccctctagcaaacgtccgccccttcaaatcggaagaggcggagttagcctatctcgagcaagaggaaataaaccgactgttagaacagtgtttaaaaagcagaaacgacagcacattttgggttgcttgtgtatgtttaatgactggcgcgcgttgggatgaggctgaatcattgaccacaaagcagattaaaaatcttaaaattagctttttcaaaactaaagggaataggaatagaaccgtcccaataagcaacgaattttacggctcattgccgaaaccggataagcccggtaggtatttcaaaccatgttattctgcttttcgcaaagccgttgaacgtgcggagcttgaactacctgacggacagctttcacacgttttgcgccacacattcgccagccattttatgattaatggcggaaacattctcgtactacaacgcatcttaggccataccgacatcaagatgacgatgcgatatgcgcacttcgcacctaaccatttacaggaggcgaccacccttaacccattggggaaaaacgtcccctttctgccccctcagaactcaaaccaccaataa

SEQ ID NO: 427321 - DNA, 624 bp, Serratia marcescens
atgttaatcttccaaatagggagattgcaagggaaagttttcatgagcctacagattgacttctccaaggggagtattgagacgctggataggatccttgaagcgtatggtttcaagaccaaattagctttagccgatcaccttggcattgccagcagtagcttggccaatcgctataggagaggttttttccccgctgacatcgtcgtgcgctgcatggccgagacaggagccacattggaatggctcgcaactggccaaggccgcaagttctacgacgaagaactggatatgatgcacttgcatcgccaaaagctggccgatggacagttgattgacgctggaatggcaagattagacaaagtctttttcaagtctgggtcagctctacctactgatccggtttgcatccaagatgtcaaagctcaatacattgttgaccgctcttttactgaagtttttgacggtgaatggctggtcagtattgaagggaaaataagcattcgaacgctggttcgtatacctacaaatcgcgttagagttggcggtgttggtatgtcctttgactgcagcctagatgaaatcagcgtattaggccgggtagtaatgacaatcacaaattaa

SEQ ID NO: 427322 - DNA, 222 bp, Serratia marcescens
atgcgccctaacattacaattgccattacaaccccatatctgccgatcgatgagtattgccgtatcactggaacccctataggaacggctcgcgacatggtgcgtgacggccgcttgcctatccgtggcaagggtgataagccaaaagcaagggttgaaatcaacatggctgcattaactgtgcaggcattgagtgaatgtaagatttcgcttcaggcgtaa

SEQ ID NO: 427323 - DNA, 510 bp, Serratia marcescens
atgtttgattatgacgtttccaaacatccacattttgacatcgcctgtcggcagtttgccgttcgtcacaacctcgtaaagctgggtgaggttacaggcattaagccacagacattgcgcaacaagctaaacccagagcaaccgcaccagctcacttgtgcggagctattggcgcttactgatgctactgaagacgctggcttgctcgatgccttgctggcacaaatcaactgcatgccgtccgtgccagtcaatgaggcttgcgccgggaatattccaacgtatgcactgcaggctacggccgcagttggcaacgttgccgccgctgccgttcagggcgaccacaaaacgccggtacgcaaaagcgcactgcttgaaagcgtcaacacggcgatccgccatttgtcgctgatcggcttgaccgttcagaaccgcatccaatccaccccggctctggcctccaccgttgacgtgatcagcgggctgagtgctgttgctggtttaagctga

SEQ ID NO: 427324 - DNA, 303 bp, Serratia marcescens
atgttgttggctactgaaacacaaaaagcgatcggcattaagcgcatttcacagattaagcgtgagctgttcccgcataagcagaatcaggcgcaagaggcttttgataagtcgccggaacatatccgcagaactgtttgttttcatgccgggctgaaagagcggcatataaaaatgaagtttgcagaaatgagttattcagagcgtaaacaaatcgtgtgggcgctgaatgacctgattgatttatcaaaaaccttaccgcgatttatcagtgatgatgattgtgaattaaacgttaattaa

SEQ ID NO: 427325 - DNA, 312 bp, Serratia marcescens
atgactaacgtcgttgaagttaatgccactttcgccattattaaagttgaagcgcgagactctagcgcggaagctttaattttggctgacgtaaaaaccgataaagaaactaaaaagaaatattatccaacaagagcggtttactctaatgcgttaaagctaatttctgacctgattaatttatcagttaatcgaggtgtttttcttcagtcgattaacagcattagcgatgtcattaaggaatcgcaccgcctcgcggagttagggcgacaggctctaattcaactgaataaaaaatcggagttgcactaa

SEQ ID NO: 427326 - DNA, 225 bp, Serratia marcescens
atggccgatttgatggactacgaacaggagcggcaagcgctggtactaaacgcgcagatcgccaacgcccgcaaatcctctgcgctgccttctgcctttgtttgcgaagaatgtgacgctccgattcctgccgagcgccgcgccgccgttcccggcgttgatacctgcgtaagctgccagcagatccgcgagacgcaaagtcacctttacgcggggaaggcatga

SEQ ID NO: 427327 - DNA, 282 bp, Serratia marcescens
atggaaattaaaatcggctctgagtttgttatcaccagcgataagctgcaattcattcttaatacggtgaaggtagggaaaacaggaaaaagcgaaggtcaagagcgttacgaggctatcggctattatcctacgattaaccagcttgtgaacggccttattcatcaccgcgtccgcaattccagcgttaatagtattgcatcactgggcgctgaaataggtcgcattggcaacctgtgccaagaggcttttgcggcatgtgaggcggcgaaagctcaatga

SEQ ID NO: 427328 - DNA, 2217 bp, Serratia marcescens
atgagccaagcggctaccgcctacgtttacccatggaatgaaccgcgcccggctgttgccgggccggtaagaccgcttacccgtgaggaactcgctcaggggcaagctgttttaaccaatatccgccgcctgccgcgctttctcagcgccatgtttctgacgcgttacaccaacttgctcaagagcaaaggtctgcacgacgccaacaaatggttggtattccagttcgatcgccgcatctggccgcgtctgcaaacggtgagcgccaaaaatgcgatgaacctcgccgcgtcaatgcggttttctgctgaagtcgataactacgcagccctgcccggtatggacgacaaagagttacgccgccttgccgatcgggtggccggtcaacttctgcagaattacgaagattactgcgatgagtttgtggcggagaacggcggcgacaatgccggtctgttcgaagatgccgcacagtcagaattttatggccgcattgccggtatggcgcgcgcgttcaacatcaccccgatgcactggcgcaaataccgcaagggcaaactggatgcccggtcagcaattgccagcctgtcacggttggttaattccgagtggtgggaacgccagttgaaggcccagcgcacgcgctggcgcgaggcgttgctgatcgccctgggtaatgtgaaccgcggggcgtcgtcgtatgccagtaagcaggctattcgggatgtgaaagcgcgccgccagtccaattttgattatctgaacagccgcgagcttgagaacgtcgaaaccggcgaacgcttcagcctcatcgacaaggtgatggcaagtatctctaacccggaaattcgtcgtatggagttaatggcgatgatcgccggtgttgagcaggccgccgctatccgtggcgataaagggatgtttatcaccatcaccaccccatccaaatatcacccgacgcgcgccgtcggcaagaacagcccgaaggtgcattttaaccacaagtgggacgatgaagcctacacgccaaaagacggccagcgctatcttgtgaagctgtttagcaagatccgcacagcgtttaaagatgcgggcctgcaggtctacggcgtgcgcgttgtcgaaccgcaccatgatgcgacgccgcactggcatatgatgctgtttacctccaaaaaacagcgccagcaggtgatcgacatcatgcgccgttatgccatggctgaagatggggacgagcgcggcgccgccaaaaaccggtttgactgcaagcacctgaacaaaggcggtgcggcgggctatatcgccaaatacattgcaaaaaacatcgacggctacgcgctggacggcgaacgcgatcatgaaaccggcgagctgttgactgatacggcggccgccgtcaccgcgtgggcgtcaacatggcgtatccctcaattccactttatcggcctgccgtcgcgcggcgcatggcgtgagtgccgcaagatccgctctgtcagtctggctgatgagtttgacgaaaccgttgaggcggtgcgcgctgctgctgatgccggtgactttgcagcttacattctggcacagggtggccctaacgttgcccgtgacgatcagactgtgcgtgtagcccgccgggttgccgacgagcgcaacgcctatgacgaagaagtgcagaaaattgcggggatttttgccccgcacatcggcgccgatcacgtttatgaaacccgcaccacgcaatggcgcatcgtcgctaaagccgttgccgttgagcctttgactttgaaaagcgcctccggcgcgcctcggagtcctgtcaataactgtgggttagtcggcagcggtggtgccgaaaatacgcaggatggcgagcctgtagaggctgtggcggtgatggaacaccatccagacaccccaattgactgggatgacatgactgttgcacggtctgttatggcgcgtttacgggcagatgctccgcagataaacaggcaacagagtagcattgacccatttagcaggccggagccagctccttcagcaagattaaccactgctgaacgcgatcgcgttcccagaatttactcagagctggcactacacggcatcgagccaacacgctcggaactggaagcactggcacgaggcgctaaagtcaaatttggtgatatttcaatgcactatccagcggttaacgattgggcgggcttccaataa

SEQ ID NO: 427329 - DNA, 225 bp, Serratia marcescens
atgtatacagtaattgggcatcggagggaaagggtgcaagcagtggatgaagtggttgttttagaaagaattgaactcatcgcccgtctgggggtttgttatgagagccaagcgaaagacaaagacattgcactgatatggatttcagaactggcgggggagatgaaaaccagcattgcccctgaaaaagcagaagtgatcaggcaacttgccgcgatctcttaa

SEQ ID NO: 427330 - DNA, 231 bp, Serratia marcescens
atgagacgagatttaaacttagccggggcgtttatggaggcgcttaacttcaacgagaacggcaagggccgccgcataaagaccgttgatttcattcacgccgcaaaccggctcggcacacacctaacgcctggagaggcgaattactacatcaaacaccagtctggccatgtttttaaactgattgacgaggggcgttatcagcacaatacatacctttatctgtgttag

SEQ ID NO: 427331 - DNA, 918 bp, Serratia marcescens
atgctcagaattgaagatgtcaaaatgtttgtgcgggctactcagctagaaagtttttcccgcgtagccagagaggctggaatactgcctgcgcaggtaagtgcggcgatattgcggctggagaaaacgcttggcgttcggctttttgtgcgcaccacccgcagcctgagaatgacgcgtgagggtgcaacctatctcccctatgctcatgagatgctggaagtgatcagggctggaagcgaaagcctggaaaaacagacgggggagctcatggatgatctgcgtatttcaatgccttcagacgtcggcagaactactctgctgccgcttatcacgacgttctgcaaaaagcacaccggagtagcggtaaacctactgtttactgatatggtcagcgacgtacatcagaaccctgttgatattgccgtacgatatggaattcttccggacaaaagctacgttgctttgccactcgctgaatacaataaacgtgttcttgtcgcgtctcccggttaccttgaatatcatggtacgccgcagtcgctgcaggaaatcgctgagcgggattgtattctgtttacgctgaatggccatccctatgccaactggtccttttacaacaaccagcaaaaacacaccctctcggtgaaaagccgctttgtctgtaatgattctgaaacctcacgcaggcttgcacttgagggcgtcggtatcgcctacacgtcctggcttgacgtacatcaggatattactgaaaaccgtctggtgctggtacttcctcatcttacaggtgtagagaatccgcttagttttatttccccccaccggagccagctcacccccactgccagagcattatatgcagagttcaaatcacattttgatagtctcagtgtgcagtttccttttacggattag

SEQ ID NO: 427332 - DNA, 1002 bp, Serratia marcescens
atgaaagccattgtatacaaagataatcagttacccattgcggatgtgaattcactttatgaaacccgcctgagcaaaccacaacccggcagtcacgatctgctggtcaaggttgcggctatcgcggttaatcctgtcgacaccaaagtgcgccggaatgtcgccgtgactgaaccacgggtacttggatgggatgccgccggcatcgttgaggcagtgggcgaagatgttagcctgtttaaaccgggagatgaagtttactatgccggctctcttatgcgtgcgggctcctacgcggagtatgcgctggttgatgagagaatcgccgggcataaacccgcttctctttccatggcagaagccgctgcgctgcccctaacgtctctcactgcctgggagttgttgtttgaccgccttgaggtgaaggaaggtaataacgacgtgttgctcattatcggtgccggtggtggtgtcggctctatcttgactcagtttgcagccagtcttaccaacctgaccattgtgggtacctgttcacgccctgaaaccgccgaatgggtcaaatcgcttggcgcgcaccatattatcgatcacacccagccttttgcgcctcagttgaaagccctgggaattagcggtgtacgttttgttgccagcctgacgcataccgacaaacactataagcagatcgttgaagttatggcaccgcaaggaagacttgctgtaattgacgatccggagatgcttgacgctatgccgctaaagaccaaatcaatttcacttcattgggaactgatgtttacccggtcgatgtttaccactcctgacatgcaacgtcagcatcagatcctgatggatgtcagtaggctcatcgataaaaaggtaatccgcacaacactgggtgaacattttggaaatataacggctgaaaatattcgtcgtgcacatgccgtgatcgaatccggcaaagctaaaggaaaaattgtgctggaggagttttaa

SEQ ID NO: 427333 - DNA, 312 bp, Serratia marcescens
atgttatatctggtatttagcggaaaaattaaagaagcaaaagtggatgagttttatgaaaaagttgcacgtgtcagccagcaggcgacactgagtcaggacaaaccggtggtttatcagtggcataaaaatcttcatgacccacgcaactttctgctaaatgagcagtgggaaagtgttgaggatctgcatgcccatttcgaaacgttatacagcctgtttggtgaggcaaaaccaactgagcgacttcccgccgcgattctggattatctcgatgaggccaacgtcgcctattacgaactggtcgtgtaa

SEQ ID NO: 427334 - DNA, 1188 bp, Serratia marcescens
atgatgctgataaaatacgttatgcctgctgtcggtttattactgagtacttttacagcaacgatattcgctgcacaatccgaatatccggtggccccggttcaactggccagtgacaagccatcaggtaaagcggaagtgatggcattgttttgggatgctatgcctaccggggtaacagtgtcagaaaacgggcgcatattcgtgaacttcccgcgctggggtgatgatgtaccttttactgtcggtgagatcaaaaagggaaaggtggttccttatcctgatatggccattaatgttgcagacaataaaattccggctgaacgttttttgagtgtgcagagcgtggtggcagatggtcagggaaaactctgggtgctagataccgcatcaccaagcttcagtcagccggtggcgggtggggctaaactggtagcgattgacctcagcagtaacagggttgtaaaaacgatcgtgttaccgcagaaagtgattctgcctgcaacctacgtaaacgacctgcgcatcgattaccgcgtgggtaaggcgggaatcgcctacattacggattcttcgctttccggtacaggtggtattattgtcgttgatctggaatcaggtgaggcaatgcgccgccttaccggcgatccttccacctctccagagaaaggttttgtgccggttgtcgaaggcgaaaccatgctgcagcgtcatcaggatggatcaacagaaccctttagcgtggcgtctgacggtatagccttatcggcagatggaaagacgctctattacagcccgctgtcaggtcgtcatctttattcagttgaaaccgaaaagctgagagacagcaatatcagtgaacaggctctctccgccgctgtcaaggacttgggtgaaaaaggggcatctgatggtctagaatctgattcggcaggcaatatttacgcaggagattacgagcgaaatgctgttcggaaaatggataagcagggaacctggtcaacgctcgttcacggtccggaaattctctggcctgacacgctctctgttgccaatgacggatacctctacttcactgtgaatcaattgcaccgtcagccgggtttccatggtggcaaaaatatgcgcattaagccttataccctgatgcgggtaaaaatcgacggaaagccagtttcaacccgataa

SEQ ID NO: 427335 - DNA, 345 bp, Serratia marcescens
atgatgaataacacactgaaaattgacggccatacggccgtcatcaacttcgaccctgaaattgaaatgttccggggcgagtttgtcgggctgaatggcggcgccgacttctacgcctacagcgtggacgagctgaagaaagaaggcgcgatctcactcgcggtctttctcgatgagtgccataaagacggcatcgagccttacaagtcgtacagcggcaaagtaaccacccgcctgtcgccggaacgccatcaggcgttagccattgccgcacaggctaccgggcagtcgattaatgaactgctgaatgaaggtgttgatctggttatcgaaaagcattcctga

SEQ ID NO: 427336 - DNA, 1035 bp, Serratia marcescens
atgagcaaacgcaaaagccgcaaggcatttaccaccccggcgccagctccggcagcagagcagaagcaggattttgaggcgtttacctttggcgagccgtccgcggtgctggataagcgggaaattctggattacatcgaatgcacgaccaatgggaagtggtacgagccgccgatctcattcgacgggctggcgcgcagcgtgcgcgccgccgtgcatcatagctcgccgatgtacgttaagcgcaatattttagcgtcaacgtttatcccgcaccggctgttaagtcagcaggagtttagccgctatgcgctggattatctggtgttcggcaacgcctatttagaagagcgtcaaaaccgcctcggcgccccgctgcagctgaaatcctccccggccaagtacacgcggcgtggtgtggagcgcggcgcttactggtttgtgcaggactggaaagaggcgcaccgcttcaagaccgacagcgttttccacctgattgagccggacatcaatcaggaactgtacggcctgccggagtacctcagcgcgcttaactccgcctggctgaatgagtcagcgacattattccgtcgccgatattttgaaaacggctgtcatgccggttatatcctgtatatgacagatgcgtcacaaagtacggctgacgttgacagaatgcgcaaggccatgcaaaccaccaaaggtctgaacaacttccgcaacctgtttatgtacgcaccgaacggcaaacccgacggcattaaaattgtgccattgtccgaggtcgccaccaaggacgactttttcaacatcaagaacgccagccgcgacgatctgctaagcgcacaccgcgtaccgccgcagatgatggggattatcccgaacaataccggcggcttcggggacgtgaaaaaagccgctcaggtgtttgtacgcaacgagctaacaccgctgcaggagcgcatgaaggaggtgaacgactggatcggggaagaggtgattagattcgcgccgtatgagttgccgaccgaataa

SEQ ID NO: 427337 - DNA, 1809 bp, Serratia marcescens
atgcgagtcgcccggcgctttcgtagccttggcggcatgaatacgacacaggcaacaaccatcatcagcgatccgcgccgccaagctgccttgctctactggcagggcttttctgtgcgccaaattgcggaaacgctgaacctcaaggggccgaccgtgcagagctggaaactgcgcgataaatgggacgacatcgcgcccatttcccgcgtggaacaaagcatggaagcacggttgattcagctcatcatgaaagacgtcaaggaggggaaagacttcaaagaaatcgacctgttgggccgccagattgaacggctggcgcgggtcaatcgctattcggcgaccggcaacgaggcggacttaaacccgaacgtcgccaaccgcaacaaaggcgagcgcaagcccgccgagcgcaacgtgttcagcgaggccgccgtggagaagctgcaaagcatcttcacagaaaccaccttcgagtatcagatgggatggtatcgcgccgggctgcaacaccgtatccgcaacatcctgaaatcgcgccagatcggcgccacgttcttctttgcccgtgaagcgttgctcgatgcgctgaccaccggccgcaatcagattttcctgtcggccagtaaggcgcaggcgcatgtattccgcaattacatcattgattttgcccggctggtcgaggttgacctgaaaggcgatccgatggtgctgccgaacggcgcccggttgatgttcctcggcaccaacgtgcgcaccgcgcagagctacaccggcaatctgtatcttgatgagtatttctggataccgaagtttcaggagctgcgcaaagtcgccagcgggatgtcgctgcacaagcggtggcgcactacctacttttccacgccgtcgagtctggcgcattccgcttatccgttctggtcgggggaactgttcaacaaaggccgccgcagcaaagccgatcacgttcagctcgacctcagccacagccacctgtcaaaaggcgtgctgtgcggcgatgggcaatggcgccagattgtcacggttgaggatgcgctgaccggcggctgtaacctgttcgacctcgatcagctgtcgctcgaatacagcccggcagagtatcagaacctgctgatgtgtgaatttgtggacgataccgcgtcggtattcccgttcgccgagctgcaaggctgcatggtcgatacgctggaagagtgggaggacttcaacccttacgccgtgcggccgttcggctatcgccctgtctggatcggctacgacccatcggaagccaacggcggcgacagcgccgggtgcgcagtgatcgcgccaccaatggtggccgggggcaagttccgcgtgctcgagcgccaccagtggcagggcatgaactttgccgctcaggcccagaagattaaagaccttaccgaaaaatattgcgtggagtacatcggcatcgatgcgaccaccgtcggccaaggtgttttccagctggtgcgcgagttcttcccggccgcgcgggaaatcaaatacaccccggaaatcaaaaccgccatggtgctgaaggcaaaagacaccatcgggcgcggctgtctggaatacgacaccagccacaccgacattaccgccgcctttatggcgatccgcaaaaccatgaccgccagcggcgcgcgttccacctacaccgccagccgcagcgaagaagccagccacgccgatgtcgcgtgggcaatcatgcacgccctcttaaacgaaccactgaccgcaggcagcggccacagcagcccgaacattttggagttttactga

SEQ ID NO: 427338 - DNA, 816 bp, Serratia marcescens
atggcaaagaaagttactaagtttttccgcatcggcgttgaaggcgacaccgttgacggccgcgagatcggagctgcggatattcagcagatggccgcgacttacagcccgaaggtgttcggcgcccgcatcaatatggagcacatcaaggggattttgcctgacggctattttcgtcgttacggcggcgtggttgagctgaaggccgagaaaatcgacgagccggatgaaccgctgttacacggcaagtgggcgctgtatgccagtctggccccgaccgccgatctggtgtcgatggtcggcgcgggccaaaaggttttcacctcgatggagatccgccgcgatttcgccaagaccggcaagtcttatctggtcgggctggccgtcaccgatgatccggcgagcctcggcactgacatgctggagttcagccgtcgccacgagaacgtcgagttttccgcgccgctcgaagtctgtttcgacttcgggccaaacgctgacccggaaacctctttctctgcccgcatcaaagcgatgtttagccgcaagcaggccaccgacgatgtgcgctttggcgagatggaaggcgcggtgatgaccgtggccgagcagttgcaggaagcggacgcccgctttaccgagacgttagccgcaatgagcgagcaggttgccgacctcaagcaacaggtaaaaaccggtagcgatgcgttcagcgcgctgcaagcccagctttccacctcggaagatttcagccagcaggcccgcccggaggccaccggcggcaacagcgcgcaagacgtgctgaccgactgctaa

SEQ ID NO: 427339 - DNA, 1212 bp, Serratia marcescens
atgcgcaagcaaactcgttttaaatttaatgcgtttatgtcccgcctcgccgaactgaacggcgtcgctaccggcgatctggataaaaaattcagcgttgagccgtccgttacgcaaaccatcatgacccgtgtacaggattcctccacgttcctgacccgcatcaacatcgtgccggtgccggagatgaaaggcgaaaaaatcgggctggatgttagcggctccattgccagcaccaccgacaccgccggcggcgatgaacgcgaaacggccgactttgccacgctggacgccgacggctatttctgccagcaggtgaactacgatttccacatccgctacaacaccctcgacctgtgggcgcgttatcaggatttccagacccgcttacgcgatgcgattgtgaaacgtcaggcgctcgaccgcatcatgatcggctttaacggtacgcaccgcgccaaaacctccaaccgcgtcaagttcccgctgctgcaggacattgcgccgggctggttgcagaagtaccgcgagaacgcgccgggccgcgtgatgaataaaatcgtgggtatggacggcagcgtggtgtctgaaaacatccgcgtgggtgccggtggcgattacgccaacctcgacgcgctggtgatggatgccaccaataccctgattgcaccgtggtatcaggaagatccggagctggtagtgatctgcggtcgtcagctgctggccgacaagtatttcccactggtcaatcaggaacagcccaacaccgaagcgctggccgccgatctgattatcagccagaagcgcatcggcaacctgcccgctgtgcgggtgccgtacttcccggcggatgcgctgctgattacgcgcatggataacctgtcgatctactggcaggaagacacacaccgccgccatatggtggagaacgccaagcgcgaccgcatcgaaaactatgagtccatcaacgaggactatgtggtggaggattacgcctgcggctgtctggtggagaacatcgagctgttggccgtcaagccgaccgagccaaaaaccaaggccgcactgccgacctccggcgatgacattaaggcgctggccggtgccattgttgaagcggtgaaggttgccaccgccccagcagagccagtcgccgacgtgaaagatccggaggaagcaccggcagacgacaaagcgaaaggcggtaaataa

SEQ ID NO: 427340 - DNA, 660 bp, Serratia marcescens
atgaccagccctgcccgccgtcaccttatgcgccagtcagcggtcgaggccgcgcagcgggagaatgacccgctgcgccacgccaacggctatgaacggatgatgcttaaactcaatgaagataagcgaaagctcaaacaggtgcgctcacaagagcgtaaggccgaactcaagcgccaactgctgccggactatgccccctgggttgccggtgtgctggccgaaggtcgcggcgcgcaggacgccattctgatgacggtcatgatctggcgtctggatgccggggatattcccggcgcgctggacatcgcccgctatgcgctgcgctatcagctggcgccgccgggcaatttcgcacgctccacgccatacctcatcgcagaagacgtcgccgagtctgccacccgcgcctttgaggccggggagccggtcaacattgaccacctcacgcagacgatggaactcaccgacgcagaagacatgcccgaccaagtgcgcgccaagttgcacaaaatcaccgggttcgtcttgcgcgcggcgggcagggctgaactggcattgaaccaccttaagcgtgcgctgcagttgcataacggctgcggcgtgaaaaaagacattgaacggctggagcgggcaatacgcaccgccgccagccgctga

SEQ ID NO: 427341 - DNA, 492 bp, Serratia marcescens
atgagcaccgttgtgattcaacggccacgcccggacgcgccagcaccgcgcccggaggatgagccgatcgttaaaaacgtctttttctggccggacattgacccggcagacgtgcgcgacgtgatgcgcattgaaggcacaatcaccgccccgcgcctgcggatggcaattaaaagcgcgatcgcggaggtgaacgccgaattgttcactttccgccgcgaccagatggccgacggctatcagcggcttgaggatgtgccgggcgaacagctcgacggcgaaagcgtgcgggtgagcgaataccgcaatgccgttagcgcgatgaccatggcgacgctctcggagcaataccgcagtttcgacaccaccgccgccaccggcggccgcaaggctgatgtggttgaagcctcgatcggcgagctgtggcgcaacgcccgcaacgcgatcagtaacgtggccgagcgtagccactgcatcatcgggctgctctga

SEQ ID NO: 427342 - DNA, 204 bp, Serratia marcescens
atgagagtctacgccctgcagggcgacaccgttgacgcgatttgctggcgctactacgggcgcacgcagggcgtggttgagcaggtctattcgctaaatgaagggctggccgctgccggggcgattttgccccacggccacccggttgagctgccggacgtgaccgccgcaccgcagcgtgaaaccgtcaatttatgggattaa

SEQ ID NO: 427343 - DNA, 210 bp, Serratia marcescens
atggagcgcatcacctcatttttagcctacgcggtggcgatgttcctcgcgtggatcggcaaatattcaccgcaggacatcgcctttatggttggcgccgccgtgggcgtcggaacgttcctcgttaactggtactaccgccgcaaaagctaccagctgttgaacaagttaggcgttagccggagggtctacgatgaactcaatcgctaa

SEQ ID NO: 427344 - DNA, 513 bp, Serratia marcescens
atgaactcaatcgctaaacgctgcagcgtggccgccgtgctggcgctggcggtgctgctgccgcaattcagcgcgctgcagatctctgagaccgggttgcgcctgctggccgattttgaaggttgccgcttatcgccttaccaatgccaagcgggcgtctggacaagcggcattggccacacggccggggtaaagcccggcgcggttatcagcgagcgccaagctgccgttaacctcgttgccgacgtatatcgtgtggagcgcggcataggccgctgtatgcctgtcacgatgccgccgccggtttatgacgcggtggtgtcctttgcctttaacgtcggcgtcacggccgcctgcggctctacgttagccggtttcatcaagcggcaggactggcgcagcgcctgccagcagttgccgcgctgggtgttcgtcaacggcgtcaaatcgccggggctggaacggcgtcgggcggcggagctggcccactgcctgatcggggccgcgcaatga

SEQ ID NO: 427345 - DNA, 429 bp, Serratia marcescens
atgagccgcgcgatcggctggtttctggtgctggcgctggtcgtcgccggttggatgaaatggcaggttgtcacgttgggtaagcgactggaaagcgcccggctggaaaatggccggatagcggcggcgctgaccgatacccgcgcggcgatcgacacgctgcaggcggcggccggtgtgctggcgcaggaagaggaaaagttaaggggcgacctaaacgccgcgcaccggctggcgctgacgcgcgagcagaaaatacagaggttactcaatgaaaatcagcaattacgtgattggtttaacactgctttgcctgctgacgttgcccggctgcaccagcgccccggcttcaccggcgccgcggattatctacgttggctgtccgaaagtgagtccgtgccaaatcccggccagccgcccggcgactaa

SEQ ID NO: 427346 - DNA, 477 bp, Serratia marcescens
atgttaaaaccgcaacagctccgcgctgagctgacaagctgcctgtcgtggctacagcgcaaccctgaaaatctgcaagttagggtagagcgcggcaatgtggccgccacgcttgccgcctcgctgtcccatgagtaccgctatacgctgaatctgctgtttttggactacaccggcgatctggatttaatcatggtgccgattcaggcatggctacgggaaaaccagccggacatcatggcaacggaggaaaagcgccgcaccgggatcacctttgcgagcgactttaacaacaacggctcttacgatttcagcgtgtcgctacagctgactgaacgtgttttggttctcgagcaaggcgatggcgcgttgcatgttgagcacctgccggagccgccgttaccggagagcgtgacgcggccgatgcagctctttgttcacggcgaattagtgagtgaatggcatgagcgagcttaa

SEQ ID NO: 427347 - DNA, 447 bp, Serratia marcescens
atgagcgagcttaacccctttgacacccggctggccgggttgattgccaagctgtcgccgcagtcgcgaaagtcgctggccgttgccgtgtcaaagcgcctgcgcgccggtcaacagcaacacatcaaacgccagcaggcaccggacggaacaccttacgcgccgcgcaaaactcggcttcgcaacaaaaagcgcctgcgcgatcgggcgatgttctccaagctgcgcaccgcccgttacctgaaagcccagggtaacagcgatgcggccgtggttgagtttgtcgggagggttcagcgtatggtcaatgtgcatcattttggcctgcgcgatcggccgacgccgcacagcgaggcggtaaaatatgaggcccgtccgttactgggatttggcccggatgacgtcaaaatcatagaaacggccgtgatagaacacctcgctgaataa

SEQ ID NO: 427348 - DNA, 630 bp, Serratia marcescens
atgaacaatcaacacgacattttgcgcctgctgcgcaacctgatccgcatcggcaccgtgagcaccgttgaccttgataacggcctgtgccgcgtcgaaaccggcggcaatcttaccgactggctcaactggctaacctgtcgcgccgggcgtactcgcagctggtcggcgccttctgtcggtgagcaggtgctgatctttgcgctgggtggcgaacttgataccgcgtttgtgctgtgcggcattttctctgacgacttcccggccccgtctgcgtcggcggatgcgctgcatatcgcattccctgatggcgcggtcattgagtacgaaccggaaaccggcgcgctgagcgtgtcagggattaaaaccgccgacgtgcaggcgtcggagtccatcaccgccagcaccaaagtggtgatcgttacggctgacaaaatcacgctcgatgcgccggaggtggtttgcaccaacaaactcaccaccggcacgctggaagtgcaaaaaggcggggcgatgcgcgggaacatcgagcacagcggcggttcgttctcgtcgaatggcattgttgttgataaacacacccacggcggcgtccagaccggcggcggcaagactgatgaaccctcttaa

SEQ ID NO: 427349 - DNA, 351 bp, Serratia marcescens
gtgaacagcgccaaatatatcggcatgaaccgaggcaccggccgcacgctgacggacatcgagcatattcgccagtccgtggcggacatcctgatcacgccgcagggttcgcgcccgatgcgccgggcttatggctcgttgctctctgagctgctcgaccagccgcagaacgacgcgctgcgcctgcagattatggccgcctgctacagcgcgattttggcgtgggagccgcgcgtcaagctgaccggcatcgcttttaataccacctatgacggcaagatggtgatcgacatcaccggcacccgcaccgatgcccccggcgcgctgtcgctgtctgttcctgtgagctga

SEQ ID NO: 427350 - DNA, 909 bp, Serratia marcescens
atggcaacgattgacctttcacagctgcccgcgccgatcgtcgttgaggtgctggattatgaagatattttggcggagcgtaaggcgacgctgatttcgctttacccggaggaacagcgggaggccgtcgcgcgcacgctgtcgctggagtcggagccgatcgttaagctgctgcaggagaacgcttaccgcgaggtgattctgcgccagcgcgtcaacgatgccgcgaaagcggtgatgctggcgtattccaccggcgaagacctcgaccagctcggcaaaaactttaatacgccgcgactggtgatcgccccggcggatgagagcaccattccgccgacaccggcagtcatggaagcggatgaagattaccgcctgcgcctgcaggatgcttttgaaggcatgagcacggcgggatcggccggttcctatcgttttcacgcccgctcggccgatggccgggtggccgatgtgacggcaatcagcccatcaccggctaacgtgaccgtcaccgtgttgtcgcgggacggcgacggtaccgccagccccgaactgctgcaggttgtccgcgacgcgctgaatgatgaggacgtgcgcccggtcgccgatcgcgtcatcgtgcaagcggccaaaataacccgctatggcattgatgccacgctgtttctctatcccggcccggaggttgcgccgatcctcacggaggcgaaacaacgtttgcaaaattatgtactgaccatgcgccgcttaggccgcagtatccggcgttccggcatcatcgcggcgctgaccgtagaaggtgttgaacgtgtcgaagttgctcaaccggccgccgacatcgtgctggataaaacgcaggcgggttactgcaccggcgtgaacatcacaccggggcgcgccgatgactaa

SEQ ID NO: 427351 - DNA, 534 bp, Serratia marcescens
atgactaaccgcttattgcctgtcggctcatcaccgctggaagttgccgccgctgccgcgtgcgccgagttggtgcgcgtgccggttcctctgcgtgatttgtggaacccgaaaacctgcccggtgcatctgctgccctatctggcgtgggcgttctctgtcgatcgctgggatgaggcgtggccggaggacgtcaagcggggcgtggtttcggctgcgttctacattcaccggcacaagggcaccatcggcgccgtgcgccgcgtggtggagccgctcggctacctgattaacgttatcgaatggttccacaccgacggcgccgatccgcccggcaccttccggctcgatattggcgtgctggaaaccggcattaccgaggaaatgtatcaggaaatggagcgcctgatcgccgacgccaagcccctgagccgacacctgatcggcctcaacattttgcaagacatccccggccggatttacaccggcgcggccgccattgatggcgatgtcattaccgtttaccccggataa

SEQ ID NO: 427352 - DNA, 2925 bp, Serratia marcescens
atgaataaatacaaagcgattattaccaccgccggggcggccaagattgccgccgccagcgcgggcggcacgcagttgaaaatcgtctctatggccgtcggcgacgggaacggcacgctgccgacgcccaacccggcccagaccaagctggtcaacgagaaataccgcgcggcgctcaacgggctgactatcgataaggcgctgaaaaatcacattctggccgagatgattattccggcgaacaaaggcgggtggtggttgcgtgaaatgggcctctatgacgaggccgggacgctgattgccgtcagcaacatggcggagagctacaagccgaagctggaagagggcagcggccgcacgcagacgctgcgcatgatcctgattgtcagcagcaccgaggcgattcaggtgatcgccggtggcgacaccgtgctggcgaccaaggattttgtgaccgacgcgatcgccgcgcatgagaaaacccgaaaccacccggacgccagcaccacggcgaaagggctggtacatctgagcagcgcaacgacaagcaccgacgaaacgaaagccagcaccccgaaggcgcttaaagctgtcagtgatgccagcatgaaaaaggctgccaatctgtccgacttgcctgacaaggccgccgcgcgtggcaatctggcgttaggtacggccgcgacgaaaaacgtcgggctggaaggtgggcaactgatggaggtcggcgcttttggattaggtagcggctcacgtcaccgggaagatgcgtattgcaatcaggctgaaatctaccgggttaatagttcatcaaagaatacgccgggcggcgatgtttatggcgtgctgagtttgccctgcgatggcggcccgtcgggcgcgtatatggcggtacaaaacaacggcaacgcattctttggccgttcgaacatccccagtaatggggtggtgtggtttcaggcttacacgacgaagtttaaaccgacggcggcagacgttggcgcatggagtaaaacagaatccgatggccgatttgtaaaacagagcggcgacacaatgagcggcccgttagcgctgccgcgtgtcgtgttcccgaacgaaaataccgctaacgccgatactgatgtgaaccgtgagaacggttttaccgttgaatcattggttgccacgaccaacaaaggttatccagtgccgggcggaatgggggtgttgtttaccggcaaagtgaacgaattccgcaacgttcagtttgcggttggctccggcgatctggcgttttatttgcgctccctgcgaaaagatagccctgcctcaacacgttgggcgcaggtatacaccacggactacaaaccgacggcggcagatgtgggcgccctgacggatgcacaggccgcgcagaaatacgcgctgcgctctatcaaggtgaacggtaagccgctgtctacggacgttaacctgttggccggtgatgtcaacgcatggaataagaccgaagctgatggccgctatgtgaagcgaaccggcgacacgatgagcaacacgctaaacctgccgcgcgtggcattccccagcgagtccgcgccaccggtaaacgctgacgatgacctgacgcggccgaacgggttcacgctggagcagttggcggcccaatcgaagggttatccgctgaatgaagcgctcggcaacctgctgaccttcaaattaaaccgttatcgcaacgtgcagtttgcgattggctccggcaatacagatttttatttacgctcgatgcgtgatgacaacccggaaactgcaaagaaatgggcgcgcgtttacaccaccgactttaaaccaacccttaccgatgtgaaggcggcggatcacagtaataactttgctgcacgaatgggggtttctcgtgtattgacggggaataatgcgccgacatctgccggggtatggagtgcagaaaacagctcttgggcggcggtgccgtgggggtcggttttgtgcaccaccaatgccagcgatctgtctactgcgtcgggtaacggcaagtttcaacattacttgcaacttgcacatgaggcgggcggtaaacccggattgcgtgcggcggtaaacgttaacgggacgtttagtggttgggactcggtgatgatgagccggggcggaacgtttaccggtgtggtgaaaaccaacgcagagatccaatcaaccagctccgataactaccggctgatcggcggtgattacggctcgttctggcgcaatgacggcaacgccttgtatttgatgctgactaatgcaaaagaccagtacgggacgtggaacagcctccgcccgtttaccattgacgtgaaaacagggcagagcacatttgcgcactcaatgggtatcaatgacagcctgactgtcaatcgctacatccgcgcagacaaaaacgtatccgtaggtgaggatttgtatgttgaccgcaacgccacggtaacgggcagcctgaaggtcggagccagcacccacgccagcgacggtaacattttaggcagccgctggggcaataaatggttgtgggatgcggtgattgagcaggttaacggccgcgttgactggggagcatttgcgaaccgaacgcatgaagggtcggggtggtggcgagacgaaaacaccggcatcttgatccaatatggcaggacgtacacaaaagggattaacgaaaatgcgaacctgtggcagtcgttcaacatcccgtttacacaatgggtcgggccgatcctgatgacgcccgcttggccggacagaagcacctgggatcagtattacgactacggcgtgcagctcggcagccataacacgcagggctttaactggaacaaacaatgctacagcaacgaagtgcgcaccgactgggatagtggcatgacgtggttcgcgattgggaaataa

SEQ ID NO: 427353 - DNA, 420 bp, Serratia marcescens
atgtatgtttatagtgctgaaaagaatgcgttttacccgctctcgatgctggaagattacgccgctgtaggcgcttggcctgatgacggtattgatgttgatgaggctgtgtttcaggcgttcaccggccagccgccggaggggaaacaacgtggatcatcgaaggggcggccgtgctgggtagacatcccgccaccgactgctgagcaacagcgcgccggtgctgaacgccgtaaagcatccttgatggcgttggccggaaaagcgctggcgccgctgcaggatgcggatgatttggggatggcgacggaggaagaagccgcacagctcaagcgctggaaaatctaccgggtgcaactgagccgcattaacccacaggatgcgccggatattgactggccggtggcgcccgccgcctaa

SEQ ID NO: 427354 - DNA, 1170 bp, Serratia marcescens
atgggcgattatcatcacggcgtgcgcgtcgtcgaaatcaacgacggcacccgcgttatttcaaccgtatcgacggcaatcgtcggcatggtctgcacggcggaggacgccgacgcgtcggttttcccgctcgataccccggtactgatcaccgacgtgctggccgcctccggcaaggccggtaaaaaaggctcgctggcggcgtcgctgcgggcgatcgccgaacaggcaaaaccggtcacggtggttgtccgcgttgccaccggcaaagacgcggcggaaaccacctccaacatcatcggcggcgcgaacgcggaaggccgttacaccggcatgaaagcgctgttatctgcacaggcagagctgggcgttaagccgcgcatcctcggcgtgccggggctggataatcaggaggtcgcgacggcgctcgccgggatttgccagcagttgcgcgcgttcggctatatcagcgcccacggctgcaaaaccgtgcaggaggccaccgcttaccgcgacaatttcagccagcgcgagctgatgctgatctggcctgattttgtcagctggaacaccaccgccaaccagagcgacatcgcctacgccaccgcccgcgcgctgggcctgcgtgccaaaatcgacacggaaaccggctggcataagacgctttcaaacgtcggcgttaatggcgtgaccggcatcaccgccagcgtgttctgggatttgcaggcgcccggcaccgatgctgacctgttaaacgaggcgtgcgtcaccacgttgatccgcaaagacggctttaagttctggggttcccgtacctgttccgatgatccgctgttcatgttcgagaactacacccgcaccgcgcaggtgctggccgacaccatggccgaggcgcacctatgggccgttgaccgcccggtaacgcctacgctggtgcgcgacatgattgacggcatcaatgcgaaattccgcgagctgaaatccgccgggctgattattgacggtaactgctggtacgacgaaagctccaacaccgtcgaaaccctgaaggcgggcaagctgtttatcgattacgactacacgccggtgccaccgctcgaagatttaaccctgcgccagcgcatcaccgatcgctatctggcgacgtttgcggcatccgtgaaccgctaa

SEQ ID NO: 427355 - DNA, 510 bp, Serratia marcescens
atggcactgccgaaaaaactgaaatacctgaacctgttcaacgacggttacagctacatgggcgtggtgtcctcgctgacgctgccgaagctcacccgcaagctggagaaataccggggcggcggcatgaacggcgcggcctccatcgatatggggctggacgatgacgcgctggccgttgagtggtcgatgggcggcattgatgagctggtgctgaagcagtggggcgccgtcgatgccgtgccgctgcgctttgccggttccttccagcgtgacgacaccggcgaggtgtccgctgtggaagtggtgatgcgtggccgccacaaagaaatcgactttggcgagtacaagcagggcgaggataccgaaaccaaggtatccaccgagtgtacttacttcaagctgaccgttgacggcaaagagctgatcgaggtcgataccgtgaacatggtcgaaaaggtcaacggtgttgaccggctggccgagcatcgcaaagcgatcggcctgtaa

SEQ ID NO: 427356 - DNA, 282 bp, Serratia marcescens
atgaaagacgcaaaagaaaataccgttaccctcgacaccccgatccagcgcggtgaaaccaccatcaccgaggtgcaggtgattaaaccgaacgcgggcgcgctgcgcggcgtcgggctggcggcgatcgccaacgccgacgttgacgcgctgctggttgtgctgccacgcgtgaccgtgccgaacctgaccaaagaagaatgcgcgcgcctggaattgccggatttggtggcgctggccgggaaagtggtcggttttttgtcgccgaactcggcggcgtaa

SEQ ID NO: 427357 - DNA, 2850 bp, Serratia marcescens
atgagtaaaagcctgcagctacaggtgctgctgaaggccgtagaccaagccacccgcccgctaaagagtatccaacaggcaagcaaacagcttgccggtgacatcaaaaccacgcagcaaaccctcaaggctctggacgcgcaaagcgcccggattgacgggtttcgcaaggcgcaggggcagcttgccgttaccggcaaggcactgaagaaagccaaggaagaggcggccgcgctggccgtccagttcaaggcgacggaaaagcccacggcgcagcaagcgcgcttgctggaggcatcaaagcgcgccgccgccgagctgcagacgaaatacaacggcctgcgccagtcagtgcagcgccagcgtgacgcgctcgacgccgacggtatcgctacccggaacctgagcgcggaacagcgccggttgaaggccagcaccagcgaagccacgacagcgctgggccgccagcgcggcgagctggagcgcctgagcaagaagcaagaacaggttaaccgcgtcggcgcgcgttatcgtgccgggcaatcggcaaccgcggctgtccgtaataccagcgcggccgggctgggtatcgctaccgccgggctggtcgctgaaggggcgtttattgcgccgggggtgcagttcgacaggcagatgtcagacacgcaagccacgttagggctggcgaaaaatgacaagcaactggccgccattcgccagcaggcgcgggatattggcgccacgactgcgttttcgccgacggacgtcgcccgcacgcaatcggtgctcgccaagtccggctttaacggcgatgccattctgaaatcgaccgaatcaacggtaaatctggcgctggcctccgatctggacatcgccgacgcggccgacatcatcaccaacatgcaatcggcgtttaacatgccgatagacgagatccagcgcgtcgcggacgtgatgaccaaaggtttcacaagctcgaacagcaacctgatggattttggcgaggcgatgaagtacgtcgcgccgatcgccgaggcagccggggccagtatcgaggacaccaccgccttgctgggcgtgttggccgataacggcattaaggggtctatggccggtacggcggccagcgcgatgtttacacggttacaggcgcccgtcgggcaggcggctgatgcgttgtcagaattgggcgtaaaaaccaaggacggcaaagggaacatgctcccgatcgcgaacatcctcaagaaaattaacggctcgtttaaaaccaacaagctcggcactgcgcagcaagccgaatacctgaaagtcattttcggcgaagaggcgatgaaaggcgctatcaagctgattgacgccgccggtaacggcaagctgagcgaaaaacacagcaccgtcacccagtcaaaaggggctacggcccagattgcccgagtgaaggtggacaacctcgacggcgacctgaaaaacctgttttcggcgtgggaagatgttcgcattgaggtgttcgacggccagaattcagcgctgcgcaaactcacggtttccgccaccgaatggctcacgaaggcgggggcatgggtgaaggccaatcctgagctggtcggcacgctggtgaaagtcacggcgggcgttacggccctgatcggtggcctcgccgcgctgggccttattgcatggccggtgatggccggggtcaatatgttgatcgccggggccgggctgctgggaacggtctttaccaccgttggcgccgggattgcggccgcattcagtgtgatcaccttgccggtggtcgcggcggcggcggtgattgccggtgtggcgttgactatccgtaaatattgggagcctatcagcgcctttttaacgggtatcggcgaaggcttcagcgccgctttcgcgccgatgcgcgccgcgcttgtcccgctggctggcgcatttacgccgctgctgaacatggtgtgcaacgtctggcagtggttcggcaagctgatcgagccggtgaaatcttcacaggccgaactccagacggccgcgcgctatgggcgcatgtttggtgaatggatcgcggccggattgagcctgccgctgcagctgttgggcggattgcccggcctgctgactggcatctggagtgttgcgagcggcattgcggagtgtgccgccgccgtctgggacaccatcggcgagcgtgttaacgcggcatggctggcgctgagcgccgccacggttcaggtatgggatcggctgaccggctggcttaatggcaaatgggaggggctggtaaacggggctaaagcgctgccgggacagttcaaagaagccgggatgaacatgattaacggggtcattgacggcattagcgagcgctggcaggcgctgaaagacaagttttccagcctcacggatatgctgccggactggatgaagtttggcgacgatgaggcggaggttaacccggcgatttcatacaaccgcccggcgcctgagctgatgccggggccgggctatgcgggggcattcgacaagggcggcatcatcccgcgcggccagtttggcatcgtcggcgagcgtggcccggagatcgtcaacggcccggccaatgtcaccgggcgccgaaaaacggcggcgctgtcggcggcgatgttaacgctgtcaacgccggtgatggcgtcggccccggctgctgcacctgccacggcgccagccccgatcacgattcaggtgtacggcgcccccggccaagacgcggcatctattgcacgcgaagtctcgcgccagctcgaggccgaacgacgcaaacacgcggccgccgcgcgtagccgcatgacttacggagattcatga

SEQ ID NO: 427358 - DNA, 486 bp, Serratia marcescens
atgatgttaacgctggggctgtttgtttttatgctgcagacgctgccgtatcaatccatgagccgcaacgcggaatatcgctggccgagcaacggccgcgttggcctgcgcccggcggcgcaatttctggggatggatgaggaaaaaatcacgctgtccggggtgctgctgccggagatcaccggcggccgctggtcactgctgacgctgcaattgatggccgagcagggccgggcgtggccgctgattgaaggcaccggcacgatttacggcatgtttgtgatcgagtcgatttctgaaacgcattccgagtttttcgccgacggtagcccgcgccgcacagagttcacgctcaacctgaagcgggtcgatgaatccctgtctgcgatgtttggcgatctgcgccagcaggccggggaactgtacgataaagccggagagatggccgggaaggccgccggtgctatgggaggattgttatcatga

SEQ ID NO: 427359 - DNA, 1149 bp, Serratia marcescens
atgatcaccggcgtaagcctgccagccggggcgcgagttgcgccggatttttcgctgttgctgcaggagaacgacatcacgcagaacatccgcaagcggctgatttcgctgtcgctgacggataaccggggctttgaggccgaccaactcgacatcgagctggacgacagcgacggacttatggcgatgcctcagcgcaatgcggtgctgtcgctggcgctcggctggcaaggctcgccattgacgccaaagggccagtttacggtcgatgaggtcgaacaccggggcgcgccggacacgctgactattcgcgcgcgtagtgcggattttcgcggctcgctgaacacccggcgcgatgagtcctaccacgacaccaccctgggcgacattgtgcagaaggtggctgcgcgcaataagctgaaagcttcgctggccgccggtctgggcaccatcaaaatcagccatatcgaccagacgcaggagacggacgcggcatttattacccgacttgcaacgctcaacggcgcggtggcggcggtgaaaaatggcgctctgctgttgttgcgaccggggaacggcgccacggtaggcgggaagccgttgccggtgtataccatcacccggcaggatggcgatcagcacagtttcagcattgccgatcgggatgcctacaccggcgtgacggcgagctggctcaataccaaacagccgaagccaaagaaagtgaagctgcagcgcaagccaaaagagcagcatttgcgcgcgctgcaacacccgaaagcgaagccgggcagcagtaaaaaaccggggaaaccggcggaggcgacgaaaggcgactatctggtgggggctgacgataacgtgtttgcgatcaccaaaatttacgccacaaaggccgccgcgatgcgggcagcacaggcaaagtgggaaaagcttcagcgcggtgtggctgagttttcgctgtcgctcgccatggggcgtgccaacatcaccccggaaacgccggtacgcgtcagcgggtttaaagcggcgatcgatgcgcaagactggatagtgagcaaagttacgcacaatctcagcaatagcggctttacgacggcgctggagtttgaggttttgctgtcggaggttacttatgatttttcttaa

SEQ ID NO: 427360 - DNA, 231 bp, Serratia marcescens
atgtttcattgcccgctttgcagaacagcggcccatgcccgcaccagccgctatttgagtcaacaaacgaaagaacgttatcaccagtgccaaaatatcaactgtggccacacgtttaaaacgatggagacctaccaatgcgcgatcatgacgccgggccgggttgatgcagtgccgccgcatccggtcggcgccagtgtggaaggacagcaacaggttatgtggatgtga

SEQ ID NO: 427361 - DNA, 1515 bp, Serratia marcescens
atgaagaaactgctcccccttcttatcggactgagcctgggcggcttcagtgcaatgagccaggcagagaacctgctgcaggtctacaaacaggccagggaaagtaacccggatctgcgcaaaagtgctgctgaccgcgacgccgcattcgaaaagatcaatgaagcgcgcagcccgctgctgccgcagctcggcctgagcgccggttacaactacaataacggctatcgcgacagcaacggcgtcaacagcaatgtcaccagcgcttcgctcggcctgactcaaaccatcttcgacatgtcgaaatggcgtgcgctgacgctgcaggaaaagaccgccggcatctccgacgtgaccttccagaccgcggaacagcagctgatcctcaacaccgccaccgcctatttcaacgtgctgagcgccattgacacgctctcttatacccaggcgaacaaacaagcggtttaccgcacgctggatcaaaccacccaacgcttcaacgtaggcctggtggcgatcaccgacgtgcagaacgcccgttccgcctacgataccgtgctggcggccgaagtcaccgcccgcaacaacctggacaacgcgctggaatcgctgcgccagatcaccggcaccttctatcctgagctggcctcgctgaataccgatcgcttcaatacccagcgcccggaagcggtgaacaacctgctgaaagaagcggaagcgcgcaacctgagcctgctgtccgcccgtctgagccaggacctggcgcgcgagcagattcgctctgcgcagaccggttacatgccgacggtcaacctgaatgcgtcgaccgggatcaccaatacccgttacaacggttccgccactcacgacacgctgagctccagccgttacagcaattctgatgccggccaaaaccaggttggcgtttcgatcagcctgccgctgtacagcggcggcgcaaccaactcgcaggtggaacaggcgcagtacggcttcgtcggcgccagcgagcagctggaaagcgcccaccgcggcgtggtgcagaccgtgcgttcgtcgttcaacaacgtcaatgcctcgatcagcagcatcaacgcctacaagcaggcggtgatctccgcgcagagctcgctggatgcaatggaagccggttatcaggtcggtacccgcaccatcgtcgacgtactgaacgccaccagtaccctgtataacgccaagcagcagctttccagcgcgcgttatacctacctgatcaaccagctgaacatcaagtcggcgctcggcacgctgaaccagaacgatctgctgacgctgaacggcgcactgggcaaaccggtgtcgaccgcgcctgacgccgtcgcgccgcagaaccgctctcaggacgcctacgcggacggctaccaggacaacgcgccgatgcaacaggtcgccgcgccagcaccgagcgccacacgcgctgcggcaccggccgtcagccaaccggctcgccagagcggcaacccattccgcaactga

SEQ ID NO: 427362 - DNA, 1029 bp, Serratia marcescens
atgaccgacacgatgcaacgctggacgatggacaccctggggcgtgaacacctgcggttgaccgtcgacgcgatcccgcagccggggccacacgaaatcagagtgaaagtgaaagcggtcgcgctcaactaccgcgacaaactgatgattgaaagcggcatggggctgacgctgccgcagccgttcacccccgcctcggacatggccggcgaggtcgacgctatcggccccggcgtcagccgtttccaacccagcgctagggtcatctctaccttcagccccggctggctcgacggccggcaaaaaccgtacggcaatgcgcgccaggtgccttaccacaccctcggcggtttctatcagggcgtgctggcggaatatgtgattttgcatgaggattggctggtggcggcgccggcgtcgctggacgacgtgcaggccagcaccctgccgtgcgccgggctaaccgcctggttcgcgctggtggagcaaggcaagctgcatgccggcgagacggtgctggtgcaaggcaccggcggggtggcgctgttcgcgctgcagatcgccaaagcgcacggcgccgaggtatatgtgacttccggcagcgatgaaaagctggcgcgtgcccaggcgctgggcgccagtcacggcatcaatcggctgaacggcgattgggtggaagcaatttatgcgctgacgcaggatcgcggcatcgaccatgtgatcgacaccgtcggcggcccgaatctgggcaactcggtacgcgccgtggcggtgggcggccgcatctcggtgatcggcgtgctggcgggcgccgagatttccgcccccgccggcctgctgctgctgaaatcggcggagatccagggcatcggcgtcggccaccgccgcgcgctggaagatctggtgcgcgccgtggacgccgtcaacctgcagccggtgatcgaccaggtctaccgtttcgatcagctgccgcaggcgttggatcacctcgatcgcgggccgttcggcaagatcgtcctgaccccgtaa

SEQ ID NO: 427363 - DNA, 921 bp, Serratia marcescens
atgagcgatcgattgagcggcatttcggtattcgtcaccgccgtggaggcgggcagttttgcgttggcggccagccggctgcacctgtcgcgttcggcggtggggaaaaccatcgcccggctggaacagcggctgggcgtgcggctgtttcatcgcaccacccgcagccagagcctgactgacgacggcgcgttattctatgagcgctgcctacgggcgctggaggagatccgcagcgcggaaacgctgctggagtcgggcaagcgacaggtcagcggccggctgcgagtatcgatgccggtgctgtttggccgcatgtgcattgcgccgctgttgaccgagctgacgcgcgagcacccgggcctggagctggagctgtcgttcaacgatcgggtggtggatctgattgaggacggcttcgacatggcgatccgcaacggcacgctggccaacagcggcgggctggtggcgcgccgcatcggcgatcatcgcatgacgctgtgtgcctcgccggcctatctgcagcggtgcggcgagccgcacagcatcgaacagctggcggagcatgaggcggtgacctatatgcgcgccggtgcgcggcgcagctggttggtattggatagcgacggcaagccgcaggaagtgatgccgactaaccggctgcaaatggacgatctgcaggcgattgcggatgcggcgacggcggggttcggcattgcctggctgccgtgctggctggtgcgtgagcagctgttgagcggggcgctggtgcgcttgctgcgcgaccggccgggcgccgcctttgaagcgcatgcggtgtggccgcacacgcctcacctgccgctgaaggtgcggctggcggtggatacgctggtgagcaagttgcccgccagtctggcgttggtcgagaaggcgctgtag

SEQ ID NO: 427364 - DNA, 1044 bp, Serratia marcescens
atggcgtcagtgaaaaaaaataaacgcattaccatcagtgacatcgccacgctggccggggtgtcgaaatcgaccgccagcctggtgctgaacggccgcagcaaggaataccgggtgtccgacgacacccgcgatcgcattctggcgctggcgcacgaacaccattatcagcccagcatccacgcccgctctttgcgctccaaccgcagccacacgctggggctggtggtgccggagatgaccaactacggctttgcggtgatctcgcgcgagctggaaacgctgtgccgcgaagccggtctgcagctgttgatcgcctgcaccgatgaaaacccggcgcaggagatgatggcggtgaacagtctggtgcagcggcaggtcgacggcctgatcgtcgcctctagccagttgaacgacgcggaataccagaagatcaacgtcgggctgccggtggtgcagatggaccgcctgatcgccggttccgagctgccgctggtgatcaccgattcggttaatgcgaccgccgacctggtggaaaaggtcgcacgccaacatccggatgagatctattttctcggcgggcagccgcgcatttcgccgacccgcgatcggctggccggcttccagcttggcctggagcgcgccggcgtaacgtgcaaaccggagtggatcatcaacggcagctaccaccccagctcaggttacgaaatgttcgctcagctgtgcgcacagctggggcgtccgcccaaagcgctgttcaccgccgcctgcggcctgctggaaggggtgttgcgttatctgacgcagcatcagctgatggagagcgacatccacctgtgcagcttcgacgatcactacctgttcgattgcatgacgctgaagatagacacggtcgcccaagactgccgggcgctggcgcagcatagcttcgaccaggttaccgcgctcatcgacgagcggccgctggaacagcatgcgctttatctgccgggccgcatccactggcgccatgccggttcccaggctttgttggccggggagtga

SEQ ID NO: 427365 - DNA, 840 bp, Serratia marcescens
atgcatatccaaaagcaagataagatcacccatcttggcgcgaactccgattatccggatcaatatgctcccgcattgctcgaagccttgccgcgtgcgcgcggccgcgatctgatcggcgtggacgagcggcagctgccgttcagcggctttgatctgtggaccgccttcgagctgtcctggctcaacgccaagggcaagccggtggtgggcatcggcgaatttaccttcccgcattcctcgtcgaacctgattgagtccaaatcgttcaagctgtatctcaacagcttcaaccaaacgcgctttgacagcgtggaacaggtgagcgccgccatgcagaaagatctgtcgcaggcggccaacggccaggtcaccgtcaagctctatccggggctggaaggttacccggcgcagatcgaccgcctgccgggcatcaacatcgacgatctggatatcgcgatcgacgacttcgccttcaaaccggaatatctgagcggcgcggccgagagaggggaaccggtgtcggagacgctgtcttccaacctactgaaatccaactgcctggtcaccaaccaaccggactggggcagcgtcgtgatccgctatgaaggccgcaaaatcgaccgcgaaagcctgctgcgctacctgatctccttccgccagcacaacgaattccacgagcagtgcgtcgagcgtattttcaacgacatcaagcagagctgcagtccggaaaaactcagcgtgttcgcgcgctacacccgccgcggcggcctggatatcaaccccttccgcagcgatttcgaaacggcgccggcgctcggccgcctgatcagacagtaa

SEQ ID NO: 427366 - DNA, 915 bp, Serratia marcescens
atgttcttgtccaaccggccttttatctccgcgcttctggcgctcaccgtcggcctttggctgccgggctccgtgctggccaggcccgacctggaacgcaaggtcggcactaccgtagccgatagcgattctgcagattaccgtttcagcgatctgcgtttcacctccgccgacggccaacggcattaccgcgttcgcatcgcccagccgcgccaggcccctgcgcctggcggctatccaacggtgtatttcctcgacggcaatgcggtactgatggaattgacccccgccttgctgaccaaattggccgcggctaagcggccgccggcgctggtgatgatcggctatgacaacgatctgcgcatcgatgccgccggccgcgcctacgactatacgctcccgttgccggcaggcatgaagagaccgccacgggccggcgggggcgcggatgcgttcttacaattgattgaaactcggatcaaaccggcaatcgccgccaaactgacgatcgatccgcagcggcaaacgctgtggggccactcctacggcggcctctttgttctgcacacattattcactcatcccgccgccttccaacgctacatcgccgtggaaccttcgctgtggtggggcaacggcatgatcctgcaagaagcgcagcagatgacggaacggcaccaggcgccggcgacgaggctgcaattgtgggtgggcctggcggatcgcgatcgcgcggcaccgcccggtgtaaagagcccctccctgccggcaaacgccacgcgttcattggccgaacacctggcacagctcgacggtctcgtcgtcggttatcgggagtggcccaccttaggacacggcgccatgctgggtgccgccatcgagccggcgctgagcagtgtgatatcagaagactaa

SEQ ID NO: 427367 - DNA, 291 bp, Serratia marcescens
atgaaatacataacctccattatcgcactgagcattatgttctctgcatcggcgttcgccgccaaacaaatcacccttgaagaatcagccaactacaccaaactcggcgatctctccattcagcagaccggcgtgcctaccgtcggccataaatatatttcctcagaggttgataagaaatgtaatgaactcagcgggctggatgggaaggattgcttctatcgcatcatctccgccaccgggcaagagagcgatcacaaagatatccacgtggaaatattcaaaaaatag

SEQ ID NO: 427368 - DNA, 192 bp, Serratia marcescens
atgccgacaaaattggatcccatcgtttctgagtttgagactcaagagcaggctgatagctacgatcgttggttcagaagcaccgtggaatcttccatcaatagcgactccccccgtattccccatgacgaagtcatggccggcgctcgtcacattatcgagcaggcaaaagccaaaagaaaatcggcctga

SEQ ID NO: 427369 - DNA, 1281 bp, Serratia marcescens
atgcggcctcaatacaagttagcggctgggttactcggcattctgatgtcgttgatttcccctgtgagcctggcgaatctgctgtcggaagacagcgcggttaaatctgaatacatggaagcgcagcgcgatagcgaagtctatgcgttggtaggcgagcatgtgatcccggtcggggaggtgaagcgcgggcagctgatccaggtgttcccggcggatgcggaatactacgaattcaaatttggacacggcaccggctttatcgataaagacgatgtgcgtgagctgaagaagtcgcgcaaggtgcaagacgatctgggcgagctgaacaaaccgctgaccaaccagaatctgatcacccaaaaaacgatcgacgtttataccgcggcggacaaggacagcgaggtcttcggcacgctggaaggcaacctgcgctatccgatcatcggtaagctgaaggaccggctgaacaacacctggtacgaggtcaacatcggcgatcggctggggttcgtcaatgagttggactgcgaaatcgataacggcatcccggtgctgacttaccaccacctgctgaaaaacgaagagaacaaacgcttccgccacacctcgactaccacctctgacgtggcgttcagcaaccagatgacctacctgaagcaggcgggttacgacaccatttcgctgtatcagctggaagcctacctgaagaaccagattaacctgccgggcaaggcgatcgtgctgaccttcgacgacgggctgaagtcggtttatcgctacgcttacccggtgctgaaggattacggtttccgcgcgacggcgttcatcatctcttcgcgcatcaagcgccacccgcagaaatggaacccggactcgctgcagtttatgagcgtctcggagctgaagcagattcaggacgtgttcgacgtgcagtcgcacacccacttcctgcaccgcaccgacggcaatcgccagccgattttgctgagccgctcgttgcacaatatcgagttcgattttgagcgctcgcgccgcgcgctgtcgcagttcaacccgcacgtgctgtatctgtcctacccgttcggcggctataaccagcgggcgatccaggcggcgcaggatgccggtttccatctggcggtgaccacggtgcagggcaaggtgaagccgggggataacccctatacgctgaagcggctgtatattctgcgcaccgactcgatccagaccatggcggatcggatagccaacaagccgggcacggtggtggtgcagtaa

SEQ ID NO: 427370 - DNA, 2199 bp, Serratia marcescens
atgccgaccaagcgtctttcatcatccgcggccaagcagggccgcacccccgtcagcgcgttagcgatcaccgtcgctgcggcgttgggcacgctggcgatgccggctttttccgccgacgccaagccggccgccaaggaagacacgattaccgttgtgggcggtagcaacaccgcccagcaggaaagcgcctgggggccggtcggcacctatgtcgccaaacacagcgccaccggcaccaaaaccgatacgcagttggtaaaaacaccgcagtcagtgtcggttgtgacacgtgagcagatggacattttacagccaacctccgtcaaggaagctctggggtacacacctggggtgatggtcggtagccgcggtagttccaacgtatatgatgcagtctacattcgcggttttggttcagttaaccagaatgaatatctggatggattgaagctgcagggggactactttaacgaagcctctattgatccctatttcctggagcgtgcagaagttttacgtggcccttcttctgtgttgtatggtaagagcagccctggcggaatcgtttctctagtgagtaagcgtccaacgaatgagcctattcgtgaagtgcagtttaaaatgggcactgacagcctgttccaaactggtttcgacttcagcgatgcgttagatgaagagggcaaatatgcgttccgtctgactggattggcgaaagatgctaatgaccagcaggacatggctaaagtcaaacgctatgctgttgcaccatcattcagttggcagccagatgatcatactaatttaaccttatattcttacctgcaaaacgatcctaatatgggctactacggttggctgccaatgcaaggaacggtgcaacctgcaccttatggcaagctgcccactaatttcaatgagggtgagaagagcaacttttattcccgccagacgcgaatgtttggttacagtttctatcatgacttaaatgatacttggactgtgcgtcaaaacttacggtatatgcaactgcataccaatcaaaataatgtctatggtaatggagttgcagccgataacgttactttaaaccgtaactatatcgtttctaatgagcggctgaacaacttcagtgtggatactcaagctcaggctaagttcgctacaggccaggtggaacatacgttactgagtggcgtagatttcatgcgcatgagcaatgatattgagggcggttggggtgttgcaagtacgcttaaccttgccaacccacaattcggtaattatacaaaaggtgcattgaatcgtactagtaaagtcgatgggcaacagcaaatcggtatttacatgcaagagcaggccgaatggaataattgggttctgacagccggcactcgttacgattgggccaaaagtacggtcgaagatcgtgtcgcagacagttacagtaagcaaaaagatcaccagtctacaaaccgtattggtcttaactatctattcgataatggcatttctccatatgtcagctatgcacagtccttcgagccaaacgtgggagctgcatatggcggtaaagcttttgttccatccaaaggggagcaatatgaagctggcttgaagttcatgcctaaagataaaccagtttctgcaaccatcgcgatctatcaactgactaagtcgaacaatctggtaacggacgttcaacacgccaatgaaggctggtatcagcagcaaacggggaaaattcgttcacggggccttgagttggaaggcaaagctgcattgaatgccaacgttaacctattggcttcatatacttataccaatgcagagtataccgaggacaccacgaataaaggtaatacgccagctatcattcctaaacatatggcatctctgtggggagattatactttccatgagacggcgttgagcggtctaacctttggtgcgggtgttcgttatacggggtcatcattcggtgatgaagccaatacttttaaagtaccggcttctaccgtgtggaataccgtacttaagtatgacttggctcgttttaacttgccgggttcttcgatcgctcttaacgtgaacaacctgtttgataagcaatatgtgtccagttgctttgctacatatggttgtttctggggcgcagaacgccaggtagtcgccaccgcaaccttccgtttctaa

SEQ ID NO: 427371 - DNA, 405 bp, Serratia marcescens
gtgagtaatacgttgtttcgatggccggttcgcgtttactacgaggataccgatgccagtggtgtggtctatcacgcccgctacgtcgccttttttgaaagagcgcgcacagagatgctgcgtcagcacaactttcatcaacagcagctgctcagtgaacaagtcgcttttgtcgtccggcgcatgacggtggattatctggctccggctcgtctcgacgagcaactggaagtccagagcgaaatcacctgtctgcgcggggcttctctcacgtttgctcaacgcattgtcaattctgacggggccctactgagccaggcagatgtcctgattgcctgtattgatccacaccaaatgaagccaagagcgcttcctaagtctattgtcgcggagtttaagcagtga

SEQ ID NO: 427372 - DNA, 741 bp, Serratia marcescens
atgtcaatagattggaactggggtatcttcctgcagcaggccccgtttgggaataccacttacctcggctggatttggtccggctttcaggtcacggtggccctctccgtctgtgcatggattatcgctttcttcgtcggttcgctgttcggtatcttgcgtaccgtgcccaaccgctttctttccgccctcggcacctgttacgtcgaactgttccgcaacgtgccgctgatcgtgcaattctttacctggtatctggtgatccccgagctgctgccggccaatatcggcacctggtttaaaagcgagctggatcccaacgtgcagttcttcgtctcctccatgctctgcctggggctgtttaccgccgcccgcgtatgcgagcaggtgcgcgccgccattcagtccctgccgcgcggccagaaagccgccgggctggcgatgggcctgacgctgccgcaaacctaccgctacgtgctgctgccgaacgcctaccgggtgatcgtgccgccgatgacctcggaaatgcttaacctggtcaaaaactccgccatcgcctccaccatcgggctggtggacatggccgcgcaggccggcaagctgttggattactccgcacacgcctatgaatcctttaccgccatcacgctggcttatatcggcatcaacgccgttatcatgctgtttatgcgtctggtcgaaaagaaagtgcagttgcctggcaacctggggagtaaataa

SEQ ID NO: 427373 - DNA, 429 bp, Serratia marcescens
atggaaatcagaaaggcgcgcctgagcgatcgtcaggctatcgccgaattaatggcggcgttggattatcccggcaccgaggcgtttctgccgcagcgaatgcgccagctgctggcgcatccggacgaggcgctgctggtggcgatggagggcgagcgggtgctgggcgtgctgtcgctgcattttctgccgcagctggcgttggccggcgacattggccgcatcagctatttttgcgtcgacgaccgggcgcgcggcgcgggcgtagggcggaggctgttggcggagggcgaggcgctggcgcaccggcgcggctgcgatcggcttgaagtccattgccacagccgccgcgagcgggcgcatgcgttttaccggcgtgaaggctttgtcgaagcgccgaagtattttgccaagctattaaaccagtaa

SEQ ID NO: 427374 - DNA, 1164 bp, Serratia marcescens
atgaccagccagttggcagacaaaatcatcgcctatcggcgtgagctgcaccaaaaccccgagctttccaatcacgagttcgccaccaccgcccgactgacgcgctggctgcaagaagcgggcattcgtctgctgccgctggcgctgaaaaccggcgtcgtggcggagatcggcagcggcaaggggccgatcatcgcgctgcgcggtgacattgacgccctcccgatcgacgaaatcgccgacgtgcccttcagctcgcaaaaccgcggcgtgatgcacgcctgcggccacgactttcatacctcggtgatgctcggcgccgcacacctgctgaaagcgcgtgaggccgacctgcccggcacggtacgcatcttcttccagccggcggaagagaccttcaacggtgcccggcacctgatcgacgccggcgcactggataacgttgcggcggtatttggcctgcataacgcaccggagctgcccaccggcaccttcgccacccgcgccgggccgttctacgccaacgtcgatcgtttccagatcctcatcaccggcaagggcgcgcacgccgccaaaccggaacagggcgtcgacaccatcgttaccgccagccagatcgtcggcgcgctgcagacgctgcccagccgcagcttcagctcgctggaatcgctggtagtgagcgtaacgcgcatcgaaggcggcaatacctggaacgtgctgccgcaaaccgtggagctggaaggcacagtgcgtacccacagcgacgcggtgcgccgccaggtgccggacaagattcgccaggtgatcgacggcatagccgccgcgctgggtgcgcaggccgaactccgctggcagccggggccgccggcggtgatcaatgacccgcattgggcggcgttcagcaaaaccgttgccgccgaggccggctaccgggtcgaagaggcggagttgcagatgggcggtgaagatttcgcgctgtatctgcatcacgtgccgggcgtattcgtcagcatcggatccgccagcgagttcggcctgcatcatccgcgtttcaatcccgatgaacgggctctgttcccggcggcgcaatatttcacgctgctggcggaacgcacgctgcaacaattaaccaccgcgccagaaaaagtcctcagcaacgcctga

SEQ ID NO: 427375 - DNA, 921 bp, Serratia marcescens
atgcagaaaaccgttaccgccgccctcgtggcggccttgctgagcctgaccggcgccgcactggcgggcaccggcatcgatttgcaggccaatgaaaccccgatccacgcgccgaaaaacccgcaggcgatcgccaaactgccggccgatttccacttcgtgaagccgggccaattcaccgtcgcgatcgccgcactcaacacgccgccgctggcgctgtttgccgccgacaaccggcggctgatcggcagcgaagtggatatcgcacagctggtggccgacagcctgggtctaacgcttaacgtggtgcaaacctcgtgggaagactggccgctgggggtggtttccggcaagtatgacgcggccatcaccaacgtcaccgtgaccaaagaacgcaaaacccgcttcgacttcgccacctaccgcatcgactcgctcggcttttatgtcaaaaccggcggcaagatcgcgacgatcaaacagcctgccgatatcgccggattaaaaattatcgtcggttccggcaccaatcaggaagccatcttgctggcgtgggacaagcagaatcggcagcaggggctcaaacccttccagccgatctacgtgaccgacgatgcggccgccacgctggcgatccagtccggccgggccgacgcctacttcgggccgaacgtgctgggcgcctataaggcggcactgaacggccgcacccggctggcgggcacggtggaaggcggttggcccaaggcagcacacatcgccgtcaccacccgtaaaggcaacggcctggtgcaggcggtgaacgaagcgctgaacggcgcgatccgcggcgggcagtacgatcgggtgctcaaccgctggggcgagagcgtcgaacgccttgcgcagtcggaaatcaacccgcccggcctgggcgattag

SEQ ID NO: 427376 - DNA, 906 bp, Serratia marcescens
atgaggggcagtgatttcgccgagttgcgcgcctttgccgcgattgttgagcacggcggtttcgctcgcgccgctgcacatttggggatgtccgcttcggcgctcagccaaacgctgcgcaacctggaggcgcgtttgggtgtgcgtttactgaaccgcaccactcgcagcgtggcgctgactgaagccggaagacagatgttggcgcgcctgacgcccgcgatggccgagattgacgcggcggtagcgcaggcggtcgatcaacgccagaacccctcaggtcttttgcggcttaatgtaacccgcgtggcggcgttacattttctggcgcctttgatcgcgccgtttcatcatcaatatcctgatattacgctcgatctcaatgttgaggagcggttggtggatatcgttgccggcggttttgacgccggcgtgcggctgcacgagaaactggcgaaagatatggtggcggtcaagctgggcggggaggtacggatgcgcgtcgttgcttcaccggcgtatttggcgcgtcacggccggccgtcaacaccgggcgatctgcatcgacatcgctgcttgaattaccgctggccgaccagcggcagtttgtatcgctgggagtttgagtgcgacggtgaaaagcaggagatcgctgtggaagggccggtgatagtcgatgagccggaagtcttggtgcgggctgcgatggatggggcaggcattgcctacctgtttgagcaacaggttgccgccggtttggccgatggccggttgttgccgctgctcgatgcctggacgccgccgttccccggtttctatctgtactatccggcaaaccgccaaatgccgcgcccgctgcgtgcttttatcgacttcgtccgtcaacaggcaggacagggcgcataa

SEQ ID NO: 427377 - DNA, 1065 bp, Serratia marcescens
atgaacacgtcactatcgctggatcactatcgtttattgggccgttccggcctgcgcgtttcaccgctggcgctgggcaccatgaccttcggcgccgactggggctggggcgccgaactggccgaggctcgccgtctgtttgacgtttatgtcgaacgcggcggcaactttatcgataccgccaaccgctataccgaaggcagcgccgaacgtttcgtgggggaattcgccgccgggcgccgcgatcggttggtgatcgccaccaaatacaccctgccgatgcagccggacgatcccaattccggcggcaatcatcgcaaaagcatgctgcgatcggtggagggaagcctgcaacggctcaataccgattacatcgacctgctctatctgcacgcctgggatttcaccacgtcggtggaagagatcatgcgcgccatggacgatttagtacgcgccgggaaagtgctgtatgtggcagtatcggatcttcccgcctggcaggcgtcgagaatgcaaatgctggcggacctgcgtggctggtcgccgctgatcgctctgcaaatcgagtacagtctgctggagcgcaccgtcgaacgcgagctgatgccgatggcgcaagaattggggatgggcgtgatcccttggtcgccgctggccggcggcgtattaagcggcaaataccggcggcaggatctgcaaccgtcgcccgacgaagcgggctctcggcgtgaagccgtgcgcgccaaggggacattgaacgcacacaatcttgatatcgccgacgccgtcaaccagatagctgatgagactggatattccccatcacaaatcgcgctggcctggacactgcgtcacccgacggtcaccgcgccgatcgtcggcgcccgaaccctggcgcaattggaagataacctcggcgcattgaaggtggcgctggcggaagatcattggcgacaattggacgatctcagcgccatcgagcggggattcccgcacgattttctcgccctgccagccacccgcaacatcatgaccggcggcgtgcatctcgcccgacgcagataa

SEQ ID NO: 427378 - DNA, 1533 bp, Serratia marcescens
atgtcactgcaacaggtttcgaatgtctctttgagcaacaacggcttaaagggcatcagttacaaacattacgcgttggcgatcgtggcgttttcggcgatcgtgcggtttatttccttaacggatcggtacttttggtgtgatgaagcctccagcgtgctgaccagtcgctatgatgtgggcgctttgctgtaccacgcttccttcgacgttcacccaccgctttattatctgttgctgcatgcctggatggtactgtttggcgacggcatcatggccgcccgttcgctgagcctggtgttcggcgtggcgacggtagcgctggcgatgcgctttacccggtggttggccaacgagcgggcggcgctgatagcgggatggctgatggcaatcatgccgatggcggtgcgttacagccaggaggcgcgcatgtacgcgctgatggggatgctggcgatcgccgctgctatagtgctggcgaagtggttgaaaacgccggataaccgccgctatctggcgctgtatgcgctgctgatgacgctgagtttttatacccattacttcactattttcacgctgatcgctcactggctggtggtgttggtgctgtcgtaccgccacgaaggcgtaagttacatcaagcagccggcgtggtggctcgccaatgcggccatcggtgtggcctacattccctggctgctggtgctgttcaatctgttggcgcatatcgccgaactgcgggtcggcggcgacgtcggttggatccctcaggttacctggcgcgatctgccggcgatgtactggcgattttttaccggcgatgacggcggcaattacccggcggctattctctggctgttgccggcgatgtttgtcgcgttgtgcgcgctgctgctgaaacggcgcgcgatgccaaggacattctcgctgctgctgcttggcggcattctgatcccggtgacgctggtattcgccatttcctggcgcacgccgctgtttgtcgatcgctacctctattccgccgcgctcggcattccgctggtgttgggcgtgctgatcgccggaacgaaaagccgggtgcgtgggatctctttgttgctgttcttcagcctgctgttcggctgcggcgtgcgtaacgactacccggtcgagaaagatgagttcaaggtgatggtgcactatatcaacagccactatcagcctaacgatgcggtggtggtcagcaacatgttcaactacctgagctacgtgtattacaacaagaagggctatcgcgccttgctgtataccccggccaggcccaacggcatttcgggcaagcctaatgcctatggcttcggcaccttcttccacgatcgggcggcgcagacctatgtcgataagctcagcgttttatcgaaaggccatcgccgggtctggctggtcagtggtggggatttcaatcaggacttcggccattcgccgccggggtgggtcaataccggcaccttcaagagcggcggtttcgaatcgcgcctgttcgtggtgcgttga

SEQ ID NO: 427379 - DNA, 144 bp, Serratia marcescens
gtgcgcaaatccagattctttctcgtgaccttgctgtgcctgtgcgccgccgccgtgctgtatgtcatggcataccgggcgctggggcattatctcagcgatggcgagaaggcctacccggatatcagcgttgaaatccgctga

SEQ ID NO: 427380 - DNA, 1044 bp, Serratia marcescens
atgatttccaaaaaactcagcatattagcatgtattgtcattaccagctgtaccacacatgtccctgtggactatcaatattatagaaccaaagcaaatgtttcggtaaaactgaccaagataataacctgcacaccagatgcccttccaatcacgacgatcgcctcaccagaaatagtcaccacttatagtgctgacgatagtaaacctccgttagtttttcatgcagaaaaaacaacggctattggctcggataccactagcagcatgagttggacgcctgattatagattgaaaggaatcaatatgactcatcatggccatggcaaagagatcgtcgctgctattgtttcgagtgtaaaaactctcgcactcatagctggaggcggcactgatattaatcagaaaaacaaaaaaaagctcatttgtaactatgtaaaaagaatgggaagtaataattctttatctgtaatattccaatacaaaatggatatcacacccgaaacaacaaatagtgtttatttagaaagcctatccccgcccggagcagtggaaagttttaacgccttatacagcgacagacgtttcaacccaacgctaactttcccaagaaaaagcaaatatgctatttcaccggtcacattcacaaatgaggaagagcaaaataaaaatgccgtcgcattaccgcttcagaaaatacacttggtaacattgcaaatagttgatgaaggcagccccgtagccgaaagcactattctggtccctggtgatgaaatctattatatccccgttccaaaagccgcactgtttggcgatacctcatttacactcaatacaaccccagcggtagcacctgagacaatttcttatagcaatctagataaaacaactgaagccatcattgcaggaaatgacgctgcaaacttactcactccccaaatgtggcaacaaaacgaaatcgatcgtgcaaaccgcgaacgcgaaatgattaaagcaaatgaaaaactggccgcatgcctggcaacccccaaggactgcaattag

SEQ ID NO: 427381 - DNA, 1467 bp, Serratia marcescens
atgttgaaaaccgcaggctggctgctgcccgccatcctggcgctggcggggtgttcgtcatccggccaacgccatgagcaaacgctcagccaggcgctggcggccatcggccaagacaaggcgctggttggcgcgtcgagcggcgtgatggtgcgcgatgccgacagcggcaccgtgctgtatcaggcgcacgcgcagcagcgcctggcgccggcttccaacatgaagatgttcacttctctggcggcattcggcgtgctgggggcggattaccggtttgaaacccggctgctgaccaccggcgagcagcgtggcgacaccttgcagggggatctctatctgcagggcagcggcgatccgacgttgcaccctgacgatctcgacaccttcgccgccacgctggcgcagcgcggcattcgccatattcatgggcggctgatcctggacgccagcgcgttcgatcaaacgcccttcggcgccggctggagctgggacgacgaacccttcgctttcggcgcgccgatctcggcgctgaactacgcctttacccccggcggcgatatcaacgtggtgcgggtggacgtgcagccgggcgcccgcgccggtgcgccagggcgggtgagtttctatcccgccaatgacgcggtgacgctggtcaaccgcaccaccaccggcggcgacaccgcactgacgttcgatcgccagccgggaagcaaccgaatcgtggtcagcggcaccatcgccgcgcaggcggagacccgctcgcgattgatcaccgtcgatcaaccggcccgcgtgatcggcgccttattgcaacatgcgctgcgcgcgcacggcatcacgctgcgcggtaacgcggaagagggcgtgacccctgccgatgcccggttgctggccgaaaaaacctcgccgccgctctctcgcctggccgtcaccttcctgaaggtgtccaacaacggttacggcgaggtactgaccaaggcgatgggccgcaagacgcagggcaagggggattgggccgccggcctgcaggcgatcggccagtttgtgcaaagccagggcatcgcggccggcgcgtaccgtcaggtagacggttccgggctgtcgcgcatgaaccaaatcacggcgcagcagctgacgacgctgctgctggcagccaggaaacagccgtggtttgccgcctggtataacgccttgcccatcgcgggccagccggggttgctggtgggcggtacgctgcagagccgcatggtgaagacggcggcggcgggccgcgcccacgccaagagcggttccatgaccggggtctcgtcgctcagcggctatgtcgactcggcgaccggacggccgctggcgttcgccatcatcagcaacaactatctggtgcccggcgcggaggtgaaggcgctggaggaccgcctggtcgagacgctggcggcctgtgacgccacggtagtgtgccgctga

SEQ ID NO: 427382 - DNA, 894 bp, Serratia marcescens
atggaccgaataaccagcatggctatttttgtcagcgcggtcgaagcggggtcgttcgccggtgcggcggaaaagttgcatatcagcccgcagggcgtgggcaagcatgtgcgttccctggaacactggttgggtgccaggttgttgcataagacgacccgccaacaaagcctgaccgaagtcggcgcgcgattttatgagcgctgcaaagcggtgctgatggaagttgaagccgcggaggccgtcgcccaggaactctccgccaggcctaaagggcagctgcgtatcgccgcccctttgagtttcggacatcatcaattggtcccgctgttgccgcgctttcttgaagcctatcccgagatacacatcgacctgcatctttccaaccggttggtcgacgtcgcggaagaggggttcgatgcggttattcgggtaccgctcgccggggatgagctgttggtgagcaaacggctgaaaacggagtctttttgcctatgcgcttcaccggagtatctggcggggcacggcgtgcctttgaccccagaggcgttggccgatcaccagtgcttgcacggcaactggagtgcgaacgaagtctggcaatttcagggggaagatcggcttcatcgcattaaggtgaacagccgcctcaagatcaataactggctggcgctgctcaatgccgcgcggcatggcggcggcattacgctacagccgctctcgcaggtgagcggtttgatcgccgatggcgagttggtggcgctgttgccggcgtaccgcattccggtcaaagaggtcagcctgctgtttttacccgatcaaaaaatgccgcttaagctacgaagctttatggattatgtgtgtggccgcttcaacgacggtcacgaggcatag

SEQ ID NO: 427383 - DNA, 987 bp, Serratia marcescens
atgaaataccgcacgctcccacacgcgctgtttggcctggcactcgcgctatcggcctggcacgcctcagcgcaaacggcaatgcctgacgccaccgaaaatgccatacgcgtcaccctgctgggcaccggtaatccggtgccgcgcatcgcgcgtgcgggcaacagcacgctggtagaggccggcaaacagaagctggtgtttgattttggccgcaacgccagcacccggctgtggcaagtgggtatcccgctggggcgaatcgacgccttctttctgactcactttcactccgatcacaccatcggcttccccgatctgtggctgacggggtggctgcaacccgtctatggccgccgcgccgtgccgttggagctgcatggcccaaccggcaccgtcgagttcgccgccgggctacggcaagcgttcgccagcgatattgcgacacggcaaaaggatgaaggcacgccgctcgacggcgtgacgatcaacgcccatgacgacgcccccggcctggtctacgccaaagacggcgtgaaagtcttcgccttcaacaacgatcatggcgtcaacatcaaaccgtcgttcggctaccgcatcgagtatcgcgggcgttcggtggtgatctctggcgatacgcgctacagcgccgaagtcgtgaagcaggcgacccatgccgatatgctggtgcactgcatctccatcacctcgcaagcgcagatgaaagccaacccgggttatcgggcaattgccgcccacctttcctctcccgacgatgtggcgcgtgtgctcaacgcggcgcgccccaagctggcggtcttcagccatatcggtttgaacggcgacgtcaccactggcgatatcgtgcggcaagtcggcgcaaaatatgacggcaacttcgtggtcggtgaagatttgatgcgatttgaaatttcaacccaaccggaacataacggtatcagaatgtggcaggtagaaaacaaatag

SEQ ID NO: 427384 - DNA, 1134 bp, Serratia marcescens
atgctcagacaaaccaatcttctggcggaagccaccgcgcgccagatcgtccagcgggcgatgggcatcatcagccattccgtcaacgtgatggacagcaacggtgtgatcatcgcctccggcaacccgcagcgcctgttccagcgccatgaaggcgcggtgctggcgctggccgagaatcgggtggtggaaatcgaccgcgccaccgccgagcatctgaagggtgtgcggcccggcatcaacctgccgttcagctttcgcaaccagcgggtgggggtgatcggcatctccggcgaaccggccgaggtgcgcgcctacgccgagctggtgaagatggcggcggagttgatggtggagcaggcggcgctgctggatcagcaccagtgggaaaagcgctaccgggaagagctggcgaaccagttgctgcagccgcagccgaacaccgcgtcgctgcaagcgatggcggcgtatctgggattggatctgcgccaggcgcgcatcgtgtggatcgtcgagctgcaagaggcgcagccgcacctgctgcgcgagctgctggcggagctggaggccacccagcgcgatgcgttgatcgccattaccggcttcaatgaaatgaccctgctgcgcccggcctgcatggcgcagggtgaatggagcctgaagctggaacgccaacaggcgcagcgtttgcaaaaccaactcaaacaccgctttcgggtgcgcttgatcgtcggcggtttttatgacgatccgcagagcgcctaccgttccagcctgacggcgcgcgccacccaggcgatggcgcagcgcctgaaactgcgtcacgccacgctgttctaccacgactacccgctgccgtcgctgttgtgcgatctgggggaggactggcgcgcgcaggagctggggcgcccctggcggaggctgggcgaacaggacgaaaaaggcgtgctgcgcggcacgctgcgccactatttttcgcagaattgtgatcagacgcagaccgccgcgcagctgcatatccacgtcaataccctgcgctatcgcctgcagcgcatcgaagcgataaccggcatgaaaatcaatcaattaaccgacgctctgcggttgtatattggcatgctgatgcacgactga

SEQ ID NO: 427385 - DNA, 381 bp, Serratia marcescens
atgacgcgtgggttattgatcattttaggctggctggcggtggtgctggcgacgttgggcgtggcgctgccgctgctgccgaccacgccgttcctgctgttggccgcctggtgcttcgcccgctcttcgccgcgctttcatcactggctgctgcaccgctcctggttcggtccctacctgcgtcactggcagcagcatcgcgcgctgccgccgggggcgaagtggaaggcggtgctggtgatcgtgctcaccttcgcctgttcgctgtggctggtgaaaatctggtgggtgcgcggactgttgctgctgatgctggccattttgctgacctttatgctgcgcctgccggttattgacctgtcgcaacaaaaacagcgctga

SEQ ID NO: 427386 - DNA, 3384 bp, Serratia marcescens
atgcatcgctggttgactctgccttctctggcgccgctcacgtttgtcggcgcatgccggcggcgcatcgccgccgcgacactccttttcctgatttttgcgtgctgcttgccggcacaggcggcgctgaacggcgatctgccgcagcgcagcgaagtgcaaagccagctggaaacgctgaacaagcaaaaagccctgacgccggtcgaaaagctctcccaacaggatttaacccgtacgctggagctgctggacgccattgagcgcaaccggcaggacgccgcacagcttaaacagcaggtgcagcaggcgccggcgaagctcaatcaggtcaccgccgaactggatgcgctgaagcggccgacggacaacgcggccgcgcgcgccgcgctgctgccgctgtcgctgcgccagctggaaagccggctgtatcaaacgctcgacgagctgcaaagcgcgcaggagagcctctccacctacaacagccaactggtgtcgctgcaaacccagcctgaacgggtgcagagcaccatgtatgccgcttcgcagcgcctgcaggagatccgcagccagctcagcggccagacgccggggcaagattcgctgcgcaacagccagcaggtgatgctgaacaccgaacaggcgctgctcaacgcgcagctggagctgcagcgtaagagcctggaagccaataccacgctacaagatctgctgcaaaaacagcgcgattacaccacggcgcatatcgacgcgctggatcggtcggtgcagctgctgcaggagctcgtcaacagcaagcgcctgacgctgtctgaaaaaaccgccaaagaggcgcagaacccggaagacgccaccgatatccagcacgatcagttggtcagcaagcagctggacgtcaaccgccagctgagccagcagctgatcgccgccaccgaagagagcaacaccctgttccagcagaatattcgggtcaaaaactggctcgatcgcggtctgcaggcggaacgtaacctgaaagagcagattcaggtgctgaagggcagcctggtgctgtcgcgcattctgtatcagcagcagcagagcctgccgcagggcacactgctggcggatatagacacgcgcatcgccgatctgcggctggagcagttcgatatcaatcagcaacgcgacgatctgttcaagggggaggattacatcaatcagctggtggccgaaagcaaggaaaaggccggcccggaagtgatagacgcgctgaacgaaattgtcgacatgcgccgcgagctgctggatcagctgaacaagcagctcagcaaccagctgtcgttatcgatcaacctgcagatcaaccagcagcagctgaccagcgtctacggttcgttgcaggatacgctgacccagcagattttctgggtcaacagcaacaagccggtcgatctggcgtggctgaaggcgatgcctgaggcggtgcgcgatcagctcgccgggctcgatatcaaattcgatggcggcaagctattgcagggcggtttgaatgcgctggtgttcctgatcccgatgctgctggcgatcgggctattgcgctggcgctaccggctgatcgacggccatctgcaaaagctggccaacgacgtggggcagcttaaacgcgacggccagctgcatacgccgaaggccatcgcgctgaccttgctgaaggtgttgcccggcgccgcgctgctgctcggcgtcggtttctggatgtatcgcgcggacttcggcatcagcgactttatctgggcgctgtcgcagcagctggcgctgtcatggctggtgttcggcttcagctaccgcatgctgaaaccgggcggcatcgccgagcggcatttcaatttcggcaccaacctgtgcgcgcattaccgtcgccagacgctgcggctggggctggcgctgcagccgctgatcttctggtcggtcttgggcgaaaaagcgccgctgcgcctggtggaggacgtcatcggccagatcgtggtgatgttgacgctggcgctgctcacggtgctggtgttcccgctgtgccgcgacagctggcgtgaaaagggctcgcacgccgtgcggctggtggtggtcaccgcgctcgccgccacgccgctgatcctgctggggctgatgttcgccggctacttctataccacgctgcggctggccagccgttggatagacagcctgtatctgttcttcctgtggaatatcgtgtacctgaccgcgctgcgcggtctgagcgtggcggcgcggcgtctggcctaccggcgcgcgctggcgcggcggcaaaacgtggcgaaggagggggccgaaggcggcgagccggtggtggaggagccgccgttggcgctcgatcagatcaaccagcagtcgctgcgcctgaccaccctggtgctgtttgctatcttcgccagcgccttctacgccatttggtcggatctggtgacggtcatcgcttacctggacagcatcacgctgtggcattacaccagcaccgtggcgggcagcagcgtgtcgcaggcggtgacgctgggcaacatgatggtggcgatcgccgcggtgatcgtcgcctacgtgctcacccgcaacctgcccggtttgctggaggtggtggtgctgtcgcggctgcagctgcggcagggggcatcctatgctatcaccaccgtgctcacttacctgatcaccgccgtgggcgcagtagtcgcattgggatcgctgggcgtctcctgggacaaactgcaatggctggccgccggtctgacggtcgggctgggcttcggcctgcaggaaatcttcgccaacttcgtctccggcctgatcattctgttcgaacgcccgatccgcatcggcgataccatcaccatcggcaccttctccggttcggtcagcaagatccgcattcgcgccactaccattaccgacttcgatcgcaaagaggtgatcattccgaacaaggcgttcgtcaccgagcggttgatcaactggtcactgtccgacaccatcacccgcgtgctgatcaaggtgggcgtggcctacggttccgatctcgacaaggtgaaaaaggtgctgctgcaggcggcgcatgacaacccgcgggtgatgaccgatcccgaaccgcaggtgttcttcctcaacttcggcgccagcacgctggatcacgagctgcggctgtatgtgcgcgaactgcgcgatcgcagctacaccgtggacgagctgaaccgctcaatcgatcgtttgtgtcgggaaaacgacatcgacatcgctttcaaccagctggaggtctatctgcataaccagcagggcaatgaagtgcaggaagtgaaaagaacgctgtcgccggatgaaggcggccagacggcgggctga

SEQ ID NO: 427387 - DNA, 354 bp, Serratia marcescens
atgcttgttacccttgcctgtagcctggaagtgaacgcactttctgttaaaaaattaaagaaagtgattaatgacaatatagcggagttagtgccggcgctgaccagcggactcagtttttattctgaaagcgcacgctatgccgaggattcattagaaatacttgatatagtgcaacaaggtgacaacgattattcaatgagttatcgctataagtggggcatttttaatgcctgtctggatatcaatagcgaagataccatcaatgatagcgcccggttccaagtgaccgagcaaggtttaatcttcgacatcattgataactcgcgtccatcaactgcggatgaattgtaa

SEQ ID NO: 427388 - DNA, 1716 bp, Serratia marcescens
atgcgcctggttcaccgtctcagccaatatcaacgcctgtaccaacagctcggcagcgcgccggtcgccgtgaccatcggcgagctggcggcgatgttctactgcagcgaacggcacgcccgcacgctggtgcaacagctgcaggatcagggctggctgagctggcattcgcagcccggccgcggcaaacgcgcccgcctgcattgcctgaaaaccccggatgaactgcgcgcgcagctgctgcaacagctgctgcaacagggcaaccatcagggggcgctggagatggcgcagctcgatccgcagcacctgcaggatctgctcagcccgcacctcggcgggcaatggcaggccggcagcccgacgctgcgcattccctattaccgcacgctggaagcgctcgacccactcacgctgaccggccgcgccgagcaacatctggtatcgaccctgcacgccgggctgacgcgcctgatgaccggtaatccggaaccgcagcccgatctggcgcaccactggcagattggcgagcacggcctgcgctggcgcttctttctgcgcagtcagctgcgctggcacaacggtgaaccgctgaccggccaacagctgctgcaaacgctggaaaagctgcagcgccacccgcgcagccaacccagcctggccaacgtcgcgcacatcagcctgccgcatccgctgtgcatccagttcgatctgcacctggcggactattggctggctcaccggctggcggagctgccttgcctgatgacccacccggagctgccgggcatcggcgccggcccgttcaagctggcgctgaatgaaccgcagctagtgcggctggaacagcacgccggttaccatctgcagcacccgtatctggacaccatcgagtactggatcacccccgacctgcccaccgccggcgccgacaccagttgccagcatccggtgcgcatcaccatcggtcagcaagacgatttggcgcaggccaggccggtgcagcgcagcatgagcctgggctggtgttatctggcgctgaacctgcgccacggcgtgctgagcgaagcccaggggcaaaagctgctgatgctgatccagcagtccggcctgctgagccgtctacctattcccaacagcgtgatcacccccagccatgaaatgctgcccggctggcgtattcccagccaacggattgaggaagatgtcaccctgcccgcccggctgacgctgctgtaccggccgccggtcgagctggaaacggtgacggtcgcgctgcagcggctgctggcgcagcacggctgcgagctggaggtgcgttactacgccggtaaacgctggcaaagcgaggcgcagatcgcccaggccgacctgctgctggcagacaacctgatcggtgaagcgccggaggcgacgctggagagctggctgcggcaggatacgctgtggcgcggtatcctgacggaaagccgctggcagcagcagcaggacacgctgcgacagatccagcagctgcaggcgcagcaaccgcgcttcgcacagctgcaggcttattatcaacgactgatggccgccgccatcatcacgccgctgtttcactaccagtatcagatcagcgcgccgccgcgcatgcatgacgtcacgctaaccgcccacggctggttcgatttttgccaggcgtggctgccgccgccggtggacagcgcaccggcctga

SEQ ID NO: 427389 - DNA, 381 bp, Serratia marcescens
atgcaacatacagagaaaaaagcgttatcaggttaccgtcatcacgtcaaagctgcgctcaccgcgctgcttttgtgcctggcggggccggccgccgcggtggataaagccgaggcgccggcacccatgctctcagcaccggcgagcaatggcgggcaatcggtgatgaccaagacagccgaggaggcggcggtcagcatcaatcaggccaccgccgaacagctggccgccgccttgagcggcgtcggtttgaagaaggcggaaggcatcgtgcgctaccgcgagcagaacgggccgttcacccaggttgagcagttgcaggaggtgccgggcatcgggccggcgctgtttgagaagaaccgcacccggctgaaaatgtga

SEQ ID NO: 427390 - DNA, 279 bp, Serratia marcescens
atgataagaagcttcaagcataagggactcaaaaagtttttcgaaaccggttcaacagcgggtatcgacgccaagcaggcgaagaaaatcgcgctgcggctgagcgtgctggatctggcgaaagtgattgatgacgtagatctacccggcttcttcttgcacccgctaacgggcgctcgcagcggacaatggtccgtcaccgtaaccggcaactggcgtatcacgtttgaactggtcgagggtgatgtttatatcgtgaattatgaggactatcactaa

SEQ ID NO: 427391 - DNA, 288 bp, Serratia marcescens
atgaaccgcatgcataacccccctcatcctggcgagttgatcaaagaaaccatggaaacgctgaatctcagcgcgcgcgcgctggctaaagcgctggacgttgcgccctccacggttcaacgcctgatcagcggaaagtccgatatctcgccggaaatggccatccgcctgtccatcgtgataggcagttccgaacaggtttggatgggcatgcaggatgcttacgatctgtggcaggccaggcagtccatcgacgtttcgaaactgcgcaagctggacttcgcttga

SEQ ID NO: 427392 - DNA, 1449 bp, Serratia marcescens
atgtccgtggcttttttacgtttaaaactatgggtcatcttcatgcaacaacagtcacccaccactgcccccgacaataagctgaaacgcggcctcagtacgcgtcatatccgctttatggcgctgggatcggccatcggcaccgggttgttctacggctcggcggacgccatcaaaatggccggcccgagcgtgctgctggcttacctgatcggcggcatcgtggcctttatcatcatgcgcgcactgggggagatgtcggtcaacaacccgcaggccagctcgttttcccgctacgcgcaggactacctcggcccgatggcgggttacatcaccggctggacctactgttttgaaatcctgatcgtcgccatcgccgacgtgaccgccttcggcatctatatgggggtctggttcccggaagtgccgcactggatctgggtgctgagcgtggtgctgatcatcggcgccatcaacctgatgagcgtcaaggtgttcggcgagctggagttctggttctcgttcttcaaggttgccaccatcatcatcatgatcgcggccggcatcggcatcatcatctggggcatcggcaacggcgggcaaccgaccggcattcataacctgtggtcgaacggcggcttcttcagcaacggctttatcggcatgatcctgtcgctgcagctggtgatgttcgcttacggcggcattgaaatcatcggcatcaccgccggcgaagccaaagatccgaaaaaatcgattccgaaggccatcaactcggtgccgtggcgcattctggtgttctacgtcggcacgctgttcgtcatcatgtctatctacccgtggaaccaggtgggcaccaacggcagcccgttcgtgctgaccttccagcatatgggcatcaccgtggcggcgggcattctcaacttcgtggtgatcaccgcttcgctgtcggcgatcaacagcgacgtgttcggcgtcggccgcatgctgcacggcatggccgagcagggccacgcgccgaagatgttcagcaaggtgtcgaaacgcggcattccctgggtgacggtggtggtgatgatgctggcgctgctgctggcggtatacctcaactacatcatgccggagagcgtgttcctggtgatcgcgtccctggcgaccttcgccaccgtgtgggtgtggatcatgatcctgttctcccaaatcgccttccgccgcagcctgagcaaagagcaggtgaagcagctggcgttcccgctgcgcggtggggtgttcacctcggtggtggcgatcgtgttcctggtgttcatcatcggcctgatcggctacttcccgaccacgcgcgtctcgctgtacgccggcctggtctgggtggtattgctgctggcgggatactggttcaaggtcaaccatcagaaaaaacgcgcgccgctggcgacgcagcaagactaa

SEQ ID NO: 427393 - DNA, 1164 bp, Serratia marcescens
atgagagtgattatcatgcgcacactattcccccgtgtcggcttaatcatgcgcaattccctcattttactgctgctttccctgtgcttcggcgtgttctccgctcaggcgaagacggtgaccgatatcaccggccgccaggtcgtggtgccggacaacccgcagcgcatcgtggtgggggaaagccgcatgctgtatacgctggcgctgctggagccgggcaacccggcgcagcgcatcgtcggctggccggcggatctggcgcggttcgatgcgcaaagctggcagctctatacgcagaagttcccgcagatcgccgcgatccccattatcagcggcaataatttccgccaggtcaatattgaaagcctgctgcagctgaagccggatctggtgatcctggcgcgctacgcgcgtgaagacggcgacaacgatctgctggtttccgcgctgaacaaggccggcgtggcggtgatctacgtcgatctgcgcatcgatctgctgaacaacaccgtgccgagcgtgcggctgctgggcgaagtgctcaatcgccagcggcgcgctgagcagttcatcgaattttatcagcagcatatggcggtgatccggcaacggctggcgggctatcaggggccgaagcccaaagtgatgctgcacctgcatctggggcggcgtgacacctgctgcaccaccgccgcgcacggcaacctcggcgatctgctgagcttcgccggcggcgacaacatcgccaacgccagcgtcaaaggggtttacggtgagctgaacccggaaaccattctgagcgccaaccccgacgtttacctcgccaccggcatggccgggccgcagggcaagcggctatccgatctgcgcctcgggccgcaggtcagccaacaggacgccgccgacagcttccgccggctgatcgccacacagccgatgctggccagcctgcaggcggtgaagcatcaccgcgcctggagcgtctggcacaacttttacctcagcccgtaccacgtggtgctggtcgagatgttcgccaaagcgttttacccggatctgttcgccgacattaacccgcagcagaccttccaacagctgtatcagcagtttttgccgttacctttttcagggacctattggagtcagttagataatgaataa

SEQ ID NO: 427394 - DNA, 1176 bp, Serratia marcescens
atgtcgcaaaacctgctgcgcgtgcgtgacggtcagggcgcttcggtctcgttttccgagctgctgttcgatctgatctacgttttcgccgtgacccaactttcccactatttgttgcatcacctgacgctgaccggcgcgctggaaaccctgttgctgtggttcgccgtctggctggcctggcaatacaccgcctgggtcaccaactggtttaatccggagacccgtcagatccgcctgctgctgttcgctatcatgctgctggggctgttcgccgccgccgcactgccgcaggcgtttggcgagcgcggcctgatcttcgcgctgttctatgtcgctattcaggtcggacgctccgtcacggtactgcgcctgctggcgcccggtcatccgttaaaacgaaactttcaccgcattctcggctggctgtgcatctccgccgtcttctggatcgccggtgggctggcggaaggcaacgcccgcctggcgctatgggcggtcgccgtcttgtgcgaatacgtctcgccgatgttcggcttccggctgccggtgctggggcgctcggacagcagcagcgagtggaccatcgagggtcaccatctggcggaacgctgccagctgttcgtgatcgtggcgctgggggaaaccattctgatcaccggcgccaccctgagcgagatggaaagctggagcctgccggtgctcatcgcctcgctggtggcctttctcggcagcctggcgatgtggtgggtctacttcgacaccagcagcaaagccggcagccatgccatcagccaggcggaaaaccccggccagctgggcgcttacttccattacgtgcacgtcgcgctggtgggggcgatcatcgtctgcgccgtggccaacgagctggtgatcgcccatcccgacggccgcatccaaaacgccacggcggcggtgttgctgctcggcccggcgctctacctgttcgccaacgcgctgtataaacggctggtgtatcatcgcttcccgctgtcacacctggtggggctgctggcgctggcggtattggcccccgtcgcctatttaaccgatctgctgatggtcaatggcctgacgacgctgatcatggtggtggtggcggtgtgggagagcatctcgcgcggcagaacgccgcagcggcatgcagaagcctga

SEQ ID NO: 427395 - DNA, 786 bp, Serratia marcescens
atgtcatcagaagccttctccgggccaaaggccctcggcgcattcctgcgcgcgcaccgcgagcgcatcacgccggaaatgctcggcctgcccagctcctcgcgccgccgcaccagcggcctgcggcgcgaggagctggcgcaaatcagcggcatcagcgccacctggtatacctggatcgaacaggggcgcgaggtgtccatttccccctatacgctggcacgcatcgccaaggcgctgcggctcggccccgccgaacgccactacctgtttaccctggcgcgcgtcgccgatcccgagcaggaaacgcaccgcgaaaccgccaacgacgcggtgctgcaaagcgtgcaccagatgacggtgccctgctacctgctggacgtgacctggaacgtcgtcgcctggaacccgcaggcggcggcgctgttcagcggctggctggatgtggccaacagccctaatctgctgcacttcatgttcttccacccgctggcgaaaacgctggtcagcgattgggaagaacgtgcccgccgcgtggtggccgagtttcgcgccgagaccagccatcaccaaaacaccgaagagatgcgcgccttcgttcgcaacatgacgcacaacagcgcggactttaatcactggtggaaacagcatgacgtgatggcgcgcgaaggcggcgagcgcgcgttcgagcaccctcagcaaggtgcgctgcgctatcgccagctcaccttccatccggcggagcacggcggtctgaagctagtaatgctgatcccgctgccgtaa

SEQ ID NO: 427396 - DNA, 747 bp, Serratia marcescens
atgcaatccgaagaacaacgccttatcgatggtctgtttggccgcctgaaagaagccgagaccaagacgggcccacgggatctccaggcagaacagcaaattaatcagcatattcgcgagcagccttccgccccttattacatggcgcaggcgatgatcattcaggaagcggcgctcaaacagatggaccagcgggtcaaagagctggaagcccaggtcgcgcagctgcagcaaaccgccaacggccagcagagcagcggtggcttcctggccggcctgttcggcggcggcagccgcagtacgccaagcccacgtgaacagtatcaggcgcagcagcaaaatacggcggcctggaacaacgcgcaacaagggggctactcacagccgcagcagccagcctatgcccaaccgcagcaggcggcgccttcgcgcgccggcggcttcctgggtggggctttgcaaaccgcggcgggcgtcgccggcggcgtggtattggccgacatgctgaccggcatgttccgccattcgcagccgcaggaaatcgtgaatattatcgaagaaaacccggcgccgctggacgacagcgcgatgcgcaatttcgacgcctccaacaaccttgataccttcaacaacggcgacggcggcagcttcctgaatcaggacaacggcttccagaacgccaactatcaggatgacacggactacgccgacgacgattacaacgacgacgacgattccttcctgtaa

SEQ ID NO: 427397 - DNA, 690 bp, Serratia marcescens
atgacttccgccgtgctttatacgctgtttcccgccgcagccaccgtcgtcggcgctgcggtggcactctatcgccgccccggtgccgccacgatgcgcgtcatccatcactttaccgccggcatcgttttcgccgccgccgccaccgaaatcctgcccgatctcaagcagcagtcgcctgtggccgtgttgctgggcggcgctgcgggggtgctgttaatgctgctggttaggcaactgggtgaaaaagcgcaggggccggtcggttttatcgccgcggtcggcgtcgatatctttatcgatgggctggtgctgggtattgccttcgcggccggcgccaaagccggtctgctgttgacgctggcgttgacgctggaagtgctgttcctggggttgtcgatcgttggcgatttgaaagactttctcggcaggcggctgcgggccatggcggcgatagtcggcctggcgctgctgctgcccgtcggtggcctgctgggggcgccggtggccatgctgggcgcattttggctgaccgcctttttggcctttggcctgatcgccctgctctacctggtcaccgaggagctgctggtcgaagcgcatgaaggcggaaaagagacaccgttcgccaccgcgatgttctttgccggcttcctgctgctgttgctgttagaggaaggtttggggtaa

SEQ ID NO: 427398 - DNA, 723 bp, Serratia marcescens
atgaaatcgttgcagaaatccgttttagcgctgtgtttgtttaccaccagcgccctgaccgcgttccacgcgcaggcggcagaggaagcccaaccgttcaccaccgcgcagcaggtggatctgacccacatcctgccgccgccgccggccaacgactcggcgcagacccagcgcgaactgcgggaagtgctcgacatgcagcaaaaacgcacgccggaaatggccagccaggccaaggcggatgcggaagagaacgtctgggtgtacagcaacgtgatggggccgaagttcaacgccaaagcgttgccggccgtgagcgccttcttcgatcgcatcgttgccaccgaagcggcggtggtcgatccggcgaaagatttctggaagcgcccgcgcccgcatatgctggacagccgcatcgagccgatcgtcaaacgctccagctccggctcttggccttccggccacaccacgctgggcacgctgatgggcatcaccctggccaacatggtaccggaaaagcgcgccgccatcatgacgcgcgcctggcaatacggtgacaaccgagtggtggcggggatccactacccttccgatatcgagatgggccgcatcgccggcagcgtgatcagccagcagctttcacagcagcaggatttccagcagcagtaccggcaagcgcgcgacgagctgcgccaggcgctggatttgcctgcggaaaaatag

SEQ ID NO: 427399 - DNA, 582 bp, Serratia marcescens
atgagccactttcgccctgtcgccctcgaacacgccagccgcctgctgaaccacggcccgacggtattgatcaccagccgcagccgcgacggcgccaaacgcaacgtgatggctgccgcctggtcgatgccggtggagttcagcccgccgcgcattgccatcgtggtggacaaaggggcgcacagccggcaaatgatcgaggaaagcggcgcattcggcatttgcgtgccggcagccatgttcatcgacgccacctacgcggtcggcagcgtgcccgggctggatgacgacaagttcgcccgcttccacatcgccgcggcgccgagcgccaccctgcaggtgccgctgatcgaacagggctgcgtggcgtggctggagtgccgcttattgccggaaagcggcgcgcaggaaaaatacgacacctgcttcggcgaggtgctgagcgcggcggcggacgagcgggtgttccagcaagggcgctggaacttcaccgccgccaatgcggatctgcatacgattcatcatctgggggcgggcaacttcgtgcgcagcggcgagacgctgcgggccaaaccgctttaa

SEQ ID NO: 427400 - DNA, 1602 bp, Serratia marcescens
ttgacgttttcaaaacaccctatcgccgcgctggcgctggcaagcgccggcctgctgacggcgggcagcgcgctggccgcttccgatgcgctggtgtactgcaccgtcgcctcgccggaatcgttcaacccgcagctctccagctccgggccgacctttatcgccacctcgcaggtgctgtacaaccgcttggtaacgctgcgcgaaagcgataaaacccccgccccttcgctggccaccgagtggagcgtcagcccggacggtaagacctacaccttcaccctgcgccagggcgtaaaattcaacagcaacaaatatttcaccccaacgcgcgacttcaacgccgaagacgtggtgttcaccgtgatgcggcagaaggatcccgctaacccgtatcacaaggtctccggcggcaactatgaatacttcaccgacatgggcctggataaactgatcgccaaggtggaagcggtggacgagcatcatgtgcgcttcacgctgagccagcccaacgccgccttcgtcgccgactgggcgatggatttcgcctcgatcctgtccgccgaatacgctgacgcaatgttgaaaaagggcacgccggaatacgtcgacaactggccgatcggcaccgggccgttcgcgctgcagcagtacaagcaggattcgctgatccgctacatcgccaacccgcactactggcagggcgaagtggccagcaagcatctgatcttctcgattacgccggatccgcaaacccggctggccaagctgaagaccaacgaatgccagatcatccccgcgccgctgccggaacagttcgccgccatcaaggccgacggcaacctgcagctgcacgacatcaccgggctgaacgtcggctatctggcgttcaacacccagaaaaaaccgttcgacaacctgctggtgcgccaggcgctgagctatgcggtggacaagaaagcgatcgtcgccgcggtgttcaaagacagcggcacgccggccaactcgctgctgccgccgggcatgctgggctacaacgataaactgccggagtacgcctacgatccgcagaaggcgcgcgagctgctgaagcaggccgggctggagcagggctttgagaccgacatctggtcgatgccggtgcagcgcccctacaacccgaattcgaagcgcatcgccgagatgatccagagcgactgggcgaaggtaggcgtgaaggccaagatcgttacctgggagtggggccagtatctggccgggctgcgcaaaggcgaacagcagagcgcgctgtacggttgggtgtcggacaacggcgatccagacaacttcgccaccctgcttggctgcgccggggtgcagagcggtgccaacgtggcacgctggtgcgataagaattacgacagcctgatccagcaggcgattcaggagaatcagccgcagacgcgcgccaagctgtatcaacaggcacaggtgatcttcgccaaacaggcgccgtggctaccgctggccaccggcaaagtgttctacgccacccgcagcaacctaagcggctacgtggtggacgtgaacggcagcgacttcgccaaggccaaattaaactga

SEQ ID NO: 427401 - DNA, 219 bp, Serratia marcescens
atgagcagaaaagacaagctcgcggcggccctgctggccatcttcctgggtgggttgggcattcacaagttttacctggggatgaagtggtgggggctgttctacctgctgttctgctggacggggatcccggcgattgtcggctttatcgaaggcattatttatctgttccagtcggaagagaaattcaaccagaaatacaatccgggtctgatttaa

SEQ ID NO: 427402 - DNA, 1044 bp, Serratia marcescens
atggcggtagtttccgaaggattgcatggcgcggcccggcgacgggcggtatccctgttgctggggctggtggcggtcaacgtcatcgtctggctgctggcgctggcggtgttcaaagacaatgccgcgctgatgggcaccgccttgctggcctacagttttggtctgcgccatgcggtggatgccgatcacattgccgcgatcgacaacgtgacccgcaagctgatgcagcagggcaaaacgccggtggcggtcggtaccttcttctcgctcggccactcgaccatcgtggtgctggcctcggccgcgattgccgcgacggcgatgatgttcagccgtcagatgggctggtttcacgaaaccggcggcctgatcggcacgctggtgtcctcgttgttcttgctgacggtcgcctttatcaatctgctggtgctgatctccgtgtggcgagcgttccggcaggtgaaggcgggcgagctgccagcgcatcaatcgctggatctgctgatgagcggcggcggtgtgctggcgcgctgtttccgcccgttgttcaggctggtgaaccagagctggcacatgtacctggtgggtttcttgtttggcctgggctttgacaccgccaccgaggtcgggctgctggggatttcggccgccggtgcgggccacggcatgaatctgtggagcatcatgctgtttccggcgctgttcgccgccgggatggcgctgatcgactccatcgacaacttcgtgatgattggcgcttacggttgggcgttctccaaaccgatccgcaagctgtactacaacatgaccatcacggcggcgtcggtgatcatcgcggtgtttatcggcggcatcgaagcgctcgggcttatcgccgacaagctggcgctgtccggcccgctgtgggacgccgtcgcgcggctcaacgatcatctgggggagatgggctattgggtgatcgccgtgttcatcttctgctggttggtgtcggtggtgaattaccgcctgcgcggctacgacaaactgacggtcagcggttga

SEQ ID NO: 427403 - DNA, 978 bp, Serratia marcescens
atgacgacaaggtggagttggagcgggctgtgtgcccacagccggatagcggcggcggcggatgcggtgctgcgcggctgttcgcaggtgatgtttcaaaataacccgttgaccggattactgttttttatcgccatttttgtgggcgcctatgaggaagggttgccgcaggtggccttcggctgtctgctgggcaccgcgtcggcgacgctgagcgcggcgtggctggtggacgatcgcacggcgttgcgctctgggctgtatggctacaacggctgcctggtcggtgccgcgctgccgacctttttactgccctcggcctggctgtggatcggcgtgatgttcagcagcacgatctcggtgatcgtcaccgttggcctcaatcggctgttgcgcacctggaagatcgcggcgctgacggcgcctttcgtgctgaccacctggacggtgctgttggccagctacccgttcagccatctgcggcatgtacggttgccggcggcggccatcccggccgacggggcggtgttctacgcgcatcccggcgtcgcagagatgctgagcggcgcgctgcacggcgtttctcaggtctttttgtgcagcagcgtgagcggtggcgtactgctgttgctcgggctggcggtgtcgtcgccgcgcgcgatgctgctgggttttttcggcgcgttgctggcggtggccacatcgctggcgatcggcgccgatccgcaggcggttttcgccgggctgtacgccttcagcgcagtgctgacggcggtggcgctgggatccgtcttcaacccgcccggccagcgagtgctgatctatacgctgctcggcgtgatttttacggtgctggtgcagggcgcgttcaataccctgctggccccgctgggcatgccgtcgttgaccatgccgttcgtgatcgcgtcctggctgtttttgagcgccaatccggcggtgatcgcggcgcggcgctaa

SEQ ID NO: 427404 - DNA, 948 bp, Serratia marcescens
atgacggcggtcagcgaagccgcgagtcgcgtcgcgcagcttggcgccgacgcgccggagctggccgattatcaggatgagccgccgcaaatggccagcggcggcgtgggcaaaaccggctatctgcggctggggtttgcgctaagcgggcatcgcagcgtgctgcggcagatggagcggcgcgtaccgtttctggtgcagcgggcgctgtattgggatgaagcgctgccgcagatgccgtgcgtgttcgtcatctccacctcggggtgcatcttgcagggcgatcgcctgacgctcgaggtgcaggtcgcccctcaggcctgcgggcatgtcaccacccaatcggcgaccaagatccacgccatggaaaataactacgcggcgcagatgcagacgctgacgctcgaagagggcagctatctggagatgatgcccgatccggtgatcccccactgcggctcgcgcttcattaccgatacccgcattacgctgcacccgacggcgacgctgctctacggcgagatcctgatgtcggggcgcaaacaccatcaggcggatcgcgggttcagattcgacgtgtactcctcgcgcatcagcgcctgccgccccgagggcaagacgctgtttgtcgaacgctatgtgctggagccgcataaacacccgctgaacggggtcggcgtgatggggccgtttgacgtgttcggcaatgtgatcctgctgacgccgcccgagcaccatcagcggatcctcgatcgcatcgcaccccagtatgacgaggttgaggggatcgccagcggcgtcagccggttgcccaacgagtgtgggctgatctttaaggccctgggcaaagaggcgcgccaggtgaaggcggccattcgcgttttctggcgcgtcgcccgggaagagatcctgggcgtgacgctgccggagccctttatctggcgctaa

SEQ ID NO: 427405 - DNA, 636 bp, Serratia marcescens
gtgaaaaaaattacccgcatcggtatcggcggcccggtaggctcgggcaagaccgcgatcattgaagttatcacgccgcgcttgatcgagcggggcatcagcccgctgatcatcaccaacgacatcgtcaccaccgaagacgccaaacaggtcaagcgcacgctcaaggggatcctggacgaggagaaaattttgggcgtggaaaccggcgcttgcccgcataccgccgtgcgggaggatccgagcatgaatatcgcggcggtagaggagatggaggcccgcttcccggaaagcgacgtggtgatgatcgagagcggcggcgataacctgacgctgaccttcagcccggcactggcggacttttacatctatgtcatcgacgtcgccgaaggggaaaagatcccgcgtaaaaacgggccgggcctggtgcaggccgacatcctggtgatcaacaaaatcgatctggccccctatgtcggcgccagcctggcggtgatggaacacgacacccgcgtggtgcgcggcgagcggccttatattctcaccaactgcaaaaccggcgaaggcatcgacgagctggtggacatgatcatgcgtgatttcctgttcacccatgcgccgtcggcggcggtatga

SEQ ID NO: 427406 - DNA, 687 bp, Serratia marcescens
atgaacgccgtccagttgattcgcattctgcagtttgccgactcggtgctgccggtgggggcgttcgccttttccaacggcgtcgagtcggcgatccaggccggcatcgtgcgcgatgccgacacgctgcagtcgttcacccgcaccgccttgcaacaggcggcgggcggcgacggccgagcggtgacggcggcctgccgggcgctgcaggcgggcgatcgcgaggcggcgatggggcacgactgggcgctgttcaaccgcaagctgaacgaagagggccgcaacatggtggtgcggatgggaaaaaagctggcggaaatggcggcggccatctgtgacgaacctcaggtggtctggtggcttgagcagatcaaaaccggccgcgccgccggcacctatccggtgacgcaggcggtggtgatgacggcgctgggcgccggcccgcgcgaggtggcggtgatgcatcagtacggcgtggcgatgaccattctcagcgccgccatgcgcctgatgcgcgtcacccatatcgacacccaacgcatcctgtttcaactcaaccgggacatcgacgtttgttgcgacgaagccgaacgcggcggcgttgaacaaatggcctcttacgcgccggtgaccgatgtcctggccgcactgcacgtcggcgcgtttacccgactgttcagcaactga

SEQ ID NO: 427407 - DNA, 597 bp, Serratia marcescens
atgatcgtgattgaaaagatactcggcaatattaaacgggatgccgactggcgcgaacgcttgcaacacgcctcgctggacgtgctgccgctttcgcagtgggaggcgcagaaaagccgctgccgcaagacgactcgcgacggccaggatcttggcatctccctcgatcgtcatcaggtgctggccgacggcgacgtgttgctttgggacgaagcgaaccgcagcgcggtggtggtgcagatgaacctgcgcgacgtgatggtcatccatcttgagtcgttgctggcgaccgatatggcgacggtgctgaagaccgcgttcgaactggggcatgcgctgggcaatcagcactggaaatcggtcatcaaagggaatcgcatctttattccgctgacggtggcgaccaaggtgatggattcggtgatgaaaactcacggtttccacgcgttgccttattcgttcgtaaagggcgaaaccattttgccgcatttgacccagcccgaagcgcgcttgctgttcggcggcgcggaggattccgccacccatgtgcatgtcgacagccccttcctcggccagcatgtgatcaaactgaaatga

SEQ ID NO: 427408 - DNA, 1716 bp, Serratia marcescens
atgccaactctctccaggcaagaatatgccgggctgttcggcccaaccaccggcgataaaattcgtttgggcgatacgcaactgtttattgaaatagagaaagacctgcgcggctacggcgaggaatcggtctacggcggcggcaagtcgctgcgtgacggcatgggcgccgacaaccgattaaccagcgataacgtgctggatctggtgattaccaacgtaacgattttggacgcccggcaaggggtgatcaaggcggacgtcggcatcaaaaacggcctgatcgccggcatcggcaaaagcggcaacccggcgatgatgaacggcgtcacgcccggcatggtggtgggcgtcagcaccgacgccatctcgggcgagcacctgatcctgaccgccgccggcatcgatacgcatatccacttcatttcgccgcagcaggcggcgcatgcgctctccaacggcgtgacgacgttcttcggcggcggcgtcgggccgaccgacggctccaacggcaccaccgtgaccgccgggccctggcatatccaccgcatgctgcgcgccttcgagacgatgccggtcaacgtggggatgctcggcaaggggcacgcttcgcacgctgcgccgctggtcgaacaaatcgccgccggcgtggcggggctgaaagtgcatgaggactggggcgccaccaattccgcgctgcgccacgcgttgcgcgtggccgacgacatggatattcaggtggcggtgcacaccgacagcctgaatgaaggcggttacgtcgaggacaccatcgacgcctttgaagggcgcaccatccacaccttccacaccgaaggcgccggcggcgggcactcgccggatatcatcaaggttgccgcgcagatgaacgtgttgccgagctccaccaaccccacgctgccgttcggcatcaacagccaggccgaattgttcgacatgatcatggtgtgccacaacctcaatcccaatgtgccggccgacgtggcgttctccgaaagccgggtgcggccggaaaccatcgcggcggaaaacgtgctgcacgacatgggcgtgctgtcgatgttttccagcgattcccaggcgatggggcgggtcggcgaaaactggctgcgggtaatgcagacggcacatgcgatgaaagtcgcgcgcggcaagctgccggaagacgcggcggagcacgacaacttccgcgtgttgcgctacgtggcgaagatcaccatcaatccggcgattgcgcagggcatcagccacgtgctgggttcggtcgaggtcggcaagatggccgatctggtgctgtgggagccgcgcttcttcggcgccaagccgaagctggtgatcaagggcgggatgatcaactgggcggtgatgggcgatcccaacgcgtcgttgccgacgccgcagcccacgttctaccgcccgatgttcggcgccatgggcaaatcgctgcaggaaacctgcgtcaccttcgtctccggcgccgcgttgcacgacggcatcaaagagaaactggggctggagcgacaggtgatggcggtgcataactgccgggcgatctccaagcaggacatggtgcgcaatgcggaaacgccgaacatcgaggtggatcccgaaaccttcgcggtcaaggtcaacggcgaacacgccacggtgaagcccatctccaccgccgtgcttaatcaacgctatttcttcagctag

SEQ ID NO: 427409 - DNA, 447 bp, Serratia marcescens
atgaaaaagcatgacccagaaaagcacgtgccgcccggcggctatatcctgtccgaaaaccccattacctttaatgaagatcgcgaaagccttattttaacggtgcgtaacaccggcgacaggcctattcaggtcggttcgcattttcatttctttgaggccaacaaagccttgcaattcgatcgcgctgccgcctttggcaagcgtttgaatatcattgccacgacggcgatccgttttgaacccggtgacgagattgaggtggcgcttattgccatcggcggcaaacaaacggtctacggttttaataatctggtggacggttgggcgggggacagcccggtagcggccggtgaaagagtaaagaaaacgatagatgtaaagcgagctattgagctgggttataaaaacctcgatcaggcgccgacgaaaacgagcgaggaataa

SEQ ID NO: 427410 - DNA, 303 bp, Serratia marcescens
atgcaattaacgccaagagaaattgaaaagttgatggtctataccctggccgacgtcgcattaaagcgaaagtccagagggataaagctgaattaccccgaggcggtggcgattattaccaccgcagcgctggaaggcgcccgcgagggaaaaacgctggaagaagtcatgaacgacacgcggcaggtattgagccgcgatgacgtgatggacggcgtggcggatctgatcccgcacgtgcaggtcgaagcgatattcagcgacggcagccgcctggtgacggtgcacgatccgattcagtaa

SEQ ID NO: 427411 - DNA, 150 bp, Serratia marcescens
atggatatgacgacgctcttgctctataccgtggccgtcgcggcggtcaccatcataccgggcccaaccatgctgttggcgctcaatcacgacgccaccaaagcgccgcctgcggtattgcaggcgcggcgctgtccgacctgctgttga

SEQ ID NO: 427412 - DNA, 273 bp, Serratia marcescens
ttgattggcgccgtcggctgcggcctgggggcgatattgcaagcttccgaacaacttttcacgctggtcaaatgggccggcgccgcttatttattctatctcgcctaccaactgtggcgtgccccgcaggcggtgcaggacaccatgcccggcgcccgtaacggccgcactgcgtttatgcgctcgctgttggtcgcactttccaatcccaaagggctgctggccggattggccgtcgccctgagcctctatcgccgcaacgcgtcgtcttag

SEQ ID NO: 427413 - DNA, 1452 bp, Serratia marcescens
atgcattttcgcgccataacccgtatcgttggtctgctggtcatcctgttctccgggacgatgtttattcccggcctggtggcattgatttaccgcgatggggcggggcgtgcgttcagccaaaccttcttcgtggcgctgaccatcggtctgatgctgtggtggccgaaccgcaaacagaaacacgagctgaagccccgggaaggctttctgatcgtcgtgctgttctggaccgtgctgggcagcgtgggggcattgccgttcctgttttcggaacggcccaacctgtcgctgaccgacgccttctttgaatccttctcgggattgacgaccaccggtgcgacgacgctggtgggattggactcgctgccgaaggccattctgttctatcgccagatgctgcaatggatgggcggcatggggatcatcgtgttggcggtggcgatactgccgatactcggcgtcggcggcatgcagctgtatcgggcggaaatgccagggccgctgaaagacaacaagatgcgtccacgcatcgccgaaaccgccaaaaccctgtggctaatctatgtattgctgaccgtcgcctgtgcgctggcgctctggggggctgggatgtcggtgttcgacgccatcggccacagtttctcgaccatcgccatcggcggtttttctacccacgacgccagtatcggttattacgccagtccgaccatcaacaccatcatcgctgtgttcctgttgatttccggctgtaactacggcctgcacttcgctttgctaagcggtcgcagtctgaaggtgtatgggcgcgatcctgaattccgcatgttcatcttcgtccagttgacgttggtggtggtatgcacgttggtgctctgggggcatggcgtctataagagcggtatggaaacgctcaatcaggcgttcttccaggtggtatcgatggcgaccacggccggttttacgaccgacagcatcgccaagtggccgctgtttctgcctatgttgttgctgtgctcggcgttcatcggcggctgcgccggctcgaccggcggtggcctgaaggtgatccgtatcctgcttctgtacctgcagggctcgcgcgagttgaaaaggctggtgcaccccaacgcggtctataccatcaaattgggcaaccgcgcgctgccggaacgcattctggaggcggtatggggattcttctccgcctatgcgctggtgtttatcgtcagcatgctggcgatcattgccaccggcgttgacgacttttccgcgttcgccgcagtgacggcaacgctcaataacctcggccccggcctaggcgtagtggcggataacttcaccacgatgccggcggcggccaagtggatcctggtggtgacgatgctgttcgggcgcctggaagtgttcacattgctggtgctgttcacgccaaccttctggcgtgagtga

SEQ ID NO: 427414 - DNA, 1197 bp, Serratia marcescens
atgactaaggcggcttgtgtcaaacgcagcggcttatggagtattcccgccagaaccatgacgctggcgtgtctgttggtatttatggcgcagatggcgacgaccgtatacctgccttcgctgccgacggtgatgcgcgagttggcaatgagccggcgcgccaccgagctgtccatttcgatcttcgtcatcggcgctgccttgccggtactgttctggggcgcggctgccgatcgctttggccgccgagcgccgctgacgctttccctgctgcttttcattggctgcagcgggctgttggcgctgtgcagcaacggcgcccagctgctggcgctgcgcgcgctgcagggtgtgggcgccggtggcgcggcgatcattgcacgtatcatcgtgcgggataactggagcggtgatgagctggcacggcggctgtcggtgctctctatcgcttttatcaccgcgctgggcggcggtcagttcgtcggcggcctgctcagccaatattcgcactggcagatgggcttcgtcttgatgggggccaccggtttggccattctggcgctgatggcgacgctgccgctggaggcggggcgcggtcgcgggcctcgcccggcgatgacggctacctacttcgccatcttgcggcggccgggatttttttggccggcctgcgtcggcgggctgggtttcgccaccacggtgacgctgcaggaggtgagcccgttcgtcatgcaacagggttttggtctcaacgtcacggcgttcggcgcgctgggcttggtgatcggcatcgcctactttagcggcgcgttgacggtgaaccgtacggtggcgcgcgtcggcgggaaaaaactgatgcaaaccggcagcggcatcgtggctctggcgacggtggcgatcctgatattgtggtggagcggcattctgaccggcctttccggtatggcgctgttcatcgcgctgtattgcctgaccatttttggccaggcggtgttgtttcccaacagcatggcgatggcggtcagcgacgccaaagagtacggtgcctatgcgatggcgctgtgtggctttctgcagcagtgtctggcgggcgtcgccgcggccggcgcggtgttgttggagcaccatggcctgtgggcgctggcgatagcgttgctcggcctggtcggctggttaatggttaaactgcggatgtaa

SEQ ID NO: 427415 - DNA, 1314 bp, Serratia marcescens
atgaaaaacgctacttcatggtgttttattttcattgcgctgttatcaaccagcgctcaagcaaccgataaacgctttctgatgtcgccttttttcagtgacagtcatgctgagctctctgtgaaaaattactggcagtatctcaaagaagacgccgctaacccgaaagaggtgcataacgcctggggacaaggggtagcgatgagttatcagtctggttattgggcagattttgtcggtgttaacgtcgattactacagtgcagtgaagctgggagccagtgattatttcaatactcgaggcgtgttgtataacaatggtcctggctacagcaaaaagaatgcgacgggttacagcaaggttggccagcgttatatcaaattgaaaggcgatatgggtagcacggcgcttggcgctcaggttggttggcagatgctgcgcaattacagcgtgatttctacgtcgactcgcctgtctccgacggcttatcaaggatggtcaggcgaggtgtccaatggtgggctgtctttgcgcggggcctatgttgagcgctccatggatcgtaattcacctgacagcctgcgtttgcaaaccaacgatggacgctatatcaaccaccttgccggcgtagaattaggttatgagaacaaagtgtttaacagccaattggcctatggagaatcacagaactatttacgtcgccagatcgtgcgcatggggagaaaagttaacgacaaactcagtctgggcagccagatttacactactcaggccctggatgattataaacagatggcgttgagcaagcgccacttcgatcggtatgccaatcactatgctgtcgatattaaatggcaggaaccgctttggagtctcaaagccggcatcgcccgcacgcgagcgccgaagggggaagggaaactcgggttttatccgcgacatatgtcgaagaattctcgtggcacctttacttcaatggcttacgccggtgaagactacatgcgccatggtgaaaccatgatggcggccattgctgaatataacctcacacctgaattcaccgccgggttggtgggcaatgtcggccagttcaattaccagggcgcaggagtccgaaccggtgaggttagtgcgtttggccggtgggtgccttctcatcccaagttgaaaaatttgacggtgtttacgatggcaggaccggggtggtcttacaagaatgccaataagacgccgatactggttgacggacatgctcaaaccgcccactcgttgtccgctaaatttatcgccgagtaccgtttcaagctgttttag

SEQ ID NO: 427416 - DNA, 792 bp, Serratia marcescens
atgaaaattaaaacgtggttgtttgttaccgctctttctctttccgccatgtcggctagcaacgtttttgcctcggagaccgacagcgtcaatatttatttcgcacgtcacggcaagaccctgctcaacacttacgatcgggtgcaaggctgggcagattcaccgctaacgtcggccggggtagaaacggcccgctatcttggcgtaggtctgaaagacgttcctttcgatcgttattacaccagcgatgccggacgtcagcgtgaaacgatgcaggtgatcttgagggagatgggaaagtcgcaagctcgagtgacggaattgcccgatctgcgagaaatgttttttggcggatttgaagggcttcccaacggtgaaatggccgacgccgcagcgaaaaagcttgggctggcttcaggaaaggtgctgtttgaagaaatgaaagcaggccgcgtttctcttatccctatggtggatgccattgggcagagcgacgagaagaaagaagcggaaacggcaatacaggtaagaacgcgcatgcagcgagcattatatgccatggtgatggaagcgacaaaaaatggggataaaaatatattggcggtctcttccggattgtcgatgcagatgatgatttctgatatgacggataatccggataaaaacaaacctctgtctaacgccgccgtcgtgagaattacttatgaaaatggggcttatacggtaaaagatattggggatatgagttatgtcgctaaaggaaaggcaatcttaaataataatcgcagatga

SEQ ID NO: 427417 - DNA, 2289 bp, Serratia marcescens
atggggaatatgacgatggcaattttgaatcacacactgggttttcctcgcgttgggctacgacgtgagctgaaaaaagctcaggaaagctactgggccggcaactcaacgcaggaagagctgttggcggttggccgcgagctgcgcgctcgtcattggcagcagcaacagcaggccggggtggatttggtgccggtcggcgatttcgcctggtacgatcatgtgttgaccactagcctgctgctgggcaatgtgccggcgcgccatcagaatgcggatggctcgatcgatctggacacgctgtttcgcatcggccgtggccgcgcaccgaccggcgagccggcggccgcggcggaaatgaccaaatggttcaacactaactatcactacatggtgcccgaattccagcaaggccagcagttcaagctgggctggactcagctgctggacgaagtggacgaagcgctggcgctcggccatcgcatcaagccggtgctgctgggcccggtgacctatctgtggctgggtaaggtgaagggcgagccgttcgatcgcctgtcgctgctgaaagacatcctgccggtttaccaacaggtgctggccgagctggcgaaacgcggcgtcgagtgggtgcaaattgacgagcctgcgctggtgctggagctgccgcaagcctggctggatgcgttcaaaccggcttacgacgcgctgcaggggcaggtgaagctgctgctgaccacgtatttcgacagcgtcggccacaacctcgataccgtccgcacgctgccggtgcaggggctgcacgtcgatctggtcgccggccatgacgatattgccgcgctgagcgccgcactgccgaacgactggctgctgtcgctgggcgtcatcaacggccgcaacgtctggcgcgccgatctgagccgctggttcgaacgtcttcagccgctggtgggcacccgcccactgtggatcggcagctcctgttcactgctgcacagcccgatcgacctgagcgtggaaagccgtctggacgaagaagtgaaaagctggttcgccttcgcgctgcaaaaatgcgccgagctggcgctgttgagctcggcgctgaacgcgcctgacgcggccaagcaggctgaactggatgcctacagcgcaccgatccgcgcccgccgtcagtcgagccgcgtgcacaacccacgggttgagcgccggctggccgcgatcaccgcgcaggacagcgaacgccacagcgcttacgccgagcgtgccagggcgcagcgcgaacgtttcaacctgccggcctggccgaccaccaccatcggttcgttcccgcagaccaccgagatccgcggcctgcgtctggacttcaaacagggccgtttggacggcaataactaccgcaccagcatcggtgagcacatcaaacaggcgatcgtcgagcaggagcgcctcgggctggacgtgctggtgcacggtgaagccgagcgcaacgacatggtggagtatttcggcgagaacctggacggcttcgtgtttacccaaaacggctgggtgcagagctacggctcccgctgcgtgaagccaccggtcatcatcggcgacgtcagccgcccggaagccatcaccgtcgaatgggccaaattcgcccagtcgctgaccgacaagccggtgaaaggcatgctgaccgggccggtgaccatcctgtgctggtcgttcccgcgtgaagacgtgacccgcgaagtgattgccaagcagattgcgctggcgctgcgcgacgaggtggaagatttggaaaaagccggtatcggcatcatccagatcgacgaacccgccctgcgcgaagggctgccgctgcgccaatccgactgggccgcgtacctgaactgggcggtggacgccttcaaactgaacgccgccgtggcgcgggacgacacccagatccacacccacatgtgttactgcgagttcaacgacatcatggactccatcgccgcgctggacgccgacgtgatcaccatcgagacctcgcgttccgatatggatctgctggaagccttcaaagagttcgaatacccgaacgaaatcgggccgggcgtctacgatatccactcgccgaacgtgccgagcgtggaatggattgaagcgctgctgcgtaaagcggcgcagaacatcccggcggaacgcctgtgggttaacccggattgcggcctgaaaacccgcggctggccggaaacccggcagtcgctggccaacatggtattggcggcacagcgcctgcgcgagcacgcgtga

SEQ ID NO: 427418 - DNA, 759 bp, Serratia marcescens
atgaatttgcaattacagcaacgcacggcattggttacgggcgccagcgaagggatcggtgccggcatggtcagggtattggccgctcaaggtgtcaaggtagtggccaccgcacgacgcggtgaccggctgcaggccttggcgggtgaggtggaacggcaaggggcggtgcgtccgcaggtgatcgttgcagacgtaaccgaccctgaggcgatagcccgtttggcggcgcaggcgctgcgccaggtggggacagttgatatcctgatcaacgcggtaggcgcgtttcaccccacgacgctgaacgacagcgatcgtagctgggatgacgctttcgctttgaacttcacgccggcccgcagattgactcaggcgctgttgccggccatgcaggcgcaaggctggggccgggtgatcaacatcagcggatcgatggagccgcgcagcctgagcgccgccagcgccgccaagggcgcattgcatctgtgggccaaaggattggccagcgacgtggctgcgcaggggattaccgtcaatacgctgcaacccggacgtatcaacagtgaacagatccgtgagcgcttatacgcttgcgatgaagcgcgccaggcgttcattgcgcaacatatcccgatcggctacttcggcgaaccggaagacatggcctatctggcggcgtttctttgctccccgctcgcgcgatatatcaccggcgcggtgatcccggtagatggcggcatgcattatttcgcgcattga

SEQ ID NO: 427419 - DNA, 864 bp, Serratia marcescens
atgtttaactggcaggatttaaaacacttcgtggcgctggcgcgcaccggttcgttgtcggcggcagcgcgggagctgggttgcgatcacgccaccgtcgggcgacgcgtagcggcgctggaacaggcgctcggcctgcgtttgatcgtacgactgccgcgcagcacaccgttgacccaggacggacaggcgattgccaggctggcggcggagatcgaggcgcaaagtcaggctattgcccgccatgcgcgcagcgccggcgcaacgccccaggccggcgtgcgcatcagtgcgccgccgtcgatcgccgcgcatattctcgcgccgcgcattgccgcatttaaccaggcttttccacagatcgtcgtcacgctgtcaggtgaatcggcgctcgccgagctggatcgcggcgaagccgacatcgccgtgcgcatggtgcgcccgcagcagccagagctgctgacgcagcgcatcggcatgatgcgctacgcgctgtatgccgcaccggagcacgccgcactgcccgacgcggcgcgccgctttctcgcctatgaccatcactaccaacagcagccgcatcagcaatggctgcaacagctgttgcaggggcgtccggtggtctttcaggccagcgatctgttttcactgcaacaagcggcgcgttcagggctgggtgccgccgttttgccgactttcgtcgccgatggcgatccggatctggtcccgttgcccacggccaatgccgcgccaacgcgcgagctttggctggtgacgtatcccgatttggcgcgcaccgctgccgtgcgcgcggtgatgaatttcctggtcgaaacgctcggcgaaacgtgcccattaccggcataa

SEQ ID NO: 427420 - DNA, 237 bp, Serratia marcescens
atgagaaatatcttcttcttcgacgcgatgctgacgccaaaaatcatcaccgccgtttactggctggcgctgttgggcgtgttgatcagcggcatcggcatgatgttctacggcgagttcttccgcggcctgttcggcatcatcgtcggcggcgtgttcgtgcgcgtggcgttcgagatgatcatcattgcgtttaaaaataacgaatatctgcgcaagatcgccgaaaaaccgtaa

SEQ ID NO: 427421 - DNA, 741 bp, Serratia marcescens
gtgggcttgattcctacggtgacggcctttccgctgcagcaggcttttatcccgctgctggaggcactgacgacagagctaccgcgccaattcccggcgctcatccacagcatttacctctacggcagcgtcgcgcacggcgaagccattcccggcgtctccgatctggacatcacgctgttgcttatcaagccggccgatagcgaggcgttgcagcgccttgaggcgtggcggcaggcttttcagctggagcagcggatcgtgagcaaggtcgactttgacatcggcagcgtcgaggaggcgttgaaccccgagcattgccattcctggggattttggctgaagcatcactgccgctgcctgtggggcgaagacgtgtccgccgcttttccgctgtttcggcccgatcggcgcatcgcgctggcggtcaatgccgatttacggcccgtgttgacgcgctatcgggagcagttgctgcaggcaagcccggtgccggatgagaagcgcttaaagcgcgaagcggccagaaagctgatccgcgctaccaacatgctgcgcgcagaggacagcgcattctggccgacaacgttaaccgactatgccgagcagctgctggcgcgctatccggcacagcaggctgacatggcgtacttgctggctcatgcggctggcgaggcgaacgatgctgcctttgccgaccggatgatggattttcttgcgtggatggaagggcagcggtag

SEQ ID NO: 427422 - DNA, 513 bp, Serratia marcescens
atgcgaagtctggaagatcaacttgccgcttatgccgcctatcaccgcgatgcgcgcaatattgccacgcattttatcggcattccgctgatcgtcgtcagcctgctggcgctgctttcccggccggcttggggcacgggagggctgccgttttcgccggcctgcgcggtggtgatcgtcgcggccctctattacctgcggctgagcctgcgccttggcgccatgatgctggcgttgttgctgctgtgcctcgtgttcggcgcctgggtggcgtcgctgtcgacggcggcgtggctgagcgtcggcatcggcggcttcgtcatcggctggctgtttcagtttgtcgggcatttctgggaggggagaaaaccggcgtttatggacgacgtgacgggccttatcatcggcccgctgttcgtgctggcggaagcctgcttcctggccggcgggctgcgcgaactgcagcgaaacatcgaaatgcgctcgggcaaagtgcgtagcgggagggcatga

SEQ ID NO: 427423 - DNA, 774 bp, Serratia marcescens
atgcacaacacgctgaataagattgtcgacgagatgctggaaagggatacccgccgtaaacgcgaggccagggtgagcgccgtgcggcaagtcaccgcccggatccgccgcatcacgttgagcggtgacgatgtggataagtttatcgccgacccgcgcgcgcaggagccggccagttggatcaaggtgttcttcccgtggcgcgacacgctggccgggcgggcctacaccctgagcggcatcgacaaactcgcccgcactttcgatatcgatatggtgctgcacggcgaaggcccggcgtcgaactgggcgcgcgacgcgatgccgggcgacaagctggggtttgccggcccttgctccggcggcttccggctgttgccgcaaactcgctggctactgttgctgggcgatgagaccgcgctgcccgccatgcgcactatcctcgcctcgctgtctaccccgctgccggtgctgtggttcgccgaagtgggcgatgcgcaggagattcaggatgtcgattgctcctttttgcagatgaacagctggcaaatacgcacccggcatttcgacagcgtgatgaacagcccgctggtgcaggccgtcagccactgcgaactgccggccggggaagggcaggtgtggctggcctgcgaacaccaggtcgccgcgtatctgaaggcgcgttttatcaacgaaatgggcatctcccgcgccgccttgtttgccaaaggttattggaaaaagggcgaagctaatttcaagggcgcgatgtaa

SEQ ID NO: 427424 - DNA, 738 bp, Serratia marcescens
atgagtaacgcactatctatcactgaattatttactgacgaaagcttcaagtcaactattgaaatatttgcaagcatccttggaatattagggagtatattcgcggcaggaatgataatacttaaatatttaaacaaaccattaaacggcgaatctgaatacttgagtaaagcaggcatccccaattggacaattagattgttctccatatctattcctctaaaaaaaacaccccagaacacgttcattgataaaatactgtctggctttattattttttcagtgaccattgggcttttatttgtttttcacatgcacatacaaacattacgcattcaaaatgggtggactcttttgacgttaaaaacaacaaatgaaagcttctttatcaccaaccattccgccaaggaatcatctttgttttcccgtcacccttggtctattgacaaaaaacaatgcattggaaatagcaatcaactaaaaagaataaaaaatatctctccagagttgtcatcattgatttgcgaaatatttaatgatgaaaaaaaccaggttgaactaaataaatacatagatgaagtaaaaaaagacaagataattatatacccaatactgaccatcatagaaatcattcttttctggttaataatcagtatttctcttactctttcccttaagagaaaagtaaggaactacatcatcaaacaacaagaaagagcgtattactatatcacataa

SEQ ID NO: 427425 - DNA, 240 bp, Serratia marcescens
atggcagacaaacacttaacccaatcaccggcaggtgagtttgttatgtttgccagcgatgatggcgaagtgcgcgttgaatgtcgtcttgagcaagaaacactgtggttgccccaggcgaccatcgcgaatctttatcaagtgactccccaggcgattacgcaacacatcaaagcgatctacgaagaagcggaacttgaacaaaacgcaacctgtaagtcttacttacaggttcaatag

SEQ ID NO: 427426 - DNA, 1344 bp, Serratia marcescens
atgcacaacaccaaaacccggctggcgctgctggtcggctgcatggcgctgagcgccaacctgtgggccgacgcgcagtcggtgcaggcgacgctggccgggcatgcgctgctgccggtgaaatccgccgtttccacaccgaaagacgcgccgagcgatctgcagcagagcggcaaatacaccagcggcaaacgtgtcaccgagttgggcagcgtggcgggcaaatccgccgatcgcctgaccggcctcggcttgccgatcgacggccagccgctgcagggccactccggcatcaaacacatgcccgacggcacctactgggtgctgaccgacaacggcttcggcagcaaggccaactcgccggacgccatgctgtatctcaatcactataagatcgatttcaaagacggcacggtcgcgccgctgaagacggtgttcctgcacgatccggataaaaaggtgccgttccatatcatcaacgagagcaccgagaagcgttatctgaccggcagcgatttcgatccggaaagcttccagtttgccgacgatgccttatggatcggcgaagaattcgggccttacctgatcaaggccgacctgaacggtaaagtgctggcggtgttcgacacccaggtggacggcaaggtggtgaaatcgccggacaacccgacgctgaccctgccgggcgcgccggacggcaagcagaacttccaggtggcgcgctccaaaggctttgaaggcatggccgcctcgccggacggcagcaagctgtacccgctgctggaaggggcgctgtgggacggcgagcagttcgagaacgtcggcggcaaacgctacctgcgggtgctggagttcgacgtgaaacagcaggcctggaccggccgcagctggcagtatgtgctggaagacaaccagaatgccatcggcgacttcaacatgatcgacgccacccacgggctggtgatcgagcgcgacaacggcgaaggcacgccggataaagcctgcgccgccggtgcgccgaccgacaactgcttcagccaggtggccaagttcaagcgggtgtataaaatcgccttctcggacgccaacgtcggcaaaccggtcgagaaactgggctatatcgacctgatgaacattcaggatccgaacaagctggcgcgcaagccgctgaacgacggcgtgctgaccttcccgttcttcaccatcgagaacgtggacgtggtggacgctaaccacatcatcgtcggcaacgacaacaacttcccgttctcctccagccgccagcccaatatggcggatgacaacgagttcatcctgctggacgtgaaggatttcctgaagtag

SEQ ID NO: 427427 - DNA, 1179 bp, Serratia marcescens
atgtctgagaaacgttaccgcattacgttgctgttcaacgccaataaagtgtatgaccgtcaggtggttgaaggggtcggcgagtatctgcaggcatcgcagtgtgactgggacatctttatcgaagaggactttcgctgccgcatcgacaatatccgagagtggctgggggacggggtgatcgccgactttgacgatcgcgagattgagcggctgttgcacaacgtgcaggtgccgatcgtcggcgttggcggttcttatcatcgcgagcaggattatccgccggtgcactatatcgccaccgacaaccaggcgttggtagaaacggcgtttacacacctcaaggagaagggcatcaatcgtttcgccttttacggcatgccgattgaaggcggcaaacgctgggcgcaggagcgtgagtacgcttttcgccagagggtggcggcggaacagtaccagggcgtggtgtatcagggaatggcgaccgcaccggagaactggcagtatgcccagaaccggctggcggattgggtgcagacgttgccgcagcagactgggatcatcgcggtgaccgatgcgcgggcacgccatctgttgcaggtgtgcgagcatctggacatcgccgtgcccgaaaagctgtgcgtgatcggcatcgacaatgaagagctgacgcgttacctgtcgcgggttgcgctctcgtcagtggctcagggtacccggcagatgggctatcgcgccgccaaactgctgcatcagttgctcgatcggcgcgatctgccgctgcagcgcattctggtgccgccggtgaaggtgattgaacgccgctccaccgattttcgctcgctgcgcgatccggcggtgattcaggcaatgcactatattcgccaccatgcctgcaagggcatcaaggtagaacaggtgctggatgcggtgggcatctcgcgttccaatctggaaaaacgcttccgggatgagaccggccaaaccatccatcatgtgatccatcaggaaaagctggaccgcgcccgtaatctgctgacggcgacttcgctgactatcaacgaaatttcccagatgtgcggctatccgtcgctgcagtacttctattcggtattcaaaaagggctacgacatgacgcccaaagagtatcggcaaaaccatggcgagagcgggtactag

SEQ ID NO: 427428 - DNA, 468 bp, Serratia marcescens
atggccggccttgaggtggcaaatattattattgctaatgataagtatcgcgaaaaattttgtcattgcctcgaagctgccgggatccacaatcccggctattacgccgtaccggcctttttggccgcctatcgcgactgcgatgactggctgctggcgctgaaaagctatctggcggcaaaccgggcattggcgatagagaccttacgcgctgcgttcccagcctggcaaatcacccgcagcgagggcacctacatgctctgggtcgattatcggccgagcgggctgaccgaaccgcaactaaaacactggttcctgaacttggccggcgtcgaaatgagttggggctccggcttcggcgcagcgggcaacggctttttccgtatcaatatcgctacgccccgggccacgctgatcgaagcattacaccgaattgtcagtactttcccctacgcacaccaggagtag

SEQ ID NO: 427429 - DNA, 1452 bp, Serratia marcescens
atgaacagcataataaaacccagaacgcccacgttggtcgaatccttactgccaatcctcaccatggtgctgttgctcggcgtcggctatgccgctttcgatctgccacctgaaccactgatggtgctttccaccgtgattgctgccctgttggtcaaacgtctggggcacagctacagcgatattttggcctcgatttcccagaagatcgccaaaaccatgcccgccttactgattctgatctgtgttggcctgctgatcggcacctggatggccggcggcaccattccgctgatgatttattatggcctgaagctcatcgatccggcgatgctgtacgttaccgctctgttggtcacctcggtggtttccgtctgtaccggtacctcctggggctcggccggcacggtcggcgttgcctttatgggcgttgccatcggtatggaagccaacctggcggccaccgccggcgccgtggtggcgggcgcctatttcggcgacaaactatcgccgctgtccggcgacaccaacctggccgcaatggccgctcaggtcgatttgtacgaacacatcggccacctgctctacaccacgctgccatcgctgctcctttcggcagccgtcatgctgttctacggcatgcacggcgatctcagcggcgcggcaatgccagataaagtgcaggtcattattcacgggctcagcactatctatcacttcaacctcctgctgctggtgccgatcgccatcgtgctgtacggctccttcaccaaaaaacccaccatcccggtgatgctggtgtcggcattggtggccatgctgaacgccgtctggatccagggattcgctttccatgacgtagtgaaaagcgccgtcgacggcttcaacgtcgccatgttgcccaataaagacgtcagcccgctgttgagcaatctgctcaaccgcggcggcatgaactccatgatgagcacgctgctgatctgcttctgcgcgctctcctttgccggcaccctggcgctcagcggggcattggaggtgatcgtgcataacctgctgaagctggtgcactccaccggcaccatgatcctcgctacgctggcctgcggcttgacgatgatcagcgtcacctgcaacggccaaatctcgattcttattccgattgaaatgctgcgcaacgcttacattgagcgcggtctgcatccgaaaaaccttagccgcaccgttgaagattccgccaccatctttgaacccattctgccttggacggccgccggcgcttacatggcgggcaccctgggtgtcgccacgctcagttatctgccctgggccattctgtgctggagcgggatatttttcgccacgctgtggggatttaccggcttcggcatcgcccggctggcaaaagaagaacaggttcagttactggcccaaacggccgatacgttaaaataa

SEQ ID NO: 427430 - DNA, 1317 bp, Serratia marcescens
atgtcctactttgatcaacttgaccaggtccgctacgaaggcgtcgacagcaacaatccgctggcctttcgccattacaaccccgacgagctggtgctcggcaaacgcatggccgatcatctgcgcttcgccgcctgctactggcacaccttctgctggaatggtgcggacatgttcggcctgggcgctttcgatcgcccctggcagcagccgggcgatgcgttggcgctggcgaaacgcaaagccgacgtggcgttcgagttctttcacaagctgaatgtgccctactactgcttccatgacgtcgacgttgcgccggaaggcgcttcgctacaggactatctgaataactttgcggcaatgaccgacgtgctggcagaaaaacagcaaagcagcggcgtgaaactgctgtggggcaccgccaactgcttcagccacccgcgctatggcgcaggcgccgccaccaatccggatccggaagtgtttgcctgggcggcgacgcaggtcttcaccgccatgaacgccacccaccaactggggggagaaaactacgtgctgtgggggggacgtgaaggctatgaaaccttgctgaacaccgatctgcgtcaggagcgcgaacagatcggccgttttatgcagatggtggtggagcataaacataagattggtttccagggcacattgctgatcgaacccaagccccaggagcctaccaagcaccaatacgactacgacgtcgccacggtctacggcttcctgaagcagttcgggctggaaaaggaaattaaggtcaacatcgaagccaaccacgccacgctggccggccactcgttccatcatgagatcgccaccgccatcgcgctgggcattttcggttcggtcgacgccaaccgcggcgatccgcagctcggctgggacaccgaccaattcccgaacagcgtggaggaaaacgcgctggtgatgttcgagatcctcaaagccggcggcttcacgaccggcggcctgaacttcgacgccaaagtgcgccgccaaagcaccgacaaatacgatctgttctatggtcatatcggcgcgatggatacgatggcgctggcattgaaagtggcggctaaaatgatcgtcgacggtcagctgcaccagcaggttgcccagcgctacgccggctggaacggtgaattgggccaacaaatcttgcagggcaagctgtcgctggaaacgctggcgcagtacgctgaacgccgcgccttggcgccacaacacgtcagcggccgccaggagcgcctggaaaacctgatgaatcgctatctgttcggctaa

SEQ ID NO: 427431 - DNA, 1452 bp, Serratia marcescens
atgtacatcggcatcgatctcggcacttccggcgttaaggccatcctgcttggcgaacagggccagctgctcgccagccagagtgagccgctgcccatttcacgcccgcagccgctgtggtcggaacaggcaccacaggcgtggtggcacgccaccgaccgcgccatgctggcgttgggcaagcaacacagcctacaacaggtcaaggccatcggcttgagcggccagatgcacggcgccacgttattggacgaacgcgggcaaatcctgcgcccggccattctgtggaacgacggccgcagcttcacccagtgccgggagctggaacaagccgtgccccattcacgccagatcaccggcaacctgatgatgcccggttttaccgcaccgaagctgctatgggtgaaacaacacgaaccgcagctgttcagccgcatcaaaaaagtgctgttgcccaaggattatctgcgttggtgcctcaccggcgagttcgccagcgacatgtccgatgcggccggcaccctgtggctggacgtcgcgcgacgcgactggaacgacgagctgctggccgcctgcggcctgtgccgcagccagatgccgcagctgtttgaaggcaaccagatcaccggtcaaatccataccgagctggcaacacgctggggaatgccgccggtgccggtggtggccggcggtggcgacaacgcggccggcgccattggcgttgggttgtatcaggccgggcaggcgatgctgtcgctcggcacctccggcgtgtacttcgcggtcagcgacggctttctcagcaatccggccggagcggtacacagcttctgccatgcgctgccgaacagttggcatctgatgtcggtcacgctcagcgccgcctcctgcctcgattgggtctgccaactgaccaacgtcgacagcgtcgccacgctgctgcacaacgtcgaacaggccgaaccggcggcggcgccgctgtggttcctgccttatctgtccggcgaacgcacaccgcataataatcccaacgccaaaggcgcgttctgggggctcactcaccaacacgggccaaacgatctggcgcgcgcggtgctggaaggcgttggcttcgcgctcgccgacggcatggatgcgctgcacgccggcggtttgcaacccaccaccattcggctgatcggcggtggcgcacgcagcccgttctggcgccagatgttggcggacatcagcggctacacgctggaataccgtaccggcggcgatgtcggcccggcgctgggtgccgcgcgcctggcgcagatcgcactcaatccacagcggccgctggccgagctgctgccagaactgccgctggagcagctgcatgtaccggacgccgaacgccaccggcaatacgccgtacaacgcagcactttccgcgagctgtaccgctgcctgctgccgttgatgtga

SEQ ID NO: 427432 - DNA, 945 bp, Serratia marcescens
atgatggtggtgatgatccacgccaccacctattacgtcaccaacggcgcggcgatagggctgcacaactgggatatcgccaacgtgctgaactcgctgtcgcgcgtgtcggtgccgctgttcttcatgatttccggctacctgttcttcggcgacaagagcgccggccggcggcatttcacccgtatcgcctgctgcattctgttctacagcgccattgcgctgatctatatcgcggcctttaccaaaatcggcttctggccgtcgctgcgcgccatcctgcaaaagccggtgttctatcatctgtggtttttctacgccattgcggtgatttacctgctgtcgccgctgatcagcgtcaagccagtgtcgcgccgttacctggccgccgcgctggtggtgttggcggtgctcgccaacccgaataccgacaaactggccctcggtaacgcgcacctgctgccggttaacctgtatatctacggcgatactttctactacctgttgtacgcgttggccggacgggcgattggcatgatggaggcgcgcgggcgcgccgtgggctggctggcggcgctggggtttgcgctgtgcgtagcgctgatcgcgcgcgggaccaagcatcagctgttcatcaacggcaacttcgccgatacctactacatctacagcggcccactggtgtttatggcggcggtggcgctgctggtgtgggtgaaacactgtttgccgcagccgatcggctggctgagcgtgttttcccgccattcgctggcgatctacggttttcacgccctgatcgtcaacgtgatgcgcagccggcacctggatttcaccggccacccgctgctggatatcttctgggtgttcggcgtggcgctggggctcagcctgttgctgtctgtcggcctgcagcggctggatacccgccggctggtgtcatag

SEQ ID NO: 427433 - DNA, 801 bp, Serratia marcescens
atggcattgaccctcaaggtactgctggaaaaccgccgcgccgccggcgccgacccattattgcaggccaaggccgggctaagcctgctgattgaggatgagacgacgtccatactgttcgataccggccccgacgacagctttctgcgcaatgcggcgctgatgggcgtcgatctctcccgcatcaccgcaacggtgctctcccacggccactatgaccactgcggcggcgtcgcctggctgccggacaacagccgcatcatctgtcacccgcaggtcggcgatgagcgctatgcggcgctgaaggtgctgggccacacccggaaaatcaaaaagctctctttggatatcgactactcgcgccaccgcatgcactatagccgcgaaccgctggcgatcggcgatcgctttatgtggtcaggcgagatcgtggtgcccgccccgcgcgcctacggggtgctcgccggggaaaacgcggcggtggattacgtgatcgacgaaggggtgctgatttacaaatccgatcgcggtctggtgatcgtgaccggctgcgggcaccgcgggatcgtcaatatcgtgcgccattgccagaaaatcaccgggatcgatcggatccacgccttgatcggcggttttcacctgcgctgcgcttccccgcgcacgctctggcgcgtccgccgttttttacggcagcatcagccggaaaagatcatgggctgccactgtaccggcgcctggggccggttctggttgccggcagggatcgcgccggccaccggcgatagctggatcctggaataa

SEQ ID NO: 427434 - DNA, 480 bp, Serratia marcescens
atgcccacctctttgtctctttcacagctgaaaacgcagggccgctatcaggaagctactgcgctggcgttacggcagctggcagcagagccggaagcggcgatgctacactttcagctggcctgcctttacgacgtacagggcctggagcagcaggctattccctgctacctcgcggcgttggctcgcgatttgccgcccgcacagcgccgcgaggcctggctgggtctcggtagcacttaccgcgccctgggagaatatccggcgtcgctgcgcgctttcgacgcgggtctgaccgagttcccgcaggccaatgagctaatgctgtttcgcgccatgacgctgtacaacctgggtgaaagcaaacgggccgtatccgatctgttgctgctgctggcggaaacctcgtcagaccccgacatccgcggctatcagcgcgccattcggcactatgccgccgatctcagtctcattggttag

SEQ ID NO: 427435 - DNA, 426 bp, Serratia marcescens
gtgaaagaatgtcatatcgaaatttccgatcgggtaacaccggaaataacgtcctgtatcgcggaagggttggaccgttttaatgatgaacatatcggctatggcgatcgtcagccgctggcggtggtggtaaaagatctcgacagcgggaaagttctggggggaattaccgggcgctcatcactagggctgctgtttctcgatcttttttatctgccggaagcgctgcgcggcgcagggctgggcagcgagctgttgcgccgctttgagcaggaggggcgccgacgcggttgcctttccgccgtgttgtataccatcagcttccaggcgccggacttttatcagcggcatggctggcagcgtatgggggaggtgccttgcttgccgccgggaaccagccgcgtctttatgagcaaaaccttgtga

SEQ ID NO: 427436 - DNA, 693 bp, Serratia marcescens
atgattttagtcgatccgtcaatcgatccggccgtcgctgcgctggcgcccggtttccgggcgttaagcattaccgtggccgcggctcccataaccaacccggacgtgggggcgctggcgttggcgcaggcctgtcgcgccctcggcgaggaggacgcgccctgggctgaggcgcatctctcggcctggcgcgatgtcttcatgcggtttggcgccaaacccaagcgtacgccctgttccgccgatgccttgcgcaagcgcgcgctgcgcgacggcacgatgcccagcatcgatccggtggtcgatctttacaacgccgtcagcattcgttatgcggtgccggtggggggcgagaatatcgcggcttatgtcggcgagccgcggctgatcgtcgcggaaggcagcgagctgttcgataccgtcaaggagggcgcggtgatccatgaatcgccggaggcgggggaggtggtctggcgcgacgatcgcggcgtgacctgccgccgctggaactggcgtcagggcgtcagaacccggctgagcgccgaggccgaacggatgtggttcatcctggagagcctgccggcaatgccgttggtggcgctgcatgcggcgggcgacgaattgactgccggtttacgacaaatgatgcccggcgttgcgatagagcaacggctcatcggctgcgcctcgtaa

SEQ ID NO: 427437 - DNA, 603 bp, Serratia marcescens
atgagcgaaaaagtcaacagaccgaccgagttcggcgccgacgtgcaaaccgtcagcgaagcggtgtcgcaccgcatcaaacagcagcgaaaaagccaaaagctgtcgctggacgaactgtcgcgccgggcgggcgtcagcaagggcatgctggtggagatcgagaaaggcagcgccaatcccagcatcgccatcctgtgcaagctcgcggcagcgctgggcctgtcggtggcggacatcgtcaacgtgacccgcgcccccgccgcctacctgattgaaagccaagacattcccacgctgtggcacggcgatcgcggcggctcggcccgcttgctggcaggcacccgcggcccaaacatgatagaactgtggcactgggaaatggcgccgggggaagcctatgcatcgagcggccatccagcgggcaccttcgagctgctgcacgttgaacaaggcgtcttgagccttgccgtcgaacaaacagagctcaggattacgccaggctgttcggcggtcgccagaacggacggccctcaccgttacgccaacgagggcgaagacacgctgattttcaccatgacggtcgccgaactgcacgcctga

SEQ ID NO: 427438 - DNA, 462 bp, Serratia marcescens
atggataagattgatcgcaagattctttctgaactgcaggccgacgggcgtttgtcggtgaccgagctggccgagcggatcgggttgagcgtctctccctgccaccgccgggtgcgggcgttagaggagtccggggtgatcaggggttaccgcgcccagctcgatcccggcagcctgggctataacttttccgccctggtgttcgtcaccatgcgcgaaggcgatcgccgcgccgttgaaaccttcgaaaacgccatgatggacattccacaggtggtgcaggcgcagcggctgtttggcgatccggactatctgctgcacgtgatcgcccgcgatctgcccgcctttcaacagctttacgacgagaaactctccgctctgccgggcgtgcagcgcctgagctccacgctggtgatgaaaaccgtggtgccggagcgctcgttcctgccgctgggaaaatga

SEQ ID NO: 427439 - DNA, 1209 bp, Serratia marcescens
atgacgcagaaaatagtgattgccggttccggttttgccggtttttgggccgccgtgtccgccatgcgcgccattaccctcgccggtaagcatgacgatatcgaggtgctcatggtttcgccgacgccaacggtcaccatccggccacgcctgtatgaagcggtgctggaaaacatgaatccggatatttccgcgcagctcgccgccgtcggcgtgcgccacctggccggggcggtagcgcgcatcgatgccgccgccaagacgctcacggtggcgcaggcgacgggaggatcccttgagctggcctacgaccgcctggtgtgggccaccggcagtcggctctccgtgcctgcggtgccgggctttgccgaatacggtttcaacgtcgatacgctggaaagcgcgcagcgtttggatgcccatatcaaagcgctggcggccaaaccctcgacgccggcgcgcaacaccgccgtggtggtgggcgcggggctgaccgggctggagagcgcggcggagatgccgcagcggctgcgggatgcgctgggcaaagacgagaacgtgcgtgtggtgatcgtcgatagcgccccggaagtgggcgccggaatgggcgtggagccgggggcggtgattcgccaggcgctggcggagtgcggcgtggaagcacgagccggcctgcgcgtctcggctatcgacgctgagggggtgatgctgtctaacggtgagcgtatcgccgccaacacggtgatcctggcagcgggcgtgcgggcgcatccgctgaccgagcagatccccggcgagcgcgacggcagcggtcgggtgatcggcgacgccttcctgcgcgcaccggcggcggcgggcattttcgtgaccggcgatacggtgaaggcggcgaccgacgatctcggcaatcacaacctgatgacctgccagcatgcgatgagccttggccgcgtggccggccacaatgcggcggcggagctggcggggttgccgactcacccgtacagccagccgaagtatgtgacctgcctggacctggggccctggggcgcgctgtataccgaaggctgggagcgccaggtgcgctttacccgtcaggaaggcaaaaagattaagcaggagatcaacacgcagtggatttatccaccggcggcggatcgcgaggcgctgtttgccgtcgccaatccggatttcgtgattgtgccttaa

SEQ ID NO: 427440 - DNA, 231 bp, Serratia marcescens
atgaaaaaacacccagacaagcacatccaggcggcgttagattacgccctttctcagggctggcattttcgtcccagcaaggggcatgcttttggccgacttcattgcgcctttgtcggtcatcaagaacatatgatgagcatctggagcacgccgaaaaatcccgagctgcatgccaaacagatccggcgcaaagtcgatcactgcctggcgctgtcgcagaaaaaataa

SEQ ID NO: 427441 - DNA, 546 bp, Serratia marcescens
atgacgctctatcatttcgcattgacgctgggcggggtcaccgccgataccaccggattggaggatgcgctgtatgcggcgggatgcgatgacgcactgatctgtttctacggtaaagccgtctacctcgagtttgatcgagaaagcgaaaactttgcccacgcaatttgcagcgccatcagcgatatcgagtctgcaaatattggcgccaaggtgatatcggtagactccagcctggtgggattaagcgatattgccgagctcactgaactgtcgcgtcaggcgatcgccatgctaaaagacgggactcgcggccccggcggcttcccttcccctattcagcggctcggcggcacctcaccgttatggcgctgggctgacgtggcggcctggttggcacagcaggggaaaatcgacccacgtcttgcagacaatgcgcagtgtctggaacatatcaatctcgctttgcaactgcgaagcgatcggcaacgccagcaggttgagcactactgctccctgctggaacacgcggaaaaacagacttga

SEQ ID NO: 427442 - DNA, 216 bp, Serratia marcescens
atgacaaccgtttcaaacctgctgctttttatcggcctggcgatgctcgccatcgccgccggcctgaatacctatagcggctacgcgcctgcagatcccaataacaccccgctgttttccccactctggtggacgcgctggttcccgctctacgcctcgggtgctgcattgttgttggtagggctggtattgcgggtttcggggcggggacgataa

SEQ ID NO: 427443 - DNA, 5844 bp, Serratia marcescens
atggataagctcaaccctccgttggcgcgcggcgccagctatttgctgatctacctgacggctttccagccgttgcacccggcgttcgccgccggcattaccgccgccaacggcaatacgcaggtggttatcaagccgggcgacgtgccggtggtgaatatcgccacgccgaacggtgcaggcatctcgcacaacacctataaagatttcaacgttgggccacagggcgccgtgttgaataacgccacacacggcggcaaaacgcagctgggcgtggagatctccagcgcgcagggcaacacctacctgaagggaaaaccggcggagttgatcatcaatgaggtgatcggcggcagtcgttccgagcttcagggcaagctcgaggtgttcggcaacaaggccaacgtgatgatcgccaacccgaatggcatcacctgcgacggctgcggctttatcaatgcgccgggcgtaacgctgaccaccggcaaaccgcagttcgacaagcagggcgcgctggaagcgctggaagtgaaaaaaggcggcgtcaccatcggcggcaaagggctggacggcagcggcgccgactatgtcgatatcatcagccgcgccaccgagctgaacggcaaaatcaacgcgcaaaatctgtcgctgacccagggcgccaaccgcattagcttcaaagacggcagcatcaaaccgatcgccggtgaaggcgcaaaacctgtgctggcggtggataccaaagcgctgggcggcatgtacgccaacaaaatccgcctggtggccaacgaggatggggtgggggtgaatctgaaagacctcaccagcaaacagcgggatattacgctgagcgttaacggtaacctggtgcttaacggcaccacgcacagcaagggtgatcttaatgtcagcgccaagggattgcacattacgccgggcgctgtcgtgcaggcggacggcaacgccacgttggcgacgacgacgctggtgaatgacgggcaaaccagcaccagcggcgatatgcgtatctttggcgaccatatccgcaacgcgggggaaaacgccaagttgcacgccaataaaaatatgtggatccaaaaggatgcgcagggcaacaaggctaaatccgtcgagaaccgttcggcgaaaatcctgaccaacagtggcgatttggtgatacgcacggagagtttaaataacgttcgccagcagttcgccatttcctctactaacgcgccgaaggacaacaaggatatcgatcgttggttggctgatggtgtgtacgaggggcaattcgattaccaattttttgattatttggcggactttgaagataaaaatttcacctggttgggacatgttgatttcaaaaaaacgccctgggttaacagtgaacgcgtgcgttttaccgtagtgaccgacagccgtcccgcagaaatcatttcagggaagaatgcctacattaatgcgtcggagctttggaatcacgtcagcacaataaaagcgactaacgacctgattttaactggcaataatctgggcgtgcgcagtgaaatgacgggggacatgaacgactatgcactgttcgaaccgaaggtgccgaatcctaaagttgttctgggacataaatggcaggatcagaaatcgtcgatcccggaatatgtcatttatgtcagaaaaggtgggcaaaagagctggtcggcttctggctatcctttctcagccatgttggccggtggcagtttggtcgcggattttaaaaatcagatagaaattaaaacttcgacgccggtggaaaatcagcttagtgaagtggtggcttcggggcggcctgactcgctggcagctcacaatattgtgctgcatgcgggacgcgtcatcagtaccgataaaataaacgcgcgtaacgacctgactgtggttgccgacgatctgttttacaccgacggtgctgagctgactgctggcaagagtctgaacgttgcagcagtgaatgagctggatgcccgtcaaagctatctgaaggggcataatgtcactttgaccagccgcaacggcaacgtcaaagtgcacactgtacctagcccgcgctatttcggcgtcgatggtgcccgctggctgagccaattgaatgctgccggggacttaaccttaaatgccgggcaaggcatttatctacgtaacacgcacttcgcgccgcaaagccaaaatattgcaatgacggcgaacggcacggtttcgattgtcagaaatgacgaggcgttgaataacgatcgtttagcgcagaatttatctcctgaacaacgacaaacgcagttcaaccaactgctaaatgctggacagttgaacgccagtggttcagtgctgctcaacagcggcggttatctggcgctgcgcgggacgcacattaaagcaggcaaagatgtcacgctgttggccggccataatgccgatctgaactatcgcgaattgggggggcaatttagtcgcttcttcccctcttctcgcacgcctgagctgggtagccgggtgcacgccggcggcaatttactgattaactcggcccgcgacatcggcacccagggaggcacgctgtccgccaacggcaacatcacgctactggccgggcagaacctgtggctgtcgaacgtggcctattccgccatcgatgccggcaacgacaacaacaaagacgatcgccatgtggtcactaccctcagcgccgggaaaaacctgaccgcggcggcgaataaccaactgctgacttacggtgccaggttgacttccggcgccaacatggcgctgacctccggtggcgacatgcgctttgaggcggtgcagaaccacacctaccgcgagggcggcaacgagttcaccgaaacccgtacccagcaaggtaccgagctgaatgccggtggcctgatgacggtgatttccggcggcagcattctgttccaggcgaccaagctggtggttaaagggttgggagctaactggaaaccgccggtagcggtgacggactggggcagtcgtattgcggcggcggagcaggcggttagaaatgcagagcaaaatgttaatcaaagacagggtgcactgaacaacgttaaaagttccccagaaggtttattgttagacgatccggctaggcatcctctgtcagagaaacttgctggcgtgatgacggtagcgggcaacacgtctttccattatgactggggaaatattgaagtaaacaaccgtgcagatttggaaaaattaattaatgggggagggaaggcatttgacccattccctgacggcgtcgatccggccgagacctccggtgatggctatgaaattgccctggctcttcagaaaaagcagatagaagcatacgaaaacctgagacaacgtataattaacaaaaataatgagataactgcagcacagcaagcgctatcttctgcgtcaggtgaaaaagcaaacgcagagcgagagttagctgctattcgtcagcaagctcaaacccaaaatgcgaacgaagccaaacaaaaagctcaggtcgacgcccataatcaggccgaagctatgcgtgtcggcaatatggatattgccgccaagggtggctatctctacgcccaggcgatggaggagtccagccactacgagaaaaaggaaaccaagcgcaaatggtggggcaagaaaaccgaggttaagcagacccgccatgacgtgaccaacaaggttaccgagtttaccgccgccggcaatatcacgctgatgagccgcgacgacagcacctatgaagccagcaaaatcgccgccgggcaaaacgcgcgcctgaccagctcccgtggacaggttaacttccgcgcggtgaaaaacacctctttcgaacagaccgtcagcaattcgaaaggcttctttatcaagcaggccaataaagggtacgaagacaataagtgggtgctgccgagcatccataccggtggcgccttgaccgtagaggccgccaagggcgtcagcgccgatgtgaaggtgaaaaacggccaggcgttgcaaagcgccatcgacgccctgggcaatacgccgggcaccacctgggtcaaagatctgaacaagcgcaacgacgtgcagtggagcaaggtcaaagacgcttacgacagctgggattacaagagccagcacctgaacccggcggtggcggcggtgatcgccattgcggccgcggcggtgaccgcaggcagttcactggcggctacggcagcctccagcgtttccggcgccgtgggcggcggggcggtaaccagcggcgcggtcacggccgggatgtcttcgctggcctcccaagcggcggtggcgttggtggagaaccagggcaacctgtcaaaaaccctgcaggcgctgggcagcaatgaaaacgtcaaggcgaccgccacggcgatggcgatcggcggcgcgctcaacggcttcgacagcgctatgggctggagcaaggatgcggcaggcaaaccgcttaacccgaacaacatcaaactgccgcagctgagcaacggtgactggagcaaggtggcgcagcgggtggccgggcaatcggttatcagctccagcctgaataccgccatcaatggtggcagcttcaaagacaacttgaccaatgcgctgctggcgaacatcggcagccaggttcaggccgagggcgccaacctgattggggataacggtcaggttctcgatataccgggccgggccgtaagccatgccgttctggcgggcgtggccgcagaaatcggcaaaggcaatgccaagggggcggcggccggggcgctggcggcggagctggccggggtgatattgggcgacaatatcatcaagccggaggagtggcagaagaaatcggaacagcaggcacagatggcacgagtgctgggcgctgccgcaggcgcagtcttcaccggcaagtctgatggtgcttacagcggtgccaccggtggtgagaatgcgttccgatacaactatctcagccacaaacagcaagaattgatggagaaggatttggcggccgcgaaatcgccgcttgataaagcggtggtgttggctagttggggaataacgagccatacccaggatggcgcctttgcggcgggtgtagtctcgggcatcccggttgaaatcagcgatacggtggatggtttagtcgccgtggccagcaatccacgtgaggccgcggatgcattaataactctgataaagaacgatgaccgcttctcgattatcggcgaaagtgtaaaacaggaatacctggggcgggtcgaagcattcaagacaaaatatgaaaacgcgggcgtggatggcgcttatggtgcaggtctagagttcggtaaactgacgatggctgggctagagctgtttgctggggccgccggcgcaggtaagctgggtgttaaggtgaccaccaacaccattaaggcagctgagaaggctgcatttaaatcgcccaatctcgttggtctaagccaacagacgcagaagttaatcaaagatgctgaggggatatctacggcgaaagggatacaagttacttcaccacgcgatttaaatgagcaagttctttggaatatagtgagaaacaacccagagcacggaaccccactaaaaggattgaataatgactctcgtttcccggttgaagcaggattccagaaaatggatgcaacacattatttgcctgatggaagtacaataagcattcattatcagttcaactcgaacacaggcaaggcgtatgatatgaagataacctcacccaaacgtagtactattcaacccggcccctcattgaatgaaggtaaaaagccatga

SEQ ID NO: 427444 - DNA, 1242 bp, Serratia marcescens
atgaatgcaaaaccccaacgtcgttccctgatgctgcgcctgctggttgccgccatcgtggccattgtcgccgtgctgatttggcgtcatttcaacgccgcgccgccggccgctgaaacacaggcggcagcccgccctgccggcggtgccaaaggtgcggccgccggtggcaaacgccgcggcaatctgtcgccggttcaggtggctacggccacgcagcaatccgtgccgagctatctgatcgggctgggcaccgtcaccgccgccaataccgttaccgtcaccagccgggtcgacggccagctgatgacgttacacttcaccgaagggcagcaggtgaaagctggcgatctgctggcggaaatcgacccccggccattccaggtccagttgacccaggctcaggggcagctggcgaaggatcaggcgacgctggccaacgcccggcgcgatctggcccgctaccagcaactggtgaaaaccaatctggtctctcgccaggagctggacacgcaggcctcgctggtgcagcagaccgaagggtccatcaaggccgatcagggcgcggtggacagcgctcagctgcagctgacctacagcaaaatcatcgccccgatctccggccgcgtgggcctcaaacaggtcgatatgggcaactacatcaccagcggctccaccgccatcgtggtgatcacgcaaacgcatccgatcgacgtggtgttcacgctgccggaaagcaccatcagcgacatcatgaaggcgcaaaaggccggcccggtcagcgtcgaagcctgggggcgcaccaacaagaccctgttggcgcagggcaatctgctcagcctggataaccagatagacaccaccaccggcaccatcaagctgaaggcgcagtacgccaaccaggacgacgcgctgttccccaatcagttcgtcaatgcgcggctgaaagtcgccacgttgcaaaacgccatcgtggtgccgaccgccgccgtgcagatgggcaacgaaggcaacttcgtctggacgatggacgatgagaataaagtcagcaaacgcctggtcaccgtcggcattgaagacagccagaacgtggtcatcgccagcggcctgaacgccgggcaacgcgtggtgactgacggcatcgaccaactgacggagggcatgaaggttgaggtggtgacgccgcaaaccaaagcggccggcggcaacgccgcaccgcacgccaagcgggagaaagcctga

SEQ ID NO: 427445 - DNA, 3081 bp, Serratia marcescens
gtgaaattcttctcgctgtttatcttccggccggtagccaccaccctgctgacgctggcgatcgcgctggcgggcgcgctgggcttcagcctgctgcccgtcgcgccgctcccgcaggtggactacccggtgatctccgtcaccgcaaccttgccgggcgccgatccggaaaccatggcgacctcggtcgccacccctctggagcgcgcgctcagccgcatcgccggggttaacgaaatgacctcaatgagctcactcggcagcacccgcgtgatcctgcagttcgatctcagccgcgacatcaacggcgcggcgcgcgacgtgcaggcggcgatcaacgccgcgcaaagcctgctcccctccggcatgccgagccgcccaacctatcggcagatgaacccgtcggacgcaccgatcatgatcctgacgctcacctccgacacctacagccaggggcaactttacgacttcgcctccacccagctggcgcagaaaatcgcccagaccgagggcgtcggcgacgtcaccgtcggcggcagctcgctgcctgcggtgcgggtggagctgaatccttccgcactgtttaaccagggcgtatcgctggacagcgtgcgccaggccatcagcaacgccaacctgcgcacgccgctcggctcggccgaaagccaggacaagcgctggcagatccagagcaacgaccagatcaagaaggccgagggctacaagccgctgattgtgcattacaacaacggctccgccgtccggctgagcgacgtcgccaacgtcatcgactcggtgcaggacgtgcgcaacgccgggatgaccaacgcccaaccggcgatcctgctggtggtcagccgctcgccggacgccaacatcatcgccaccgtcgatcgcatccgcgccgagctgcccgatctgcaggccagcattccggcctcgatcaagctgaacatcgcgcaggatcgctcgccgaccattcgcgcctcgctggcggaagtggagcaatcgctggtcatcgccatcgcgctggtgatcctggtggtgttcgccttcctgcgctccggccgcgccacactgatccccgccgtcgcggtgccggtgtcgttgatcggcaccttcgccgccatgtatctgtgcggtttcagcctcaacaacctgtcgttgatggcgctgaccatcgccaccggcttcgtggtggacgacgccatcgtggtgctggaaaacatttcccgccacgtggaagccggtatcaagccgctgcaggcggcgctgcaagggatacgcgaggtcggttttaccgtgctttcgatgagcatgtcgctggtggcggtattcattccgctgctgctgatggaggggctgccggggcgcctgttccgcgagttcgccgttaccctgtcggtgtctatcgggctgtcgctcatcatctcgctgacgctcacgccgatgatgtgcgcctacctgctgcgcccgcaaacggaacgcgcgcagcagcgcgtgcgcggcttcggcaagctgctgctgaaactgcagcagggctacggccgctcgctgcactgggtgctcgaccatgcccgctgggtgctggcgatcctgctggcgacggtggcgctcaacgtctggctgtatatcagcatcccgaaaaccttcttcccggaacaggataccggccgtctgatgggctccattcaggccgatcagagcatttcgttccaggcgatgcgccaaaaactgcaggatttcatgaccatcgtgcgcgacgatccggcagtggataacgtcaccggctttaccggcggttcgcgcaccaacagcggcgcgatgttcatctcgctcaaaccgctgtccgaacgtaaggacagcgcgcaacaggtgatcgcccgcctgcgcaccaagctggccaaagagcccggcgccagtctgttcctgatggcggtgcaggatatccgcgtcggcggccggcaggccaacgccagctaccagtacacgctgctgtcggacgatttgagcgccctgcgcacctgggagccgaaaatccgcaccgcgctggccgccctgccggagctggcggacgtcaactcggatcagcaggataaaggctcggagatggatctgatttacgatcgcgacaccatgtcgcgcctcggcatctcggtgtccgacgccaacaacctgttgaacaacgccttcggccaacggcagatctcgaccatctatcagccgctcaaccaatacaaggtggtgatggaagtggcgccaccctacacccaggacgtgagttcgctggacaaaatgttcatcatcaacagcgaaggcaaggcgataccgctctcctacttcgcgcactggcagccggccaatacgccgctggcggtcaaccaccaggggctgtccgccgcctccaccatctcgttcaacctgccgctcggggccagcctgggcgacgccaccgacgccgtcacccgcgccatgacccagctcggcgtaccgcctacggtgcgcggcgccttcgccggcaccgcccaagtgttccaggacaccctgaaatcgcaggtgatcctgatcctggcggcgatcgccacggtgtacatcgtgctcggcgtgctgtacgagagctatatccatccgctgaccatcctctccacgctgccttccgccggcgtgggcgcgctgctggcgctcgagctgttcggcgcgccgttcagcctgattgcgctgatcggcatcatgctgctgatcggcatcgtgaagaaaaacgctatcatgatggtcgacttcgcgctcgaggcgcagcgcaacggcggcatcagcgcccgagaggcgattttccaggccagcctgctgcgtttccggccgatcatgatgaccacgctggcggcgctgttcggcgcgctgccgctggtgctggccagcggcgacggcgcggagctgcgccagccgctcggcatcaccatcgccggcggcctggtgatgagccagttgctgacgctgtacaccacgccggtggtctatctttacttcgaccggctgcaggcgaagttccgccgcaacaagcaactggccccgctgccacactaa

SEQ ID NO: 427446 - DNA, 717 bp, Serratia marcescens
atggacatccagaatcaccccgtgcagatcatgattgttgaagatgagcccaagctgggccagctgctggtggactatctgcaggcggcgggttacgccacccgctggctgaccaacggcaacgaagtggtgccgaccgtgcaccagcatccgccggcgctgattttgctcgacctgatgttgccgggcgccgacggcctgacggtgtgccgcgagctgcgccgcttcagcgacgtgcctatcgtgatggtgacggcgaaaatcgaagagatcgatcgcctgctggggctggagatcggcgccgacgattacatctgcaaaccctacagcccgcgcgaagtggtggcgcgggtgaaaaccattctgcgccgcagctatcggccgcaggagagcgcgcgggaagatgacctgctgcacatcgatgagccgcgtttccaggccagctatcaggggcagttgctggatctgacgccggcggaattccgcctgctgaaaacgctggccagccagccgggcaacgtgttttcacgcgagcagctgctgaacaacctgtatgacgactatcgggtggtcaccgatcgcaccatcgacagccacatcaaaaacctgcgccgcaagctggaactgatcgacggggaaaaatcctttattcgctcggtatacggcgtgggctaccgctgggaagccgagccctgccggctggtgaatggggtttag

SEQ ID NO: 427447 - DNA, 1215 bp, Serratia marcescens
atgaaaatcgtcaacgccgaggtgttcgtcacctgcccggggcgcaactttgtcacgctgaagatcaccaccgatgacggcatcatcggcctcggtgacgccacgctgaacgggcgtgaactgtcggtggcctcttacctgaaagatcacctctgcccgcagctgatcggccgcgacgcgcagcggatcgaagacctctggcaattcttctacaaaggcgcttactggcggcgcggcccggtgaccatgtcagccatttccgccgtcgacatggcgctgtgggacatcaaggccaaggccgccaacatgccgctgtatcagctgttgggcggcgcgtcgcgctcgggggtgatggtgtattgccacaccaccggccactcgatcgacgaggtactcgacgactacgccaagcacaaagaacaaggcttcaaggcgatccgcgtccaatgcggcgtgccgggcatgaaaaccacctacggcatggccaaaggcaaaggccaggcctatgagccggccaccaagggcgactggccagaagagcagctgtggtcgacggaaaaatacctcgatttcacccccaaactgttcgacgcggtgcgcaacaggttcggtttcaacgagcacctgctgcacgacatgcaccaccgcctgacgccgatcgaagcggcgcgcttcggcaaaagcgccgagccgtatcgcctgttctggatggaagatccgacgccggcggaaaaccaggcctgtttccgcctgatccgccagcataccgtcacgccgatcgccgtcggcgaggtgttcaacagcatctgggattgcaaacagctgattgaagagcagctgatcgactacatccgcaccaccctgacgcacgcgggcggcattaccggcatgcggcgcatcgccgacttcgcctcgctgtatcaggtgcgcaccggctcccacggcccttccgatctgtcgccgatctgcatggcggcggcgctgcatttcgatctgtgggtgccgaatttcggcgtgcaggaatacatgggctattccgagcagatgctcgaggtgttcccgcacagctggacgttcgacgacggctatatgcatccgggcgacaagccgggcatcggcatcgagttcgatgagaagctggcggcccgttacccgtatgaaccggcctacctgccggtcgcacgtctggaggatggcactttatggaactggtaa

SEQ ID NO: 427448 - DNA, 1035 bp, Serratia marcescens
atggaactggtaaacaccatgcgcagcgttgtgatcgaacagcccgggcgcctggcgctgcagacgcgcgcgctgccgcagccggcggccggcgaggtgcgggtcaaggtgaaattcgccggcatctgcggctccgacgtccatatctatcacggccataaccctttcgcccgctatccgcgggtgatcggccacgagttcttcggcctgatcgatgcgctgggcgaaggcgtcgatccggcgcgcctcggcgaacgcgtctcggtagatccggtggtcagctgcggccactgctatccctgttcggtcggccggcccaacgtctgcacctcgctgcaggtgatcggcgtgcaccgcgacggcggcttcagcgactacgcctgcgtaccggcgcgcaacgcctatccggttccgcccgccatcagcgatcgccacgccgcgatgatcgaacccttcagcatcgccgccaacgtcactgcccacctgcaaccgcgccctgacgacatcgcgctgatctacggcgccgggccgatggggctcacggtgatccagacgctgaaaggcgtgtacggcgtcaagcaggtgtgggtcgtcgatcgcatcgccgagcggctggacatggcgcgcgtcaacggcgccgacgaagtgttcaacaacgccgaggccgcattgccgcaggcgctgcagcagcgcggcattcagccgacgctgatcgtcgatgccgcctgccaccccgccattttgccggaggcgatcgtgctggcctcgccggcggcgcgcatcggcatcatgggcttttccggcgacgcctgcaccctgacccagcagagcatcaccagcaaggagctgtcgatcttctcctcgcgcctgaacagcgcgcgcttcccgcaggtgatcgcctggatggcggacggcaagctagacccgcagcggctgctcacccactgcatgcccgccggcgacgtcgaacgggcgatgctgatgttcgagcgagatcagcgcacctgctgcaaggtgctgctgcagttcgagtaa

SEQ ID NO: 427449 - DNA, 1290 bp, Serratia marcescens
atgtttaaaaacctgcgttggaccatcgtgttcctgctgttcatggtctacatgatcaactacctcgatcgcgtggcgctgtcgatcaccgtgccgatgatcgaacaggatctgatgctgaacgccgaacagttcggcctgatcttcggcagcttcttcttcggctacgccatcttcaacttcgtcggcgggctggcggtcgaccgtttcggcccgacgctggtgctgggcgtggcggtcggcctgtggtccattttctgcggcatgacggcaatcgccaccggtttttactcgatgctgatcctgcgcgtcctgttcggcatggccgaagggccgatctgcgcctcggccaacaagatgatcaacggctggttcccgaagaagcaggcggcgaccgccatgggcctgctcagcgccggttcgccgttgggcggcgcggtggccgggccgatcgtcggctatctggcgctggcgttcggctggcggccggcgtttatgatcatctgcgctatcggcatcgtctggatgctgctgtggttcttcgtggtggcggataatccggcgaaaagccagcgcgtcagcgccgaagaacgggcgctgatcgcacggttgaaacaggaaaacctcggcgaggaaagcgcgctgagcgacgcggcgcacgggctgggttactacctgaagcagccgatcattctggtcaccgccttcgccttcttctgctacaactacattctgttcttcttcctgagctggttcccttcgtatctggtgcaggcgcacaacctgaacatcaaggagatgagcctgaccacgatgatcccgtggatcgtcggcttcgtcgggctggcgctcggcggctatatttccgacaaaatcttcaacatcaccggcaaattgctgctgtcgcgcaaaatcgtgctggtcaccagcctgctggcggcggcggtgtgcgtggcgttggcaggcaccgtcagcagcgtggtgccggcggtgatgctgatgtcggtgtcgatcttcttcctttacatcaccggcgccctctactgggcgatcatccaggacgtggtgcataaatcccgggtcggcggcgccagcgggttcattcatttgatcggcagcgtctccggcatcatcgggccgatcgtcaccggctacatcgtgcagaacaccggcaaattcgacagcgcctttatgctggcgggcggcgtcgccgcgctgggcgcgctgctggtgctgctggtgatcaaggcgccgcgcgcaacggcgggcgtgcaaatcttaaaaccataa

SEQ ID NO: 427450 - DNA, 1506 bp, Serratia marcescens
atgagactttccgaccacagcgcgctgccggccgccattattcggcccggctacgcacgtgagcgcgtgaaaccgcgcatggtgcatatcggcttcggcgcgtttcaccgcgcgcaccaggcgatgtacgccgacaggctggccagcgagcacggcagcgactggggctactgcgaaatcagcatgcagcacggccagcaaaagatcgccgacctacggcaacaagatctgctgttctcggtggcggagatggacgacgacggctggcggggccgggtcatcggcgtggtgcgccaggcgctgcacctgcaaaccgacgggctggcggcggtgctggcggccctgacgcagcctgagatcgccatcgtctcgctgaccatcagcgaaaagggctattgccaccatcctgccagcggccggctgatggcggaacacccggcaatcgcgcatgatatcgcccacccggcacagccgcagtcggcgccggggctgctgctggcggcgctgcgcctgcgccgtgaacgcgggttgccgccgttcgccgtgatgtcctgcgacaatatgccggccaacggccgggtcacgcgccaggtgctgctcgacctggcgcagcggcaggatccggcgctggccgactgggtgcgtcaagaggtcgccttcccttccaccatggtggatcgcatcgtgccggcgatgacgcaggaagcccgcgggcagctgcttgcctggctgggcggcgtcgaggataaggtcggcgtggcctgcgagccgttcagccagtgggtcattgaggaccgctttccccaggggcgaccggcttgggaaaaggtcggcgccgaactggtgagcgacgtgctgccgtttgaggagatgaagctgcgcatgctgaacggcagccattcgttcctcgcctacctcggctatctggccggttatcagcacgtcggtgactgcatgcaggacgcggattttgtccgcgccgcccgtcacctgatgctggcggaacaggcaccgaccctgcaggtgccgaacgtcgatttggcgcagtatgccgactcgctgctgcggcgtttccgcaaccgcgcgctgaagcaccgcaccgcgcagatcgccatggacggcacgcaaaagctaccgcagcggctgctggacgcgatccgctggcatctggcgcgcggcagccgcttcgactgcctggcactgggcgtcgccggctggatgcgctacgtcggcggccgcgatgagcaaggcgcgccgatcgacatcagcgatccgctgcgcgaccccatcgccgcgttggtcgccggcagcgaggaaggccagccccgcgtcctggcgctgctgcagctcgacagcgtcttcggccaggatctgcccgactcgcctgacttcgtccgcgccgtcagccacgcttatcatcaactgctgagcctgggggccaaagccgccgtcgccgctctgccgcttaccgaccgggaggtttccgatgaccgtcaccacgcataa

SEQ ID NO: 427451 - DNA, 1332 bp, Serratia marcescens
atgaccgtcaccacgcataacgccgtcaataccggcaatcaaccgctgctgcggcgcgtcgccagcgcttcggccatcggcaccgccgccgaatattatgatttcttcgcttacggcaccgctgcggtgctgttcttcggccagctgtttttccccagcgccgatccgctgatcagcacgctggcggccttcgccacctacgcggtcggtttcctggcacgcccgctgggcggcatcgtgttcggccacatcggcgacaaggtcggccgcaagaaggcgctggtgatcaccatcctgatcgtcggcctcggcaccttctgcatcggcctgctgcccacctatgagcagatcggcatctgggcgccgctcgcgctgatctttatccgcgtgctgcagggcttcggcgtcggcggcgaacaggccggcgcggtgctgatgaccgccgaatacgcgccgccgctgcggcgcggtttctacgccagctgggtacagatcggcgcgcccgccggtttcctgctgccatcggggctgttcgcgctgctgaccgccgtgctgtcgccggcgcaaatgctggactggggctggcgcattccattcctgctcagcctgctgctggtgatcgtcgggctgtttattcgcctgaagatcgacgagtcgccggtgtttacccagatccgcgccaccaaggcggtggagagccggccggtggtggaagtggcccgccgctaccccggccttatcggcaaaggggtgtgcgccaagctgattgaagcctgcgccttcgccatgttcacggtgatcgtgctggcctacggcaaggccaaccacctcaacgagaccattctgctggaggcgatgatcgtggcggtgctgctggagattttcgccattccgctgatgggccgcctctccgatcggctggggcgaaaaccggtgtacatcgccggcgcgctgctgcaggtggtgtgcatcgtgccgttctttatggcgatcaacctcgatagtttctgggtgacgcagatcgccatgatcgtggtgctgaccttcggccacagcatgtgctacgcgccgcaggcctcctacttcccggagctgttccccacccgcgtacgctgcagcggcatcgcgctgatctggcagataggatcgctgatcggcagcggcattctggggctgctggcggtgaagatcctgcaggtgaccggcggccactactacgggctggcgggttacatgatggtgctgggcgtggtgtcggccatcggcctgagcctgatgccggaaaccgcgccggggcggcgcaagcaggaatatcaggattggcatcactga

SEQ ID NO: 427452 - DNA, 687 bp, Serratia marcescens
atgtctgaaacgtacagtctcaccaacaacgtcccggtcaaccagcagatctatcgcttcctgcgcaaggatatcgtcgactgcaccatcccccccggcaccctgttgtccgagaaagagatttccacgcgcttttgcgtttcgcgccagccggtgcgcgaagccttcatcaagctggcggaggccggtctggtgcagatcctgccgcagcgcggcactttcgtgatgaaaatctccgccaagcgcgtggccgacgggcgctttattcgtcaggcggtggaatgtgccatcgtgcgccgtgcggccgagcgcgccaccccggcgcagctgatgacgctggagcataacctgcaccgtcaggcgctggcggcgcagaacgggcagacgcgcgagtttctggcgctggacgatgaattccaccagctgctgacccagttcgccgactgcccgctggcgtgggagaccatcgaaaccatcaaggccaccatggatcgggtgcgtttcctcagcctgagcgaagtctcgccgccggagagcctgatcaagcagcactaccgcatctacgaggcgctgaaagcgcgcgatgccgaggcggcggaacgcgccatccacgatcacctgcaggagatgatctactccatcaccccgatcgccctgcagaacaccgagtggttcgagatcgaataa

SEQ ID NO: 427453 - DNA, 1050 bp, Serratia marcescens
atgactgatattgtgcagttgctaggaaaggaagcggaagatctgctgcaacaccgctgtaccactatccccgccgagaatctctacctgccgggcgccgatttcgtcgaccgcgtaatgatcgataacaaccgtcccaacagcgtgctgcgttcgatgcaaaccctgttcaaccacggccgcctggccggcaccggctacctatcgatcctgccggtcgatcagggcatcgagcactccgccgccgcctcgttcgccgccaacccgctgtatttcgatccgaagaacatcgtcgagctggcgattgaagccggctgtaactgcgtcgcctccacttacggcgtgctggcgtcggtatcgcgccgctacgcgcacaagatcccgttcctggtcaaactcaaccacaacgaaacgctgagctacccgacccagtacgaccagaccctatacgccagcgtcgagcaggcgttcaacatgggcgcggtggcggtaggtgccaccatttacttcggctccgagcagtcgcgccgccagatcgaagagatctcgatcgccttcgagcgcgcgcatgagctgggcatggtcaccgtgttgtgggcctatctgcgcaacccggcgttcaacaaggatggcgtggactaccactccagcgccgatctgaccggccaggccaaccacatcgccgccaccatcggcgccgacatcgtcaaacagaaaatggcggaaaacaacggcggctaccgcgcggtgaaattcggctataccgacgatcgcgtctacaccaagctgaccaccgatcacccgatcgatctggtgcgctaccagctggccaactgctacatgggccgcgccgggctgatcaactccggcggcgccgccggtgagaacgacctgcaggagtcggtgcgcaccgcggtgatcaacaaacgcgccggcggcatgggcctgatcctggggcgcaaggcgttcaagaaatcgatgaaagacggcgtggcgctgatcaacgctgtgcaagacgcctacctggacaagaaggtcaccatcgcctga

SEQ ID NO: 427454 - DNA, 615 bp, Serratia marcescens
atgcaaatcgacgaacacatcaccgggcgagagccgcagcaggaaagagggcggcaacgcgtacaaaccattctggattcggcggcggcaatcgtggcgcaggacgggctggcggcgctcagcatgcagcggctcgccaagcacgccaaaacctccatcggctcgatgtatcacttctttcccgatcgtcacgcagtgatcaaggcgctggcggatcggcataccgagtcggtcgaggcgctgatccgcgacatggcgttggccagtgacgacgagtggcggcgcctctccgctgaagaggtgatccagcggctgttttcaccctatgcgcaatatttgcgcgagcacaccgattacctgccggtaatgcgggagatgaacctcccggacgaaaagtccagcttcctggcgctgatcgccagagtgctgcagctgcgtcgccccgagaccgccgaagcggagatcctgcagcaaacccggctgttgcaaagcctggtggccggcacgttgcaccatatcttcaagacggcgccgcagagcgtggcgttcacgctggcggagctgcccggcgtgctgagcctgtatctggcgggaaaagaggggaacatcgcttag

SEQ ID NO: 427455 - DNA, 264 bp, Serratia marcescens
atgcccgacaaaaaactgcttatcacctgcctgaccgcgctgttgctcaccaggtgctcgccggcaccgtcgatagtggtgttcggcgcttcgtttcccgactggctgttttgcctgtgtggcggcgtggcgggcatggtggcgatccacctgctgctgcgcaccccggaaaaacgcgcctggctggcgccgcagctgctgacgtatccggcgctgaccgcgctgatcgccatgctgatctggttactggttttcccccactga

SEQ ID NO: 427456 - DNA, 1038 bp, Serratia marcescens
atgacccaaccacaaatctccaacaagcgcagactgctggtgcttgccatcctggcgttgacgctcatcgtggccgccgtcgtcgtctggcgggtggaaaacgccccgaccaccgacgatgcctacgcctatgccgacaccatcgacgtagtgccggaggtgaacggccgcatcgtcgagatgccgatccgcgacaaccaggaagtgcggcaaggcgatctgctgttccgcatcgatccgcgcccttaccaggatgcgctggcggccagcgaggcgcgcctgatcacgctaaatgagcagatcaagctgacgcagcgctcggtcaacgcgcagcagtacaacgccgaatcgatgaacgccatcgtcaaacgctcgcaggcgctggtggcgcaggcgaccgacacccttaaccgccggcagaagctgctcggcaagaactacgtttcggcggaagaagtggaaaccgcccgcacctcccagcgctcggcgcaggcggagctgcaggccgcattgctgcaggcgaaacaggcggaagccgccgtcagcggcgtcgaagccctggtcgcgcagcgcgccgaagtgcaggccgacatcgccatcgccaagctgaatctggaatttaccgaggtgcgagcgccgttcgacggccgtatcgcctcgctgaaaaccaccgtcggccaatatgcctccagtgccaaaccggtgttcacgctgatcgacacccgccgctggtacgtagtcgccaacttccgcgaaaccgacctgaaaggcgtgcatcccggcgtgccggccacgctgtatttaatgagcgacgccggccagacattcagcggcaaggtagagtcggtcagctacggcgtacagcccgacgacggcggcaccgtgctgggcgggctgcccaacgtgtcgcgcaacatcaactgggtgcacgtttcgcagcgcttcccggtcaagatcgcggtagaggcccccaacccggcgctgttccgcgtgggcgcttcggcagtggcgaagctgaacctgcgccatgaagaataa

SEQ ID NO: 427457 - DNA, 1980 bp, Serratia marcescens
atgaagaataaaacgatgtctcgcggctggttgtctcagttgatcgacgagctgcgcccctcggacagccgcatcaacctggtgatccgcgccctgctctccagcgcgatcgccatcgtgatctcgcagacgctgcaggtgccgtggctggcgctatcgctgatcgctgtcttctttatcacgcagtccaatatcgtgatcacccgcgcgatcggtatcctgtttttcgtcagctccacgctggcgatcggcgccgctatcctggtgctgaagttcacctacgactacccgatgctgcgcattctgctctccagcgcgctgtttttcctcagcgtgttcctgatgcgggtgaccaaggtcggagtgctgttctttctgatggcgctggtggtgatctacacgcaaagctttgtcgatctcactccgcaggcggaagtggtgatacggctggtgctgtgggtatgggtggcgatcaactacgccattctgctcaccctgatcgtcaataccctactgctgccggccgaaccgctgaagcagctaaagggccggatgatcgcggtgttggacgaaaccctcgctatgttggcccacggcggcgagacgcgcgatctgagcgccatctcgcagcacgccaccgagctgcataagctgctgcgcttctcggtgatgcgcagcgatcgctgccgcgccaacgagcccggttatctggcgctgatcaccctggtattgcagctcaatatcctggcctaccagctgccgccggctttcggcacggccgcacgtaaattggcgcaagagatagatgccgcctgccgagaactgcaaaccgcgataagccacgacagcgcgctgcgattttccgtcgcgatcgccggcagtgacgatccgcaggtgccggcgccgctcaatgaaatggccggcctcctgcaggtctacgccaaccgcagcgactacgccgacgcactacaggccgcaccgccgccgaaagtgcccttctttacccccgacgccctgaccaacccggtttacatccagttttcgttgaaaacgctgctgaccgtgctggtggcctacgtgttttataccgccgtcgattggtccggcattcataccatcatgctgagctgcctgatcgtggcgcagcccagccttggtgccacgcagcggcgggcgcggctgcgtctcggcggcgcggcgatcggcagcctgctggcgctgatctcggtggtgtggatcatgcctcacctcgacagcctcgtcggcttgctgctgctgacgctgccggtaatcgccctgtccgcctggatcgccgccggctccgagaagataagctatgccggggtacagatcctgttcaccttttccctggcactgctggaaagcttcggcccggtcaccgagttgaccgagatccgcgatcgcctgatcggcatcgtgctgggggtggggttcgccaccttcattcacgccacgctgtggccggaatacgaaggggagtcgctgcggcagcaggtcgctaacctgctgcgggaattgtcgcgcttcctcggcggcgagaacacaaacgccatcggcatctggcaaaagatcgagggctgcgaagcggtggtggcccgggtgacgctggagcctacctggcagttggcggatgataaccatgaaagcttcacccggcatatccaactgatcttcaaccagacgcgcagcctgttgctgaccagcgaaaagctcaacacctatctggcaggcagcggcgccgcgctgtccgtgcaggaacacgaggcgctgctagaggtccaacgccagggcgggcacgttctcgccgagtatgcggcgcagcttgccagcgcaccgcaagcgctgcgggcgcccgactttcatccaccgctggccgccctgcatgccgacaccgtgcgccacctggctcaggagttaagcgacgggctcaatcgcctgcccgcctggggtgacgcctag

SEQ ID NO: 427458 - DNA, 195 bp, Serratia marcescens
atgagagaattaaactcaacagaggttcagcaggtgaacggcgcaacgattggcctgggtctggctattatcggcaaggttgttaatagctggggcaacgcgtggaataatgcctggggtggttgcacgccaaaaccgccggtatgtaaacctgagccgccggtctgcaaaccaaaaccgcctaaatgcgattaa

SEQ ID NO: 427459 - DNA, 2115 bp, Serratia marcescens
gtgaataaagtttatgagaatatcgttggcaagctgaatctgtcgctcagaagaaaagtgccgcaggtcttgcaaacggaggccgccgaatgcgggctggccagtttagcgatggtgtgcggctattacggcatgcacatcgatatgctgtcgatgcgccagaagtttgatatctcggcccgcggtgccaccctgagctcgctgatcgcgatcgccgagaatctcaatttgaaaacgcgggctttatccttgagcctggatgagattcaccaggtgaaaaggccctgcattttgcactgggatatgaatcattttgtggtcctggtcaacattcgcggtgggcggataaccttgcacgatccggcatttggccgccgcgttatcggcctgcaggagttttcccttcattttaccggaatagctttagaggtatggccaagcagtgaattcacgcctgtggtgcagaaaaaccgcctgcactttagaaaactgctcaacaatgtcaccggtcttaaaagcgcgctggtaaaaattttcgctctgtcgctggtcattgaggccgtcaacctgctgatgcccgtcgggactcagttggtgatggaccacgtcatccaggctggcgaccataatttattggtcattatttgcgtcggtttactgttttttatcttgttccgcacctgtgtttcgatgtttcgctcgtggatctccatcgtgatgggcgcgttgatcgatatacagtggaaatcagggctgtttgatcatctgatgaagctccctctcgcctattttgaaaagcgcaagttgggggatattcaatcgcgctttggctcgttagatgccattcgcaccacgtttactaccagtatcgtttccagcatcattgatggcatcatgtcggtcggcgtatttatcatgatgttcatgtacggcggctggctggtgtgggtagcctccggctttacggtcttatatgttctgctgcgcctttcgacctatcgctattatcggcaagcgtccgaggagcaattggtgaagtcggcgaaagccagttcacattttatggagacgctgtacagcatcgcgacgctgaagtcgttggggttggcgggaacgcgttcgcagttctggctaaatctaaatatcgatacggcaaacgccaatattcgggtgacgaagctcgatatgttctttggcggcgtgaatgcgtttcttgctgcctgcgatcaaatcgttatcttgtggttaggcgcgtctttagtgatcgacagtcaaatgacattaggcatgtttgtcgcctttaatgcctatcggggacaattctccgatcgcgcgtcaaatcttatcgatatggtaattcggctgcgaatgctgaatttgcataatgaaaggctggcggacatcgtgctttctacgacagaagaagaaaagccctatcgtaagatatgcaatcccaacgaggcggtgacttttgaagtgcgcgatctgctttatcaatatgacagcctttcacgcccagtgatccctgggctcagcctgcagatcgcggcgggagaaagcgtggcgatcgtcgggccttcaggcgttggcaaaaccacgttgatgaagctgatgtgcgggttgttggaaccgacggaagggcgcttgtttatcaacggcattaacattcatgacatcggcattaataattatcgggagtgcatagcgtgtgtattgcaagaagataaactgcttgccggttcaattgccgagaacatatgcagttttgacgctcatcccgatacggaacttatcgttgaatgcgccaaacattgcaatattcacgacgatattatgaaaatgccgatgggatatgaaacgttggtgggcgaattgggaggcagcctttccggcgggcaaaaacaacgggttcttatcgcccgcgcgttataccgaagacccagcattctgtttatggacgaagcgaccagtcatttggatctggacaatgaaaagagggtgaacgaagctatatcctcgttgaaaatgacccgcgttatcattgcgcatcggccatcgacgattgcatcggcagatcgtgtaattacattgcgacccgtaaatgcaatggtgtaa

SEQ ID NO: 427460 - DNA, 1278 bp, Serratia marcescens
ttgtttagggaagaggccttaacgcacagtcgttctaaatgggctggaaaagcattgttaattgcagggttgccggcctgggtcatcgcgggcatttcactttcattcgtttctgtgctgatcattttcgtgacctatggcggttatacccggcgtatcagcgtgggcggagaggtcacgacgctgccaagatcggtcaacatatttgctactcagcagggatttattgcacaacgctttgtcaatgtgggcgatcaggtaaaaaaagggcagcatctttatcagatagacgtcagcagggtgacggattccggcaccgtcagcgcaagcacgcggcaggcgatagagaatcaactggcgcaggtcgatagcatcatcgccaaattggaggcgaacaagaaaacgaccttggtcaatctgcaagcgcagattgaccaatataaactggcgaacagccagtccaaacagatggtcgagaattcacgcaacggcgttaacttcatgcgcgaaaccatgaaaaattacgatgagtatcgcagtaagggactcattaatcgggatcagctaaataaccaggtttacctttactatcagcagcagagcacgttccacagtctctacaaccaaagcattcaagagtctttgcagataactaacctgaatagcgatctcgcgacaagagcgtccgatttcgataatcaaatctcgcaatatcaatttcagcgcaatgatctcctgcggcagctggccgaagcggacgccagcggctcgttgattgtcaatgcgccggcggacgggcgcgttgaatcgctcagtgtgacgcctgggcaaatggtcaatacgggggacagcctggcgcaattaatccccagtaatcatgccatctattatttggttttatggctgcccaacagcagcgtgccttacgtgagccgaggcgatcatattaacgttcgttatgacgcctttccgtatgaaaaattcggtcagtttcccggagtgatcgaaagcatcgcttatgttcccgcatcgattcaggaaatgtccacttacagcagttcgccaactcgacaatcggctgaactggttgagtcgtactacaaagtgctggtggctatcgataacacgcagttcggctatcagggaaagaagctgaacctttcaagcggcatgaaggcgcaagccacgcttttcctcgagaaaagacccatctaccaatggatgttcgcgccattttatgacatgaaaaacagtgtgtcggggccacttcgtgaataa

SEQ ID NO: 427461 - DNA, 318 bp, Serratia marcescens
atgaaagagctaaatattgcagagatcgaaatcgtttctggtgcggggattatttccgatacggcaagctttgtatcaggatttgccggcgatgttatcattgataccgtaaaattggccaatgatgcgcttaatacccgattgatctcttccgtaggccaaggattcaacgcgatcggttttggcttgggcgccgttcataatgtcgcggactcgcttggctatgcggcatttaaaagcgtggcagccgtaggctccctgctgggcggggatgcaagccgtatcgaatatcattacgagaaagaatggggggcttga

SEQ ID NO: 427462 - DNA, 1626 bp, Serratia marcescens
atgactagttctagtttgaacacgttccctgtaggctatgagtatttcaattttgttaattggtcaaaagaaatctccggcaatcatattctgacctgctatccacaaaatacggatgagctcttggccgtgattaactgggcgcatgaaaataaatattgcgtgcgtccggttggcatcaagcacaactggtccccgctcgttattgcaaacggggaggataacagcaatgtcgtgctgatcgacctcactaggaaattcaaaaacatttcaatcaataaagtgggagagcatggatacgtcaccgcgcaaacgggagtgacaatgcaggctttgctcactgaattagaaaaaaagaaactcggcttttacgcgacgccggcgcctggcgatctgaccctgggtggcgtgctcgccatcggcggccatggaacctgcatcccggcaaaagatgagcgtctggctgagtttgccagctttggttccgtgagcaatagcgtggtgtcgctaaaagctgtcgtctgggatctggcgcggtcgaagtatgaattaaaggagtttacgcgtgataatgcggagagctcggcattcctggtgcatgtcgggcgggcttttatcagcgaagtgacgctgcaggtgccgcgcaacaggcgtttacgctgtcaaagttatgtcaatgtcaccgcggcggatcttttttccactgcgagcacgacaaaaaataccttcagccatttcttggatctgtgcgggcgcgttgaagtcatctggtttccgttcacggaaaaaccatggctgaaagtgtggaagcaagaagacagcttcccaaaagtgtcaaaaccggttaacggtccatttaactatccgttctcggataatttgccggttaaaatttccgatatcattaaaaaaatcaataatggccacccggagctgaccccgacactcggcaaggcgcagatggagttggtcagcattggtttaggggccaccgtgtcggcggatctgtgggggtggagcaaggatctgctgttgtatgtgaagccgacaacgctgcgcgtgacggccaatggttacgcaataattacgaaacggagcaatattcaaaacgtattgcacgatttcacgaaaaaatatgaagaaatggtggccgattaccagcgcaagaattcatttccgatgaatggcccgattgaaattcgcgtcaccggattggacagtgcaaaagagagcgcagtggccaatgctattgttcccgatctttcggccattcgccccgttgaatcgcatccggaatgggatgtcgcgatctggttggatattctgaccatgcccgatacgccggatgccaataaattctacagtgaaatggaaaaatggatttttagccactatgcgggcgactatgcgacggttcgcgtagagtggagtaaaggctggggttatacttcacaggcagcatggcaggataaaaccgtactcgaagaaaacattccgcgcagctttaatgccggggcagggaaaaatgacagctggaatcatgcctgcagcgtgctgaataagtacgatccgcacaacgtgttctcctctccattgaccaaagcggttttcaaacagaagagttag

SEQ ID NO: 427463 - DNA, 804 bp, Serratia marcescens
atgagttaccagcatagtatcgtagtcgagctagttaatttgatcgagatgaatatacagcatgatctctcgatagaaaagttatcggatttgtctggttattcgaaatggcacttgcaaagaatgtttcagcgttatacgggaatgaaaatagcgacgtatattagaaataggcgtctgagcaagtctgccgtcatgctcaaacagtctgatttaaaagtattggaagtggctactgctatcggctttagctcccagcaggcttttagtcgcgcctttcaacgctttttcggtgaaagcccaaaggactttagagcgagccaggaatgggacttttccaaacatctccctccctttttaatacaaaatccgtctgcatatcattttatcgaaatgcccaagaacatatacctgcttaagggatataagttttttctctatcattcgatgaatgcttccagttctggaggagaggaacgacagaaatacagcagccgcacagggaaaaataccgatacgtcaatgcgcacggtaaagttggcttcatccggttgggaagtcacgctcagcaaagggtactacgagacacgcaatctgacgttgataagagggcagtatttgttgttcgagtttaacggcaggttaaacgaatacctgattttttttgacagcatctatgatgcctatcttcctttgctcggcgtgcgaataagaaacggctttttaattgaattgcataaagaaaagaattttcaatacgcggaacttaacgtcaatgtgttgatttatatcggcaagtcttga

SEQ ID NO: 427464 - DNA, 348 bp, Serratia marcescens
atgacgtttgaacaacgaagggacaaagcgatagcgctgatggaggaaaagaagatgtggcggagcaactacgcgccgccaatcttgcgcctgctgtggcgaatggacgtgaatatgccaccgccgccgtttgcgcctttctggctgaatatgctgttcttcggcatttggtttggcccgctgtggggcgtgctgatgtggttcatggtatggaaaaatcagggatataccggtgaagaggccctgacattaagcctcgccgccggcctgttgtttggcttttttatggcgcttttccactacaggcggaaaaaggcgaacaggctgccggactggaacgatctttga

SEQ ID NO: 427465 - DNA, 1947 bp, Serratia marcescens
atgtggtacagaacgggaaaaattaatgttgtcagcaatgggacatccgtcgcaggggtggggacacaatgggctgacgcaaaaaatggcgtgatgcctgggatgattttgctggctccagacaatcaactttatgagattaaatctgtaagtaacaataatctctttgtattaagttcgccttatgcaggctcgacggccactgggcaagattacgcgattatcactacttatgaaggtgatatcagccagttttccgcaagattgtcggctttgctaacttactttcaaggaagccgcaatgatttgatgaatttattgacttcatcaggtgatgtcaccatagaaaaagacgatggacaacgcattatcttgccgggatataggaaagtgctcgatagcatggatgtcacggttaaaaaagtcattaataacactcgttggaagatgcctggtacggcaaagaacccaggatggtatttgcttggtgaaatcagcaaatttacgcaaggtggaagtacgctaaagatcgatgttaccggcggaccaggttataacggagcttggatccataatgcgatggcgagtattgttatacgtaccggtgatgggcaagtttcgactgtcaacgcagctggacgagcgggggtgacatgttggaacgcactgcaagagcgtgcggcggtcattgacgtttgtttgattgagcgaacggcgaatatgtatgaggtacatgtcaatcttggtagctttatcaatcagtgtttctatgagatttctagcgtagatatggctatggtcgataactggaatcatgtcgccaccaaagatagcgttatacctgagagccctctgggtaaaaaagtgattgcgaacttgaccgatgcaactgtcgtcgatcgtgattatctcgacagccggttgatttcaaaaggggagtttggtctgggagcaggtgcccagcataaagatgatgcttttcaacgaatttacaacatgtatcgagtgacgccagcctctgccaatgctccacttcccaacaacatttttggctgtgtctcgctgccgatcgatggtggcccaacaacagggtatatggctgtgggctcatcgggagcactctttaccggtgtatccaactcggtatcggcggggaaaatcagctgggggcgaaccttcggtgatacctgtttgcctacggtatcggatattcccaacctgaaagattggggattgacctatggtgtaacggcagcgagaaagctggattttaatgatcgatacttctcgcgcagagggatggtaggaacggatcctttggggaatccgttcaaagatgtcgggacgtattttctggatgtgtatggctggaaagccggtcaagaagacaccaaagaaaattatcgcgcggcgcaaacttgttacggttatggggtgtcgggaaaccagagtgggaagatgtttttgcgtacctggaatggtaccgagtggagcaagtggttcaaggtttggacagaggcctccacgatcacggacaccaatgggtatctcaaacccgcctccccggtagtcaagctctttggtgatggccgcagcgtattcaatgaagacgttctgggggtaaaaacggagaggctcagcgaaggggtttaccgcatggcagggacgctcggattcaatgccgacccaatttggggggggataaacggtgggattgaaatcccattagacagtaacaagcaagcattgatttgggttgattatcaggttgaaaccaatggcgatatcatcattcgcagttatcaccgtactcacgacggtgttcctgttttcgcgcggaatattaaagaagggtatgtggatggtcagcctatcgacattcctgagggacgtcatatcgatctgcgcgtacaaatgcccgaattgcccatagcggttgaggtgtaa

SEQ ID NO: 427466 - DNA, 2034 bp, Serratia marcescens
atgtggtataaagcgggtaaaattaatgttgtcgctaatagcgcctctgtttctgcgaccggcacacaatggggagatgcaaagtacggcgtgatgccagggatgatgttgctggcaccagataataagctctatgaaatcaagagcgttaacagcaatacttcattgaccttgaacagtagttatttgggtgagacggccaatgggcaaccctatgccatcattacgacttacgaaggagatatcagtcagttctctgctcgattcagcgccttgctaacctattttcaggggagtcgtagtgagttgctcgatgtcttgactggtgccggcgacgttaaattaaccaaagaagatggttcgttgatcactgtaccttcgtacagcaaattgatgacggatatgcaagacaaggcgcttgtttccatcgatcgtttacgctttgcgatgccggtgacaacaacggcagatgtcacttatttgtgggggacgctggtgaacttcccgcaaaatggcgcaacggtgagtatagatatcgttggtggggcgggatttaatggtcaggtttacaataacactggagcacaggttattatcagaacgggtacgcagaataacgttgttaattcacgtgggcgcatttcagctagagtggttcactcaggtaatgaagttattattaaaggtctttctttagtagaaacatcggcaaataattacgatgtttatgtgactctgggcagtttcatggcctccaactactatacggtgcaaggagggtcactttcgaccatgctgagccgttgggtcaataaagggactcgtttcgagggcgaccttcctgccagcaatatgaacgtgggaatctatgcgcagtatgtcgagagtttggcaaacaagaaaatagatctgcagaagtgcatttgggctggcgatggtaccgggattggcggcacttctgtgcacaaagatgatgcgtttgaaatgctcaaccgtttttatcggataaaccaagactcggctaactatccaggtggtgcgggtaacgtagcggtggtttccctgccgctggatggcagcccatcggcggcttatttggcggtgagcgggcagcggcatgcctgggtagggcaaggaagcaactatggggaaaataaaggaaaaatattctggcagcgcgtgtttaccgatctctatgctcctgccgtttcggagttgagaaatggcaaagattacggattgacaggggcagtcaccgctgcagctcggcttaatttagattcgctataccagtccagtccgttgatggtgattaatgacgctattaatcgaccggcggaattgggggtgggcgccgcgtttattaaagttgaaagctggaaagtggatggcggagcggaacccggttcgcttcgcacgcggcaggtggtttccggttatggcagccttggttctgaaagcggcaaggtttttacccgggtgtggaacggtacgaaatggactggatggattaaggactggacagaagcgacgacgacggtagatggcaacggctttatcaagaaagcttcgccgattgctcgcttgtccagcgatccgcagcgcatgaacagtgattttttagccggctttatgcttgccggcgtagcggcgatcaatcccgaggcggcgggagtcactgcagaaaagctcacgactggcgtttatcgcctcaccggtgctcgtggcttcgcaaaggaggggtggacgtttgaaatacctcaagatggcaacggcaaccgtttgtgcttcgtagagacggagactgacgacgatggcgtcgtcacggtcagagtcagtaaacggcgattcgatgcagatacggcgatggttattgccggtgagcccatggatattccggcggggcgctggatcgatctacgactggatgtccttcagaatcaggaagtggatgagaaggaaaaacatgcggcagattttcgcgatattgatcttgccgatgcagatgatgccaacgttggacctttgcagtaa

SEQ ID NO: 427467 - DNA, 5718 bp, Serratia marcescens
atggcacagacacttattcgcgggcgcaaaggtggtggtggagcggcgcatacaccggtcgaatcacctgatgacttgcagtccaatgcaaaaattaaaatcctcctggcgttatcggaaggtgagatcgccggcgaactggacggcacgcgcattctgctggatggcacaccggtacacaatgccgacggcagcgagaatttcaccggactgaaatgggaggtgcgcaatggtacgcaaatgcaggattacattcaggggatgccggacgttgagtcggaaacctccgtcaacgtaaaactgacgacgaccaatgcctggacacgtactttcactaatactgacattgatgcattgcgcattcgaatgggatttccatcgttgtttcgttatgaaaataacggtgatatgcatggcgcggttgtggaatacaaaattgaactctccaccgacggcgccgcttatcaaacggtcgttgacggaaaagtagagggcaaaaccaccagtttgtatgagcgtgaccatcgggttaacttgcccaaggcaacaaacggctggacgttgcgtgtaagtcgtctgacgccggactccaccagcagcaaactggtaaataatacccaggttcagacttataccgagatcgttgacgcgaagtttcgttatcccaatacggcactgctgttcattgagttcgacgcagctcaattcaacgcggtccctaaaattaccgtcaggccaaaaggcaagattatacgcattcccgccaactacgatccgttggctcgcagttactccggcgcttgggatggcagtttcaaatgggcttggagcaacaaccctgcctgggtgttctacgatattgcgcttgataagaactatgggttggggaaccgggtttccgcattggaaatggacaaatggggactctatcgaatcgcccagtattgtgatgagctcgtcagtgacggactgggtggtgagggtaaggaaccgcgctttttgtgcgatgtgtatattcaatctcagcaagatgcttacaccgtcttacgcgatatttcggctattttccgcggtattacctactggggtaacgatcagctatttgcctatgcggatatgccgcgcgatatggattttgtctattcgcgagccaacgtgattaacggtgagtttacctatgcctcaggttcttacaagaatcgctatacctcggcgttggtcaaatggggcgatccatccaatcattatgccgaggccgttgaggcggcctacgataacgatttggttaaacggtatggggtgaaccagaccgaaataacggctattggctgcacacgccggaccgaagctcatcgccgcggtcgctgggctattttaagcaatgccaaagatcgtaccgtcagttttaacgttggactggacggcaatattcctctgcctgcgcgtattatcggcgtcgcggacgcgatgttggccggtaaggccaatggcggcaggatccgatctgcacaggaacgaacagtcgttttggatcgtgaggtcgagtttaccgcgggcgatcgtttgtgcgtcaatctgccggatggcacggcccaacgccgcaccattgccagcattgctgctgacaagaaaaccgtaacgctcactgcggcttttcgtcagcaaccggaaacggaagcggtctggagcatcgattctgacgacctggccgttcaacagttccgcgtgatttcagtgcaatccaacgatgacggcactttcaccatcagtgcggtagagcacgatccaaataaatacgcgtttatcgataacggtgttcggttggattctccgccgcttactgtcaccccccctggcacgatagccgcacccgccaatatcactctttcccggtatgactatgtcagccaagggatcaatatcgccactctgcgcgtgcaatgggcgagggtgaccggtgcgctgaagtatgaagcgcaatggcgcaaagacagcggcaactgggtgaatatcggtgcgacctcttcgcttgggtttgaagtcaacggtattttcgcaggcaattatgatgttcgggtgcgtgcggttaatgcagtcgacgtctcctcaccttggggccgctcggaaaccacctatttggccggtaaagaaggggcaccgccgcgaatcgttgggctgcgcgcttcttccgatcgggtatttggtatccaactttcctggatgtttggtacaggggctgaggatggtctgaaaacaacgctagccgttgctgcacgagcggatttctctgatgagaaactgctggcagacgtgccttatccgcaaaataactatgacatgcaaggactcagggcggggcaaacgctgtattttcgcgcggcgtttacggataaaaacggcttacagtctgaatggacggagtttgtacgcggcatttcctccgataaagcggatatcgttttggaacagattgccaacagcattaccgagacggagttaggtaaagaactgttggataaaatctccagtctgccgtccgatcaaaacgttcaggatctggcgaataagatcgctaaggcgcagcgtgacattgagcaaaacaaggaggcactggccgacgatgtcggtgcgttggagcaggctctcgagagtgttaaagaacaagttgccggcaccaataccgatctgaacatgaccgtagaaggtttgcagcgcaacctggagcaaatcagcaaggcggcgattgagaatagcctgacactcgatttggcacgcactgatttgacgatggcgaagcaaacgttggccggagatattcaagatgcccggcatgagctcagcgggacgcgagcggctctgcagcgggccgatgccgagttgcaggctaaagtagacgcattgaccggcggtgacggcaccagcattgcagaggtgatttctcaggttagcgtcttgcgagaacaggaccaagcgctggcagagcaattggctgccgtcgtggccaaatcagcgggcaacgcggcgcaaattgctcaagaaaagcaggcaaggagtgatgccgatgaggcaatgtcccaaattatcaattcggtaaaagccgtttccgataagcagcagggaacgatcgcccaattggaacaaacgcaggcagatgctcaagcggcgttggccaaagtggaatcggatgtggccgccagtgcccaaattgtcgatgaccatcatgcggagcaaggtcgggttaatgcggccgttacggcaaaaacggaagcattggctaaccagcagcaggcaatgggtgagcagttgggcggattgggcgccgagtttagcgataatcaggcccaggttacgcagcaactgaagactttgacggatagcgagtcggctctggcgcggcaactcagtgccctggaatcacaaacgggctccaatacggcagcgatagcagcggaatcgcagactcgcgcagaagctgacagcgctcaggcgaaagcgcttaacacgttgggaacggccgttgatggccaggcttcggccatcaatgtacttcagcaggcagccagcaatgccgagagttcaatggcgggcattacgcaatcgttggaagcactcagcaaagcggatatcgagaacgcattaaatcttgataacagcaaaaaagatcagcacgaagttaacgccacgattaccgcccaacagcaagttcaggccgatcggttggcgtctcaggcacggcagttgacacgtttgcaggccaactttggtgatgtttctgcagaactccagcaagagttaaccgtgcgtgcaacggaagacagtgcgctgtcacgacgtttggactcgctcaatagtcaagtgggcgatagtcgtgcaaccttggcccaactgcagcaggttgtcagcgatgccgaaagcgcacgggcgggaatgacgcagtcgctggaagccttgagcaaagcggatattgagaatgcgctaaaccttgataacagcaagaaagagcaggttggggtaaacgccgggcttatttcgaaacaggaggttcatgccgacaagttggagtcgcaggcacggcagttgcttatgctgcaggctaactttggcgatgtttctgccgggctgcggcaggagctcaccgtacgcgcgaccgaggacagcgcattatcacaacggctggattcacttaatagccaggtaggggagagccaggctgcaattacgcagctgcagcaaacgcaatctgatgccgatagcgccaatgccagtctgtcacaatcgttggcagcgacggcgaaagccaatattgagctggcattgaagcaaagtggggatgttcagcaacaaaacaccattactgcggggctccagactcaacagacggttttggccgatcagcaacaagcgcaggctaggcagttgattggcttgcaggccaattttggtagcgttgcggctaaattggccacagagttgacggtaagggcgcaggccgatcgcgctttggcgcagcagttgacgacgttaagcggcacggttgatgagaatcaagcgaacgttgaacaacagctgcaggttttggtggatacgggtagcgctcaggcaaaacagcttaccgatatatccagtaaaacagagggaaaccgcgctgcacttacccaactggcgaaaacagttaccgataaccaatcggcctcttcacaacagattgttcaacttaatactgaagtgggtaaggtcaaaaccaatctgctgaatgaaagcagcgtacgttcaagcgccgatagtgcattaggacaacgtattgatcacgtgacggcgaccgccggtaataacactgcggcggtacaggaggtcaaacaggcacaggcttctttgaacggcaagatatcggcatcatggagtttgaaggtacaggctgacaacgcagggcggcagtttgttgcagggatggcgttgggcgtagatggcgcgggcaacagtcagttcttggtccaggcggatcgttttgcgttgctgaataatccaaacggaagtgtctcctccccgtttgccgtgcaaaatggccagacgtttattaacgccgcgtttatcgccaatgcttcgatcgacagtgcaaaaatagcacaggaaatcacgtcgtcaaactacgtttggcatgacgaccccgtctatcggcagggatgggcgatcaataagaatggctatgccacgttcagtaatatggatgtgcgcggacgtattttcgccacctcaggcgtattcaacaacgtgaccatcaatgagaactgcgatgtcagaggcaaggtttatgcgaataggatagatggtgatattgccagcatgcaggcattcagtgcccagacgctacgcaagcatgatggcgtatatacctacgtctatgcgggtggaatgaactatgccgtgagactcgtcattcccaatatcaaggttgtgtattacagcagcccgcgaggttcggtatgcaatatgcgaatcaaactgaacgggaatatccttcgtcaacatcgattcagtagagtgagcggaggggatgtttatgaagatgctatttcaatcgatattcccgcgtatgccggcgagcagcaaattcgaattgagactgacgctatggatgatcgggatagcacaatagtttcctcttttgtcatgatggttttccctcttaagaataatagattctggtcttggagaggatga

SEQ ID NO: 427468 - DNA, 621 bp, Serratia marcescens
atgaacaaggtagcgagaacaatcaggttaggaggccaactgggcaagcggtttggtaagactcaccggttggtggtcgaagatacttgtgaagccttgcgcgcgttgtgcgtcacggtcgaggggtttgagaaatatatgatgggcgctcatcgccaaggcattcacttcgcttttttcaacggtgatcaaaatatcggggttgaagagttcgcaacctcgaaaggtgatgccgtgatccgcatcatgccgatcattgcgggcagcaagaacggcggcatgttccagatagtgctcggcgttgccgctttgataggggcattttatacggggggcggcacgttggcgctttggaaggcatccatggcaacttctctcaccgtttcaacgctcagcatgatgggtgcttccatggtgatgggcggtgtcatccagatgctgacaccgcaacccagcttcggcatgtctgtttcacagtcggtggagaacaagccctcgtatgctttcggttccccggtcaataccactgcacagggctaccctgtgcccattttgtacggtgaacgcgagatcgggggggcggtgatctcagcgggcatttacgccgaaaaccaacaatag

SEQ ID NO: 427469 - DNA, 711 bp, Serratia marcescens
atgcaagaacatgttatgcaggccatatatgagcatgcccgctcggtgtacccgaatgaaagctgcggttttgtggtgctcagtggccgtaaagtacggtatttgccgtgtgataatgtggctgacagcccgctggaagggtttgttattgctccgcaggactatgctcgtgcggaagcgtgtggggaaattattcgcattattcacagccatcccgatgtgccaaatgtagttccttctgagttggaccgggttcagtgcgatcattcgggtattgtctggggcattttgtcgtggcctgaaggggattatctcgaaattgcaccgcgtggcgatcgtccgttgattggccgcaactggctgctgggacatgccgattgctggtcattgatcatggattattaccaccggcagcatggaatcatgctgaataattactccgtagagcatgagtggtggatagatggtcatacccgactctatgacgagcattggtatcgtgaagggtttcgtgaatttgcgggagaaatacggccgggtgacatgatcatgatgcaaatttcagctccggtgacaaaccatgcggggatttatttaggggatagcatgatgttgcatcatctctatggtcagttaagccaacgttatccctataacggctatttccaagaacgaacggtacgagtggtcaggcgtaaggagttgttatga

SEQ ID NO: 427470 - DNA, 753 bp, Serratia marcescens
atgtcatatcacagcgatgtgcaaaaattagagcccggtgaagttatccaattgattgaaattgatgggaccggttttggcgcggacatcctgcgcttccatgcgcacagtcttcctcgggagtctgaggaacttgccgcgtctgcaggggatgagcaacgtttgaagcccaggtcaatttggtggcggggtcaggaatatgaagcttacccgtatgagattaccggcttggccacgacaaccgacggttcacagcctacgccgaaactgcgcgttgctaatatcagcaatgtggtgactgcgctatgtctggcgtacagcgatcttgtccaggccaaagtctccgtgcatcagacctttgtgaaataccttgatgcgcgcaactttccggcaggcaattcgctggcggatgccagtcaggaacgggtgcaggtattttatatcgatagcaaaactgctgagactaacaccgtcgtggaattccaactggccacaccctttgatttgcaggggcaacaattgccgtcacggcaaatccatggtttgtgcacgtggtgtattcgcggttggtatcgtacaggaagaggttgcgactacggcggcgttgccggcttcgacaaagatgatcaaccggtggacgatcccgcgttagacgtctgtggcggccgtgtttcctcatgcagaaaaaggtttggtgaagcccagccgctctccttcggtggtttccctggttcaaatcttttagggaaatga

SEQ ID NO: 427471 - DNA, 342 bp, Serratia marcescens
atgccaatcgatacttttcaatggcgcacgcaggcggcacctgtcggcaacttttctcacaatgtacgaagcgcacagtttggcgacggatataagcaaatcagcagcaatgggttaaacagcgttacccaatcctggcagctggtctataccggccaccctacggttacggagtcgctgttgtcttttttaaatgctcatgtgatccgcgcctttttctggacgccgcccggcggcagaaaaaatctgtttagagtcaaatctgactccatcacggtatcaccgctttcacgcaatgtgttttcggtgagttttacctttgaacaggccttcggggtgtag

SEQ ID NO: 427472 - DNA, 2445 bp, Serratia marcescens
atggcagatattgcaaccatgacgctgcgtattcataccggtgatttgcagcgtgcgaataaagaattgaacgacttgcaacgaaacgcttcggcaaccgtcggtaaaatcgatgtgctgaatcgcgcttttcgcagtggggcgcaggatctccgccgctatagtgatagtttacatcagatgtcgactcggctgggtccgttaaataatgaattgggcaagttgattcggcagcaacgtcaaacccagagttcagtttcccgcagcgccttcgatgagcaaggtttaaggcgccatggggcggcgctgcagcagcttagaaggcaaatggggcagcaagctgctgatatgcatactggtaataataatgccaaagcctataaggaaacattaaacactctatcaaccaatatgttgggtttggtgtcgtcattggcgtcgggggagcctgtttggaaagttgcgctaaatcatgggacacaactggtcacttcatttggtggtgtaagcaatacgttgcaagcattacgcccattgctggcgaccaccagcgccgctttgggtggggtcatcggtggtgtcgcaacgttggccagttggggctataacgtccgtgaatcattcgacagtatgcgaacttccatcattatgaccaacggccaggccttcaactcgattggccaaatggagtctctggcagtttctatcggttcaatgacgaacagcagcatcagttcgaatgaaacattgctcacgtctttgaaccgtttgggacgttattccgcgccgcagataggcattattgccaaagcaacgcaggaccttggtgcggtgaccgaggtgaccgctgaagaggttgaagccaacttccgcaaaatagcggacgatcccgttaaaggattggcggagttgggtaagcagtatggctttgtcaacgttgagatgttagagcatgtctctcgtttggttgatgctgggaaaagcaccgatgcggctacgttggcgatgcagttctatggtgatgagaccggcaggcagtctgcggctatcatggaaaacatgtctccgctgtcgctgatgtggatggacgttaaaaaatgggcttctgatgccgcacatggcgttggcgtggatatgttggccatggccaggctggtgaaagatatcgtgggcacgcttatcgatgaagtcaggctgttaatcacaaaaggcgatggattgatttccggctttatcgttgattctttggggcctatagccaagatggcccacgttgactttcttaacggttttattgatacgaataaaaaaattgttgaggacagccagaaggcctccgctaagttagaagagagcatctttcaggggcacgcaagaatcagtgccggtcttgcaggttatcgtgaggccatgacggcggaacaaccgcctgttcacaagggagacagccgtgagcaaatagacgcctggctgggtaagcgcaataaacgctccggattttattcacccacggtggtagcggcccctgtctcgtcggcgaaagggcaagaaaagcccgactacggccgtattgcgggggattacattaatcaacaacgctcgaaatcccagcaagtactgcaagaaagcggagtgagtgaacgtgaattgcaacgccgtcgtgagcttcagcagttgagtcgggagaataaagaaaacccgtttgctgcaaatatgatgagtgagctggcaaacacatttgccgctgaagataaggttcgtggcgactggctcgccggtgcacgtaaaggatggagcgaatatctggatactgcgaccaacgtttacgcctctatggcggaggttgggcgagccacctttaacggcctttccggaatgttgacggatatggtcacaacagggaaaaccagttttcaagagtttacttcctctatcttgaaaatgatcgtccaggttatcaatcagttgttggtggcgtttatggtgcaaaaagccatgggatggattgcccgagacgcttcttcgggcggtaacacccctggggcggtgccgatggggttgaagtcctccggtgggtataccggtgatggcggcaagtatgatgctgccggcgttgtgcatcgcggtgagtttgtcatgaccaaggaggcgacgcagcgtattggcgtaggccatctttacgccatgatgcgcggctacgctgacggtggtttggtcggcgagcgtgcaccgatgttcgggctgaaaggcgatcggggaggcggtattacggtaaatagtactgtggtgatgagccaagatggcaatgcgcgtaacgccggtgagtctcctgcgggagggatggggaaaatcgtacagggtatcgtcaatcaagcgattaccgaacggttgagcaaagaactaaaaccggggggattaatttggaatgcctcgggagcgcgctga

SEQ ID NO: 427473 - DNA, 354 bp, Serratia marcescens
atgatgactgaatttacccttaacccaaccccaacctttagcattgacgtcgctattccacgtgcgggaagcgaggatggaatattgacattttcgttcaaacataaaaaacgcagccaattggaaacgctggaaaaatcgctgcgcgaagcaaccgaacagcaattggatgcgggtagctacaacaatgaacctatggccgatttcttgcacgaaatttgtgatggatgggcattgcccgacacgttgaatagagaaagcattatcacattgcttgataactatccgcgcgcgtttgatgcaattgccactgcgtataccaaagagttgatggtggtacgggaaaaaaactga

SEQ ID NO: 427474 - DNA, 663 bp, Serratia marcescens
atgagttttgcattacctaatggcgcaactgtatttgccggtatccctgctacttcgacggtagcaacgacggcggttagcaacgctaatggcgctgtatttactctggccacaggtcatggtttgaaaattggggacattgtcattgtcaattcaggctgggggctgattgatgacttggttgccaagatcacagcctcaaccgataccagcgttactattggtgcgatcaatacttcagatgtgaagtttttccctgccggtatcggtaaaggtgcactgactaaagtcgccaactggacccaaattccgcaaattaccgaagtggctcagtcgggcggcgatcaacaatatgctcaggttcagtttcttgaggatgatcgtcaacgcaacctggcgacattcaaggcggcgaaaacgcaaacctttaccttcgctcacgattcgacacagccaatttatagcgtgttgcagaatgcggatcgtaatggcgatgttttggcattttatatgtacgtccctaaagccaacgaactgcgctattggtcagcaattccatcttttgaccctcaaccaacaacggctgtcaaccaggtggaaactgtggctgtatcgctggcaattcagtccagcgacatgactttctataaaaccaccctttaa

SEQ ID NO: 427475 - DNA, 669 bp, Serratia marcescens
atgaaaacgatcgaagaaatccgacgggaaaacgccagaaaattgcgcgacggcgtgggcggcaactcaaacttcgctgccatgttggatcgcgaagcgacgcaaatcagccgagttatcggtaaaaaccccacaaaaaaaattggcgacgatctcgctcgccatatggaaatttgtttttctcttgctaccggatggctggataaaacccatgacgccgccggccacaccaacgttcaggaaacatcgtacggcaacgataaaaagataaaattggttccggtgatatcctgggttcaggcaggagcctggacggaaatcgcgttttcagaggttgatttgattcaaacagaacactatccctgccctgtcgcctgtggggaaaggacctacattttgcgtgtggtcggcgattcaatgagcccggaatactcccctggcgatctgatttttgtcgatcctgatgttaccccctggaatggcgatgacgtgatcgctttaatgagcgacttcggcgaaaccacatttaaacgttttattgaagagggctcagaacggatgctaaaagcactcaatcctgattggccggaacgttacatcccaatcaacagcaactgccatatcatcggtactgttatcttttcgggtaaatctcgtcgccatcgataa

SEQ ID NO: 427476 - DNA, 573 bp, Serratia marcescens
atgagcgagcaggaaaaagacttttttgaacaggcgatggcagacgtggtgccgctggcgagcggacggcagacgctgtacctcaagccgcaggaggcggtggacaaaagcgcgcggcgcgaagcgcagcggctgctgcaggaaaacttcctcagcaccgattttctcgaggtgatcccctgcgaacaaccgctggagttcaaaggggaaggcattcaacagggcgtgctggacaagctgcgcaacgggcgttatccgccgcaggcgtcgctgaacctgctgcgtcagtcggtcgaagccagccggcaggcgctgtttcgcttcatcgtgcaggcggaggggcaaaacctgcgttcgctgctgatcgtgcacggccgcggacggcagaacgaaagccatccgaatattgtgcgcagttacgtcgccaaatggctggcgcagtttgaacaagtacaggcgttttgccgcgccttaccgcgcgacggcggcgagggtgcctgctatgtcacgctgcgtaaatcggcgcaggccaaggcggaaaactttgagcgccacgccaagcgcagccggtga

SEQ ID NO: 427477 - DNA, 906 bp, Serratia marcescens
atgctgaatctgcagcgcctggcgatctttgcggcggtggtggaagcgggcagctttaccgcggcggcggcggcgctggggcaaaccaaggcggtggtgagctttaacgtcaaacagctggagaacgagctgggggtgtcactgctggcgcgcagcacccggcggctgtcgctgaccgacgccggcgaacgcttttaccagcgcagcctgcagctgctgcaggaggcggaaaacgtgctggacgacgtgcgtcgcgatcatcacggcctgagcggcgtgctgcgcatcaccagcacgccggagtacggcgcgcaggtggtggtgccggcgctggcggctttttcgcggcagcatccgcggctgcgcatccagcatgtctcttcttcttatcatgccgatctgatctcggagcgctttgacgtggcgatccgcctgggccagctggcggactccagccaccgcgcggcgctgatcgacagcttcgccatttttccggtggcgtcgccgggttatctggccgaccgaccgattcattcgctgacggatctggcgcaggcgcagtggatcgcccacagccggctcagttcaccgctcagctggcaggtggccacgccgcagcgcgaagcggtgctgttcaaggtcgcggacgctgccatgctcaccggcgacagcgccgcggcattgctggcgttcgccctgcatggcgccggggtggcgctgctgccggcgtggctggcacagcccgaaatcgacgccggccggctgcagcggttgctgccggatcaccgtttccccgagcagagcatctatgccctctacccgaacacccgccatgtgccggaaaaggtacgggcgtttatcgattttctgcgcgcgcgggtggcggcaaaatcgttagcgaaataa

SEQ ID NO: 427478 - DNA, 975 bp, Serratia marcescens
atgaaaaccgtctcgctgaaacacgcgccgggccgctacgccggcctggccctcgccgctctgctgctgctgacgctgctctacctgttcgtgcggcactgggccgagtttgtgcagtattgcatcaacttccagatttacatgcaccgttatctggtgctctatctgctgcagcagcgtaaccagcaatacagcggcgggctaatgctgacgctggccagtttcgcttacggcttcctgcactccatcggccccggccacggtaagttcgtcatcaccacttatctggccactcaccgcgaacggctgaacgccagccgggcgatcaccctgctgggcagcctgatgcaaggcgtggtcgccattgtgttcgtggtggtgttggcggtggtgctcaacctgtcgatgggcgatctcagcctcagccgttactgggtggaaaaaggcagcgcggtctttatcgccgccttcggtctgatggtgatcctgcgcgccggtggctggcgctggcgtcgacgtcgctcaccggtcattcaggcgctgcacccggcggaccacgcgcatagcgcggcgtgcgagtgcggccaccggcatcagcccggcgcagccgaactgaccggcggctggcgtaacgcgctgtggctgatcgtctccatcggtattcgcccatgcagcggcgccatcctgattctggtgttcgccaacgccatcggcatgttcacctggggcgtgatctccgccatgagcatggcgctgggcaccgggctgtcgatcatgatcctcgccacgctggtgcaccacgcgcgcgagcgctttctggcccatcaacccggcctgacgggctactatctggcacaggcgtcgcgcatcgccgtgatgttcggcggcgtgatcctgatcctgttcgcgctggtgttgttcaattcggtgatcccggtcagcgccagcggcgattttatcgccgccggctgctaa

SEQ ID NO: 427479 - DNA, 894 bp, Serratia marcescens
atggacagaatcgacgccatgcgcctgttcacccgcgtggtagaacaacgcagctttacccaggcggcgcaggatctgaacctgccgcgctccaccgtgaccgacgccatcaaacagctcgaagcccggctgcaggtcaggctactgcagcgcaccacccgccacgtcagcccgacgctggacggcgaagcctactatcagcgctgcctgagcattctggcggacatcgaagaggcggagatggcgttcgccggcgccaaaccgcgcgggctgctgcgcatcgaggtgcacggcacgctggcgcgccattttctgttgcccgacttgcccgattttttagcgcaatacccggatatcgagctctatatgagcgaaggcgatcggctggtggacgcgctgcgggaaggcatcgactgcgtggtgcgcgtcggcaaactgcgggacagcgacatggtggcgcgccgcctgggcgagctggaagaggtgacctgtgccgccccggcctacctgcagcgcttcggcacgccgcaaagcctggacgatctgcgccatcaccacatggtgggctttcgctcttcggcgaccggtgcgctgatgccgctggcgttcacggtggcggggcaagcgcagcccatcacgctgccggcgacggtgtcggtcagcgcggcggagagcctggtcgccgccgcccgcgccgggttgggcatcattcaggtgccgcgctatcacctgcgcggcgatctggccgacggtagcctgttgccgctgctgccggattggccttctccgccgatgccggtctcgctgctttatccgcgcaaccgccagctctcgccgcgggtgcgcgtgtttctcgattggttcagccgggtgttcgccgagcgcaaccggtag

SEQ ID NO: 427480 - DNA, 1593 bp, Serratia marcescens
atgcgcctcaaactctcatttcaaatcaagctgtttctgtgcctggtggccttctcctgcctgctgctgacctgtatcggcgcctatacctattaccagctggatgcgcagctgcaccgcgatctcggcgcccgcgcccaggtgcaggcgcgggaaatcgccctcattccttctctggtggacgccgtggaaaacaacgacgccgccagaattgccgcgctgatgaaaaaaatccgcgccagcagcgacgccagttatatcgtcatcggcgataatcatgcccgccacctttatcattccgaatatgaaggccgcctgggcacgccgatgatcggcggcgataataaagaggtgctggaaggaaaaagcattatttccattcgcaagggcggcattggcgtttcattgcgcagcaaggcgccgatcgtggatgaaaataatcgcgtgatcggcatcgtttccgtcggctatttgaaatcgcatatcgataatttaaatgccaggacgttgacgcaaattatcggctccatcatcctgctgctgatcgccctgttcgtcttttcctggctgctgtcgaaaaacctcaagcgccagatgttctggctggagccgaaagagatcgcgctgctggtgcgccagcaaaaagcgctgctggaagccatctatgaaggggtgatcgccatcgatccgcagatgcggatcatcaccatcaaccatgcggcgcgcgagctgctggatctgcaccagcccgccgccggcttgctggggcggccgatcggcgacgtgatccaggcgcagccgaacttcttcgccgccgcgcagctgggccaggatacgcatgacgaggtgtgccgcttcaaccacgtgcgggtgatcgccagccgggtgcgcatcatgcaggaacaggagctgcaaggctgggtgatcagcttccgcgacaagaacgatatcaataccctgagcagccagctcagccaggtgaaacgctatgccgacaacctgcgcatcatgcgccacgagcagctgaactggaccgcgacgctggccgggctgctgcatatgcagcgctacgacgaggctatccgctacgtggaggcccagtcggagggcgcgcaggagatcctcgatttcatctcgcagcgcttcagctcggcggcgctgtgcggcctgctgctgggcaaatactccagcgccagagaaaaaggcattgagctgcgcttcgatccggcctgccagctgcggcagatcccggcggcgctgaatgagaccgaactgatgtcgatcgtcggcaatctgctggataatgccgtggaggcgacgctgcactgcccggccccgcacgaagcgatcgagctttatatcagcgacggcagcgacgagctggtgatcgaggtggcggatcgcggcaccggcatcgccgaggagattcgtgatacgctgtttgaacagggcgtcaccaccaaagcggataaaagcgaccacggcatcggcctgcatctggtcgccagccacgtggcgcaggcgcacggcagcatagaagtgtcggacaacgagccgcacggcgcgatattctctatatttatccctaaataa

SEQ ID NO: 427481 - DNA, 1416 bp, Serratia marcescens
atgaaaatcaaaacccgttttgcaccaagcccgaccggctatcttcacgtcggcggcgcgcgtaccgcactttactcctggttgttcagccgtcatgcgggcggtgagttcgttctgcgtatcgaagataccgatctggaacgctccacccaggacgcgatcgacgcaattatggatggcatgaactggttgaacctggattgggatgaaggcccgtatttccagaccaagcgtttcgatcgttacaacgcggtcatcgacgagatgctggagcaaggcacggcctataaatgctattgctccaaggaacgtctggaagcgctgcgcgagaagcagatggaaaacggcgagaagccgcgttacgacggccactgccgcgacagccagtgcagccacaccgacgacgagccgcacgtggtgcgcttccgcaacccgcaggaaggctcggtgatcttcgacgacaaaattcgcggcccgatcgaattcagcaaccaggagctggacgatctgatcatccgccgcaccgacggttcgccaacctataacttctgcgtcgtcgtcgatgactgggacatggaaatcacccatgtgatccgcggcgaagaccacatcaacaacaccccgcgccagatcaacattctcaaagcgctgggcgcgccggtgccggaatacgcgcacgtgtcgatgatcctcggcgacgacggtaaaaagctgtccaagcgtcacggcgccgtgggcgttatgcagtaccgcgacgacggctacctgccgcaggcgctgctgaactatctggtgcgcctgggctggtcccacggcgatcaggagatcttctccatcgatgagatgaaagagttcttcacgctggaagcgatcaacaaatccgccagcgcgttcaacaccgagaagctgcagtggctgaaccaccactacatcaaccatatgccggcggaagaagtggcggtgcatctggcatggcacgttgagcagctgggcattgaaacccgcaacggcccggaactgaaagacatcgtcaagctgctgggcgagcgttgcaaaacgctgaaagagatggcggagtcctgccgttacttctacgaagacttcagcgagttcgacgccgacgcggccaagaagcacctgcgcccggtggcgcgtcagccgctggaagcggtgcgcgccaagctggccgccatcaccgtctggacgcctgaaaacgtgcacgacgccattcagggcacggcggatgagctgggggtcggcatgggtaaagtcggcatgccgctgcgcgttgcggtgaccggcgccggccagtcgccgggcatggacgtgaccgtgcatgcgatcggccagaagcgttcgctgcagcgcatcgacatggcgctggcttacatcgccgagcgcgaagcgcaagcctga

SEQ ID NO: 427482 - DNA, 786 bp, Serratia marcescens
atgtctttgcattcaccaaaagaaatcgccgccctcgccgttcaggccggggtaaacaaaagccgcgcccctctcgctaatctgttgattctgggctttctcgccggcgcctttattgccaccggctttctgctggatattcacgtcatcggcaccctgccggccgaatggagctctttcggcgccctgttgggtgccgcggtctttcctatcggtttgatcctgaccatcctggccggtggcgaactgctgaccggcaacatgatgaccttgccgatggcctggtttgcccgcgaaatccccgccattgccgtgctgcgtaactggttttgggtcaccctggccaacttggccggcagcctggccgtcgcctacttcttcggtcatttgctgggcctgaccgaaggcgcgttcttgcataagacgctggcgatcgcgcaggccaaagtggatgcggacttcctgcacgccttcatttccggcgtcggctgcaactggctggtgtgcctggcggtgtggttagccttcgccagcaaggatgtgccgggcaaagtgatcggcatgtggttcccggtcatggcttttgtcgccatcggcttccagcacgtggtggcgaatatgttcatcatcccggcggccatctttgccggcggcatgggctgggagcagtatctgcccaatttcatcgcggtatttcttggcaacgcgctgggaggcgccggctttgtcgggctgatgtatttcctcgcctaccgcccggggctgccggctagcgagcaagcctga

SEQ ID NO: 427483 - DNA, 990 bp, Serratia marcescens
atgtcctaccaagcctcccctacgcgttatcaagatatggcataccggcgctgcggccgcagcgggctgaagctgcccgccgtctcgctcgggctgtggcacaacttcggcgacgccacgctgtacgataacgcccgcggcctgatccgctgcgccttcgatcgcggcattacccatttcgatttggccaataactacggcccgccgcccggcgccgccgaggagaactttggccgcattctcaacgccgatctgcgggcctggcgcgatgagctgatcgtctcgtccaaagccggttacaccatgtggcccggcccctacggcgattggggctcgaaaaagtacctgatcgccagcctcgatcagagcctgaagcgcatggggctggagtatgtggatatcttttatcaccaccggccggatccggacacgccgctggaagaaaccatggcggcgctggatctgctagtgcgccagggcaaagcgctgtatgtcggcctctctaactacccggccgagcgcgcacggcaggcgttcgacattctgcaacggctcggcacgccgtgcgtgatccaccagcccaaatattcgatgttggaacgcgggccggaggcgggattgctggacacattggcggagcatggcgtcgggtcgatcgccttctccccgctggcgggcggcctgctgaccgaccgctacctgcacggcatcccgcaagattcccgcgccgccagcggcagccgcttcctgcagccggagcaactgaccgccgaacggctggacaaggtgcgccgcctcgatgcgctggcgcggcaacgcgagcaaaagctgtcgcaaatggcgctggcctgggtgctgcgcggcgatcgcgtcacctcggtgctgatcggcgccagcaagaatgcgcagatagaagacgcggtaggcatgctggccaatcgtcatttcagtgaagaagagctggttcagatcgaacaaatcctactgtaa

SEQ ID NO: 427484 - DNA, 771 bp, Serratia marcescens
atgaatgcgagaattggaatcgacggcagggctgccgccgcgatggtgatgctatgcgccatctggggaatgcaacaggtggcaatcaaggccgccgagccggatgtgtcggcggtgctgcaaatcgccattcgctcgggtctcgctgcgctggcggtttacctgctggcgcgcggccgcggcgagcgcttcacctgggatcgcgccacgctgtgcgccggtttgagcgtgggggcattgttcgcgctggagttcttttttgtctccgcggggctgcgttacaccagcgcctcgcatatggcggtgtttttgtacaccgcgccgctgttttccgcccttggcctgcattttctccttcctcaggagcgcctgtcgccggtgcagtggctgggcatgctcatcgcctttggcggcgtggtgctggccatatcgggcatggctgagggaagcggcggagccgaacggctgaaaggcgatctctacggcctgctggcggggatcgcctggggagcctctaccctggtgatccgcaccacgcgcctggcggagtgcccggccaaacagacgctgctgcgtcgctatcaggcctcctcactgggcattctcacctttatgacgccggtattcggtatcctggcgggggtcgttattctcggcgagccgttgcaaattgagtttgtattgggggccgtgctgatcgtgctgggattaatcgtggtgagttgttcttatcttatttattttgaccgaagggtggcacccaaaatataa

SEQ ID NO: 427485 - DNA, 930 bp, Serratia marcescens
atgttccccagtaaaaaacattcacagcgggccaccccgctgaccagctatcaattttcccggctgcatactttcgaatgcgtcgcccgtcatttatcttttgcgctggcggcgcaagaattgtcgatcacccccagcgccgtaagccatcgcattaatctgctcgaaaaggagttgggtttcctgctattccagcgctttcatcgcagaattaccctgacgccggagggcgagcgcatgcaatgggcgctggacagctccttcaacacgctgaatcaggaaattctggacatcaaaaatcgcgagctgacggggacgttgaccctctactcgcacccgtctctggtgcaatgcctgctgctgccgcgcatcggcgactttatcgcccagcaccccaccattcacctcaatattctgaccgggcaggagatcatcaacctggccaaccgcggcgtggacttggcgatgtacttcggcaaactgccctcggggcggcatctggacgaggcttttatgcaggaatcgatggtgccgatctgcacgccgcagtatgccgccgcacatagcctgtacgatgcgccggaaaacctggcccactgcacgctgctgcacgatcgctacaactccggcgaagacgagtggcaaacctggtcgcaacactttgcgctggggctggataccgacagcaagagcatggagttcgaccgctccgatctcgcggtgctggccgccacgcggcaccttggcgtcgccatggggcggctcaatctggtgcaggattggatcaaaagcggcgagctgatcattccgttcaccgacatgaccgtgccctgcgagcactgctatttcacctcgaccatctccgagcggcagtggccgaaaatcctcgcgtttaagcagtggatcatgaaaatcgcccctctggtctga

SEQ ID NO: 427486 - DNA, 1485 bp, Serratia marcescens
gtgcagttgatttattttatgtcggaatcgttggcgccggagaaattcgcccgcatccttaatcccgccgatgcgcgttatgaactggagcgacattacctgttcggcggttcgtccatgtcgtcgatatcgagcaggcacactatcgcgcgcaatacgcagtccggtattggcgtatcgagttaccgggaagatagcggcatgaagcgcggcgtgtttgacgaactaaaacgcggcagtttgctggccgtcgatgcaagtatcggcgcctggagccccgtcaaatatccgtttttcatcaatgcgcaagggcgcctgcagcgctatcccggcagtgtattgccgccgcagtacccagtcgaacgtataattcaacgttatgaagagatgatcagccgatatgccgccaggcctaaaccaacgtccttgcccccgagacaaaacaccgctaaaaatccgccgctgatgcaggcggtggccgccgttggctcaagccttaccgttatcaaagaggccgttcgcccaatgagcaaacaggagcgttggcaggcgagaaaatatctgattggtcggggggagcgaagtatctatccggatgcgcggattgcggcgcaacgcctggcgcaaaataacgtcgcggtggaaaaggccaagctggcgcagaatgtctataacacgaccaatccgttggcggctacgcctggcgtgccggaaggatggcgggatgtgagtaatgacggcggttttttggaaaaattggaacttcgcagggacatgctttttgataatgagatcgaagcaaactttttgtcgagaatttatgcacctgatagagccgtgtttggcgatgatatgaatccgacagtcgtcttccgcggttcaagaatgcctgagctccctaaaggcaaattgaatgcggcgaagaagctatttatcgatcgtgaactgccggagataaaaaatctggaagactggacgaataatttcaatcaaggtcggggggctgactctgaatattataaaaaggctgttgctataggtaaaaggttagatggctctacaacaaaaatcgatatttcagggcattctctggggggcggtttggcttctgctgcatccattgctagtggtaagccagggtggacatttaatgctgcggggttgaattcgagtaccgtggaaaaatatggcggttccttggtgggccgtgaagatattatcaacgcctaccgggtgagaggcgaagttttgacgaggttacaggaagtcgatctcaggcaagattttatcgatgttaatggcaaccttgcgttattggccgcgaaggaaaaattatcgtcgcatttgccagatgccgttggtgttaaacacacgcttgatggcggtgtgggcaatatgggtgaccgacatggcatccaacaagtgatagactgtatcgaacaggaaaaagacgatgatatcgccacaatcggtcacaggatatag

SEQ ID NO: 427487 - DNA, 663 bp, Serratia marcescens
atggacttgccaccagaaggttactttacaggtcaacagcttgtgttggctaaggctatccgcgatgggaatatcggcgacatcaaacgtctggcgaaagagacggatctgaacagccccggtgaacacgatatgacattattgttttatgctctggcgacgtcgactcatgacaatgccacgccggaacggctgcagattgcgaccgagttggtaaaggccggagccgatccactgcaacctcgccccaatggcggtgccagtcctgctgaatggatggcaaaattagacaacggtatttggttaaaggcattgcttgatgggggattgtctcctaatgcaagaggcaaacttgatgatctaccaataatatttcagacaattaaatccagtaatacagagacaatggcgacactgataaaatatggtgcggacattaacattcaggataggttaaagagaacaccattagtggagtgtgcttatttggggcgaattgaccatatgaatcttctgcttaaacatggtgcaaatccgtttattgaagatagatttggtgaaaactttgttgatttactcgatgataaaatcaagaaaacggagggtaatgattcattgcatactcgataccttgaattaaagaaactgctgagagttcaataa

SEQ ID NO: 427488 - DNA, 801 bp, Serratia marcescens
atggattatagaaaggatattcttgtacaggtcttggagtatatggagaaaaatattatagaggggctttccgttgagaaggttgccattatctcgggttactctaaatggcatttacagcggttattcaaacattattttggcgtgacgctcgggacttatatcaggaatagaaaactgagccggtccgctgtcttgctcaaacagcatcaaggtaacatattggatgttgccctggcatccggatttgcttctcaacaatgctacacgcgggcattcaagcgtttttttggcgaaacgcccaaccattttagaaacagccatggatgggatttctccacccagatcccaccgtatggcagcgacaagaaaccctatttttatcatacggtcatgccggatgacatcgagatgttaaaacagtacaaggcattgattttccactctgtaaggaagtacagaaatcccagtgatatcgcgcagactaatgatagatggctaagcaataataggggggcttatagtgtagaaaaaagaaaagggggaaagccgcatgccaacggcaaggagcaagaggtttttcattccatatttaacttctatatacccatggggaaatatattgttattccctttatgggagacctgcctgagtatattgatttttttgagagcatctatgatgcccatctgccggctattaatgtcaaaatgagggagagctttttcatcgaattatacagaaaggaacatttaaacggtaaagttatcaatgtcgacatacttattcctgtgacgtag

SEQ ID NO: 427489 - DNA, 1380 bp, Serratia marcescens
atgtttatccaggaaacgcttaagtttgtggtggatatattaaaggtgccttcggtattggtcgggcttattgcgctgatcggtttgctggcgcaaaagaaatcgttttccgacgtggtaaaaggcacggtaaaaaccattctcggctttatcgttttgggcggcggcgccacggtattggtcggatcgctcaatccgctgggcggtatgttcgaacacgcgttcaatattcagggcatcattccgaataacgaagccattgtctccatcgcgctggagaaatacggcgcctccaccgcgctgatcatggcgttcggcatggtggcgaatatcgtggtggcgcgcttcacccggctgaaatacatcttcctgaccggccaccacaccttctacatggcctgcatgatcggcatcatcctgacggtggcgggcttcgagggcgtgcagctggtgtttaccggcgcgctgaccctggggctggtgatggcgttcttcccggcgatcgcccagcgctatatgcgccgcatcaccggcaatgacgatatcgctttcggtcacttcggcaccctgggctacgtgctgtccggctggatcggctcgaaggtgggcaaaaactcgcgctcgaccgaggagatgaacctgccgaaaaacctcagcttcctgcgcgacagctccatttcgatctcgatgaccatgatcgtcatctacctgatcctggcgatctgcgccgggcgggcctatgtggaaagcgagctcagcggcggccagaactacctggtgtattcgatcattcaggccatcaccttcgccgccggggtgttcatcatcctgcagggcgtgcgtttgattctggcagaaatcgtgccggcgtttaccggcttctcggaaaagctggtgccgaatgcgcggccggcgctggattgcccggtggtctatccctatgcccccaacgcggtgctgatcggcttcctgttcagtttccttggcggattggccgggctgtttctgctggggcagctgaagatggtgctgatcctgcccggcgtggtgccgcacttcttcactggcgctaccgccggggtgttcggcaacgcgaccggcggacggcgcggcgcgatgctgggtgctttcgccaacgggttgctgatcaccttcctgccggtattgctgctgccggtgctgggggcgctgggctttgccaacaccaccttctccgacgccgacttcggcgcgatcggcatcctgctgggcaatatggcgcgctttatgtcgaaggagatgatcatgctggcgatcgtcgccgtgttcgcgctgctggtggcgcataacttcctgggaaaacgcaaaggcgcgccggccgctgaccgcgtcgagaaataa

SEQ ID NO: 427490 - DNA, 519 bp, Serratia marcescens
atggcacacactggtcagtccgttgagaaaatagccaaaacgctcattaacaatgccattaattacgattcctacctttggaagatcgaccggctcggccctacaacgaacagaatgctggcgctggctttttctctgacgagaggaaagagggaggtatcgggattaacccgcttcgtaggccacagcgcaggcatcacgcatgacgcctccctatttgaccgatatattgaagaactgcaggcgaaggagaaaaaaagccagcggctgattctcccgtggagcggtaaaaaggaagttgaagcgcggccctttaccgcatgcgccgaagcccatgtgtggcttgaactttatgctcgcaacctgcatccgcgtcattactactgcgttgcttttaacggggatgggagaatcgcgccgtgttgcaataactgcaaaatgtgggtccacaatgcgtttttcggcgttgtcacgccgaataccgaatataacaaccgacacacctattctccgcgttaa

SEQ ID NO: 427491 - DNA, 366 bp, Serratia marcescens
atggcgaagttacagtatatccatgatgactccggccagccgctctatgtggtattgccgctcgatgagtataaaaggcttgtgagacagcaagaggactacgagcctcttccctaccatgccgataagcatgatgatgaaaccgtcccccatgaagtcgtttccatcatgctggatcaagacgtcagcttgattgccgcttggcgaattttccgtggcctctcgcaatacgatgtagcggaaaaattgggcacgacacaatccgccgtttcccaatgggaagcccctcactcgaaaccacaaaagaaaacccgggaaaagctggctgtcctctatcgctgccaaccggcacaaatgacgttgtaa

SEQ ID NO: 427492 - DNA, 261 bp, Serratia marcescens
atggcaaagatcagctggtcacgtaaagcactgaaacaattgatgacactgccttctcagaaccggttggccattgcgcacaaggttgaactcttgggcactttcccgaccgtcagactggacattaaaaagctgcacggtaccgataaccagtaccgtctacgcgcagggaactaccgcattatttttgagatcgtcgatgatgaacctgtcgtgtgcctgattcagcaggtaaaacgcagaacatcgacaacttattga

SEQ ID NO: 427493 - DNA, 873 bp, Serratia marcescens
atgaattgggacgacgcgcgcttctttttggccgtcgcacgctgtggcacgctacgcaaagccgccagccagctgcatgtcgatcaggcgaccgtcggtcgacggctgtccgctttcgaagatgcgctcggctccaagctgtttatccgcacgccgaaatccttcgccctcagcccgctgggggaggaaatgctggcggacgtgatgaagatggaaaatgcggtgcaggcgatcaaccgtaaagctgccagcggtgacgaaagcctgaacggcaacgtgcgcatcgccaccaccgacaccctggccgaagccttcgtgatgccggcgctgcaagatctgcgggaacgctaccccgccatcaccgtcacgctgttaacggcgctgaacatcgccgatatctcttaccacggcgcagatctggcgatccgcggcgcccgccccgatgacgatgagctgatcatcaaacgcttagccaccatcgaaatgggtctgtacgcctctcagcactacctggcgcggcgcggcatgccggtcaggggcgagcagctgcgcggccacgatctgctgatgttcccgcgcgagctggtgccgcgccactggaacaatttctgcggcgaggctctgcacgagcccaacgtcgtgctgcaatgcaattcgcagctgctgctgcgctccgccacccgcagcgggctgggcatcggcctgctctccgcgtttttggcggacaaagacccggagctggtgcgcctgctcccggagaacaaagactgggtggatatctggctggtgctgcatcccgatttgcaacgcgccgcccgcgtgcgcgcggtggtgcaggcgctggaaacgtcgtttagcgtccattacggctga

SEQ ID NO: 427494 - DNA, 2169 bp, Serratia marcescens
atgacttaccgaaatccactggcggcgctgatgccgctgcttgcctcactctttccttataccgctgcggcgcaggccgatcgtgacgaggtgttgaccgtcaccggcagcgcgttatcccccgcgacggaaagcgcatccggcgccggttttaaaacgccggagattgaactcgggccgctgggcaccagggcgtggatcgatacgccttattcttctaccaccgtgacccaaccgatgatcaaaaatcagcaggcgaaaagcgtcgccgaattgctgaaatattcaccgagcacgcagatgcaggctcgcggcggcatggacgtcgggcggcctcaaagccgcggcatgcagggcagcgtggtagcgaacagccgcctggatgggttgaacattgtctccactacggcctttcccgttgaaatgctggagcggctggatgtactcaacagtctgaccggtgccttgtatggccctgcgagcccggccgggcagttcaactttgtggcgaaacgcccgacgccgcaaccgctacgcgaggtgacgctcgggtatcagagccgcagcgcctttagcggccacgtcgacctcggcggccatctcgacgacgacaatacgtttggctatcgcatcaatgccctcaacgaagagggtgaaggcagcgttgacgacagtaccttgcgccgtcggctgttggccgtggcgttcgactggaatatcaagccgggcacgcagctgcagctggacgccagccattacgaattcctgcaaaagggttatcccggcggcttcagctatgggccgaatgtcccgctgccttccgcccccaatccgcagaataaacgtctggcactcgcaacggcgggtaacgatttaaccactgacaccctcagcacacggctgattcattacttcaatgacgattggtcagtcacgggcggcgtaggttggcaacaggcggatcgcgccatgcgttcggtatccagcaccctgctcaacggcgacggcgacatcaagcggtcgatgagcgactccagcgcctcggggcgatttcgggtattgagcaatacgctgacgttgaacggccatatcgataccggctcggtggggcatgagttggcgctcgccacgacgggctacgtctggtctatctacagcggcaaaggcgccagccggcgctacgatttgggtatcgacaatatgtatcatccgtcggcgatgcatgagccgggcgacggaaagatccccaagaacggcgcgcgctataaatccagcgacaacagccagcagagcgtgactttcggcgatacgatgaccttcaatccgcagtggtcggcgatgctctatttaagcgaaagctggttgcaaacgcgcaactacggcgccgacggcaagaaaatcgaagaggacaatcaacagggtttgagcccgaatgcggcgttgatgtacaaaattaccccgacgctgatggcctatgtcagctatgccgactcgctggagcaaggcggtacggccccgctgggagaaggcgtgaagaacgaagggcagacgctcaagccctatcgcagtcggcaatatgagattggcctgaaagccgacgtcggggagatgaacctcggcgccgcgctgttccgcctcaagcggccgttcgcttatgttgacgccgaagaccgggtgtacaaggagcaaggcgaacaggtgaacaatggccttgagatgacggccgccgggcgcgtgggtgaagggctgagcctgtttggcggcgtcacgctgctcgatccgcaactgaaagagacggtttccgacagcacgcgcgacaagcgcgtggtcggcgtgccgaaggtgcaggccaatatgctggtggagtacagcctgccttcgatgccgcaatgggtctatagcgccaacgtgcactataccggcaagcgagcagcgaacgacaccaatagcgcctgggctgacagttacaccacgctggacctgggggcccgctacgctacccgcattcattccgtgcctgcgactttgcggctgacggtcaataacgtcacgaacgaacattactgggcctcaattttcccgtcgggcacggacgggaacggtggggcatcgagcgcgtttctcggcagcggccgtgaagtgcgcgcatccgttacctttgacttctga

SEQ ID NO: 427495 - DNA, 996 bp, Serratia marcescens
atgagaatcgtatcgttgcctgcatgggtgctgttggttggcgtgttgttgcatggcggtttgtgggccgcgccgcctgctggcgagatgcgcattgcctcgccgtggcctgcgcaaaacgccatcatcgcgatgctgggctatggcgacaatatcgtcggcacatcgaatgtcgcgaaacagatcccgctgtttcgccaaagcctgccgcgcattgacgccgttccggtagtgagtgtgaatagtgggcaagcgttgaatccggaacaaatcatcgcgcttggcactcggttgctgtttgtgcctgacagcatgaaagtgccgcaattggatttactcgaacgggctggggtgcgcgtattggcgtttaaagccaattcgatggcggcgctgcgcgagcgagtgttaaaaacgggggccgcgctgggatctgatgcacaggaaaaagcgttggcttacgagcgctatttttctcgtaatgtggcgcgcgtcgccgagcgactgaaggatttgccgccaggacagcgcattcgcgtttatcacagcatgggcaatccgctgaccacctcagggcgaccgtcgcttaaccaggattggatggatctggccggcgccgccaacgtggcggaaacgtggtttggtctgaaaaaagagggggcgggcgaagtggcgctggagcagatcgtggccgccaatccgcaggtgatcgtggcgatgaacaggcgcgatgccgaagagatacgcgcctccgcgcaatggcagggcatcgatgccgttttgcggcatcgggtcgtggtcaatcccaaggggatgttctggtggtgtcgcgagaccagcgaagaggcgctgcagtttttatggttggcgaaaacgctgtacccggcgcgttttgccgacattgacatgcgggaagagacgagaggtttttatcgggactttttcggtctgtcgctcactgcggcgcagattgacgctattcttaatccacccgcttga

SEQ ID NO: 427496 - DNA, 216 bp, Serratia marcescens
gtggaagccctaatttgtgtcaaaccggcgttacgatgtgtgttcatttatgtttacatagggattgtgctttggtctgactctgaggaagtaaaagccccgccggattttaccgccgggacattcgttaaattattttacggaaggcaggataccgccggcgatactcaactgaatgacgatcatcgccaatccaaagagcagcacgagggttaa

SEQ ID NO: 427497 - DNA, 1209 bp, Serratia marcescens
atgaagaatcgcactgttggcagcatttttatcgtagcgggtactaccattggcgccgggatgctggcaatgccgctggcagcagccggcgtgggtttcagcatcaccttggcgatgctggtcggactgtggctattgatgtgttacaccgcactgttgctcgttgaagcctatcagcatgtgcaagccgataccggactgggcacactcgccaaacgatatctcggcaacggagggaaatggctcaccagcttcagcatgatattcctgaaatattcgctcaccgctgcctatatcagcggcgccggcgaactgctggcgaccagcgtcagccagtgggcatctatcgattttcccctgcccttaggagcgataatttttacgctggtggccggcggcatcgtatgtatcggcgcccactccgttgattttttcaaccgcattctgttcaccgccaaagtggtgtttctagcggtgatgctcggcctgatgctgccgaatatccagcaggccaacctgatgacgctaccgttggcacaggggttggcgctgtcggccattccggtagtctttacctctttcggtttccacggcagcgtgccgagcatcgtcaactacatgggaggtaatactcgcaagttgcgttgggtgtttatcatcggcagcgccatcccactgataacctacgtcctgtggcagctggcgacattgggcagcatcagttccgacaccttcgtcggtattttggcacagcgtgccggtctgaacggtttgttgcaggccgtccgagaggtagtggcatcacctcatatcgacctggcaatgcacctgttcgccgatctggcgctggcaacctcgttcctcggcgtgacgctagggatgttcgactttctggctgacctgtgcaaacggcaaaatactccgctagggcggctgcagacaggtcttatcacctttctgccgccactggtattcgccttgttctacccacgtggctttatcttggcgctcggattcgccgccgttgcgctatcggtacaggcactcctgctgccagcgctactggcatggaaaacgcgccagcagcaccaagcagcataccgcgtttggggcggcaaacctgcgttaaccctcgtgctgctctttggattggcgatgatcgtcattcagttgagtatcgccggcggtatcctgccttccgtaaaataa

SEQ ID NO: 427498 - DNA, 1206 bp, Serratia marcescens
atgacaacactcagcattggcattatcggcgccgggcccggcggcctgtgtctggctcagggactgcatcgcttcggcatccacgccacggtgtttgaacgtgacaccacgccgcaagcgcgcgatcagggctaccggctgcgcatcgatccgacgggccagcaggcactggccgcctgtctgccgccggcgaattaccggttgctctgcgccagcagcgcgcaaaacagcggcgagagcaatctatgggatccgcagcttgccccgctcaacgcccgacgccccgagcactggctgccctccagcccgtggcaggcgcaggaactgagcggcgatctcggcattcatcggcaaacgctgcgcgaaatcctgctcaccggtctgcaagaccgggtgcgcttcggctataccctgtatgaattggcacaaacgccgcagggcgtggagcttcagttcgccaacggcgagcatgtgcgggtcgatgtgctgatcgccgccgacggcgtcaactcgctggtgcggcggcgctgcctgcccgaggcggggcccgaagacagcggcgcggtcaccctctacggcaaaacgccgctcgatgcggcgacccgtgcccaattggcccccaaattgctgggcggcgtgtcggtcgtcttcgccgacggcttgtcgctggtgattgaaccgatgcgctttcaggcgcccatggcgcagctggcagccgactatgcgccggactgccccctcacgccggtcgacgactatctctattgggcctgtatcggaacggctgaacggctcggcgggccggcgcaggcggagggaagcgctgcgctgcaggcgcgcgtaaggcatatatcgcagggatgggcccccgccttgcaaacggcgttagcgctggcggaccctcagtcactcagcgtgcgggcggtgcaggtcacgaaagcgatgccggtgtggcacagcgaacacatcgcctttctcggcgacgccgtgcatgccatgagcccggcgggcgggctcggcgccaacaccgcgttggcggacgccgccagcctggcgacgcatctggcgcaggccggcagcgccgcgcaggcacttaaggactatggtgcagatctgcaaacgcggggcgcggcggcgatacgcctttcacgcctggcgtccgaacggctgcagcaaaaccgtgacgccggcgactcggcgccatga

SEQ ID NO: 427499 - DNA, 822 bp, Serratia marcescens
atgaacgataaccctcacttcgccgatgctgactgcagcgaatggcgggcgggcccctggttgatcgcccttggcggccgcgacgcggcaggccgggagtatcggttgggcacacgcgaatacgactggcatcagcatgtgcgtgggcagctgctgtgcgtcgaaagcggtttgctgcatgtacgcacggcgcacggcgattgggtgctgccgccgcagcgggcggggtggatcccgccggcgacgcagcaccgggtgcaggtctgcggtgcgctgagcggctggagcttgctgctggcgccggaggcctgcaacgatctgtcgaatgcaccctgcgtcatcggcattagtgccgtgctgcaggcgctggctcagcgagcagaaggctgggacaagtgcagcgcgctcaccctggagcaggatcgcatagcgcaggtgatgcgggacgagatacgtctggcgccaacggagccgctgcatttgccgatgtcgtcccatccgcgcctggccggcgttctgcaggccttgctggcgcagccggggagcgagcgttcgctggaagcctgggccgaatggggggcgatgtcgccgcgaaccctgcggcggctgatgatcggcgaaacggggctgagttttgcccagtggcgccagcaggctcggttgtcatatgcattggcgaagctggccgaaggtgaaacggtgttgcagatcgcggaaacgctggggtatgcctcgccgagcaattttatcgccatgtttcgcaaagcctttggcgattctccggcgcgttatttttccacatcggcaggaaaggggcgctaa

SEQ ID NO: 427500 - DNA, 1149 bp, Serratia marcescens
atgcaacctgctaaaaagtggtcacaggaacttgaaggattgcgtggtttggcatctctttgggttgttttgggtcatatctgcattttaacctgcttccatctccctattctttctgtccctgctatcggcgtagatctattcatcctgctttctggctacttaatggccaaaaattatgttgagcgtaaggaacaggaaccctggaccgacgtgtcgactttcaaaaaattttggactcggcggttctttcgcatcgcgcctctttactacgtcttattggctgcggcaattgtatttggtagctacttcggtgaggccagagacatcattggccacttctacagcgaaacgcaaaccaacagctcacgctatagcgatcattcattcttgaatgtatttacgcacgtcacctttatgtttggctttctgcctgattactccttcaatacggtgctccccgactggagcatcggtttggaaatgcagttctatttactttttccattcatcatgttgacagtcttgaaactgggatttgcccgtgcatacctcgcggttgtcttgctgtgcggactcaccaaatttttagtaccggactactttgctgcattccccatgccctccatgatcctcataaagctgaacttatttattgggggcatgctgatggctgaatcaatccgaagtaagagtgttcgctatgtcgtttttgctttattaaccgtactgggtagcgcgtatctgccaaacgaattgaataaataccatttgctcgctcaaataggtcttatcttaatgatggtcacgatgctttgggccaggagtaaagagagtaagtggtcacgcgtgctgcgcttgcctcgctggtgcctgacaaaccgtttcagcgtatttctgggagatgtctcatactcagtctatttgctccacctattgatagtcctaccggtcgttgcctatttgctctcaaacacatcatttgctgaactttcgtcagtgatgcggttcattgttgcatcaggaatcattctcccgctcacctatggtatcgcaacgttgctgtaccactttgttgagaaaccaggtatcaaactcggcaaaatgcttattagccgcaaccaagcgaaagctgtcgcgctacggtaa

SEQ ID NO: 427501 - DNA, 834 bp, Serratia marcescens
atgccatttttacactgtaaatcatcgacattgtttattcatctaacgggcatcaatagcgtgatcggggtgatgcccagggcgggggaaaggcgcatggatttcggtaaacggcagtttttgcagcggctgggcgtgttgacggcgggggcttcgctgatccccatggcggaagccgggctgacgtgggcaccgatgcggcgcgagggggatattcgccgccgctacgcgatgctaatcgacctgcggcgctgcgtcgggtgccaggcctgtaccgtgagctgcgccattgaaaaccagacgccgcacggtgaatttcgcaccacggtaaaccagtatcaggtcagcctcgaaggcgaagaggtggcgatcaacgtgctgctgcccaggctgtgcaaccactgcgacaacccgccctgcgtgccggtatgcccggtgcaggccaccttccagcgcgaggacgggatcgtggtggtcgacaacaaacgctgcgtggggtgcgcctattgcgtgcaggcctgtccgtacgatgcccgttttatcaatcacgccacccaaacggcggacaaatgcaccttctgcgtgcaccggctggaagcgggattgctgccggcgtgcgtggagtcgtgcgtgggtggggcgcggatcatcggcgatatgcgcgatccgcacagcacgctgagcaagctgctgcggcgccatgagggcgagatcaaagtcctcaagccggagaaccaaacagcgccccacgtcttttatctggggttggatgacgccttcgtcacgccgctgccgggccgggcgcaggtcgccttatggggggagggacgatga

SEQ ID NO: 427502 - DNA, 1026 bp, Serratia marcescens
atgagccgccaactgatgatcgcagaagtgctgagccaaccgcaggcggtgagctggctgccgtgggccgtgcaatatttcttctttatcggcatcgccgcctgcgccgcgctgctagcctgcgtgtggcgctggcgtggtggggatagcgccgcacatctggagcgcacggcgctgtttattggactgacgtgcgccatcaccgcgccgctggcgttgaccgccgatctgcatcaaaccgcccgtttctggcatttctacgcttatccgacgccctggtcgtggatgccgtggggggcgctgttcttgccgctgtttaccttgttgatcggcctgtggtttatcgcgatcgaatttacgcggctgacgggcaggcgggtggcgctgctgcgtgggatagcgcccgcttgtgcgctggtagctatcggcctgctgttgtactccgggcgtgaggtttccgttgtgcgcgcccgtcccatctggttcagctacggatttccgatcgtgatgttcctcagcgcgctgcaggcgctcttggccctgctgctgttggcgatgcgcaaacggcccggactgcaagcgccgctggcgcgcgggatgctgctgacgctgttgctgctcggcggggcgatcctgctgtgggtgtgcggcgatacgctatccggcgcggcggtacgccactggctgcagacgcaggcgacggcgcgtcagtatgccgccggatggatcgcgctgtgggcactggcgctggcgtgtgccgcctgggccgcctatcgacgtttgccgcgcggcagcacgctgctgctggtggccggcacgctggggctgagctggctgatgcgctggacgctgttgatcgaggtgcaagctatcccgaaatacaacgcgtcttattccccctataacctgccgcttggtaccgatggtttgctggcgatcgtcggcaccttcgggctgtggctggcgttaatgatcatggtgcgtgaagcacaggcgtttttactgcggagaaaacaacatggctaa

SEQ ID NO: 427503 - DNA, 3072 bp, Serratia marcescens
atggctaaactcacccggcgtcagtggttgaaagtgggcctggccttcggcggattgtccgctttcggcctgagttatcgcgaggtcgcgaaaagggcgatcgatggtttgattcacggcacctcagggcgggtgacgttggatcgcatcaacggcaactccctgccgcccgaagggcgggcaatgccggaatggcaaggcaatccgcagcaggccatctcgatgacccagtgtttcggctgttggacgcagtgtggcgtgcgggtacgggtggacaggcagaccgatcgggtattgcgtattgccggcaacccttatcatccgctgtctcaggaacggcacgtcgactcggccttgccgctgcaggacgcgttggcgcagctgggcggagaaagcggtcttgacgcccgttccaccgcctgcgcgcgcggcgccacgctgctggaggggctttacagcccgctgcgcgtgctggagccgatgaagcgcgtcggcaagcgcggcgagggcaagtggcaacgcatcagcttcgaacagctgatcgctgaagtggtggagggcggcgatctgttcggcgaggggcatgtggacggcctgcgggcgatccgcgatctggaagcgccgatcgacgcccggcggccggggttggggccgagagccaaccagctgctggtgaccaacgccggtgacgacgggcgcgacagcttcctgcggcgcttcgcccagaacagtttcggcagcaaaaacttcggcgcgcacggcgcttactgtgggttggcctaccgtgccggttccggcgcattgatgaacgatctggacaagaacccgcatgtgaaaccggactgggaacaggtcgaattcgcgctgtttatgggcacctcgccggcgcagtccggcaacccgttcaagcgccaggcccggcagctggccagcgccagattgcgtggcgagttccgctacgcggtagtggcgccggcgctgccgctcaccaccacgctggcggacgatcatggccattggatcccgatattgccgggcaccgactcggcgctggcgatggcgatgatccgttggatcctcgacaaccggcgttatcaggccgactatctcgccatcccgtcggaggccgccatgcaacgcgccggcgagaagagcttgaccaacgccacgcatctggtgatcgccgagagcgagcacccgctggcggggcagcatctgacgctcgctcatctgaacggcgccgagtcggcgtcgccgctggtggtcaacggcgcggggaaactggtgccggccgaggcgtgcgaccgtgccgagctgtgggtaacccgtacggtgacgctgcacgacggcgcgcaggtggcggtgaagagcggcttccagtgcctgaaagaggccgccgacaaactgtcgccggaggcgtacagccgggaatgcggcgtgccggtggcgcgcatcgcggcgttggccgaggcctttaccgcccatgggcgcaaggcggcggtgatcgcccatggcgggatgatggcggcaaacgggttttacaatacgtggtcggtgatgatgctcaatgtgttgatcggtaatctgagcctggcgggcggggtgtttgtcggtggcggcaaattcaacggctttgccgaggggccgcgctataacctggtcgagtttcccggcctggtaaaaccgaaggggctgaatatcgcgcgcagcaaggccgcctatgaaacctccgacgaataccgcgaaaaagtggcggcgggtgtttcaccttggccggccagggcaccctggtatccgttcgttgccgggcagttgaccgagctgctgacatcggcgctggcggggtatccgtacgggctcaaagcctggatctcgaacatgaccaaccccctgtacggtatcgccgggttgcgcggcgtggcggaggaacgattgaaagatccggcgcgtttgccgctgtttatcgccatcgatgcgtttatcaacgaaacgacggcgttggccgactatatcatcccggatacccataactttgagagttggggattcagcgccccctggggcggcgtcgccagcaaggccaccaccgcgcgctggccggtagtgacgccggcgaccgcgaaaacggcgcaagggcagccgatttccatggaggcgttttgcatcgccgtcgccaaacgcctggcgctgccagggttcggcgatcgcgctatcggcgacggccagggcgggctgctgccgctcaaccgtgctgaggattactatctgcgcgctgccgccaacgtggcgtttgccggcaaggcgccggtgccggccgcgagggcggaagagctggcgctgtgcggcgtcgatcgcttgttgccgcagcttgcgcagacgctgcgcgctgatgaaatcgatcgcgtggcgtttatctacagccgcggcggccgcttcgccgatcatgacagcggccgccgcgatggcagcgtgggcaaccgttgggagaagccgctgcagatctggaatgcggaagtggcgaagcaccgccatgcgatcaccggcgagcgtttcagcggctgccccacctactacccggcacgtttgtcggacggccgcgcggtggaagagctctaccctgagcggcagtggccgctgcggctgatgtccttcaaatccaatgtgatgagcagctccaccgtggtgatccggcgcctgcacgacgtgaagccggtgaacctggtggccctgaacccggcggatggggtgcgtttcggcattcaacacggtgactgggtgagcctcagtacgccgggcggcagccgggaggcgcagatcagtttgctggcgggggtgatgcccggtgtgatcgcggtggaacacggttacggccaccgggagatgggggccagccagcactacctggacggcgaaccgctggcgatggatgagcgtatcgccgccggcatcaaccttaacgatttgggctttgccgatccgacgcgcgaagtgccgaacacctggctggattgggtgaccggtgcggcagtgcgtcagggcatcccggcggcgatcgtcaaactttccgcgtaa

SEQ ID NO: 427504 - DNA, 594 bp, Serratia marcescens
gtggctaaaaaagtggcgatcgtactggcatccggtttcgccgattgggaatacgcgctgattgccggcgttggcggcccgttttatgggctggaggtggcgttttttgcgccgcaggtcggaaaatttcgctcgcagggcgggctgacggtagaggttgaaaaaagcgtggccgaattggcggattggcgccccgaggtgctggtggtggccggcggcaccctgtgggaaaccgaacgagcgccggatatcagcgcgttgctcaacgagcagtttcaacgcggcgcgactctggcgggcatttgcggtggaacgttagcgctggcgcgggccggcctgttgaacagcagggggcatacttccaacgatgccgggtttttgacgcgccatgctgagggctacaccgggcagcgccatttcgttgcgagcgccgccgccgtcgtggatgaccgtgtcattacggcaccgggatcggcgccggtcagctttaccgccgccgtgttcagggctgtgggcctggatgaagagacgctgcgtcagttcagcgccatgttggcggcggagcacgcggtgggggaaaccgctcgcgcctaa

SEQ ID NO: 427505 - DNA, 207 bp, Serratia marcescens
atgacctataaccaaaaagcctggttgggggttttgctgctgtgcaccctgttttgggtggcggtcatcggcggcgcctgttcgctgtataaccgggcggatcgcctcaatgcacaccagccgcagagcgagttcgccgcgcgccacagcctggccccctgctcgcagcaaggcgctcaggcgtccaccgccccccggaatgggtag

SEQ ID NO: 427506 - DNA, 4071 bp, Serratia marcescens
atgctaaccagacaagtcaggcaaatctatcctctacaggaaaaagatacccaaactgtggtatttagtgattattttcactttccgaatattgtactgcttggtgatcctggtgctggaaaaacgcacctcttcaaacagtttgcggcattgcaagaggcaaaatatctgacagtacgtcacttcttaagtggcgtacctattgataatcagaaaacgttgttcatcgatgcattagatgagaagaggagtgccagtaacagtagtgacgttgtagatgacatcgtccgtaggcttttttcccaaacgccacaaaatgtcagaatttcttgtcgctctcaagattggttaggcgaatcagacttgtcagcatttttaccctattttgagcagacgggaggctatgttgttttacatttgcagtcactctcaaaagaagagcaaactgcaattctacaagctaatggtgtagaacaccccgaagcgtttctggctgaagcagaaaaacatgatgccagcgaatttctttacaacccacaaaatctgctaatgctggctgaagccgttaaagaaggaaactggccccgaacaaggtctgaacttttccactctgcgacacagttccttttaactgaacatagccaagagcatacgcggctaacttcaggaatttatacctgcgacgaattagagtatcctgctggatcaatttgcgcgttgcgcatattgagtgatgtttccggggtttctctacttccgaacgatatccgaccagaataccccagttacagaaccatctcgttcttctcacatgaaataattagagcggcgttatcgaggcgggttttttctgccggagatgagcttgaaactgttgagtacagccacaggacaattgctgagtatttagcagcaaaatggttagccgggatcgttgacaaagggctacccatggggcgtttgagaagtatgctgggatttgaggggtatccgtcttcagaattgagaggtttacacgcatggctagcggtctttttaccgcaatacgcccaggtattcattgaagccgatccttatggcgttctgacctatggcgatgcagcttcattaccgatagcggaaaaacaaaatctacttgtggcgctgtcaaaactttcagaacgtgatccctggtttagaaatcacggtctcaattcatatctgaatggctttgcgacagtagaaatggaaactctgttacgacagataatccgcgatcctcattcgtcattttctctgcgcatgatcgttttggaatccttatcggtaacaacaccgatagtcgcattgagtgatgacttaatcaatattgtcaaatcagaggattcctcgtatgcggaaaaagaagaagcaataacagcattaatccattttggagtacctggccagaaattttcggtgcgtttatttgcggagttaaaagacaaaaatcacgatagcatccggttgcgtaaccatatcattcagttgctttataaagattactttacaccgcaggatatagcacaactgctggttgatacattaaacataaccagtgagcgattaccgataggcgcattatggcgactgaatgatattgtaccgacagctgatctgctcgctatatttgagtgtcttgaacagtaccataacgatcacagtaaagattgggattcctcacctaagaatcaatatgaaattgtgcattttctcgaagctggcttattgcacatactgagcaaggatagtaattatagtgcggatcagatatggttgtgcctaaaaacgttctatagctactcccgttatcaccactatcgcagttatgatgatttgcagaaatctatcgttcatgagataaaaaatcgtagctggcaatatgaagatattatagatgccgccattctctcatttacacgccatgatactcgatacttgttcttacatgaatttactgaaagcacctttcatcttgtccctgatgagcttttgctggctcgttttatccactatttatcccatgctgacgctggttcagataaaactgaatgtatttatcgactgacatttgcggtcctttaccgatgtgccaagccatcccaagaagagtttgagtttctttccgcgtactgccatttaaatgtaaagttgacgactgtgtttgagacctccatcgtctgcgagattgacgattggcgagtaaaacataatattagacaaatagcgtatgagaaagaacgaaacgcggcgcgttatgaagataggcacagtttcgagttatgtcgtcaggaaattgtgtcgggccaacatttggggtggctcaaacatatttcctatatttactattcgaaatacagcgatgttgatgacaaattgacgccagtgcagcgctgtgaagacatattaggtgccgaaaacgtcattgatgcgatatccggtcttttagcgattttaaatcgttcagatctgcccactattgacgagttgaattgtgctttgctgaagagggagtattacggatggtggtatgcagtactggcaggaagcgatgagttatttaaaaaacatcctgatgttacacaatggaacgaaggtttattaacaacgctattgactctggatgttatattagcacttttcaccaaagacagtaatgttgtaagtgattattcattaccgtggaaaagggatgtgatacttaacaaaacagcatttttcatcaaaacctattaccacattatcaatttctgcattagtaatcagttgcaacatatccgtgcacttaactatctgttaaatgatacctgcattccaatcgactataccgttcctttagttatgagactcgctaaagagcaccctgatgatgttctccacttacaaaacctggtggagtggttgttagcgcatcctgagagtcatgcagagttattgcagttatctgagttgatggtagcgcaaccctcaaaactcaaaaatccaagttatcaaatttggctggtatgtacttatttattcgttccaaaccagtgtcaggatctatttttatctgaatcaaaatccgcgccggaaatgatagcgctccttcgtcaactatcaggtaaggcgaaaagaggccgtggcagtagtgagcagcgtttatcactaacacaattggaagcgatcatcactgtctctgctactcattttcctaatgcagatcgcgttgcaagaaacgactctaactcagcaaacaattgggagtatgctgattttatcaaaagattgattgatgacgtttcttccttttcctcatacgatgccggtgaagtatttgaacgtttattattactgccagaatgtacaagttaccgggattatctcttgcacgcccaaagcaaccagaaggtgcggtatcgggaatcacagtttcaacacactaactggaagcaagcgttgaatacgcttaaaaatcagaccccagctaatgtaatggatctctatgagttattgttagatcatttgcgggatatcgctaaccgaattacttatgaaaataccgatatttataaacagttctggaatgagaatggcaatggtcaaattttagtgcctaagcctgaagagagctgtcggaatttttttctggagctgcttagagcacgactccatccgttacaaataatctgtgagccagaaggccacatggtttcgagtaaaagggctgatatcatcatttcacttccaggaataaagatccccattgagataaagcgtgattatcaccgggacgtctggagagcacttaacgagcaacttgaccaactttatactaccaatcccgatgccgcaggctacggcatctatcttgtgttctggtttggtgcttctcgaccaaacgctatccctcgcccggagaaagacacaccacccccagtaaacgccacgacaatggaggacattcttaatgaagctgtgccaatggttaagcgaaaccgcctgtctgcgatagtaattgacgtatcaggtgaggctaattcgactattgaaacgcaaaaatcatctatgtaa

SEQ ID NO: 427507 - DNA, 1611 bp, Serratia marcescens
atgattacaaaagaacttgtagatgaaagtctcaatattcaccgactggttgattgtggtgattttgacctggcataccagcaatccgttgtattcctggaaaaactggggaaaataacggtcaaaggtgaaaattattttattgtgctggggaatgtggctggcagtcttgttgatattgggcaaatgagcaaccataaaaatgcagcagagcttggttttaagctgatggatgataacaaggaagcattagcacatgtacaaggagagagccatttttattataattatggtaatgccttgtctaataagataagtgtcgataatcctcacgaccacacattccagtcaatagaagaacttgtttcgttaaaaaacatctactggcgagcctttagattctcctcacaagagagcgaagagtttcaggcggaactgtccgttaatctggccaattcgctaagaagccaatttaggctgagtgaggcactgagatattatgatctcactaatcgcaagggattagatataccacagtcttgggtcaatcgttctgccgcgctcattgagctaaaccttgtttcatcttcatactccattaagcaactgaaggagatacgaaaaggttatattaatgcatctgtttccaaaaaaattcctccacaatgtgaatcattttatcttggtcgtatagcacaaatgaacgataaaatagaaaaatgtgtatcagcagacggcgaaacggacgagcatgatgacatgctcacgcaacaggagtttggcgcattaagtgcatataggcaattctgcctaataaattatctgacgctgtccgagcacggtctttattgcccctgcgtggggagtgccaccgatgatcttgtcatctcttcttctggtgtaaccggtgattttattattccaatggagatggcattaaaccgctttaaatcggagttttcacttgcccgccatctctattttgattacctttatcctcaggatacggatgctatcaaagaagaatgccattttctggagttacataatgacgtgatcttaggaattgatattgagaagatcagaacggcatttcgtctctgctttggtattctcgataagattgcgttatgtatctgtgaacttcacaaagtttatccacctgcaaagaagggtgggttacagaaaaatatctattttcaaagcttctggcagttagacgttgataacagaagacaacggtttgaagatataaagtcacctggacttttagcattgtacagcattgctactgacctgaataaaaataaaggtggcgaattggctttttataaagagtggcgaaatggtctagagcataaatttttgatggtacataaaagtgataaagcagaagatctttatcagtcttataaattgattaaagatattctttttatcaaagaggatgagtttattcaccatttcggtcagttgattcagattacccgttcagcaatattttcatttgtttttatggttagacatgaaggtaagaaacaaaaaaaagagaatgttccttatattaccaatgaactgcatatgagaaagtattcgtcagaacctaagtaa

SEQ ID NO: 427508 - DNA, 579 bp, Serratia marcescens
atgccgcatgtttttaatgtccgattgattggagaaggcgcactggctgcaaccaatgacctctttgctgaggccgggtatggtgtccgggtgcaaatgatgaatgctgaagattttgagtggtgcgttgcgttagctcgccaacaacccgaagagcgccgtattccctgggagttgaatggcgccgcgttgggcgatcctgacggctttatgtttagctttaagatacagggcatcgatgaccggccggccggcgcctgtctctgccggttttgtccggctgcaggcgagcatctggcgatgttaaatattgagatgctgcagaattttcgtattagagactcgagccttgatggcaatacgctacgttttgcgctctatgtcgccgtgctctttatggtggatacggcatgcgcaggtttgcgcttaatatcgccgattaatacggagttggctgattattatataaatcatcatcattttgtcgacctcaccggggggctcaaacagatactttatcgagatgctgaggcgcttttcctgaggttccaggaaggtttttcgccgccggcctcataa

SEQ ID NO: 427509 - DNA, 717 bp, Serratia marcescens
atggaagacgaatataatctcagcaacattatcggcaagcgcctggaagcggcactaggggagttgggcgatctcctgtgggcgtatgtggtgttatccaaaaaagacattgcctgcatctttggcgtcaccaactacccgagtgaatgggtaaaaaagtatcaggagcaggggttgcagtacattgatccggtggtgcttaccgcccgcaaccgcctggccccgttcgcctgggacgagcaaattatggctgacgcagggctgcactttcctgagctgttcgagcaggcccgcgagtttggcgtaacgcacggctataccttcgtgctgcacgattacaacgacaatctcgtcacgctttcctttgccttcaacgttgagcagagagcggaagccatccaggcgctcaccgagcgtaaaggcgacatttcagtattgctgacctcaatccatgagtcctatctggcgctgtccccactgtcagcaaaaaacgccgcatccctggagcgtaacgcccgctttaccgacagggaaaacgagatcctctattgggccagcgtgggtaaaacctaccaggaaacggcgatgatcctgggcataaagaccggcaccatcaagtttcatatgtccaacgtcgtcaaaaagctgggggtaacgaatgcccgacatgccgtgcgcttggggatggagctgcggctgattaaaccggtggagtag

SEQ ID NO: 427510 - DNA, 1332 bp, Serratia marcescens
ttgaaatccagggggcactgggggcataattgggggcatctccacttcgatagaaaatgtgcccccaaaatgaagctaaacgcccgccaggtcgagaccgcaaagcccaaagaaaaaacctacaaaatggccgatggcggcggtttgtatctcgaggttacgacgaaaggttccaagtattggcgaatgaagtaccgccgccctaacgataaaaaagaggatcggcttgctttcggtgtttggccgatggtcagtcttgccgaagcacgtagcaaaagagacgaagccaaaaagctgttggtacaaggattggatccaaaagcagaagaaagggaagctcaggctgaaactgcgggcgcatacacgttcgagaccattgcccgagaatggcatgccaacaacaaacgttggagtgaagatcaccgagcgagagtgcttcgttatttggaactgtatattttcccgcgcattggtgcagctgatattcgtggtcttaaaaccagccatctcttagcaccgattaaggccgttgacgccagcggtaagcacgacgtagcgcagcgcttacagcaacgtgttacggccattatgcgttatgcagttcagaacgattacattgattctaatcctgccagcgacatggccggagcattggcaacaaccaaagctcggcattatccggcattgccgcctcatcgtttccctgagtttctcgcacggcttgccgcttatcggggacgtctcatgacacgcatcgccgtagagttttcattactcacctttgtgcgttctagtgagctgcgtttcgcccgctgggatgagttcgattttgataaagcttgttggcgcataccggcgcagcgtgaagaaatcaaaggtgtacgctactcacaccgtggcatgaagatgaaagaagagcatatcgtcccgctaagccgccaagcgttggttttgttggagaagctaagaactctgagcggagaaaacaagcggttgttccccggcgatcatgatcccgataaagtcatgagcgaaaatactgtgaataatgcactacgtgcaatgggctacgacaccaaaacagaagtctgtgggcacggttttaggacgatggcacgcggtgctttaggggagtccgggttgtggagcgatgatgcaatagaacgtcagctaagccattctgagcgtaacaatgtacgtgcggcttatattcatacttcagaacatttagacgagagacgattaatggtgcaatggtgggcagattatttagatattttaaagtctgaatttatagcaccttatgaatatgccgcgccgaaaaaagtataa

SEQ ID NO: 427511 - DNA, 1767 bp, Serratia marcescens
atggctgagttagcatcgcaaccaacaccaattcaatcaatctataactggttcattgaaggaaaactatacgttaacagacgttatcagaggaagttagtttggaccttagaggaaaagcaaaaacttatcgattcattattacgaaagtatccaatacctgcaattttaattgcagaaagagaaactgagccaggtacatatgaaattatagatggcttacaaagactacatgccatcatgtcatttatagaaacaagatacactacaatagatggaaccttgtttaatttacaatttttcccgacagctcaaactagggctgacgaaggaggattcacacctggagaagctgaagaaaaattatctcaaagagaaacaagtacaattttagactacaccctagcattatctatcatgcgaaatgctagtgaaggtgaaataaacgatgtctttgatagaattaactcctatggacatcaactaagtgatcaagagagaaggcaatcaggtgtagaaaataacttttctaacatggtaagagatattgcctgttcaattcgcggcgatgtctcaaagaataacattctattaggtgagatgcccgccattagcatagatttaccatctatgaagcacggctatgagattcaagcagaggaaaccttttgggttaagcacggaatattacgttcaaccgacttaagagacagtatggatgaacaatgtatcgctgatatagcagcttgcattgttggtggttctctaatcgagcgttctaaagatgctttagataaaatatatgaaagcaatcatgatgaaagcataagaattaacacggcattagacgtgtacgaccccaagaaattcactgaggaattcaaatattgtcttgatgaaattttaaaaacttgcagtgaaggcaattttgtaaagttaagagatcagatattcgaagaaaccaatacaaatggattccctgctgtgttcactattttgttcactgcattctttgaactgatagttaaagaaaataaaaaaataagtaattatggcgaactaaaacaaaatcttttcaatatagtaaggcgggttaccgttggcagaagagcaagttcgcctgcaggaagacgagcaaatataaatgcagttaaaggggtaattggtgattgcttcgttgtgagtaatgaaccacttccaatctataataaccattcaaccattgatattgaaggtgtaatcagaagatccgaaattgaattagcttcttatgagttaaagcaagggattctacagttacacggacaaagagaagaaaacttagaagtcacagaaagaataataaataccatttgcgccatggccaacaatgggaaaggaagcacaggaaaaatcataattggagtaactgatcaagagcagcatgcagatttagtttctcagttagaccgaatagaaccgataaaaattggttcacgatatgttgttggtgtaaaaagagaagcagcaagaatgggtctaagtctagaggattactttgctaaatgggctaatgcaataagaaaatcagagcttagtgaaccacttaaaggccaagtactttccaccatggactttaatgatttctatgggcttggattattaattataaccgttccaccacaacaaaacatctcatccgttggtgacaacgtttattggcgtgatgcggataacacaaagcttgcaaatggtatccaagtagcgagagtcgcacagcgtttctaa

SEQ ID NO: 427512 - DNA, 1260 bp, Serratia marcescens
atggctctgagtgatgtgaaggttcgtaccgctaagcctgaagaaaaagcctataagcttactgatggcgaaggaatggtgttgctggttcatcctaacggctccaaatactggcggctacgttatcgctttggcggtaaagagaagatgctggcgttggggaaataccctgaagtatcgctggcggatgccagggcacgccgagacgaagcacgtaagcttttagctaacggcatcgatcccagtgaaaataagaaagtcgttaaggtagaacaagcgcaggaagctataacttttgaagtggtcgccagagactggcatgcaagcaatcaaaagtggtctgagtcgcatagtggccgtgttcttaaaagtctggaagataatttgtttgatgcgattggtaagcggagtatcgctgagctaaaaacccgagatctgcttacaccgattaaagccgtagagatgtctgggcgtcttgaggtagcagcgcgtctacaacaacgaacaacagcaattatgcgatttgccgtgcagagcggtttaatcgattacaatcccgcacaagagatcgctggagcggttgctacagctaagcgacagcatcgcgctgcgttagaacttaatcgcattcctgaactacttcatcgaattgatacctacactggcagacctctcactcgactggcggtggagctaacactattagtattcatacgatctagtgaactgcgtttcgcacgttggtcagaagtagattttgaaactgctatgtggacgattccgggggagcgtgatccgcttgaaggtgtgaagcattcacatcgaggatcaaagatgcgcactcctcatcttgttcctttatcgcagcaagctctcgccattctggaaaagatcaaaagtatgagtggaaactgtgagctgatcttcattggtgatcacgatccgcgtaaacccatgagtgagaacacggtgaacaaggctctgagagtgatgggctatgacacaaaaacggaagtctgtgggcatggtttcaggaccatggcttgtagttcactgatagaatcggggttgtggtcgagggatgcagtagagcggcagatgagccatcaggagcgtaactctgtgcgtgcggcttacatccataaggcggaacatcttggggagcgtaggttgatgttacggtggtgggcggattatctggatagaaatcgtgaaagtagggttagcccattcgactttggtaaccatttattcagttaa

SEQ ID NO: 427513 - DNA, 762 bp, Serratia marcescens
atgaaccatgagcagttagttcagtatggattcaagtttggaaaaaatggacctcatgcagcgcgttgcatgatgatcgaagaattgaagatcttgctccaggcacggcctgagaacaccttacaagaagaatatagggtaagcattgtggatgacaatattcttcataaacccagttctagtgccaggaaactaacttatcggcacatggttggtctttatgggatgtctccgcacatacctttgttcaaattttttcgtcaactttgggagctatctgaagaagctcagcctctactcgcactgcaattggctattgcaagagatccactacttcgagaatctgttggggtcattacggcacttaagcctgggcaaatcttacccagaagcgttatggaagaacacctagcaaaagacgatccagatcgatttagtcaggcatcacttcagtcatttgctcgaaacattagtggcacctggactcaatcaggttatctttcgggtaaggttaaaaaacaacgtactgacccaaaagtaacgtatgtgaacgtggtttttgctctacttcttgggcactttcaggggctttcaggtaaacgtttgtttgatagcttttggatgaaactattaccagttgatgaaacaactttgtacgagcttgcatatagagcaactttgcgcggcctgattaatttcaaacaagccagtgaggtcgttgaagtgtcttttgcacctctgaatctcctagttaaggaataa

SEQ ID NO: 427514 - DNA, 543 bp, Serratia marcescens
atgtctgacagattgtcaaaattactgaaaagtttttccagtcacatcagtgtgccatggggtaacaatatctcagctgaagagaaagctatctttgtcgtatatgacaaagaagatgagcttaagcttcgtgctcgcatgactgaatttgagcatgcatgcatcgaaagcgagcacccatggctgttgttggacttgaccaatgagttcccctactggatggccagacaggactacaaagaggcttatttcgaagatccagagtatctggaaggaagctatgactattttgctgaagagcttgtgtcgaaactccatgagcagattaatgcgcaccaaacacctgaatctgtagtggctcttatgggatgtgggaccatgttcggctttgtatcagtctccgctttagttaaatctttaacgactcaagtacagggacgcttggtggtatttttccccggagaatatcatgagaataactacaaactgctcgatgccaaagatggctggggatatcaagccactgcgatcaccatagcttaa

SEQ ID NO: 427515 - DNA, 3474 bp, Serratia marcescens
atgctaaaccgcgaaatttataaacttgaccctctggaaagcaaattggccaacaacggtgtggctgaggtaaaagatgatctctccaaaggggctctagaaacattagattatgagctgcggacgtttgtctgtagcggggcttatgccaaaggcatggctgatattcttagcaactacttacgaaacgttaaaagttctggtgaacaacctgcagtttggatttcaggctttttcggttctgggaaatcgcatctagctaaaatgctcagaaccctttgggtgaatcagaaaatggagagcggagcagatgctcgctcattggttgagctacccgatgatgtacgacaatattttgacgaactttcaacattgggaagtcgactgggaggacttcatgccgcgtcaggaactttgggggcgggagcagaagacaaagttcgattagccttgttggcgatcattttcaaatcagctgggttgtctgagcaatatcatcttgcccaatttgaactttggttaagatctgaaggggtgcttgagcaagtaaaagcttacatccaacagcatgccaaaggtaaagaaggcgaagacctttggaagaaagaactgcgcaatctccatgtttcaccagtcatggcgaatgcgctgttacatgctttaccatctcttggaagtgatgctaaagaagtacgagatatgctgcgtgcgcaatataaaattgttgatgatgtatcaaatacggaaatggtccagtcgattgttgatgcattgtcaaatgaaggcgaaatgcccttaactttggttgttcttgacgaggttcagcagtatatcgctgatgatccagatcgtgctcatcttgtgcaagagaccgttgaaacatgctgtaaagctggcgcacttaagtcgaaattgcttttcgtcgccacagggcaaagtgccttatccgggttgcaaaacctgcaacgccttatggggcgtttccagatttctgttcagcttgaggatactgatgtcgatgcggtaatccggaaagttattctccagaagaaagaaactgccagagctgagatcgaatccgtggtacatcataacctcggtgagattaatcgtcatatgagtggttctgttattgaagctcataaagacgatgaaaaatggatggttgcagactatccgttactgccagtgcgtcgtcgtttctgggagcgagtcctacctgcgctggataaaaccggaaccggatctcaactacgaaatcagttacgtgtagtgcatgaggctacaaaatctacggcacttaaaccgttgggttctgttgtccctgccgattttatctatgaacaaattgcaatcaacttgctacaaacgggtgttattggcaaagagatctacgaaaagatagctcgcttcaaggctggggacgaagatgaagtcctccagggtagagtgctttcgttgatactgctcattagtaaactaccaacagatatcaatcacggtattgcctcaacggaagctttcctcgctgatttgctcttggaacatttaagtgatggtaagcatgaactgagagcaaaattgccacatttaattcaacaactggttgatgacggcgacttactgccaatgaatactggtgcaggtgttgaatacaggttgcaaacgcttgaaagccagcagtggcatgatactttcaaacaacaacaaaatgatctacgcggtaacccacagcgtttagaaacgttccgcagcctcgaaataaaaaaccgtgttaacactgccctagggtttggtagcgtgaatcaaggggtcagtaacgaaccccgtaagatcaccgtgtgtttcgatcaggatcttcctgccgatgctaaaaaaaatctctatgctcatgtacttgaatgtaaagaaaaagctttcgagggtgcagtgcgtagtgcgaaccctgatgacgccactattttcattcatgttccatccatgcgccgtaatgagctactgagcgcaattgtcgattttaaagcggcggaaacaactctggaagtgagtgggataccctctacggatgcgggtaaagacgctcgcgctgcaatggagcaccggaagtatgaagctgatcgcaccaagaaactgattcttaaagaaattattgatggtatccaggtacaaatggctggtgggagcgaagtactaggcgacacgctagttgagcagttccagaatgcaggtaagaaatcatgtgaacggctctatacagagtttaagcaagcagatcaaagaggttgggataaggtatttgagcgtgcaagtaaattcgctgatgccaatgctctggaagctgtaggccataatgatgaagtggaaaagcaccctgtctgtgtcgccattaaacgctatatcggtgttgcaaaaactgggggagagatacgagaaaactttatgtctgctcctttcggctggccgaaagataccgttgacggcgctctttttaccatgttggctgctggtgtattgaaagcaagcgactctcaggaaaaatcagtcgatgcgaaaagtttggagcgcagcaaagtctctcaaaccaactttcggcctgaaaccgttagcttgacgccgcgacagttggcgggcattagaagtttgatccatgcgcttggtttgaactgtaccaatggtgaagaacaatccaaattaagagatgcgatagaaactgctaagcaattggctcgtaaagcgggaggcgacgccccattaccattaccaccaaaagcagaattactcgttgaagttgaaaggctttctggtaatgaacagctaatggcagccttcgaacgacatcgcgatattatcgatgaagtggagcgttggaaagggcttgctgaaaaagtgttcgtcagacaagctcgctggggcgaactaaaatcggcgcttaagtattgccaaaatttagttggttttgacgagctcatgaacgaggtgcatgcgattgagcaaaaccgaagtctgttagccgatcctgatccagtacagccgttgctgaagcaggtaattgaaagaattcgcgttgcgattttgaaaaagtatgaagattttcaaactgaatataacgaatgtctaaaggaattgcatgaagatgcaatctggagccagctttctacagagcagcaggagcgattgctgacaaagcatcatctggataacctggaaatgtcaccattatctgataacgacagagtactcgattgtattgaaaatacctcgttagaacagtggagtgataaaacctctgctttggcaggccgttttagccgtatgcggcaggatgcggttgatatgttggtgcctaaagcaaaaatcgtacttttaccaaaatcaatcattgaaacagaggctgagctcgattcctggttggcaaaagttagacaagaagttatgtctgctttagctgagaatcgtcctgcatcgttgaaataa

SEQ ID NO: 427516 - DNA, 3321 bp, Serratia marcescens
atggcggaagcccctggatacctgaacgataatgagcgtaagctgcgtaatcgcctgcgtgcccatgcccgccagttgggggacaagctgcaggccaatggtgtgcagggaactgaacgcctgcaggcggaggtcagctatgagcactggcatcgtatgttatttgcccgctttttggagcaaaacaatttgctgatgctggataaatatcttgctgtcacgctgaccgactgtcaggaatatgctgaagaagaaggctgtaaagatggctgggaactggccggcaagctggcgcagagaatgctgcctcaggtatttagggtcgattcccccatatttgagctgcaaattcccgtcgaccgcattcgtgaattagaggatttgattctgacacttcctggtacggtttttcaggcccaggacagcctgggatggtgttaccagttctggcaaagcaaacgaaaaaaggaagtaaatgcggcgggcattccgattggtgcggatgagttaagcccggtcacccagttattcactgagccttatatggtgagcttcctgctggataacagcttgggggcgtggtgggcgaaaaaacagctgacggatgcggatttacgctcggccagtgatgagaaaactttacgtcaggctgctgccattgatggtgtaccgctggaatatctgcgttttgttaaaaccagcgatgagcagggtgagttgtggcaagccgccggcggctggtttgatggctggccacaggaagttcgtgcactgaaaacgctggatccgtgctgtggttcagggcattttctggttgcattattcctgatgctggtgccaatgcgtatgcatcttgaaggacttgatgcaagaagcgctgtagataaggtgcttgctgataaccttcatggtcttgaacttgacagccgctgtgtggagattgctgcttttgctctggcgctagaggcctggcgatatcccaatgccggtggttaccgtaccctccctgcactaaatattgcctgctcagggctggatgtcagcgcagctgcccaggaatggctggcgctggctaaacacaatccagatattagcgaagcgcttcaatggtttactcgagcctttaaaaacgcgcctgtactgggcagtctgattaatgtcaatacggtttattacgaggggaaaacagaaggaaaacaagcgccttggcaagttattcttgatgtgcaagcttcaacagatgatgaagcaaaaacagcccaagtgacagctcaggggctcgctaaggctgcacaactaatgtcgaaaaactatagcctagtggcaacgaatgtaccttatctggcacgtggtaagcagtgcgatatcttaaaagattattgtgagagttacttccctgaagcaaaaaatgatttggctacagttttcctagagcgctgtctggatttcactctaaaaggtggctgctcgactattgtattgccgcaaaactggctgttcttgacaagttataagaaattccgagaaaagttgcttactgaggatacttggaacctggtggcacgtttagggccgaagggatttcagacaccaatgtgggattttaatgttcagctgatcactcttactaaagatgctccacctaaaggtgctttgttacagggactggatgtatctgcagttaaaaccgcaatagataaagctgaaaaattgtttgtcgaagccctaactagtgttgagcagaagaaacaattggaaaactcagaggcgcggattacgttaactgactcagaaggcgttgattcgcttgagaactttgcaactttccataatggtatgcaaactggtgactatcagcgatttggagtttctttttgggaaatttatccaattactaataactggtcttactatcaatcaactgtttcgcgatctttagaatattcggggctctccggtatagttttttggcaggaagggaatggcagtattgctaatagctccgctgctgtaatcagaggcactgaagcttggggaaaaaaaggtatttcaattagtgcaacaggaaccctttatggctcattgtataatggtaatctgtatgatgagaacactgtttctattatccctaaaaatataaattattttaaagctatttggtcattttgctcctcaccaacttataattatgaagttagaaaaatcaatcaaactctaaaagttcgtgccgacttactaaaagtgccatttgatttcgagtactggtctaaaatcgcagagcaacattatcctaacggcttacctcagccctttacaaatgatcccacccagtgggttttccacggccacccatgcggttctgtggtatgggacgaagaaaaaaaatggacagccatctctgataagcgcactgacgagatagtactacaagttgcggttgctcgccttttgggttaccggtggccagcagagctggatgacaaaatggagctggctgatgagatgcttcactggcttggtaaatctgaggaactgcttaaactcgtggatgatgatggcatagtctgcctgccaccacttcgtggtgaaaaagccgctgcttctcgcctcgaagctatgctgcagcttgcctacgaagaggactggtcatccagtgttctcagtgatttgcttgccagtgttggtagtaagagccttgaaacctggcttcgggataaattctttgaacaacattgcaaactcttccagcaccgcccgtttatctggcaaatctgggatggtcttaaagatggattctcagtactggtcaactaccataaactcaattaccagggtttggaacgcctgatttatacctatcttggggactggatccgtactcaggagcacggtttcaaagaaggcattgatggtgcagaaagtcgtttgatggcggctaaaaacctcaaagactcgctggaagccatccttaaaggagatgccatcaccggcaagagtggtctcgacatttttgtgcgctggaaaccgttacacgaacagcctatgggctggaacccggacttaaatgatggtgtgcgccttaatattcgtccgtttatgcaggcactggatgtggataagaagggggccggtgttttacgcactaagcccaatattaagtggggtaaagaccgcggcaacgacgttgaatcggccccctggtattatctgggcctgcagtatggtgaaaaagagggggcgcgtatcaatgaccaccatatcagtcttgcagataaacaagctgccagagacgaacatgcaaataaggaaaatcacggatga

SEQ ID NO: 427517 - DNA, 1800 bp, Serratia marcescens
atgattaaatcagtattcaactatccggtgtcaaccttgttggatattgaagcaggggtggtatatgccatcccacgttaccaacgggagtacacctggggtaaatggcaatgggatgccttgtttgaggatctattagaaaacgaccttaattactacttgggatcgattatctgtatcaaccaaagtacagatacgctggctctgcagcagttagagttagtggatggccaacagcgaatgaccacattgtcattattgttagctgccatttatgcaagctacaaccagttaggcattgaacttgagatggaacagcagatagagctgtataacctgaagcataaattggtgctgaaaaagaatgcggaccagccccgattagtacctcaggtgcaaaatgccaaccagcaggattacctggcggtgttgaaagaggcaggcattcttaaagaagctgagtgggtttccaatgcaggtaatcgtcgggtatttcgtgcctatcgacattttttaatgcgtattgaacagtatgtcagtgagagcgaaaccccattgcaggcactgaatgcgctacttgataaagtcaatgcatctactctggtaaaaatagaggtggcaagtcattcagatgcttacacactgtttgagtcacttaacaatcgcggtgtgcctcttaccgcgattgatttaatgaaaaacaagctactggcgaagatcgaacagattgagccgggcagtattgataagtcttttatcagctggaccaaagtgatggaagccctgggggatgattatggggtacaagagcgttttttccgtcagtactacaatgcgttcaagcctgagttaaaagatatcgtcaatgtaccagtagcgacgaaatctaatcttatacaaattttcgaaaaattgattgctcatgatccgcatcaattcctacaagctatgcgcagtcattctgactggtatgcgcagattgtagggaattgcgaagttccggatgaacctaaactaacaaaactgcttaaaagtctggatagaattcaaggcgctccttcttatctcttattactaatgttgtttgccagacgacagaacttagcattgagcattgagcatattgaaagagtggtcactttgctgatcaacttctttgtccgtaggaacactactgatgtgcctgctactcgggatttaaaccgcatatttatggagttaactgaaattctgcaaagctgccacggtgagcaggttgtcagtgcgattgctaataccctagggtctgtcagtacctctgatgagcatttccgccaagcgcttagtggcggtctatacgaagaaaatagctgggtctgccgctttatcctgtgtgctcttgaagaaagcatgatgaccaaggagaaccaagtagacctatgggcagtggaaggcaagcaatatgtgtggaccattgagcatgttttcccacaaggattaaacatccctaattcttgggtagatatgatagcggatggcgataaaacgttggcggagcaatatcgtcaaagccatgtgcataaacttggtaacttgactatctcgggatacaacagttctttagggaataagtgttttttggaaaaacgcgatcgtacgacccgggataaacgtcctgtaggctacaacaatggtttgtatctaaatcaggagctggctattactgagacttggtcaatagtgcaaattgagcaaagaacaaccgcgatggtagataaggcactaattctgtttagtttaccgggtgtcgtcgggagataa

SEQ ID NO: 427518 - DNA, 2037 bp, Serratia marcescens
atgcaagtaattgataaattgatagagcagctacggggtagtgcacattttaatcctgcggtgcaggaggccccagcagcggtgctatggacagatgaagcctgccaatggcaaagtgccatgccattgattaaacaatttattccagagctgctcgaacttggtgattatcaaccagagcagcggactggtccggctatttggttgaagtgtgccattgctggggtgttggaagatgttatgttacctgaaggtcgtacaccaattatctatcttcccaaaattgggcgaaaagcgttgcgcgctatcgaagattgcccggactatttacgtcctttagcagaattacaatatcgtgggtgttggtgggcctataatacggcaggacgtgattggagtataagttcttttctgacaaacccacgagttgggcttgaattagacgtagcaaaagataaaaacacattagaaattatcccccaaatcttgaaggatcttttagaatcccgtgttgaagacttacaaggaaagcggttagaggctaaagattttcaatcgttagtatttaatgatcctattaaagatctacttgggtggctgaataatcccgaagataagcgtaagcagtgggacgacaataaatggtcgcttttcagcaatacttgctcaagtcagtttggttatgaaccaacagatgctaattattctcaaatgctcgcatcccttttatctgcccaaggggcgtggcaagaagtgtggcagcgctttgaagataccgcacataacctatcaggattaatccttgtccttcgtgatgtaacccctgatttagctgctgatttaagtcattatcctattgaaaatactcgcgatgaaaaaagccttgccgatgcgcttgctggccttcctcaacttgatgtaaacaaagttagaggaactatctgttcactatatcaacagaataaagagcgcgaaagctggctttggtatcgattaggggaatctaaatacctcgagattttggcccatctggcaaaagtcgctgaattgacccagcaagtgttcaatcatcagtcaccggaagagatggcagagctatatcaggagtgcttctggcgagtcgatgctgcagcgttgcaggccatggcattggcaaaagaaccgggccaacaggaattagtcgcaaatgtattaaaactaatatattccccttggttgaacgaggtatcgcttaacttccaacagttggttaaaagaaaaggatatcccgggaatactgaaattaaggaagcgacagctacttaccaggttaaagggatggtagtgttttttgtagatggtttgcgttttgattgcgctaaagtattagagcgtaagcttactgcgcgtcatttgattgtcgataccaaaacacaatggagtgctctgccatctttaactgatacagcgaaagctgcggttactcctgttgctgcacttttgaacggtgcttatgacactcaggattttaagccttcagtagtggcaacgggtagtgagtttagtagctatcaattaaaaaaagcattggcacaacaggggtggcaataccttgaaggattggatactggtgagcctaatggcttagcgtggctacaaacaggtgacctggataacctgggacatcagcagcaaagaaaattacctcttggtattgatgatgttcttgaagaaatagctgatagggttagctatttgtttgaagctggatggaagcaaatccgtattgtcacggatcatggttggttatggcttccagatcaattacctaaagcagatcttgaaaaaccattggttcgtaagtacttatcaagatgtgctattctcaaggataatgccagtacgaatttgcctcaggtagagtggtattggaattcctcagtgtcacttgccatggctccaggcatcagtgcatttactgcgggagattactacaatcatggtggcctaagtttgcaagaatgcctgacacctgtaattaaagttactaaggactag

SEQ ID NO: 427519 - DNA, 1857 bp, Serratia marcescens
atgaacagctcaaataaacaccgaaatcatgtactgtgttcaatagtgaaaaatacttttgagcaccaacgcaatgctgctgagaaagcattttctaagttgaactctggctcaaaagtcgtggtcattgcagcggaaatgcagtcaggaaaatcaggtatagctcttgtccttgcctgccttcagagactatctttacccgatgaattattggctgaccggaaatacttaaaagatactttatatcttctgacaatggcagatcttgcacttcaagatcaagcaaagcgagacctttcaccctgcaaaaatgttgttgtaagtaactttacaaatattgataacgcgcttaaagcggattttaaacgccaaccacctaagctcatcatcatcgatgagtgtcattatggttctggcattgatagtgttcgctatgaaaaggtatttaattacctggaacaagataatgtagactgtaaagttatatttatttccgcaactccatttagctcactctactcagctagcgaagattccattctacgtcacagcttcaatacgtctttggtatttcacaaagctagcgatgaatatcatggcattcgacaaatgcatcgcagtaaccagctggtcaaacttgatgatgatcaacgcgatttttgtgaagattcactgctacaaaagcgctttatacgccagtttaaagaacatcagggcgtaggctggtcactgattagggttccatcaagtcaagcaaacatagctaaacaagtactgattaatcaaggtgtagatgaagagcaaatcttaatcataggtcaaaagcttgttggcgttggcgatcacgaactctcatctatcgatgacttcaaacgagcgtacgaaacagcagcaatgtttgatgaaaagataatcgctataactgtggctggatttcgcgctggtattaactttggccaagaaatgaaaaacacgctaataaacacatgggatagctctattgccaatatagccgcagtggtgcaagccaacgttggcagagcatgtggataccaccagaatactcaggcgaaacattttacaaacctggaagctgttcgagcgtattcagaactacttgatcatcttgaggccagcgatgaattgaatgatttcgatgggttacggtattcatttgaagatatttgtgcgaaatatcaagtcagaggctttgaccgaggaatgtttatcacccctttttctgaaactgtaatcatcaaaaaacgtgatgattcggaaacatttctcactcaaagctatctagtcattcctggaaaattgtctgagcccgaagttaatttcagcgcctataccaacgatccacagctgcttgaggcaatcaaattaattcgtgacgaattcctgaatgaaggagcgccctatcctaaatctggtcgtgcaatgcgaggtgaagatagaaactggataaaagctcagtgggtaaatggagtcacctataatgacttctcgccgagctgtgcgaagagcagagtgctggattttaattcacgcctggagctgggtgaagatgtagaattcaacttaattgttaaccctggtggcggagagaccactgctgacaaactcatagttgcgtgtgtattcagtatttataatctttctaaacaaaaagatgcttacaaacgtgccatggaccgagaggatatgcgggaaattagtgaagccttaggttgtgaatatgacgatacgattatggtgctctatcagcgcggaaactactctagtggagtgacagaacaaaaaaaagcaactacaaaacagctatctcgcatccgcaattccagcgtgttcaaatag

SEQ ID NO: 427520 - DNA, 1998 bp, Serratia marcescens
ttgagcgcacaagcacaaaaacaccgacaactagttctttctattttgcaaagtaacgcattacatcagcaccaagtaaccgcagccactaaagtttttgatgctttggtaggaaaggttcgagtagtagtaacagcagctgaaatgcaagcaggtaaatcagggattgcacttgcgctatgttgcctgcaaagactcagtctttctgatactgatctttgcgatcgcaagcagctaaaagatacactctacctgattacaatgcctgatactgctctcaaagaacaggcagaagatgatcttaagcttgccaagaatgttgttgtcagtaattttgttaacttcgaaaaggcattagaaaacgaacttaaagggaatcctcctaaattaattgttatcgatgaatgtcactacggctccaatatctcagcggtccgttacagcaagatatttgattatttggaaaaagaaaatgatacctgtaaagttgtattcatttctgcaacccctttcggtgctctctatggagcagaaactgaataccaagaagctttggatcttcaacaagaagccaaagatgataataactcagaattgctaaccgaagccaaagaggtagcagaaaaagctctaaaagattctatcttgcgccgaaattttaatactcgccttgtcttccataaaaccagcaaggaatattatggtgtacgtgagatgttgaaaaacaataaagttatgagtcttgaagatgacagccgaaattttctttatccttcagaacaacgtgatagttttgttcaacaatttctacatcacgaaggaacaggatggtctctagtaagggttcctgctgggctagcaatggaagcaaaacaatttctagtttcgcgaggcattgatgaaagtgtcatttatatcttagggaattcattgtcgggagtgcctgaagacgagcattgcagcattgaacggttcaaaaaagaatttgatgatgcccagctatttgaagaaaaactaattgctatcaccgttgctggagcaagagcaggcattaacttcggtccaatgatgaaaaacaatttaatatcaacttgggatagtaccgtagctagtgtcgcggcagtggttcaagccaatattgggcgcgcatgtggctatcatggaaataaaacttcagttcactatacaaatttaaatgcagctgaggcatatgcacgcatattagatcatcttgaaagcacttgctctgatcaggcagcttccgacttcgaaggtttaaaggaattatttgaagacatttgccaagagtacaacgttaatggcttggatgttgggctaactataaaatataaacgcagacgcccaattggtgatgtcgagacatataaaacagatagctatatagtcgtaccagctcagcttctaaaagagaactatgactctaaaaaatataccagtgatagatattttattcaggctattgatattctccgcaaagaatttacagcaaaaggtgcccctagtgtcaaaggtaatagggctatgcgaggtaagggaaaaaactggataaaagcgcactgggttaatggtgatagttataacaacccagaaaaagctccagctgatggcactcaacaagaaaagacgaaaatgtacactcaaatgcttgaaaatgatgaatatttagagttcaacagagttgtaactcctgggtcaggtgagcgatctggagataaatttgtagcggcaactatcttcagcatctacaatatttctcgtcgtaatgtcgcgaaaaagatcatgactcaaacggatgtttgggaaatgtgtgactactttggtgttgagcgtgatgataccctttttgttatatacaaacgcggagaatacgatattgaacgcactatagaaaagaagaaacttaatgaacttcctgaaaagtcagggaatcttagggatgagtctcacttttctaatgagatagaatctttaaattaa

SEQ ID NO: 427521 - DNA, 414 bp, Serratia marcescens
atgaaagctaattgcttacaggtcattgcaggttcgatattgttaagcgcctgtactggcgatcgtctcgatcagcgctatgcaccagacattccaatcgccacacatgctaaagcaaatggcgacatctgcatctatccgtcaccaaaggaaaacgaaaagccagatacgctctatatcagtgatgatttggatgagaaattgattgaggtggtgaaccagaatctgaaaaagggcatttgcgttacccaagaagattacccgtttcaggaaaattatatctacagcatgaggctaaatttcgtaccgattgagaagcgcagaaatctgcaggatgtctccggcagggcctttatcgctcacttcaaagtgaaaagagtcaataatcactttgctatcgaaaacatccaataa

SEQ ID NO: 427522 - DNA, 963 bp, Serratia marcescens
atgaaacccattgcagtcaccatcctgaccggctttttgggcgccggcaaaaccaccctgctgcgccacatcctgaacgccgaacacggctataaaatcgcggtcatcgagaacgagttcggcgaagtgccgatcgacgacgcgctgatcggcgatcgcgccagccgcatcactaccctgagcaacggttgcatctgctgcagcaagtccaacgaactggcggacgcactgctggatctgctggacggcgtcgacagcggccagctggcgttcgaccggctgatcatcgaatgcaccggcatggccgatcccggcccgattacccagacctttttctcgcacgagatcctgtgcgagcgcttcctgctggacggtatcatcaccctggtggacgcggcgcacgccgagcagcagctgagccagttcagcatcgcccaggcgcaggtgggctacgccgaccgcatcctgctgaccaaaaccgacgtggcgccggactgcgaggcgctgatccagcggctgcagcggatgaacgcccgcgcgccggtctacaaggtgactcacggcgacatcgatctgagcgtgctgttcgacatcgaaggctttacgctgaacgacaagctcaacctgacgccgcccgccccgctgttccgccgcatcccgcagccgcagagcgacatccgctcaattgtcgtgacgctgaagcgcccgctgccgctgatgcaaatctccgaagtgatggaaggcctgctgctggaatacgccgacaacctgctgcgctacaaaggcattctgtccatcgaagacgagccgcgccgcctgctgttccagggcgtacagcggctgtataacgccgactgggatcgggagtggctgccggaggaagagcgcaagagcacgctggtgtttatcggcgtggatctgccggaggaggagattcggggaaggattggggggttggggtaa

SEQ ID NO: 427523 - DNA, 2181 bp, Serratia marcescens
atgaaacgagaggggattttaaagcacattccgtggatgctgctggggatactcggcgcagcctgcctcggcgtggtggcgctgcgccgcggcgaacacatcagcgcgctgtggatcgtcgtcgcttcggtggcggtgtatctggtggcctaccgctactacagcctgtacatcgccaccaaggtgatgaagctggacgccggccgcgccaccccggcggtggtcaacaacgacggcctgaactacgtgccgaccaacaagaacgtgctgttcggccaccacttcgccgccatcgccggcgctgggccgctggtggggccggtgctggccgcgcaggtcggctacctgcccggcacgctgtggctgctgggcggcgtggtgctggcgggggcggtgcaggactttatggtgctgttcatctcctcgcgccgcaacggcgcctcgctcggtgagatcatcaaaaaagagatggggccgataccgggcaccatcgcgctgttcggctgcttcctgatcatgatcatcatcctggcggtgctagcgctgatcgtggtgaaagcgctggcggaaagcccgtggggggtgttcaccgtctgctccaccgtgccgatcgcgctgtttatgggcatctacatgcgctacctgcgccccggccgcgtgggtgaagtgtcaatcatcggcatcgtgctgctggtggccgccatctggttcggcggcgtggtggcgcacgacccgtactggggcccggcgctgacctttaaagacaccaccatcaccttcacgctgattggctacgcgttcatctccgccctgctgccggtgtggctgatcctggcgccgcgcgactacctggccaccttcctgaaaatcggcgtgatcgtcgggctggcgatcggcatcgtgatcctcaaccctgagctgaaaatgccggcggtcacccagttcgtcgatggcaccggcccggtgtggaaaggtaccctgttcccgttcctgttcatcaccatcgcctgcggcgcggtctccggcttccatgcgctgatcgcttccggcaccacgccgaagctgttggccaatgagaccgacgcgcgctttatcggctacggcgcgatgctgatggagtccttcgtcgccatcatggcgctggtggcggcttccatcatcgaaccgggcctgtacttcgccatgaacaccccgccggcggcgctgggcatcaccatgccggatctgcaccgcctgggcaccgaagacgcgccgatgatcatggcttcgctgaaggacgtgaccgtgcacgcggcggcggcggtcagctcctggggcttcgtcatcagcccggaacagatcctgcagaccgccaccgacatcggcgaaccttcagtgctgaaccgcgccggcggcgcgccaacgctggcggtgggtatcgcccacgtgttccaccagatcattccgggcgccaacatgggcttctggtaccacttcggcattctgttcgaggcgctgttcatcctgaccgcgctggacgccggtacccgctccggccgctttatgctgcaggatctgctgggcaacttcgtgccgttcctgaagaaaaccgactcgctggtggccggcatcgtcggcaccgccggctgcgtcgggctgtggggctacctgctgtatcagggcgtggtggatccgctcggcggcgtgaagagcctgtggccgctgttcggcatctctaaccagatgctggccgccgtggcgctggtgctgggcaccgtggtgctgattaagatgaagcgcacccaatacatctgggtgaccgtgctgccggcggtgtggctgctgatctgcaccacctacgcgctggggctgaagctgttcagcgacaacccgcagctggaaggcttcttcttcctggccggcgagtacaagcgcaagatcgccgaaggcggcgccgagctgagcgcccagcagatagccaacatgaaccacatcgtggtgaacaactacaccaacgccgggctgagcattctgttcctgctggtggtgtacagcatcatcttctacggggtgaaaaccgcgatggcggcgcacaagaacccgaaacgcaccgaccaggaaacgccttacgtgccggtgccgcaggccgcgcccgccgacggcgtaactgagggggaggtcaaagtttcgacccagcattga

SEQ ID NO: 427524 - DNA, 1371 bp, Serratia marcescens
atgcattctaatatcatcggcttcaatccgctgctggcggagctgcccgcttcgccaacgcgcgccttccacaaagagctggaacactacctgcagcgctatccgcagaccgaacagctggatatttatctgcacgatctgaacggccagctgcgcggcaagcggctgccgatcgccgaagcctttgggctggagaaaggctgctactttccgctgtcgatctacgccctggatctgcacggccgggtgattgaagaaagtgggctggggcaacgggcgggcgagccggaccgtctgtgcctgccggtgcccggcacgctgcgcccctgcgcgcgcgatcccgaacgccacgcccaactgctgctgacgatgcaaaacgccgacgacggcgcctgcgagctggagccgcgcgtggtgctgcaacgggtgctgaagcgcctgcacgagcgcaactgcttcccggtggtggcggccgaactggagttctacctgcaggatccgcagcaccccgccgcggcggaaacctgcccaacgcagagcttcgcggtggatgcgccggaacgtcaccatgcgctgctgagcgacatcgaacggcacgcccgcctgcaaaacctgccgttgaccggcgtggtggccgaagccgcctccggccagtacgagctgaatctgcatcacagccggcgcgtgctggaagcctgcgaccagatcatggcgctgaaacgcctgacgcggcagattgccgagcaacatcaccagcacgcctgctttatggccaagccctgcgcccacgccgccggcagcgggctgcatttccacatcagtttgcaggacgagcacggcgagaacctgctgaccggcgcgccgggcgaactgagcgacaacatgcagcaggcgatggcgggcatgctggcgctgatgccagcgtcgatggcgatcctggcgcccaacatcaacgcgttccgccgcttccgccctggcatgcacgtgccgctgcgcgcctcttggggccacaacaaccgcacggtggcgctgcgcctgccctgcgccgacagcgccaaccagcgcatcgaataccgcctggccggcgccgacgccaacccctatctggcgctggcggtgatgctcggcggcctgctgcacgggctggaaaacccgctacctctgccacccgccgccaacggctgcgagagcgacaacgccgcgcccttgccgctcggccagcaggaggcgctggcgctgttccgccacagcgatccgctgcgtgaactgctcggcccggcgttctgcaccctgtggcatacctgcaaaagcgccgaactacgccgcttcgaggaacaggtcaccgccgccgaactcggctggatgctgtaa

SEQ ID NO: 427525 - DNA, 390 bp, Serratia marcescens
atgaaatttatcgtcatatcgtgtttgatattgctggttttaagcgccttcatccagttcattggctaccgtcgccataaaaaagagtttgacgctttctatcaacgttacgccggcagcggacattttattccgccctacgtcgcctttgccgatagcctcggcatgcttggaacctcattgaaagcacagtggtttctttggattctgaaaaggaaaaaaataaagggtcaagtttggctcgatgcgaaaacctacgatttcgtgcaaaaaaccgcctctcctgagctacagaagtggctggcgatggattttatacttttgctcgtagaggccattattaccaccgtgggctgtatttttatttatctcatcaaaatcaacgtataa

SEQ ID NO: 427526 - DNA, 1185 bp, Serratia marcescens
gtgcaacaacgtgaagtggtgatcgtggcggcaacgcgtacgccggtcggcagttttcacggcgcgctggcgccgttgacggcggtggaattgggcacggcggcggtacaagggctgctggcgcaaagcggcgtggcaccgcagcagatcgatgaagtgatcctcggccaggtgctgaccgccggctgcgggcagaacccggcgcgccagaccgcgctgaatgccgggctgcccgttacgacgccggcgctgaccatcaacaaggtgtgcggctctggtttgaaggcggtgcatctggcggtgcaggcgatccgcagcggcgacgccgaggcggtgattgccggcggccaggagagcatgagccagtcgccttacctgatggccggcgcgcgcgccggtctgcgcctcggtcacgcgcagatggtggacagcgtgatccacgatggcctgtgggacgccttcaacgactaccacatgggcatcaccgccgagaacctggcggagaaatacgccatcagtagagaagaacaagacaggttcgcgctgcgctcgcagcagaaggcgcaggcggcgcagcaggccgggcgtttcgcgcaggagatcacgccggtgacggtgccgaagccgaagggtgaggcgctgagtgtggggcacgacgaacagccgcgcgacaccagcctagaggcgctggcgcggctacgcccggcgtttcgcaaggagggcacggtgaccgccggtaacgcctcgtcgctcaacgacggagcagccgtggtgctgctgatgagcgcggaaaaagccgccgcgctgcgcttgccggtgctggcgcgcatcgccggttacgcttcgtcgggcgtcgatccggcgatcatgggcatcggcccggcgccggccgcgcgccgctgcctggagaaagccggctggcggctggaggaggtcgatctgatcgaagccaacgaagcctttgccgcgcaggcgttggcggtgggcaaagaactgggctgggaagcggaacgcgtcaacgtcaacggcggagcgatcgcgctggggcatccgatcggcgcgtccggctgtcgcattttggtgtcgctgctgtacgaaatgcagcgccgcggggtgaacaaggggctggcgatgctgtgcatcggcggcgggcagggcgtggcgctggcggtagagcgcccgtaa

SEQ ID NO: 427527 - DNA, 228 bp, Serratia marcescens
atgcgctccgtcgttatttcccgccatgagttaattcccctgcgtgacggtttacctgcggcaataatatttatttgttatttgctatttttattcccggataatcacgccggtttattttgggtgaaacgtgcggattggtttattttgtgctgcggttattacattatttttcttggtgttacagataaacacgtttttgctgaaattaaatccaacctgaaataa

SEQ ID NO: 427528 - DNA, 204 bp, Serratia marcescens
atgaaggttttttcagtgctcatgtcaagagtcatcatagggattagctatgccgtcattaccatgaccttgctatgcatcgcctatttcacgctgctctctgactcttcatatcatattgtttacgcagttttttcttgcattggatttgttctggcctacttcatctattatatagccatgaagttccatgatggcgtttag

SEQ ID NO: 427529 - DNA, 648 bp, Serratia marcescens
atggcaaaaggtgcgaaggaaatcgcccaagagatggcgaacgctgtaaattcaaaaagtaatttctttggcggttttatcgaaggggccatctcctttcccgttgatatgggatacctagcatatgattttatcaatacagatagccgctccataaatcgatatgacacagaaagaatgcttcgcctcattaaagctggacttgctaaccaacactcactgaccaaaatcgtaaaacttgtcgttgacgaatatctgaaaaaagtcgatgtagagaaagtcaaaaggtgggttgaaaaaggctccgggaaaattgcaggcaggtttgtaagcaatcaggttttgatggttaacttaggggcggtgctttccgaaaggatggttattcgcctcgcaacaggttatgccctaacatcactgctaaccctcggtgctatgaactcaagggccatccacacctcacgccagttacgacagcgaaatcctgaaatttacgataacttaaggcgtgcggggaatttggatctcttatattttctggtagaacccaaaacaaagccatttgaacaagcgatagaaatttggcgaaaaaacagaggcgagtttgaccgcattaccgagctattttttaaaaaggtgtcgaaatga

SEQ ID NO: 427530 - DNA, 1185 bp, Serratia marcescens
atggaacgtgctcataaaaaaaatctgctacttgaacgaataaaaaagagtaataaaaaaagaaatagtggagtaaaacagctattctccatctttaatgaacagtggaagttagttactattactgcgttcacgataggtttcttaaattattggacatatctttactccatcggcagacgtgactttatttgggactctctgggagggttcaatacatttattattttttcaatatcggtaactttgagcacaatggcattggctttctttctctatgcaccttctttattgattttcttgattcgatatgaaaaggttggccgtagagatttggagccttgtttttgccttcttatgtcatttttcttttcggtttttatcattttcttactctccatcctttttagtgaaattaagggagtgttattgattattggtatgacaatcaccttaatttttttgattttctttataattacaaggtttatgtttggttttgaggggagtaagttaaaaagtacatcgattgccatggggttgtctatctactcattgtttttcatggtaattataataaatcttagtgatatgggtagttctgaatcatggagtcagttacttgcaatgtttaccttgctgatgattcagttgcttcctggcttagtcttgttcttacctggcaaaaaaaatagtaaaagaaataaaaaagatgactttgttctgtcggtggtttttggtgtgtatataatgctcattgctatccccggtgcttttttatatgcccagtatagctctctgaagttttttggaatcattgatgttgatactcacatctttcatataaataaaaatgatttcgacaaccgtttgattgataaggttgattggagtttagataacggctttagttgtatgaaaaatggatttgactataaggaggggagtttgattgcgggggcgatcggctttcgttctggaggaaggattcttgtttgtccacctaattaccctaaggttgtgaaagcattcttgcgggagagaatgctaattattaattatataaagaaaggtatgcatgtggatttagaaaaagaaactaaaaaatgcattgctcttagtgatacgccatccttacaacaagatgtattggaatcaacttttttttatggctataaaagttag

SEQ ID NO: 427531 - DNA, 1509 bp, Serratia marcescens
atgaccattacccattggatcaacggcgagcccgccgccggcggcgaacgcagccagccggtttacgacccggccaccggtcaatcggcgcaggaggtgcagctggccgaccgcgccacggtggagcgcgccatcgccgccgccgaacaggcctatcccgcctggcgcgacaccccgccgctaaagcgcgcgcgcatcatgatgaagctcaaggatctgctggagcagcacgccgacgccatctgccaactgatcaccgccgagcacggcaaggtgctcagcgacgccctgggcgaactgcagcgcggcatcgagaatatcgaatacgccggctatgtgccggaactgctgaagggcgaacacagcaaagaggccggcccgggcatcgacagctggagcgagtttcaaccgttgggggtggtggcgggcatcacgccgttcaacttcccggcgatggtgccgttgtggatgtggccgatggcggtagcgtgcggcaacactttcgtgctgaagccttccgagcgcgtgccttccgccgccctgtatatcgcacggctggcggcagaagccgggctgccgcccggtgtgctcaacgtggtcaacggcgatcgcgaagcggtagagacgctgctgcatgacgggcgtgtcaaagcgatcagcttcgtcggttcgacgccggtggcggaacacatctatcacaccggctgtgggcagaacaaacgggtgcaggcgctgggcggcgccaagaaccacgcggtggtgctgccggacgccgatatccccggcgcggtcggcgcgctgatgggcgccgccttcggctcctgcggccagcgttgcatggccatcccgctggtggtggcggtgggcgagggcaccgccgaagcgctgatcgccgggctgcggcaacagatggccgccatgcgcgtcggccccggcagcgacaaccgcaacgacatggggccgctggtgacccaacagcattatcagaaggtaaaaggctatatcgatcagggcgtagccgaaggcgccgagctgctggtggacggccgcgaactgagcgtgatcggcgccgacggccgccccagccaaggatatttcctcggcccgacgctgttcgatcgcgtgacgcccggcatgcgcatctatcaggaggagatcttcggcccggtgctcggcgtggtgcgcgcggcgtcgctgccggaggcgatggccttgatcgacgcccacgaatacggcaacggcacctgtctgttcacccgcgacggcgaagcggcgcgctacttctccagccgcattcaggtcggcatggtggggatcaacgtggcgctgccggtgccggtggcctaccactcgttcggcggctggaagcgctcgctgttcggcgatctgcacgcctacggcccggacgccgtcaggttctacaccaaacgcaagaccgtgacccagcgctggccggcctccggcgatgcccggcgcgccagcttcagcttcccatcggggcaggggtaa

SEQ ID NO: 427532 - DNA, 804 bp, Serratia marcescens
atgctggataaagagcaggttaaccgcgccgtacagcgcctgcatcaggcggaaaagagtcgtgaacagatccgcgcgctgtcgctcgatcatcccgagatcaccatcgaagacgcctatgccattcagcggcagtgggtggagctgaagatcgccgaggggcgtacgctcaaaggccacaagatcggcctgacctcgcgcgccatgcaggtgagttcgcagattaccgagccggactatggcgcgctgctggacgacatgttcttcaacgacggcagcgacattccgatcgatcgctttatcgtgccgcgggtggaggtggagctggcgttcgtgttggccaagccgctgcgcgggccgaactgcacgctgttcgacgtctataacgccaccgactacgtcattcccgcgctggagatcatcgacgcgcgcagccacaacgtcgatcccgagactcagcggccgcgcaaggtgttcgacaccatctccgacaacgccgccaacgccggggtggtgatgggcgggcggccgatcaagccggatgcgctggatctgcgctggatctccgcgctgctgtaccgcaacggcgtgattgaagaatccggcgtggcggcggcggtgctcaaccacccggccaacggcgtggcctggctggccaacaagctggcgccgtatgaggtggagctggaagcggggcaggtgatcctcggcggctccttcacccggccggtgccagcgcggcgcggtgataccttccacgtcgactacggcccgatgggctgcatcagctgccgcttcgtctaa

SEQ ID NO: 427533 - DNA, 1278 bp, Serratia marcescens
atgcaactcatcatgagtctggtcggcatggcggtgctgatcgccattgcggtgctgctctccagcaaccgccgggccatcaaactgcgcaccgtcgtgtgggcgttcatcatccagatcggcatcggcgcgctggtgctgtacgtgccgctgggccgcagcatcctcggcagtatgtctaacggcgtggcaaacgttatcgcctacggcaatcagggcatttcgttcattttcggcgggctggtgtccgacaagatgttcgaggtgttcggcggcggcggcttcgtattcgcgctgcgcgttctgccggtgatcgtgttcttctcctcgctgattgcggtgctgtactacctcggcatcatgcagttggtgatccgcgtgctgggcggcggcctgcacaagctactgggcacctcgcgcaccgaatcgctgtcggcgaccgccaacattttcgttggccagaccgaagcgccgctggtggtgcgcccgtatatcgccaccatgagccagtcagagctgttcgccgtgatgtgcggcggcctggcctcggtagccggttcggtgctggcagggtacgcgcagatgggcgtgccgctggaatacctgatcgccgcgtccttcatggccgcgccgggcgggctgctgttcgccaagctgatggtgccggaaaccgagcagacccacgataaagacgatgcgatgaagctgattgccgaagaagatcgtccggccaacgtgatcgacgcggcggcttccggcgcggcttccggcatgcagctggcgctgaacgtcggtgcgatgctgctggcgtttatcgcgctgatcgccttgcttaacggcattctcggcggtatcggcggctggttcgattatccgcagctgtcgcttgaactgatcctcggctgggtgttctcgccgatcgccttcctgatcggcgtgccgtggagcgaggcgatgaccgccggttcgtttatcggccagaagatcatcgtcaacgagttcgtcgcctacatgaacttcggcgcctatctgcgcccggacgacgtggtggcggcggaaggcctgcaggtgctgtcggcccacaccaaggcgatcatctccttcgcgctgtgcggcttcgccaacctctcctcggtggcgatcctgctgggcggtctgggcagtatggcgcccaaccgtcgccacgacatcgcgcgtttcggtctgaaggccgtcgcggcgggcacgctgtccaacctgatgagcgccaccatcgccggtttcttcctggcgctgtaa

SEQ ID NO: 427534 - DNA, 1272 bp, Serratia marcescens
atgccgcaatttgattacctgaagacgtccattaagcaaaagggctgtactttgcagcaggtggcggatgccagcggcatgaccaaaggctatctcagccagctgttgaacgacaagatcaaaagcccgagcgcgcaaaagctcgaggcgctgcaccgttttctcgggctggagttcccacgtaaagaggttaaagtcggcgtggtgtttggtaaattttacccgctgcacaccggtcacatctacctgatccagcgcgcctgcagccaggtggacgagctgcacgttatcttgtgccatgacgagccgcgcgatcgcgagctgttcgagaacagttcgatgtcgcaacagccgacggtcagcgatcgcctgcgctggctgctgcagaccttcaagtaccagaaaaacatccatatccactcgttcgacgagcagggcatcgaaccctatccgcacggctggaacgtgtggagcgacggcatgaaggcctttatggaacagaagggcatcgtgccgagcttcatctattccagcgaagcgcaggatgcgccgcgctaccgcgagcatctgggcatcgaaaccattttggtcgaccccgagcgttcgttcatgaacatcagcggcaatcagatccgccaggatccgttccgctattgggactacatcccgaccgaggtgaagccgttcttcgtgcgcaccgtagcgatcctcggcggcgaatcgagcggcaagtcgacgttggtcaacaagttggccaacatcttcaacaccaccagcgcctgggaatatggccgcgattacgtgttttcgcacctgggcggcgacgagatggcgctgcagtattccgactacgacaaaattgccctcgggcaggcgcaatacgtggatttcgcggtcaagtacgccaacaaggtggcgtttatcgataccgatttcgtgactacgcaggcgttttgcaaaaagtacgaagggcgtgaacaccccttcgtgcaggcgctgatcgacgaataccgtttcgatctggtgatcctgctggaaaacaacacgccgtgggtggcggacggcctgcgcagcctcggcagcaccgccgatcgcctggcgttccagcgcctgctggaggagatgctgcgcgccaacaacatcgagtacgtgcacgttgagtccagcgattacgaagagcgtttcctgcgctgcgtcgagctggtgcaacagctgctggcggcggacgccggccggttgagcgcgcccgcccatcgtcacgcggcaggctga

SEQ ID NO: 427535 - DNA, 582 bp, Serratia marcescens
atgcgttgcgcaaaaagccccgtgccgggcttccatgccgcacgcctgaatatcggtcacatgttgctggtcgttttgttggtgctgctgacgttgcccgggcctgcgcgcgccgccgatgctccctatcaaaaacgcacgcacgccgtgacgaccgtggtggtcggcatcatcagctacgcccgctggccgcgtgaacccaatccgatccggttgtgcgtgaccgcacccacccagtatgccgaagggttgttcgatccgatcctgctcagcgccccgcgtccgattaaagccgagcgcgtgccgttcgacagcccaacgctgagtaccggctgcgatgttatctacttagggaacatcaccgccgcgcagagacaaaatttcatgcagcgcatttccggcaactccattctcagtatcagcgagaacgatagcgaatgctccgccggcagcgcattttgcctgcagatcgatggggatcaggccagcttcaaggtcaacctggacgccctggcgcgcagcggcgtgcgcgtccaccccaacgtgctgcagctggcacgcaaacaggcgccgccgctatga

SEQ ID NO: 427536 - DNA, 234 bp, Serratia marcescens
atgatgaaaaaaattctgcttgcctgctgtggcaccctgctgagtggcgccgcgtatgccgatgccgtcagcggccagatcggcgttaccctgaccattgaaccgcaatgcgccgtgcgcctcgaggccgccgccccacaggccgaatgcagccacgcaacggcgcagccgaacatcatccacagcccaccggcacaggagagcggtgcagaagtgatcctcgtggaatggtag

SEQ ID NO: 427537 - DNA, 1191 bp, Serratia marcescens
atgcgacagcgaatcatcattgtcggcggcggaaccggcggcaccatcctggccaatttattggccgcaaaattgcaccgggaaattattaataataaagtcgagttattaatgatatcggattcaccgctgcattattacaaaccggcgtttatgtatgtcgcgttcaatacttttttcaagcaagaactcatgcgctcacagcggagtttattgcggcccgaaatacagtttattgttgataaagcggaatctttcgatttaaagcagcgaagtctagccacgcaaagcggtaaaatttattcctatgactttctggtctttgcgaccggctgtgtcccctggccagagcgcatcgagggattggcgcaggcgggcgatcatttttaccagtatcaggccgccaggcggttggcgcataaactggctaccatcgagaaagggcgtatctttatcaccgtttccttccccgaaacacccaatgtgccccatcagtgcggcattgcaccgattgaaaccaccttgatgctggacgactacctgcggcggcgcggcgtacgtaaggcggtggagatcgtttatacctacccgaccatttcccaactgctgcgcaactgcctgtttttgcagcggccaaccggcgaagcactgcccgccattttcgcggcgcgcgatatctaccaccagcgtggctttacgctcaatcgggtggatgcgcagcgcaatatcgcctgttccgctgagggggaagagcagccgttcgacattctgatggcgacgccgccgattcgcgcagtcgaggcggtgcgcaataccgggttgagcgagagtcaaaacggtgaaggctggctgccgaccgatcatcaaacgctgcaggtctatggccagcagggcgtgtatgtcataggcgataccgtggatttgccggtcagcaaggccggcggttcttgccataatcaggctccggtcattgccgacaacatcgtggcggaaatgcggctgggtcaaaccgtgagccattatgacggcaaggtgcaggcggtcgcgcaaatggggctgaatgccggcatgccgctggtgtacgactaccgtcacgacgtgctgccgacgcccgccaccaaggtgggcggcatgctgcgcaatgggtttaaccgcggtctttactgggccacggtaagggggctgatatga

SEQ ID NO: 427538 - DNA, 405 bp, Serratia marcescens
atgacggaaagcacggtgcatgcggctgacctgcaatcattggcggcgttgctcgagaaactgcagccgctgctggcgggcggccggttggataacgtggtcgatctgctgtcgttgctgtcggacgtggtggatattgccgacaacgcgctggtagaaaaactggcaggcgtgtttgaagggctggttacggtcggttgggagggagggactgcgttgaagatggcgcacagcgagctgcaattgaacccgccgcccgccaattttcgtgcggcttacgccttgctgaagcatccggatactttactgggcatcatgctgctgctgcgtactctgcaaatcatcggcgggcgcacgcgggacagcgcgttgccgctctcgctccaggatgagccatcgaattaa

SEQ ID NO: 427539 - DNA, 1194 bp, Serratia marcescens
atgtccgccatcactggccacgctttcgccacccgcgccattcattacggctacgatccccagcagcatcagggagcgctgtgcccgccggtgtttatgagttctacctttacctttcccacggcggaatatggcggcgcctgctttgccggcaccgagtcggggtacgtttattcgcgcatcgccaacccgacgttaaacttgctcgagcagcgcatcgccaacctggaagagggggaagcggcggtggcgttcgcttccggcatgggggcgatcaccgcctgttgctggacgttgctcaatccgggcgatgagctgatcgtcgatgaaacggtgtatggttgcaccttcagctactttcatcacggtctggcgcgctttggcgtcaagataacccacgttgatatgacccggccggagcggctggcatcggccattggtccgcatacccggctggtgtattgcgaaactccggccaatcctaatatgcgcttgatcgatatcgccgccgtggcggagatcactcatcggcatcgggcgttgctgctggtggacaacacctactgcacgccctatctgcagcggcccctgacgttaggtgccgatattgtggtgtactcggcaaccaagtacctcggcgggcacggcgatctcctggccgggatagcggtgacgagcgaggcgctggcgcaggagatacggttggagggactgaaagatatgaacggggcggtgttgtcggcgcaggacgccgcattggtgctgcgtgggttgaagacgctgccgctgcgtatggagcggcactgcgacaacgcccagcgtctggccgaggtgttgtcggatcatccggcggtggcgcgggtttactatccaggcctggcaagcttcccgcagcatgcgttggcgcagcggcaaatggcgcgatacggcggcatgctggcgtttgaattgcgcggtggcatgacggcgggcattcgtttccttaacgcgctgcagctcatcttgcgtgcggttagcctgggagattgtgagagcctggcgcagcatccggccagcatgacgcactcggcctacagcccggaagaacggcggcggcatcatatcagtgaaggactggtgcgtttgtccgcggggttggaggcgttcgaggacctgcgggcagatgtcctgcaagcgttggcgcaggcacaataa

SEQ ID NO: 427540 - DNA, 993 bp, Serratia marcescens
atgtcatacgctgttaccgcgcgagcggcgttgttcaccctcgctgccgcattcacccttagcgcgccggcgcaggccgccgtcagcgcagactgcacagaaagcagcataacgctgccgcccggcgcactttaccccaacggcatcgcccgcgcggcggacggtacgctgtatgtcgggctgatcaccagcggcaacgtgctgcgcaaacggccgggtcaggcgtgggaaaccttcttccccggcgctgacacggtgttcgcctcaaacgcgctgcggctggacgaacggcgcgggctgctgtgggggaactcgccggactttctctccggcggcaaaacgcgcgccaaccgcatctatgcgctgaacgtcgtggatggcaccctcaaccgcagcctggcgctgccggcgggggaaatgggcaacgatatcgtgctcggcgcagacggcacggtgtacgtgacggaaacccgcggcggcggcatcctgcgcctgcggccgggcgaagcggccttcagtacgctgtatcgggatccgcaattggcggctcccagcgggttgggggccgccgggatcgtgctgctcgacgaccggctgatggcagtcgccaatttcggcaccggtaagctctacgccctcagctataacgatccaaagccgcagctgacggaaatgcagctgccgcgcctcatcgaaaacccggacgggatggggttggcaccggatggcgcgctgatcgtgctggaaaacgggatccagagcggccaggggcggatcctgcggatcccttcccccaaggcggcaggcatgcaccggattgagatcttgcgcgaaggcatggaatcgccggtcaacctgactatcacgccacaaggctgcgccttcgtcagcgaatcgcgcatccgccaccgcctgctgcccggccatgaaaccgaagtgcccgacagcttccgcctctatcaactgcctttgcctctcaccgccgcgcaataa

SEQ ID NO: 427541 - DNA, 2406 bp, Serratia marcescens
atgtcacagcctacgctcaagaaggatgcttttctggcggcgcttgcccgccagtggcaacggttcggcctcagttccgcacagcagatgacgcagcatcaatggtgggaagccgtcagtgcagcactggccgagcagttggccgcgcagccggcgccgcgcaaaagcgccaaaccgctgcgccatgtgaactacatctcgatggagtttctgatcggccggctgacggcgaacaacctgatcaacctgggctggtacgacaccgtcgagcaggcgctggcggagcagaacgtcaagctggcggatttgctggagcaggaaaccgatccggcgctgggcaacggcgggctggggcgcctggcggcctgtttcctcgactcgatggcgacggtggagcaacccgccaccggctatgggctgaactaccagtacgggctgttccgccagtcgttccagggcgggcagcagcaagaggcgccggataactggcagcgcgagagctacccgtggttccgccacaacgccgcgctggctgtggatgtaggcatcggcggcaagctggaaaagcaggccgacggccgcgaactgtggcgcccggccttcaccctgcgcggcgaagcctgggatctgccggtgctggggtatcgcaacggcgtggcgcagccgctgcgcctgtggcaggcgacccatcagcatccgttcaacctgagcgatttcaacgacggcaaattcctgcaggcggagaagcagggcgtagaagccgacaagctgaccaaggtgctctacccgaacgacaaccatcaggccggcaagcgcctgcgcctgatgcagcagtatttccagtgcgcctgctcggtggcggacattttgcgcaagcaccatcaggccggccgcaagattgaagagctgccgaagtacgaagtgatccagctgaacgacacccacccgaccatcgccattccggaaatgctgcgcattctgctggacgaacaccagctggagtgggaggcggcctgggcgatcaccagcaacaccttcgcctataccaaccacaccctgatgccggaagcgctggagtgctgggatgaaaaactggtgcgcagcctgctgccgcgccatttctccatcatcaaacagatcaacgccaggttcaaaaagcaggtggataagcactggccgggcgacgaggcggtgtgggccaaactggcggtgcatcacaacaagcaggtgcgcatggccaacctgtgcgtggtcagcggctttgcggtcaacggcgtggctcagctgcactcggatctggtggtgaaggatttgttcccggaatatcaccagctgtggccgaacaaattccataacgtcaccaacggcatcacgccgcgtcgctggctgaaacagtgcaacccggcgctgtcgggcctgatcgacgagacgctgaaggtggaatgggcgaacgatctcgacgcgttgcgcgggctggaaaaattcgccgacgacgcggcgttccgccagcgttatcagcagatcaaacgcgacaacaaggtggcgctggcccattacgtgcacggcgtgatggggttgactctcgatccggacgcgattttcgacgtgcagatcaagcgtctgcacgagtacaaacgccagcacctgaacctgctgcacatcctgtcgctgtatcgccagctgcgcgacaacccgaatctggacatcgtgccgcgcgtcttcctgttcggcgccaaggcggcgccgggctactacctggcgaaaaacatcatttacgcgatcaaccaggcggccgagaagatcaataacgatccgttggtgaaagatcgcctgaaagtggcgttcattcctgactaccgcgtgtcggtggccgaactgatgatcccggcggcggatatctccgagcagatctccaccgccggcaaagaggcctccggcaccggcaacatgaagctggcgctgaacggcgcgctgacggtcggcacgctggacggcgccaacgtcgaaatcgccgagcaggtgggcgaagacaatatctttatcttcggcaataccgtggagcaggtgaaggcgatactggcgaagggctacgatccgctcagctaccgcaagaaagacaagcacctgaaggcgattttggacgagctggcgagcggcgcgttcagccacggcgacaagcacgcgttcgacatgatgctgcacagcctgctggaaggcggcgatccctatctggtgctggcggacttcgcctcgtactgccaggcgcagcgccgggtcgacgaactgtaccgcgaccgggacgaatggacgcggcggactatccttaacactgcgcgcgtcggcatgttcagctcggatcgctcgattcgcgattaccagcagcgcatctggcaagccaaacgttaa

SEQ ID NO: 427542 - DNA, 1104 bp, Serratia marcescens
atgggcattttgttgttggcggcgaacggggccgcttgcgccgccgacgacggcattcccgccctgttgaagtttgccgaacaacggcaggcaccgccagccgcgctcaaggaaaaagctgcgcgtaaaccggcgcctgcaccggccgccaaaccggctgccatcgtcgaggcagacggcgttcgtttaacttcactgaagcagtctttgcaacggcaggcggagaaaatccgtcagttggagcggcagttagcggcggctcaggcggcgccgaaacgggagcggaccgtcgtcgatattcggccgctggtcgatgccctgaagggattgcggcaagccgttgcgccggtgcctgaggtgggcacattggccgcttcgctaacgcgggccgaacagcgcagcgcaaggttggcggcgcagttggcgcagcagcagcagcggatcgacaccttgctggccgagcggcagcaggccaccgaaccgcccttgctggccagcgagtcggacaaacaggcgtatgccgccggcgtatcgctcgggcgcgacattttgcatctgcagcaggagaaccggcgcgcagggctggaggcggatcggcagctgttgctggcgggcatcgccgataccctggccgggcggttgcggctggatgaagccgctatcgacagcgctttgcacacggcgcagcagcggctgcagcaagcgcaacagacgcaaattgcccctctggacggcaaggcctatctggccgatttcgcccgtcaggagggggtcaagcaagatgcgctcggtttctactatcgagtggactatgccggctgcggggcgatcggcgccgacgatcgggtggatatcgtggtgcgcgaaagcctgaccgacggccgggtggtcaaagatatggaactggcggggacggtgatctcgcagccgttgacgcgctacccgccgctgtttcgcgccgctatcgaaaagctgcagcgccacggttcgatcacgttggtggtgccgccggcgctggcgtacggcaagcagggcagtccgccgacgatccctccggacgccacgatgatttataccctgcgcatcgctgacgtgcagtcatga

SEQ ID NO: 427543 - DNA, 414 bp, Serratia marcescens
atgataacgatgattaatgcttgcggcggacgccgcacggtgggtttgactatattttttctgtcttttatggcgttgtctggctgtgcgggcggtagcaagacaaaactgaactctgtgaaaaaaatttcacagaacaatcctaatgataaatccgatgagcaacgcattgcgctttgccaacaacgagttaattcgttaaagaatattaatccgcaaagttaccagaagcgcatcgcctattttaacggtctactttccaatgcttccggatatgccggggtacgtggcaacgtggatgagagcacccgtaaagcgattgatgctctttatcaatataaaaccgagaaattctgcgccgacgtcgaacatgagctgatgtccgatctgtccagccgtgttgagaatctgtag

SEQ ID NO: 427544 - DNA, 531 bp, Serratia marcescens
atgaaactgaataaattaatgctggcaaccgtgattgctttcgcttccgcatctgttgcgcatgcagcaccaaatcagggcagcggtaaagtcacctttaccggcgaaattatcgatgcgccatgcagcgtcgcaccggaatccgttgatcagaccgtgccgatgggccagatcagcagccgtatcctggccaaccagggcaaatccagcatgcaacctttcagcatcgaactgaaagattgctccatttccaccatgaaaaacgtcgaagtgacctttaccggcacgcctgatccggtcaacagcaaactgctggccctgagcggcaccgcgaccggcgccggcatcgtgatttacgacaacctgcactccaaagaagtggaactgggcacggcgactgacggccagggcctgaacaacggcgacaactcgctgaaattcgccgcttacctgcagggcagcagcgcttctgccgccgtggtaccgggcgacttcaccagcgtggcgaacttcaccctggcttacctgtaa

SEQ ID NO: 427545 - DNA, 552 bp, Serratia marcescens
atgactatccgcctttgcggcctgttgctcatcacgctctgcgtaggcagcacggcggcggcagcgaaaaatcagggacacggcaaagtcagcctgggcggcaccatcgtcgaaacgccgtgcggcatcgccagcgacagcctggaccaaaccgtcgattttggcctgatctccatgaccgacgcctcacaggacggacaatcggtgctgctcggcagccgccgccatttcacgataaaactggtgaactgcgagctggcaagccaggtgaaacctgacttcgtctatcgcgcggccaacgtcacgttcgacggcaccgccgacagccgtgatccctctctgctcggcgtttacggcgaggcgaagggtgtggctatcgagctgttgaccgatgccggtaccccgatcccgctcggtagcacgacggcggattaccagatcgtcgccggcgacaacacgctgcgcttcggcgcgcagttgcgcctgcatcccgataaggcgcgggcgggcggcttcagctctctggccaaattcaccctgtcttatctctag

SEQ ID NO: 427546 - DNA, 2502 bp, Serratia marcescens
atgagtgattatgctatgacgtcattactgacacggaaacacctacctctcctcgtcattctatctttcctctgggtgcgtccggcattttccgccacggaattcaataccgacgtcctggatatcggcgagcgcagcaaagtggatctttcgcgcttttccgacgccgactacgtcatgcccggcgcttatctgctggacatcaagatcaaccagaaaacgctgcctcagcgcagcattcagtatttcccgtcacaggataacaagagcggcagccaagtgtgcctgccgcctgatctggtggaaaaaatggcgctgaaagaagaagcggccaaaaaagtcaccctgtggcacgacaaccagtgcgccgacattcgcgcgatccagggtgcaaccgtctccgatcgcatcggtggcggcgtgctggcgatcaccatcccgcaggcgtggatgaaatactccgatcccgactggacgccgcccgagcagtgggatgatggcattcccggcctgctgctggactacaacctgagcggccagttcggcaagcaaagccacaacaacaacaccgcccagaacctgagcagttacggcacgctgggtgccaatatgggcgcctggcgcctgcgcgcggactaccaggccaattacaatcagcaagccggcgatcgcagcaccggtttcgactggaaccagatctacgcctatcgtgcactgccgatgcaggccgccaagctgacgctgggtgagatctacctggattccggggtgttcgacgcttaccgcttcaccggcctcaacctggccagcgacgagcgcatgctgccgcccaatctgcagggttacgcgccggaagtgcgcggcatcgccaaaagcaacgccaagatcaccgtctcgcaggaaggccgcacgctgtacgaaaccaccgtgcccgccggtccgttcgtcatccaggatctcaacagctcggtacgcggcaaactggacgtcaaggtcgaagagcaggacggcaccgtctcgaccttccaggtggataccgccaccattccgtacctgacccggccgggctacgtgcgctacaacgtggcgctgggcaaaacctctgcctacgaccaccgcacccaggggccgctgttttccgccagcgacttctcctggggcctgagcaacgcctggtcactgtatggcggagcgctgctcggtggcgattataacgcctgggcgctcggcctcggccgcgatctgaacgtgttaggcgccatgtcggtggacgtcacccagtcgatcgcccgtctgcccggcgaaccgaccgccagcggcatgtcgttcaagctcaactacgccaaacgcttcgacgaactgaacagccagatcaccttcgccggctaccgcttctcgcagcgcaaattcatgaacatgtcgcagtatctgcaggagcgctacggcgactacgacaagaattacaacggccgccagaaagagctgtacaccatcaccgccagcaaaacctttatggcggaggacagcgccaaggcgatcaccgcctatctgacctactcgcaccagacctattgggacgcgcgaacccaggaccgttacgggctgtcgaccagcaagctgttcagcatcggcgatatcagcaacatcactgcctcgctgtcggcttaccgtacctactaccagggccgcaccgacgacagcgtgatgctcaacttcaccgtgccgatcggcgatcgccggcgcgtcggctatgcgctgcaaaccaacaacggcgacatcacgcagaccgcgtcgtacaacgactacagcgatccggacaatacctggcaggtcagcggcggctttaatcagtccggcaaatcgctggcgcgtgggtactacacccataacgcctcgttcggctcgctgaacgccagcgcctcttaccagcaggacagctattcgtcgatcggcggctcgttccgcggcggcctcaccgccacccgacacggtatcgcggcgcaccagaactcgagcaacggcggcagccgcatgatgctcgacaccgacggcatcgctggcgtgccgatcaacaacggccgcgcctacagcaaccgcttcgggctggcggtgatttccgacatcaccagctactacaacaccgacacccgcatcgacgtcaacaaactggcggacgacgttgaagccacccgcgcggtggtgcaaggcacgctgaccgaaggcgccatcggctaccgccacttcgaggtggtaaaaggcagcaagctgctggccaccattcgcctcgcggacggcagcgaaccgccgttcggtgccgcggtgctgagcgagaaaggccgcgaggtcgcggtggtcaacgacggtggttcggtctacctgaccggcgtgcagccggaggaaaaactggacgtcgcctgggaaggccaacgccgctgccgcatcgtgatcccgggcgccgccaagccgctggaccagctgctgctgccgtgcgccaccctgtaa

SEQ ID NO: 427547 - DNA, 747 bp, Serratia marcescens
atgaacaaacacccgataacgctactgaccgccgccggcctggccctgagcgccgtactgcccaccgccgacgcggcgatatcgctggatcgcacacgcgccgtctatgtgagcgacgccaaatcgatcagcctgaatatcgtcaacgaaaacaaagagctgcctttcctggcgcagtcctggctggagaacgaacagcaccagaaaatcacctcgccgctggtggtactgccgccgttgcagcgcgtggaaccgagcgaacgcagcgtggtgcgtatcaccaagacgccggaggcggatcgcctgccgcaggatcgcgagtcggtgttctacttcaacctgcgcgagatcccgccgaaaagcaccaaaaccaacgtgatgcagctggcgctgcaaacgcagatcaagctgttctaccggccgaaggccatcgtcgcgcccaagggtgaagtgtggcaggaaaagctggtgtttcgtaaaagcggcggcaccgtcaccgtcgataacccgacgccgttttacatcaccctgaccggcatgacgcggcagacgcaaaaacagggcggcggcgcaatcggcggcttccaaccgctgatgctgaagccgaagtccagcgaaagcctcaagctgcacgacaccggcatgaacaacttcgtcatcacctacatcaacgactacggcggccaccccgaactgcgcttcgcctgcaacggcagcgtttgcaccgccgtgcccgagaaaaaataa

SEQ ID NO: 427548 - DNA, 612 bp, Serratia marcescens
atggctgaattcaccgatcgactgcgcccgctgctgctcggcgccctgctgtgcggcggcagcgcgatggcggcaacgccgctgggcgtgatcgaaggcaccaccggcaccgtcagttttcacggcggcctgctcagctccccctgcagcctgacgccggatagccgggatcaggccgtcgatctgggcgacgtcagcgcacgcgacttccgcaacgccggcgatcgcagtacgccggtgcgttttcgcctctcgttccgcaactgcctgctgggcgcgcgcgcgttggcggataacccggccggcccgcgcaacggcgacgccggccgcctctatctgcagggagagcaggccgcgacgctggtatttctgggcgaaagcgacgtcgacaatccgtcgctgctgaagctgaacggcggcgtacagggcatcggcctgcggctgcaagaccagcagggccaggcgctggaactgaaccagcgcagccgcccctacattctgcaacccggcagcaacaccctgtggttcagcgccagcgtggaatccacccagcgagcggtgatggccgccgggttcgccgccgtggcgcacattcaggtgatttacctgtga

SEQ ID NO: 427549 - DNA, 1005 bp, Serratia marcescens
atgaaaatgcaactgaccaaactttgcctgccgctggcgatcgcgctggcggctcccgccgcctgggccaacggctacgtcacgccggacggcggggcgaaaccgttctatatcgatctgaatcaaagcaacatcaccaaccaggtagggttcaccaaagtgttcccctattcattaggcggcacctataccggcaaggcttactgcgacacgccgatccccagaagcccacacttttacaagtcggattcggcgctccccccatccagttacggcaacggcttcttgcagctgaacgacttcctggatttaaaagccgaggtgtggatcgccggctataagaaggcctatgtcaccgtgcctttttacaacgaatccaacgagtaccccaatcacagctgtacgccgccctatgtgcaggtcaacaactatgaaagcggctccaaaggccgcatcaccttccgggtgcgcaaaaaaatcatcaacggcgtcgagattaacgatcggcagatcatcgagatgttcggccgcctgggctcgaccgacggcggtttcgggcccaacccgatggcgcaggtgtttatccaatccgcgatcctctacgtgccggataaatgcgtggtgaacgaaggccagctgatcaacgtggagttcggcgagatcggcggcagcgatcttaacggttcgaactacccgcaaagcattccggtgcgcttccagtgcgaaggcggcagctttgaggacggtacgctgaacatcaaactggcggtctcaggctcagcggcctctttcaataacggggtattcaaaaccgacaagaacgatctcggtatccggctgacgcacaacggccaaccggtcatcccaaatgagttttacccggtgccgaatatcggcaacggcggctcctggaacctggtggcagcaccgttcgccaatggcggcgcagagatcggcgaaggggaattcaacgcatcggccaccatcgtggcggcattccagtaa

SEQ ID NO: 427550 - DNA, 540 bp, Serratia marcescens
atgcgtctacgcgctttagcgctgctgagctgcgtgccctggtggtttaccgccatgccggcgacggcgaacaccgagcttatcggcgcgccggtgcagttccacggcaccgtggtgagccgcccgtgcaatatcgaaccgcagtccgccgatcaactggtggagatgggcacggtgatcgtcaaaaccctgtaccgctacggccacactacgccggtgccattcagcatcaagctgaccgactgcaagaccacggtattcaaatccgtcagcgtgaccttcagcggcaccgaagacggagagctcccgggcaagctggcgatcaacaacggcgcgaacggtgccgccatcgccctgttcgatcatcagggtgccgatatcgatctgaataaggccaccagcgccgtcgcgctgcaaaacggccccaacagcctgaatttcaccgcctatgtgcaggggcggccgagtgcgattcagaaccaaagtattaccgaaggcgaattcacttccgtcgccaattttgtgctggcgtaccaataa

SEQ ID NO: 427551 - DNA, 2181 bp, Serratia marcescens
atgaaagccaccactaccgcccaatcggccccgaaccacgcactcagcaccggcattctgcaggcgatcgactgggtggacgccgcgcgccggcagtccacccgtttggaacaggaggcggatcgcctgacgctgcgcctgcgccgttgccataaccgcgcgctgcaattggcgaatgcgcaacctgagcaggtcgctatcggcctgtacggccacaacgccgccgccaaggcccacctgctggcggcgctggcccccggcgcagaaaggctgcacgcagacgccgcgctggcggttcgttactgcgccgccgcgccgtcgccgtgcgccgagtatcctctcgccctcgcgctgctcgatgaagcgcagtggctggccatcaccctcgatgccgccgcgatgggcggcttccgactggactgggacgcccgcgcgatcgccggctatctgcaagcgttggcgcgccaccgccaaaccgtcgccctcgacggcctcagcgacagcgatgtgctgacgctgtgggatagccaacgccgccacggcgacaaggggcaacagacgctggacaggcatttctggccacaggccgtggcgctggcgccgcagttgagcatcgacgatcgcgcgcgcctgtttgcgccgctgtgggaagaggaagcaacactgacggcgcgttatcgccagctggcacacacgctgcatgccctcggcgacagccgacaggttcatgctccgcaccgcgccttgccgctgctgaccgcgagcgccgcagcagaaaacgctacgatcgtcgtgatggccgaacacggcggtaaacgggagatcgcgctgagcgatctgacctggctgaccgccgaagtgactaccgttctgccgcaaacggcgcaggcggccctgcccgccgacgtggcgctgatcgacctgcccggcagccgcgcctgcccgcaggcggaaccgacgcagcggctgcaacaggcgaaacgcgcccatttgctaacccgctgcgcagacggcctgcacgccaacctgctgctggtagccgatgccgccgccatgccgcaggacgccgcccgcatcggccaggcgctcgccaactgggtcaaccagactcagggggaaaccccggcgctgcgccagcgccgcaagcctggcctgatctgggcggtcacaccgttcgaccaacgcggggaaggcaaagcgcgccccgacgacgccgtacagcgccaggtcggcgaacccggcgacagctgggccacgctgctggcgctggatgaacaggattgccgccgtatggtgagctacctgaccgctcaggcgcgcccggcccagaagcaagcgcgcctgctcgaacagcgcgaagagttgcagcgcgagctgacggaaagcctgctcggcaactggctcaccgccgccgatccacacgcggcgcagcaacgcggccagcagctgctgcgagcgctgcaggcgcaggccggccgccacggcgaactgctggaacggctgttaccgcagcgcgatacgttgcgccagctttatcagcaacagcagcacgcagcgccggccccgacagcgacgccagcgccgttcgggctcgatatcgatctgttcggcgcaccggaaaccccggcgcccggcgagccccccgcgtcatcctttgccgcgcgggtattcgcggattggatcaaccatctgcgtagcctgccggacagccgtcggttgctggagctgctcggcgtcgaaaagccgcacctggaactgctggttgatgcgctgatcggcgccgcctgccgcctgcggctcgatgatgagctggagaacgcgctgtgcgccgggggcctgccggaacagagcgaagatcggcaaatcagccaggcgctggcgatactgggcgactttgtcgcctggctcggtttccagcggcgcgatgcggcaacgcgccccgagagccgcgtcaatcccggccagccgatctttaccccaccgccgcagccggcggtggactggagccgccagcagcggttaacccggctggcaccgacgccgaccaaaaacaccgcgttttatatctatgactggctgatcggcctgcaaaccctgctggcggagaatgcggcgacggagagcgcactcggcgaggcgcagcgcgcggcgttggaagagatcgtggcgactctgcgctaa

SEQ ID NO: 427552 - DNA, 684 bp, Serratia marcescens
gtgaaaactgtcggtgacagcaagctgaaagaagcgtttatcgaagctcacgatctgcgaacggcgctttcgcccccgctgctggccgctttgcgcctggtcagggtcgaggccggtgaatacctggtgacgcaaagcgatcggttgacccacctgttttttctcgtgcagggaaaattgcaggttgagaattacgatgtgaacggcatgcacatcgtcttttccttcgaaacggatttctccgtgataggcgatctggagctgttttcccaggcgcagcgggcggtgttcagcaccgttcaggcggtcacggacgcgctgatcttcacgctgcctatcgaggccatcaaagagcgggccatgcacgatcctgttttcctcgcctttatgtgccggcagttgagcgacaagttgcttaacgcttcattgctgcatgcgagcggcggcttaacggcagaatataagctgcgcaaatttttgttatttaaaataaagcaggaaggcgtgcagattcagctcgaaaacagggagttgctggcgggcagattagggatctccgtcaggcagctgagccgcgcgctggcgcagctcgcggcggacggtattattcagtttaaaaacaaatcgctacgggtggtggatagccaacggctggccgacatcaacgggagcgccaggatctag

SEQ ID NO: 427553 - DNA, 954 bp, Serratia marcescens
atgcgacatattttgatagataccgataccgcctccgacgatgccgtcgccctgctgatggcgttgcgcgagcctgacgtgagggtggaagcgatcaccacggtcgcaggcaactgcccgcttgaacaatgcgtcaaaaatgcgcttatctgcgtggaaaaagcgggaacctatgcccctccggtatacgccggcatggcgaaaccgctgttccgcacgcgctatcactcgcaccacattcacggcgaagacggcatgggcgacatggccttgcccgacccgcagctgaccgccgcacccattcatgccgtagacgccatcatcgactgcgccgcacggctcaatggcgagctggaaatcgtcaccctcgggccgctgaccaatctcgcgatggcggtgctaaaagcgcccgcgctggccgaacaagtgaaaagggtttatgtcatgggcggttccgggctgacaccgggcaatattaccccgctggccgaatttaacttctacgccgacgctgaggccgcccatctggtgttgaatgccgggctgcccctcaccctcgtcggttgggagatcgggatgggagaagcgtttattggcgaggacgatattgaacgattgcatcatctcggcgaactggggcgctttgccgtgcgctgcaaccgcatgctgatggcgttcaacgccgggcgcacagagcgtaaaggctttgatttgcccgatccgaccaccatggcggtggcgctctacccggatatcgtcgagaccagtctggaggcgtattcctgggtagaatataaaagtgaaaggtcttacggccattacgtcattgattccacccatctgaccggcgaaccggccaatgcccgcgtgatcacccgcattaaacccggcctgtttaaagaaaaactgttttcgttgttatctcagccgttaatgaataagtggcccgtatga

SEQ ID NO: 427554 - DNA, 993 bp, Serratia marcescens
atgaaattcgatccaagaatattgaagaaagtggaattacacgtccatttggatacctgtttaagctaccactatgtcaaaaagatcgacccgcaaataaccagaacggcctttaatcggcaatttatcgcgccgaaacgatgcgccgatctcggagactttttaaacaagatcgcaccgcaaatagacctcctgcagacgcgccaggcgataacgctggccgtcgatgacttgttcgcgcagctggcggcggataacgtcatctatgcggaagtgcgctttgccccgctgctgcatacccggatggggttaagcggtgaagcggtggtcgagacggtgctcgccgcgatgcgtgacgccgcgcaaacttacggcgtcgccaccgggctgatcctgtgcacgctgcggcatttcgatgcggccgccagcctgcaaaccgccgggctcgtggttaactttctgggccacggcgtggtcgcgctggatttggccgccgacgaagcgcgttacccgctggccaatcacgtagcggcctttcgggcggtgcgcgaagccggcggcaacgtcatcgcccacgccggcgaggcgaagggcgccgacagcgtacgggaaacgctggattggctgcaggtgtcgcgcatcggccacggcgtcaggagcatcgaggatgctgcgcttatcgagcgcctgataaccaccggcgtcctgctcgagatctgccccagctgcaatctcgtctgcaatctgttcgacagcatcgacagtcacccgatagaccggctgaaaaggatgggagtgcggctgaacgtgaataccgatgcgcgcaccgtcgccgataccacgctgaacaaagagtaccagctgttgcatgacgccttcggctggcaggatgacgattttaaccgcagcaaccgacaggcgttggaagcgagttttctcgacggcgatactaaaatgaaattaatgaatcagctcaaggccgggccaatgtga

SEQ ID NO: 427555 - DNA, 1785 bp, Serratia marcescens
atgaagctgacgacctttaagaacggcagcaggctggcgatcccggccatcttcgccgcgctgtttctggtggcttcgaccgtcacgctctattactacagcgccaccctgtcgaagaaagggctgtatgccatcgccggcacgcaggagaattactcgtggtcgatcgccaagttctccatcaagctggcggaattcgacaccttcgttgagcagcagagccacgctccgcaggtcgacaacgacaatctgcggctgcggttcgaaatcctctattcgcgcttttacgtgctggaaaccgtctccgaatcgacccagccgctgtacgccgagccgggttacccggaagtggtcaaacagatgcgcctgcagatggatcgcatcgataagctgttggacagcccgaaaatcgacttcgaccaggttttcgcggccatgaaggccatcaagccttacgccatcgaaatggccaacctgaccgaccacgccgaggtgaagcagcgcaccgccgcctatgaggattacatcgagaaacggcacattattttctatgggctggtgatcgtcatgttctcggtgattgcgctgatcgccatcaccctgatcgtgttccgccagcagcggttgaccattcgccagcaggccaaggccatcgaggcggagaaagcgactcgcaccaagaacgccttcctcggcgccatcggccacgagctgcgcacctcgttacagagcgtgatgtcggccatcgacgtactggtgaacacccgggtgtcggcggagcatgcggacactttccagcggctggagaccgccgcgcagcaaatcgaaagccagatgaaagatctgaccgactatgcgcacctcgacagcggcatgatggaattgcgcatcgtgccgttcgacgcgcagaagctgatcgcggagaccgccaacgaaatcgccaccctgacccgcaaagaacaggtcaaactcagctgcgaggtggagtgcagccacctgctggtgcactccgatccgctgcgcatccggcagattatcgtcaacctgctgaccaacgcctacaaatacaccgaaagcggcagcatcacgctgcacagctgcctgcgccgccaaccgggcggcagttcgttgatcatcgaagtgaccgacaccggcatcggtatcgaaaaagaccagctcgatcagatcttcaagccctttacccagttggatcagtcgcataccaagcagtatgccggcgtggggatggggctggcgatcgtgcatggcctggtgacgttgctcgacggcaccatcacggtgtacagcgaaatcaagaagggcagcacctttatcgtcagcattccggtgcagatcagtgaagacgaacgtgccgacgagcccgccgccgccaatacttctctgcagcagaagccgcagcaggtgttagtggtggacgacaacaggtcggtgggtgacgcctttgcggcgctattggacaagctgggctatcagcacgaactgtgcgactcgccggaacgcgcgctgcagaagctgctcagacgcccttacgacgcgctgttgctggatctgcagatgccgggcatcgacggggccgccctggccaggcagctgcgcaaccgtcgcggccccaaccgccatgtgccgatcatcggcatcagcgcctacacgccggagcagctgacggcggaccagcgcgccctgttcgacaactacctgatgaagccggttcggctggatgcgctgtctagcgcgctggccgaggtgttccccgctaaagattaa

SEQ ID NO: 427556 - DNA, 3099 bp, Serratia marcescens
atgacaacaacaatgggttttgatagcaaaggaaacgttcgtcgctcaccgtggcggctgaacgcgctggtctgctgcatggcgctggcggggtatgcgcaggcagcaccgcacgaggtgaacggccaagccggcgatccggccagctggcgcagcgccgaattcaacgccaactgggggctgggggcgatccacgccgatgaggcctatgccgcaggctataccggcaaagggcagaaggtgggcattttcgataccccggtcaaccgccatcccgagttcgccggcgacggcaaactgatcaacgtggtcaccgaaggctatcgcgcctacaccgatccgcaccggccgggcattaacgctggcgaccgcttttacttcgacggcaccttccatttctataacggggcgacgttgagcaatcacggggtgcacgtcgcgggcatcagcgccgccaagcgcgatggcgttggcatgcacggcgtggccttcgattcgcaggtgatcagcgtcgataacgacaacgacggcccggcctacggcgaatttctcggcttggacggcgccgtcaccaatgctggctggcaggcgatgatcaacagcggtgcgcgggtgatcaacaacagctggggcgtcagtattcccgactttctgtccgacggcggccgcgatcctaacgcgctgcactttgagctgaaggatgcgcaggaacaattcgatcaggtcaaaccgctgctcggcagcctggccggcgcaggctatcagggcgccatcgacgcggcgcgcaaaaatattctggtgctgttcgccgccggcaacgacggcaactacaaccaaccggatgtgatcagcgggctggcctacttcgtgccggacatcgcgccgaactggctgtcggttgccagcgtggcgcaggatgcggcatcgaccaacagcgtgccttacaccatcagcagcttctcttcccgctgtggctataccgccagcttctgcgtctcgtcgccgggcagcaaaatctacagcaccgtggccaacggttccgatccggccaacctggtgtcggactacggcaataaaaacggcacctcgatggcgacgccgcacgtcaccggcgcggtggcggtgttgctgcagcgcttcccgtacatgacctcggcgcagattgccgacgtgttgaaaaccaccgccaccgacatgggcgcgccgggcatcgatgcgctctatggctgggggatgatcaacctgggcaaggccatcaacggcccgggtatgttctataccgtcgaggatattcccgcggagttccgcatcccggatccgacgggcgtggcctatggcccgacccagtttgtcgccaatattccggggaggggcgccgaggtggatgccggtacgctgcatgccaggaaatgtgatgacttccactgtggatgggaaatctactccaacaacatttctggccacggcggcctgaccaaagagggcgcgggaaccctggagctgaccggcaccaacacctatgccggcccgacgctggtcaatcaggggcggctggcagtcaacggctcgatcacctcggccgtcagcgtgcagaacggcggcaccgtcggcggcagcggcacggtcggttcgctgaccgcccgtcagggcggcaccgtggcgccgggcaactcgatcggcaccctgaatgtggcgggcaacgtcagcttcgagccgggttcgcgctacgcggtggaagtggggccgaacggccagagcgatcggatccagagcagcggatcggcgacgatcggcggcggcgaggtagaggtgaggctggagaacagccccaacctgctgacgcaaagcgaggtacgcagcctgctgggccagcagtacaacattttgagcgcgcagcagggggtgagcgggcagtttgacgcggtggcgccaaactacctgttcctcggcaccgggctgagctaccagccgaccggggtgacgctgagcgtcgggcgcaacggcacgagcttcgccagcgtggcgcagacgccgaacgagcgtgcggtggcggcggcggcggatgcgctggcggcgggcaacccggtgtacgagagcctgctcagcagcggtacggcgggcgaagcgcggcaggcgttccgtcagctgtcggggcaaatccatgcggatatcgcgtcggcgctggtgaacgacagccgctacctgcgtgaggcgctgaacgggcgtctgcgtcaggcggaagggctggcgagctcgtcggccatcaaggcggacgaggatggtgcctgggcgcagctgctgggggcgtgggaccacgcgtcgggcgacgccaacgccacgggttatcaggcctcgacctacggggtgctggtggggctggactcggcggcggcggccgactggcggctgggggtagcgaccggctacacccgcacctcgctgcacggcgggtacgggtcgaaggcggacagcgacaactaccacctggcggcgtacggcgacaagcagttcggggcgctggcgctgcgcggcggggcgggctacacctggcaccgcatcgacaccaagcggtcggtgaactacgggatgcagtcggaccgcgacacggcgaagtacagcgcgcgcaccgagcagctgttcgcggaagtgggctacagcgtgcagggcgagtggctgaacctggagccgttcgtgaacctggcgtacgtgaacttcgagaacaacggcatcgcggaaagcggcggcgcggcggccttgcgcggggataaacagcacacggatgcgacggtgtcgacgctgggcctgcgtgcggacaccgaatggcaggtgaccccgggcacgacagtggcgctgcgcagcgaactggggtggcaacaccagtacggcggtctggagcgcggcaccgggctgcggttcaacggcggcaacgcgccgttcgtggtggacagcgtgccggtctcgcgcgacgggatggtgctgaaggcgggggcggaagtggcggtgaacgaaaacgccacgctgtcgctgggctacggcgggctgctgtcgcagcaccaccaggacaacagcgtcaacgccggcttcacctggcgcttctga

SEQ ID NO: 427557 - DNA, 3012 bp, Serratia marcescens
atgctgatctgcctgacggcgatcggcggggcgcaggcagcaacctatatagagaacggcaaagcgggcgatccggccagctggcgcagcagcgagttcaacgcggaatgggggctgggggcgatccacgccgaccaagcctacgccgccggttataccggcaaaggcatcaaactcggcattttcgatcagccggtctacgccaaacaccccgagttttccggtcctgataaggtgatcaatctggttacccatggcacccgcgaatacaccgatccctatattccggtgaaaaaaggcgatgacttccgctatgacggtacgccaagcaccgactccagcggcaaattaggctcgcacggcacccacgtgggcggcatcgccgccggcagccgcgacggcggcgccatgcacggggtggcgttcaacgcgcagatcatcagcgcagaaaacggcgatcccggcccggaagacggcattgtgctcggtaacgacggcgcggtttaccaggccggctgggaggcgctggtggccagcggcgcgcgcatcatcaacaacagctggggtatcggtatcaccgaaaaattcgataaaggcggttatgacccggcttatccacacttcacggtgaacgacgcgcaaaagcagttcgatcagatcaaacagatcctcggcaccaagcccggcggcgcctatcagggcgcgatcgacgcggcgcgcagcggcgtggtcaccatcttcgccgccggtaacgattacaacctgaacaacccggacgccatggccggcctggcctattttgtgccggatatcgcgccgaactggctgtcggtcgccagcttgcaagatcccaccaatagcggcgattacagcatcagcaccttctcttcccgctgcggctataccgccagcttctgcgtctctgcgccgggtacccgggtgtacagctcggtgatcgcgggcaccggtgtggacgaccttacgaccggctatgccaataaaagcggcacctcgatggcggcgccgcacgtggccggcagcgttgcggtgctgatggaacgtttcccgtatctgaatggcgcacaggtggcggacgtgctgaaaaccaccgccaccgacatgggtgcgccgggcatcgacgcactctacggctggggaatgatcaacctgggcaaggccatcaacggcccgggcatgctggttaccgagcaggacattcccgaagagttccgcgtcaacggcgcttacggttcaccacagttcgtggtggatctgccgggcgtcggcgcggtgctggacaagggtaaaccgaccgagcgcgtctgcagcagcgatctttgcggcctggacttttggagcaacaacatctccggccatggcggcctgaccaagcagggcatcggcacgctggtgctgacgggtcacaacacctatgccggcccgacgctggtcaatcaggggcggctggcagtcaacggctcgatcacctcggccgtcagcgtgcagaacggcggcaccgtcggcggcagcggcacggtcggttcgctgaccgcccgtcagggcggcaccgtggcgccgggcaactcgatcggcaccctgaacgtggcgggcaacgtcagcttcgagccgggttcgcgctacgcggtggaagtggggccgaacggccggagcgatcggatccagagcagcggatcggcgacgctcggcggcggcgaggtggcggtcacgctggagaacagcgccaacctgctgacgcaaagcgaggtgcgcagcctgctgggccagcagtacaacattttgagcgcgcagcagggggtgagcgggcagtttgacgcggtggcgccaaactacctgttcctcggcaccgggctgagctaccagccgaccggagtgacgctgagcgtcgggcgcaacggcacgagcttcgccagcgtggcgcagacgccgaacgagcgtgcggtggcggcggcggcggatgcgctggcggcgggcaacccggtgtacgagagcctgctcagcagcggtacggcggacgaagcgcggcaggcgttccgtcagctgtcggggcaaatccatgcggatatcgcgtcggcgctggtgaacgacagccgctacctgcgtgaggcgctgaacgggcgtctgcgtcaggcggaagggctggcgagctcgtcggccatcaaggcggacgaggatggtgcctgggcgcagctgctgggggcgtgggaccacgcgtcgggcgacgccaacgccacgggttatcaggcctcgacctacggggtgctggtggggctggactcggcggcggcagccgactggcggctgggggtagcgaccggctacacccgcacctcgctgcacggcgggtacgggtcgaaggcggacagcgacaactaccacctggcggcgtacggcgacaagcagttcggggcgctggcgctgcgcggcggggcgggctacacctggcaccgcatcgacaccaagcggtcggtgaactacgggatgcagtcggaccgcgacacggcgaagtacagcgcgcgcaccgagcagctgttcgcggaagcgggctacagcgtgcagggtgagtggctgaacctggagccgttcgtgaacctggcgtacgtgaacttcgagaacaacggcatcgcggaaagcggcggcgcggcggccttgcgcggggataaacagcacacggatgcgacggtgtcgacgctgggcctgcgtgcggacaccgaatggcaggtgaccccggacacgacggtggcgctgcgcagcgaactggggtggcaacaccagtacggcggtctggagcgcggcaccgggctgcggttcaacgccggcaacgcgccgttcgtggtggacagcgtgccggtctcgcgcgacgggatggtgctgaaggcgggggcggaagtggcggtgaacgaaaacgccacgctgtcgctgggctacggcgggctgctgtcgcagcaccaccaggacaacagcgtcaacgccggcttcacctggcgcttctaa

SEQ ID NO: 427558 - DNA, 1218 bp, Serratia marcescens
atgaacgacaatcaggcagtgatttacgttgcaaccacagcggataccaagggacgggaattggcttatgtgcgccgcctgatcgccgaaaccggattacccacgctgaccgtcgatctttccacccaaccgctggcctccgacagctaccgggccgatatctccgccgctactgtcgctcactgccatcccgatggcgaacgcgccgttttttgtggcgatcgcggcaaagcgattgccgccatggcactggccttcgaaaaattcatgctgtcacgccgcgatgtcgctgcactgctcgggctgggcggctctggcggcactgcgctgatcacgcccgccatgcaacagctgcctatcggtttgcctaagttgatggtttccaccatggcctccggcgacgtttccgggtatgtcggagccagcgatatctgcatgatgtattccgtcactgacgttgccgggttgaaccgcatctcccgcaccgtgctgggcaatgccgcgcatcagatcgccggcgccgttcgcttcgcagctcaagcgacggtcgacagcaaaccggccgtcggcctcacgatgttcggtgtgaccaccccctgtattcaagccgccacggcagcgctcgaagagagcctggattgcctggtatttcatgctaccggcagcggcggcagagcgatggaaaagctgatcgacagccatttgctgaatggcgtgctggatctgaccacgaccgaagtttgcgactacctgttcggcggcgtactggcgtgcagcgaggatcgttttggtgctctcgcacgcaccggcgttccctgcgtgatgtcctgtggcgcgctggatatggtgaacttttcccacccggacagcgttcccgcccgatacgctcagcgccagttttatcaacacaatgcccaagtcacgctgatgcgcactacgccggaagagaatgcgctgatgggccgttggatcggcgacaagctcaatgcttgcgaaggcgatgtacgtttcctgatacccgagggcggcgtttccgcactggatgcaccagggcaaccattttggaacccagaagcattggccgcctttaccgacgcgttggaagcaacattgcgcgtcacggaaaagcgccgcctgatcaagaccccttataacatcaacgatccccgttttgccgacttcgccgcgcaacagttcagggagatcgctcatttttga

SEQ ID NO: 427559 - DNA, 834 bp, Serratia marcescens
atggctaaaaattcccgtcaggaactactgactcaattcagagaaatgattgcccgtggcgagccgattatcggcggcggcgccggaaccggcctctcagcaaaatgtgaggaagccggcggcatcgatctgatcgtcatttataactcgggccgctaccgcatggcgggcagaggttctctggcgggtttactggcctacggaaatgcgaacgacatcgttatggatatggcaaaagaggtgttgccggtcgtcaaacacacgccggttttagccggggtcaatggtaccgatccgttctgtcagttcgataaattccttaatgacatcaaagcgatcggtttttccggcgtacagaatttcccgacggtgggtttgatcgacggcaacttccgcgccaatctcgaagaaaccggaatgggctatgcgctggaagtcgacatgattcgcctggcgcatgaaaaggatctgctgaccacgccttatgtgttcagcgcagatgatgccgtcgcgatgacgcaggccggcgccgatatcatcgtaccgcatatggggctgaccaccggcggcaatatcggtgcggaaacggcgctgacgctggcgggttgcgttcccctgatcaacgagtgggctcaggccgcgaaacgcgtgcgcgaggacgtgatcgttctgtgccatggcggccctatcgcgacgccgaaggatgcggcctacatcatgcaacactgccctttggtcgacggattctatggtgccagctccatggagcgcctgcccaccgaagtggctttgacggaaacaacccgacaattcaaaaatatcaataagggttaa

SEQ ID NO: 427560 - DNA, 867 bp, Serratia marcescens
atgaaattgcttaatcaccccacctgtcgtccgtttaccgaagcgggcaatctgtcgcagctgtccgcctactatgaagaagggcggcacatcatgtggatgctgctgcgcgccgcgccgcgcccctgcttcaaccaggcgctgatcgaagacatcatgacgttggcgcaggcggcgaaggagtcttcgctgcggttcgatttctgggtcaccggctcgctggtgccgaacatgttcaacgtcggcggcgatctgcagttcttcgccgaagcgatcaaaaaccgcaagcgcgaggcgatgatggcctacgcgcgcgcctgcatcgactgcgtacatgcggcggcgcgcggtttcgacaccggcgcggtcagcattgcgatggtcgaaggcagcgcgctgggcggcggctttgaagcggcgctggcgcaccatttcgtgctggcgcagaacaacgcgcgcatggggtttccggagatcgcgttcaacctgtttcccggtatgggcggttactcgctggtggcgcgcaaggcgggcatgcgcttggccgaggagctgatttggagcggcgagtcgcacaccgcagagtggttcgagagccgcgggctggtagaccagctgttccagcccggcgacgcctacatggcgacgcgcaccttcatcgataccatccggccgaagctcaacggcatgcgcgccatgctgcgggcgcgtcagcgcgtgttgcagctgacgcgttccgagctgatggacattaccgaagattgggtgcactcggcctttaccattgaggaaaaagaccgcgcctacatcgagcggctggtgatgttgcaggatcgccataccctgaacctgcgtcgtgccggctaa

SEQ ID NO: 427561 - DNA, 1233 bp, Serratia marcescens
atgtttggttggaccccgctgcaacgcaatgcggcaatcgccagcttttcaagctggacgctcgatgctttcgattttttcgtgctggtattcttactcagcgatatcgcgcaatcctttcacgttggcctggaacaggtgacgttggcgattctgctcacgctggcggtgcggcctatcggcgcgctgatcttcgggcgcgcggcggaaaaatatggccgcaagccgatcctgatgctgaatatcgtcttcttctcggtgtttgagctgctctccgccgctgcgccctcgctgacggtctttttgctgttacgggtgctgtacggggttgcgatgggcggcatctggggcgtggcgtcatcattggcgatggaaaccataccggaccgctcacgcggcctgatgtcgggtattttccaggccggctacccgttcggttatctgctggcggcggtggtctacggcctgctgttcgaaacggtcggctggcgcggcatgttcgttatcggcgcggcgccgatcctgctgctgccgtttatatattattgcgtgcaggagtcgccggtgtggctggcggcgcgcgaacgcaaagaaagcaccgccttgctgccggtattgaagagccactggaagctgtgctgctatttggtgctgctgatggcggcgttcaatttcttctcccacggcacgcaggatctgtatccggtatttttgaaagttcagcacggtttcgaccctaaaaccgtcagtatcatcgccataagctacaatatcgcgtccattatcggcggcgtattcttcggttcgttatcggaaaagatcggccgtaagaaagcgatcatcatcgccgcgctgctggcgctgccggtgatcccgctgtgggcgttttccagcggttcactgatgcttgggatcggcgctttcctgatgcagttcatggtgcagggtgcctggggcgtgataccgacctacctgaccgaactggtgccggccaacacccgcgcggtgctgccggggttcgtgtaccagctgggcaatctgatagcctcggtcaacgccacgctgcaagccaccatcgccgagcatcatgggcataattacggcctggcgatggcgatcgtcgccggtacggtggcggtggcgatcgccctgttggtgttctttggcaaggatacgcgcggtaaggcgatcaccgacgcggtgaagaaaccggacatgcgcgccaacgtgtga

SEQ ID NO: 427562 - DNA, 882 bp, Serratia marcescens
atgcgacagttatccctgcttgatgatgttaagaaggcgtatcaggaacaccgttcagcctttatccccggtgccaccatgcaagcgatcctgctggcgctgggcgcgcggccggaagatttcgccaagctgcagcaggtcagcggcaatctggcggacgatcccacgctgcctttccgcaagtccagaaacggccgcttctgtttcgacttcgatcgcgcccagattgagcggctggagttccagcccttcgtgctctcggtcgaggaagacttcatccgttacgattcgggaaaggtgcgccacttccgcggcatcaacgacgatctgcagttgaatacggcattccaggcgctgatgaaattcaaagcctacgtgatcgatggcgtgagcgtgacgccgcgcgcccggcttaatcaggagatcaacaagttcgtctgcacggtgttcaacctgcgcaccgtcaccacgccgcagatgctgggcgaaccggctctggaaggcgtgcacagcgacggcgtcgaccacaccatgacgaccttccttggctgcgacaacatgaccgacgacagcgccaagacctttattcacgatatgcgcgaaaccagcgggatcaaatttgatcgggcccggccggaatggattttgggcgaaatacagcatcggcatttcctcgataccctgctgattgtcgatcatgaacgcaaacacagcctctcaccggtggaagcgcaggacaaacgccggcattcgacccgcgatatgctgatctttttcacccgcaaaccggtcgaagacggccacgtctctttcgcgtatgactctttcaaaccgcatatcgaaatcccgctgtcgatagacatggtggcgcgcgcgagctaa

SEQ ID NO: 427563 - DNA, 333 bp, Serratia marcescens
atggccgaaatcactgattttatgaaactggatatgcgtattggcgaaattatttccgtggaatataacgacaaggcgttaaagcccgcctataagctgcgcattgatttcggcgaagaaattggcattaaaaacagctcggcgcaattatgcgaaaactatcaggaagatgatctgctcggcaaaaaagtcatctccgtcgttaatttccccgccaggcgggttgctggatttaaatccgaagtgctggtacttgccgcggtcacccgggatcaaggcaccgtcttgctgaaaaccgatttcgacgtggagatcggcagcaagattttataa

SEQ ID NO: 427564 - DNA, 918 bp, Serratia marcescens
atggaaataacccagcgcgaaaaacgcgatcggcgaaaggcatttatcgcgccgtttttcctgatattaatttggtcgaccggttttattgccgcgcgggcggtggcggatcatgccgatcccaaccttttcctgacttttcgctttttgatcgccgctgcggtattcgccctgctggcgctgcattgcgcctggcccaaggggcgacagttcgtgatgcacctgctgaccggcatgctgatgaacggcgtttacctcgccgcaagctggtgggcggtggcgaacggcctggcggccggggtgatgtcgctcattggcggattgcagccgctgttcaccgcgctgattttcgcgctggtgctgcgcaaatcgatagggttgcgttcctgggccgggctggcggtcggttttatcggcgttgcgctggtgctctcccctcggctgaccggtatcgacgtcggcaatatggcgctgttgccgatcctgatgggctttggcagcatcgtcgcgctgacgatcggcatcatggtgcagaagtcttcgctggcggcggccgatctgcgggcggcaggcgccattcagcacctcggcgccgcgatcgtgaccggcgtgctggcggccgtgatgggctccgctgcctgggacaattcgccgacgctgtggttctctctgctgtggtcggccggcgtgttgtcgctgggcggcaccgcgctgtttatctggatggtgcgccacggcgacttgactcggattaccgcgctgatgctgctggtgccgccggcggcggcgctgcaggcttacgcgctgtttggcgaggcgctgtcgctgctgcagctggcggggtttgtgctgacgctgctgggagtcgccatcgtacagcgaattcgcctgctgcggcgctctcgcctggccgaatag

SEQ ID NO: 427565 - DNA, 966 bp, Serratia marcescens
atgaccagctatcagatgcttgatgttcgcgtcgtcgacatcgaacccgtcaccgcacaggtcaagcgctttaccctggcggatccgcaaggccggccgctgcccgccttcagcggcggcagccacatcatcgtgcaaatgcaggacggcgagcagcgttacagcaacgcctattcgctgctgagctcaccgttcgagctcgaccgttaccagatcgccgtgcgccgtgagtccccttccaaaggcggttccgacttcatgcacgatcggctggcgatcggcgatacgctgaccatcagcccccccaataacctgttcgcgctggcgccggaggcgcagcatcacgtgctgatcgccggcggcatcggcatcacgccgtttatggcccatctgcacgagctgcagcgcagcgggcaacgctatcatctgcactactgcttccacagcgaggaacacaacgccttccagcagcagctgacgcaagcgccgttcaccgacaacgtcagttgccatgtctccagccttaacggccggttggatctggcgcgcacgctggccgacgtggagcccggcgcccatatctacgtctgcggcccggcggcgctgaatgaagcggtttaccggaccgccgccgaactgggcatcgcccccggtcgcttgcacagcgaagccttcgccgccgaagacacggcgggcggcgcctttacgctggtgctggcccgctcaggtattgagcttgaagtggcggaagacatgaccatcctgcaggcactggaaaacagcaaggcggctaaagttgaatgcctgtgccgcgaaggcatttgcggcacctgcgaaacccgcatcgtcgagggggaagccgatcaccgcgatcagtatctcagtgacgaagagcgcgcggcgcagcaaaccctgttgatctgctgctcgcgcgccaaaggcaaccggctggtgttggatctgtaa

SEQ ID NO: 427566 - DNA, 1449 bp, Serratia marcescens
gtgaatatttccgatcgggcgctattccgccaacaagcctacatcaacgggcaatggcgcgatgccgacaaccaggaaaccctgccggtgagcgatcccgccaccggccaactcatcggcagcgtgcccaacatggcgacggccgaaacccaacgggcgatcgacgccgcccagcaggcgctggaaggctggcgcgcgctgccggcacagcaacgcgcgcagctgctgcgccgctggttcgaactgatgctggaacaccagcaggatctggccagcctgatgacgctggagcaaggcaagccgctggcggagtcgctgggcgagatccgttacgccgcctcctttatcgaatggttcgccgaacaggccaagcgcaccaacggcgacatcattccctcgccgagcggcgataaacgcctgatggtactgaaacagggcatcggcgtgtgcgcggcgatcacgccctggaacttcccggcggcgatgatcacccgcaaggccgcgccggcgctggcggccggctgcacgctggtggtcaaacccgccaacgaaaccccttactcggcgctggcgatggccgagctggccgagcgcgccggcattcccgccggggtgttcaacgtggtgaccggcaactcgcaggcgatcggtgccgagctaacccgccacccgcaggtgcgcaagctgagctttaccggctccacgccggtgggcaggctgctgatgcgccagagctcggacaccatcaagaaagtgtcgctggagctgggcggcaacgcgccgttcatcgtgtttgacgatgcggacatcgatgccgcagtagaaggcgcgctgatcgccaaataccgcaacgccgggcagacctgcgtttgtgtcaatcggttctacgtgcagcgcggcgtttacccacagttcgccgagaagtttgtcgcccgcgtggcggcgctacaggtcggcaacggcttcgaacccggcgtacagatcggcccgctgatcaaccgcaaggcgcgcgacaaggtgctggagctgctcgatgacgcgctgagcaaaggcgctcaggtgctgaccggcgctacgccgcacgcgctgggcggcaattttttcacgccgacggtgctgggcgacgtgcagcccggctcgctgctgctggaagaagagatcttcggcccggtcgcgccgctggtggtgttcgatgacgaagccgaggcgatccgccaggccaacgacaccatttacggcttggccgcctacttctacacccgcgatgcggcgcgcatctggcgcgtttcggagcggctggagtacggcatggtcggcatcaataccggccttatctccaacgaggtagccccattcggcggggttaagcagtcgggcctggggcgtgaaggctccgaatacggcatcgaagactatctggagctcaaatacctgtgccaggcggtataa

SEQ ID NO: 427567 - DNA, 1125 bp, Serratia marcescens
atgagcactctgatccctgaatttaccttaccgaaagatttctgcgccgacgcccgcgaggcttacaccattccggcccggttctatacccaccaggcggcgttcgagcacgaaaaagagcaggtgttcgccaccagctggatttgcgtggcgcaccgcagcgagctcgccgaaccgaacgactacatcacccgcgagatcatcggtgaaaacattctggtggtgcgtggccgcgacaaagtgctgcgcgccttttacaacgtctgcccgcaccgcggccaccagctgctggcgggcgacggccgggcgaaaaacgtcatcacctgcccttatcacgcctgggcgttcaagctggacggcgaactggcacacgcgcgcaactgcgaaaacgtgcagaacttcgataaggaaaactcgcacctgatgccggtgcgggtcgaagagtacgccgggtttatttacgtcaatctggactcgcaggccggcgcggtggaagaccagctgccgggtctcggcgccaaagtgcgcgaagcctgctcacaggtcgacgatctcaagctggcggcgcgcttcgtcacccgtaccccggccaactggaagaacatcgtcgacaactacctcgagtgctaccactgcggcccggcgcaccccggcttcgccgactcggtgcaggtcgaccgctactggcacaccctgcacggcaactggacgctgcagttcggctacgcccgcccttccgagcagtcgttcaagtttgaagagggaaaagaagccagcttccacggcatttggctgtggccgtgcaccatgttcaacatgccgccgctggaaggcatgatgacggtgatctatgaattcccggtcgatgcggaaaccaccctgcagcactacgacatctacttcaccaacgccgatttgagcgacgagcagctcaaactgatcgactggtaccgcgacgtgttccgcccggaagatttgcggctggtggagagcgtgcaaaaaggcctcaaatcgcgcggctatcgcggccaggggcgcatcatggccgacggcgccggcagcggcgtcagcgaacacggcatcgcccacttccacaacctgctggcgcaggtttatcaaccctga

SEQ ID NO: 427568 - DNA, 1611 bp, Serratia marcescens
atgcagagcaaccctaaaaaggatgtcacgctcatcgccatcagcctgtgcagtattgcgctgatcgccatttgcctgatgctctttccggctcaatccgcgcttatcgccaacaccattttcaacggcgtcacccggctgttcggttcaaccattcaaatcctggtgctgatcgccctgctggtggtgctgtatctggcattgagcaaatacggcaacatccgcctcggcgaaggcaaaccgcaatactccacgctggcctggctgttcatgttcatctgcgccggcctcggctcgtccaccctgtactggggggtgatggaatgggcgtattactaccagacgccggggctgaacatcgcgccgcgcaccccaaaggcgctggaatacagcatcagctactccttcttccactggggcctgagcgcctgggcgacctacgccctcgcctcgctgatcatggcctaccacttccacgtgcgtaagaacaaagggctcagcctgtcggggatcatttccgccatcaccggcgtgcgcgccaacggcccgatcgggcggatagtggatctgattttcctggtcgccaccgtcggcgccctcaccatttcgctggtgctgaccgcctccacctttacccgggggctgacggcgctgaccggcatccccgacaatttcgtggtgcaggcgacggtgatcctgctggcggcggtgattttctgcctcagctcctacatcggcatcgacggtggcatgcagcgcctgagcaaaatggtcggctggggcgctttcgtcttcgccgggctggtgctgctggtcggccccaccgagttcaccatcaacaacaccatcaacgccatcggtctgacggcgcaaaatttcctgcagatgagtctgttcaccgatccgatgggcgacggcagcttcagccgcagctggacggtgttctactggctgtggtggatctcctataccccgggcgtggcgatgttcgtcacccgcgtctcgcgcggccgcaagattaaagaggtgatctgggcgctgctgctcggcagcaccctcggctgctggttcttcttcggctcgctggaaagctacgccatgcaccagttcatcagcgggcagctcaacgtgccggagatcctcagcacccagggcggcgaaaccgccgtgcagatgctgctgacggcgctgccgctcggcaagctgttcctggccgcctatctgttcatcatgatcattttcctggcctcgcacatggacgcggtggcctacaccatggccgccaccagcacccgcaacctgcaggaggggcaagatcccagcccgatgctgcgcctgttctggtgcgtggtgatcaccctgatcccgctgtcgatcctgttcaccggcgcctcgctggacaccatgaaaaccacggtgatcctgaccgcgctgccgttcctgctggtgctgctggtgaaaacctacggcttcgcccgctggctgaagcaggactacgcggccattccggctcacctgatcgaaagcagcgcgccggcgctgcccgaggcgccgccggccgccgaactctccgctccatcgtcgtatcaaccgcgccctatggcgaaatga

SEQ ID NO: 427569 - DNA, 1086 bp, Serratia marcescens
atgagcaaaacttacaagattgccgctatccccggggacggtatcgggcgggaagtgttgccggaaggcatacgggtattgcaggcggcggcggcgcgctgggatctgtcgctggaattcgacaccttcgagtgggccagctgcgactactaccagcaccacggccagatgatgcccgatgattggtttgagcagctcaaaggcttcgacgccatctatttcggtgccgtcggctggccggatacggtgcccgatcacatttcgctgtggggttcgctgctgaaattccgccgcgacttcgagcagtacgtcaacctgcgcccggtgcggctgtttcccggcgtgccctgcccgctggcgaacaaacagccgggcgacatcgatttctacgtggtgcgcgaaaataccgaaggggaatactcctcgctcggcgggcggatgttcgaaggcaccgaacgcgagatggtgatccaggaatcggtcttcacccgtcagggcgtggaccgaattctgaaatacgccttcgagctggcgcagcagcgcccgcgcaaacgcctgaccgccgccaccaagtccaacggcatggccatcagcatgccgtactgggatgagcgcgtggcggagatggcgcgccagtaccccgatatcgcctgggacaaacagcacatcgatattctgtgcgcgcgcttcgtgctgaaccccgaacgcttcgacgtggtggtggcctccaacctgttcggcgatattttgtcggatctcggcccggcctgcaccggcaccatcggcattgctccgtcggccaacctgaacccggagcgcaacttcccgtcgctgttcgaaccggtgcatggctcggcaccggacattttcggcaagaacatcgccaacccgatcgccatgatctggagcggcgcgatgatgctggacttcctcggcgacggcgatgcccgttaccgccaggcgcatgacggcatcctgcaggcgatcgagcgcatcatcgccgacgggccgcgcacgccggacatgcgcggcgatgcctccacccagcaagttggccaggcgatcgccgccctgctgcaacgctaa

SEQ ID NO: 427570 - DNA, 939 bp, Serratia marcescens
atgaacaatatgccgatcctgagtgacctgcgggtgttcgtgctggtggcgcgccgcgccgggtttgccgccgccgccgaagagctgggcgtgtcgccggcctttatcagcaaacgcatcgcgttgctggaaaaggcgctggacgtgtcgctgctgcaccgcaccacgcggcgggtggcgatcaccgaggacggcgagcgcatctacgaatgggcgcagcgcattctcaacgatgtcgatcagatgatggacgaactgtccgaggtgcgtcaggcgccgcagggcatgctgcgcgtggtcagcagcttcggcttcggccggcgcttcgtggctccggcgctgtcggcgctggcgcgggagtatccgcagctggagctgcggcttgacgtgtcagatcggttggtggatctggccagcgaagggttcgatctggatatccgcatcggcgacgatatcgcccctaatctgatcgcgcgcaagctggcggacaaccagcgcatcctgtgcgcttcgccggcgtatctgcagcgccacggcgtgccgaaaagcgtggcggagctggcgggccgcgcttgcctggtgatcaaggagcgcgatcacccgttcgggctgtggcggttgcaggggccaggcggcgaagagacggtgaaggtgacgggggcgctggcgtcgaaccacggtgaaatcgtgcaccagtggtgcctggacgggcagggcgttgcgctgcgttccgcctgggacgtgaaagagaacatcgacagcggcaggttggtgcacattctgccggagtattttcagccggccaacatctgggcggtgtacgtttcccggctggcaacgtcggcgaaagtgcgggtgacggtcgaatttttgcgcgactatttccgtgagcactacggcgaaacgggggcggcgagtgaaaatccgccgcggccttga

SEQ ID NO: 427571 - DNA, 234 bp, Serratia marcescens
atgcagactgacgtttccccgcccgcgggcacctcgcggcggctgatatatgcaggcgtggcggccgtgctcgttctgttgatgctgtcttttcgcggcgacgcacagagccatggccatagtggcctgcatgctgccggcttacaacgggggcatcaggcggtgacgccggacgcctacggctgcgtcaaagcgcgcattaaaaagcagctgcgccgcctggctcagctttaa

SEQ ID NO: 427572 - DNA, 873 bp, Serratia marcescens
atgcccctcacagaccttgagctacggcgctccaagccgcaagaaaagccctatacactcagtgatggcggtgggctctctatactcattgagccgaacggctccaagggttggcgttttcgctaccgtttcgatggcaaaccaaaaatgctttctctcgggacataccccacagtttcactcaccgaggcaaggcaaaagcgtgatgaagctaaaaagctggtggtatcgggcatcaatcccagcgaagccaggaagcagcagaaacgagctcggcaagatgttactggcaatacctttgaggggacagcgcgggagtggtacggcaagaggcgtgatcgctggtcagaatcatacgccgaagagatgatgaaaacgtttgagagcgatgttttcccatacatcggccaacggccaattgccgagataaagccaatggagcttatggggacgctttctaaactggatgaacgaggcgcaacagagaaattgcgcaaggtgcgccagcggtgtggagaggtatggaaatatgccatcgttaccgggagggctgaatataacccagccccggatctcgccagtgcgttctcaccgcataaaaaagagcactatgcgttcttgtcagttgccgagttgcccgagtttttccgcatctttaacacatataccggcagccagatcgttaagctagctatgcgcttgcttattatcacagggacaaggccgggagagctgcgaaaggctgaatggtcggagtttgattttgataaccggctttgggaggttccacccgaacgaatgaagaagcgccgccctcattgcgtaccgctaacgtctatgtcctgcactatatgcccgaagagaaacaattag

SEQ ID NO: 427573 - DNA, 255 bp, Serratia marcescens
atgaaagccgaagaaatgttaacgagtaaagatgtgcgttcgctgctgaaaatatcaaactcatccatgcatcgactacgctatcgggatgtaaacccgttcccggagcctgacttttatggagtcgacgaagcgaataagtggtttacatcgaaagtagcagaatggcagcttgcggagagccagtgtgacaaggttaaaccagccgaacatctgcatgaaaaaactaggcgattttctcgtcgggttgtctga

SEQ ID NO: 427574 - DNA, 309 bp, Serratia marcescens
atggctgcagattgggaactagatgacgaagcagagaaaatcgaagatgaaagacgttggtcagacgcacagcttgctgcaaagttagttattagtggctatgaacgtgatagtgcggtgggggctataaaaagtgtgaacgaaaacagagagtctcatagaaatgaccctggcgttcatattgatggcgatggagagcaaccaagcgaatggaccatcaaagaatgcaactacccaaacgaggtgaagggagaatttaaccctcagcaagtgtataaaatagctcaagagcttattgatgatttttaa

SEQ ID NO: 427575 - DNA, 1032 bp, Serratia marcescens
atgttaacaccatataaaaaagctgacgtttccttccgattcatagatgatataggacaggaagggcagaactcaaaagtctatttagcacatgatgagtacttagactgcgaaatagcgataaaagaggttgttaaagcctcattgccttctccgagcgattatttctgtgaggctaaacttctgtattcaagctcgcatccaaatatagtaaaaatcaactatgcagccatagataatgataatatttatgttagcatgccttactatcgtaatggctctttaagtgcaagaatgaaaaaggaaaatttatcaagtaaagaggttataagatactctatccatttcctaagtggcctgcatcatatacactcgaaaaaattaatgcattttgatataaaaccaaataatataatgctttcggacagggatgaagcattgctttctgattttggtttggcagaggtaattaacacgcagggttttgcatctccaaagatgatatataaattacacactccaccagagaggtattctgtaaccgaattcaaccttacttatgatatttatcaggctggcttgacaatgtatagaatggctattgggcatgttttatttgaggccgaagttcagcgggcattcgattctggaaatgtacctcagcaaataattgatggcactttcccacagaaggttttccagccacatataaataaatcactgcaaaagattattttaaaatgtttaaaagtagaccctgctgaacggtatcagtcagtgttagacatacaaaatgatctttcagatatatgtgatggttcgctcgagtggaggcaggacgtagctaatcctaaactgtggaaaaaagaacataacgatgctatgctagaactaacgttatctaatgataatttgagttgtgaatgcttcagaacctattctgatggcaggggaaaaagaaggtttggggagatgttcgccactgaactgactccagcaaaattagccaagcttttcaaaaataatgggtaa

SEQ ID NO: 427576 - DNA, 753 bp, Serratia marcescens
atgcagagcagaacggtttaccactggcagagctggcgtgatgatcgggcgataaccctgcgtatccgggaaatcgcggaaacccggatacggtatggttgcccgcgtattcatattcagttgcggcgggaaggctggcttgttaaccacaagaaaacccaccggatttattgcctggaaggactgaacctgcgcagaaagcgtccccgcagacatgtcagtgcagcacgccgtcagcagcgcccgattctgacgcatgtcgatcagtgctggagtatggattttgtgtcggataatctgtttaacgggcggcgttttcgggcactgactgtagtggataattttagtcgggaatgtctggcgatccatgctggaaaatcgctgaaaggcgaagatgtggtcaaagtaatggaagcacttcgggtgctgtataggcgtttaccggtacgtattcagacggataacggcagtgagtttatttcgaaaaatctggataaatgggcgtatgagcatggtgttacgatggacttctcccgccctggaaaaccaacagataacccgtttattgagtcatttaacggcagtctgcgggacgaatgcctgaatattcactggttcctgtcacaggaagatgctcagaacaaactcgatagctggcgcagggaatacaaccacgaaaggacgcattcatcattaaatgacatgactccggctgaattcatccgaagtctccggaaagacgaagatctctga

SEQ ID NO: 427577 - DNA, 495 bp, Serratia marcescens
atggacagcacacttctaggggcgttgattggtgcaggggcggcgattgcaggagctatagcaacatccaccatcacctacttttcaaataagtcacatgacaaagaaaaaacattatcaataaaaaaagaatcactctacattttcttggaagatttaaaaacaaacattcacaacaacgcattaatatttggcaaaatgggcagggatgagaaacccataattaccaaagaccttgacgacgaatatagggacgtacttaaaaatataaaaatgcttattaatatttacttcaaagactttggtagtgaatttgattcaaaaatggatattgtcattgagttttatacttcatacgcaatacatctaagacaagacacaagaacatcaccattattaataactaaggagcttcttgacagcgtcaatgcgtcatacgacaaatcgatgtcagcaattgacgatctgcagaatatagttttgaaaataaaataa

SEQ ID NO: 427578 - DNA, 864 bp, Serratia marcescens
atggacacagcaagcatacatgacataaaaatttctcttagatacgacggactggacgcggagaaccatgaaattgatctcgcatgtcttggtgagtcgctaaaggggttttcgaaaattctggcaaccgcaggaaattttgcagtaacacagaggtacagcaaaaacgtagctggacaggatgttaaagtgtacgcaaaagaagcacgagcaaattgcttcacgcttgatgccgtgctgaatttcgtaggtcaatcccaattgttctctggtgctgtgggttctatactgggggcgttgataccttacatttttagccggaactcgcagaaaaaagaagaaatgaaactgcttaaagactctctcgacaaagcgatagaggctcttggcaacaaagacagagcaactatcgatggactactggccgtcatcgacaagatggctggagagttgcgtccatcggttaggcaagcagtttcaccaatcggtaacacctgcagagaaatcagcgtcacaactaactgcggccatgaacccgccaggatagatgaagaagacaaagctgtgatcgatcgcctaaatgatgatgaggttatcgggctgcgcgaatacaaggtattcataactgagttcgatgcgcagagaaccacagccaaggtcatattgctcgatgacgacagtggtaggcgagttccggcagagatcaacgacccttcagttaggaaggcaggcaacccatacatcacagcccttaacgcctatcttgaatcacagggtgcaggcagcgcatgcataactgtaacagcaaaagcatcggtgaaaaaaggcaacattagtaagctatatattgctgatgcatcataa

SEQ ID NO: 427579 - DNA, 240 bp, Serratia marcescens
atgaaagcagcaattcgaaaaccccaactcctggcgatggttcccatgtcggagtcgcagatcaccaaacttgaaaaggcgggcgagtttccacagcgttttgctctgaccaaccgcaccgtagcctggaacctggatgaagtagaagcgtggctcgataagcgacaggccgagaacaccggacgcacgccggattatcccccttacatccgccagcgcaaacgcaggccagcacgctaa

SEQ ID NO: 427580 - DNA, 1311 bp, Serratia marcescens
atgaccgataaaataccaggaactcgctggctgcgggttatcgcgccgatccttgtcacctgcattatttcatttatggatcgcgttaatatcagctttgctctgccgggcggcatggaacaggatttaggcattaccagccagatggctggcgtggccagcggtatattttttattggttatttatttctgcaaatccctggtggacgacttgcggtttacggaagcgggaaacgttttatcgcctggtcgctcgtggcctgggcaattgtctctatcgccaccgggttcgtcacccatgaatatcagctgctcgtgctgcgttttattctcgggatctccgagggggggatgttgcccgtcgtgctgaccatggtaagcaattggttcccggaaaaagaactgggccgcgccaatgcctttgtcatgatgtttgccccactaggggggatgctgaccgctccagtttccggcgcgattattgccactctcgactggcgctggctgttcattatcgaaggcttgttgtcggtcgtggtgctgaccatttggtggctggtgatcagtgaccgcccggaagaagcgcgttggctgccggcgaaagaacgcgactatttattgaccgagctggcacgggaacgcaaagcgcgagaaggaatggtgccggcggccaaggcgccattaaaagcggtgttccgcaacaagggattgatgcgcctggtcgtgttgaatttcttttaccagaccggggactatgggtatacgttgtggctgcccaccatcttgaaaaacctgacaggcggcagtatggctaatgttggggtattggcgatcctgccgtttgtcgccactctggcagggatttatgtgatttcgatgttcagcgatcgcagcggtaaacgccgtttgtgggtcaggatctccctgtactgttttgcggcggcgctgatagcctcagtgatcctgcatgagcacgtagtggccgcctatatcgcgctggtggtgtgcggcttcttccttaaagctgcgaccagccccttctggtcaattcccggacgcattgcgacggcagaagtggcgggcagcgcacgcggagtgatcaatgggctgggcaacctcggtgggttctgtggcccctatttggtaggcgtcatgatttatgtgtacggacaaaacgtcgcggtttgcgcgctggcagcatcgctgttgctggcaggaagtatcaccttcctgctgccgaaagaatgcgatcgctcctgcgaagaaacaggcagcctcctcccatccggggccaaacagaaatggagttaa

SEQ ID NO: 427581 - DNA, 951 bp, Serratia marcescens
atgcatactgacactcaacccaccattttacttatcgcgccggtgatggatgctttgcaggccgcgctggatgccagttaccgggtattccgtctctatgagcaatcagatattccagccttcctggttcgccatggcgcagacgttcaggcggtggtcacccgtggcgatgtgggggtaacccggcagacgctggaacagttgccgcaggtgggcatgattgctgtctttggcgtggggaccgacgctatcgacctcgactacaccagggagcgccatatcagcgtcgggatcaccgccggtgtgctgaccgatgatgtggccgatctggcgatggggctgatgctgtccgccagccgccgtctatgccaaggggaccgttttgtacgcgaaggccgctgggaaacgacgccgccgccgctggcaaccaaagtgagcggtaaacgcatcggtatttttggcatggggaatattggccaagccatcgcccgccgggcgaaaggcttcgatatggccatcctgtatactgaccgccagcgcaaagacaacctggattaccagtggtgcgccgatctgcacacgctcgccgcgcagagtgatttcctggtgatcgcggcatccggcagtgcggaaaaccgcgggattattgatgccagcgtatttaacgccatgcccgatagtgcctggcttatcaatatcgcccgcggcagcctggtcgatgaggtggcgctgataaaagcgttacaaaatcatgttatcgccggggctgctctggatgtatttgaaaacgagccccatgtcccgacagcgttctttgctctcgagaacgttctgcttcagccccacgtggccagtgctaccgtagaaacccgtcagggaatgagccaatccgttttggataatctggcaggttatttttcccatcaggatattcctggattaattaaataa

SEQ ID NO: 427582 - DNA, 471 bp, Serratia marcescens
atgattattgatgccttaaccactgccgtaaataatagtttctatccggcggctatccgaaaaatgctggccagcattattgaacgtgagccgtccaatttacctatcggccactatcaggtacagggtaaacagatgttctttaacgtcgttgaaggggaaaccaaactattggccgaccagaaaccggagtttcatcgccagtatctggatatccatcttgttctcgaagggaaagaagtgattggtgccggggtcttggggctacctctgactctgagtgagccgtttaacgaggcgcacgatcttggatttagcccggcgatccccggtgagacactcatccatctgcaacccggtgaattggccgttatcttcccgggggagctgcaccgcccgatgagcacctgcacagcaccggcagctctgcgtaaaattgtggcgaaaatcgacgctgccctgctgacgtag

SEQ ID NO: 427583 - DNA, 588 bp, Serratia marcescens
atgtcgttgcaaatcgtgcttacccgcagggaggcgctggtaaaaatggtgggcgtaatcgtcgccgccagcctgttgccttattcaaatataacctatgccgaacgggcgcaaattgccgcttcgcccgtcgaatacgcacaatttctgcaaatttcgaggaaaattaccgagtttgacgatttggacgtcacactctccgcccgttatttttctgcactgcgcgaacattttccgcagttgaacccgcagctcaacgccttgttcactctgagccagcgagccgccgatgcggaaaccttgaaccaatatgcgattgaacatgggcagagggagcttatccaagcgatcgtgaccgcgtggtataccggaaccgtagatccctcaaacgccgagcatggtcagttgattgcttataaagaggcgctgatgtatcgcacggtccaggatgccctgattgtaccgacctggtgcaattttggcccgctgtggtggagcggcttgccgccgggcgttagccgccaaccttccattcccgcaacagatttgcctgccgtagccgataaaaaatatgaggaccgcgtgtga

SEQ ID NO: 427584 - DNA, 1653 bp, Serratia marcescens
gtgaaaagcccaataattaatgcttccggcgatgcagaggccgatgtcgtcattgtcggttccggtattgtgggcggtctgatggcggatgctttggtgagccaaggctactcggtgctggtacttgaggctggcccgcgcattgagcgcgctcaggcggtggaaaactggcgcaatatgccactgcacaatcgtgcggggtcggattttcaggggctttacccgcaatcggagtatgccaccgcgccgctctatttcccggaaaacgactatatcaaactgactggccccaatggatctggctttaaacagggctatttgcgtgtggtagggggaaccacctggcactgggccgcttcttgctggcgcaaccaccccaatgattttcgcatgaaatccctctatggcgtggggagagactggcctatttcctacgaagacatcgaaccgtggtacgcgaaagccgaagaggagataggcgttgccggcccgaataatccggagtggcagtcccctgcggaacgcagcgggccttacccgatggacatggtgccctgggcctacggcgacagacgcattgctgaaattgttaatcctcacggttttaaatcggtgcccattccacaaggccgcagcacccggccctggaacggacggcccacctgctgcggcaataacaattgccagccgatttgcccgatcggggcaatgtacaacggcattcaccacgttgaacgggccgaacacaagggggcgaaggtgatccccgaggcggtggtgtataaaatagacaccgacgacaataaccgcgtcaccgccgttcactggtacgacacggcgcacaactcccatcgggcgatcggtaaaacgttcgttctggcctgcaacgggattgagaacccgcgtttgctgctgctggcggccaacgaaaagaacccaaacggcatcgcgaacagttcggatcaggtggggcgcaacatgatggatcactctggcctgcactgctccttcctggcgcgagaggccctgtggattggccgcggcccggcgcagagcagctgcatggtggggtatcgtgacggtgcgttccgcagcgaccactccgccaacaagatcatcgtcaacaacatcaaccgggtgatcccctccgcccttgaagtactgaaaacgggcaaggtcggcaaggcgctgcaggatgaagtgcgcgatcgcgccagccgttcggtggatctttccatcagcctggaaccgctgccggatccgaacaaccgtcttaccctgagccccacccgtaaagacaagcatggcctggcctgcccggacatccactacgacgtcggcgattacgtgcgcaaagggctggacgtggtcaaaacccagctacggcagattggcgacttgtttgatgcgcaagagtttgtgattaacgacaagctgaatgccaacaaccacattatgggtggcacgatcatgggtagcgaccccacgaactcggtggtgaacggtaattgccgcgcccacgatcacgacaacctttggatcccgggtggaggcgccatggtttcagccagcgttgtcaacaccacgttgacaatggcggctcttggactcaaggcggccaatgacgtacttcgagccctggagagcaaatga

SEQ ID NO: 427585 - DNA, 1398 bp, Serratia marcescens
atgaataaaatcacccactcgctggctgcgacgctgctgctgggaagcggttttgcggcgcatgcccaggacggcgatctgatcgctaaagggcaagcgctggctatcgcctctgactgcatggcctgccatacgaatacgcagcagcagggcaagccttttgccggagggtacggcattgcttcccccatgggcactatctacgccaccaacattaccccatcggtaaaatacggcatcggcggctattccgaagcggcgtttgccgacgttctgcgctcagggatccgtaaagatgggtcgtatctctatccggcaatgccctacaccgcctacactcgtctgagtgatgacgagatccacgcgctgtatacctatttcatgcatggcgttgccccggtcgatgagcccgccaagcaccaaaccgatctgccgtttccgttcaacatccgcctctccatggcggtatggaacatgctttacttggacaatcgccgcttcaccccagatctgacgaaaggtgaggtgtggaacgaaggggctgcgttggtgcaggggccggctcactgcggaacctgtcatacgccgcgtaatatgctgatggcggaagacaattcgcgcttcctgatgggggcatcgttgggctcttggtacgcaccgaatatcactggcgatcgccaggaagggatcggcaactggagcgagaaggagctggtggactacctgaaaaccggtcgggcggaagggcgcgcgcaagctgcggggccaatggcggaagccgttgagcacagcttccaatacctgaccgaccggcagctgcaggcgattgccacttacctgaagaccgtgccgtcacagggcgacgagcgtcagggcaatagccttagtcaggcgcactacaacgttgagcaccatctccgcggcatgaactcgcccaatgccaaccacacgctcaatagcggcgaggcgctctacagcggctactgcgccagttgccatcagccggacggcagcggcagtttgaaccaggcctacccttcgttattcaacaactccaccacggccgcgagcaatcctgcaaacctgattgccgccattttgcagggggttgatcgccggggcgacggcaagcacgtactgatgccgagctttggcgccggttcctatgtcggggagctgacggataagcaggttgccgatatcgctaacttcgtgctgcaaaaatacggcaacagcacgctgagcgtaaccgaggccgacgtgagtgaagttcgcgccggggggccgaaaccgctgttggcgcgtgcgcagccgatgattctgcctggcatggcgaccgcggcggtcatcgttattctgctgatcttattctggctccggcgccgcaaggcacgctaa

SEQ ID NO: 427586 - DNA, 996 bp, Serratia marcescens
atggtgaagtcgcagcgaattacgttaaatgacattgctgtactggctggtgtaaccaaaatgacggtcagtcgctatctgcgcacgccggacagggttaaaccagaaaccgctgggcgcatcgccgccgtgatcgaggaagtcggctatcgggccgatcctgacaatccagccctctattccaatagccctcccctcatcggcgttctggttccttcttttaacaatctgatatttgctgatgtcctcgccggcattgaatccgtaacgtcagtacatggctatcaaacgctggtcgtgaattatgactacaacagcaaacgcgaggaggagcaaattgccgcgatcctggcttttaagatcaaagggctgctgctgaccgagtcggtccatagtctgcgggcggaaaaattcctgaaggcggcaaaaatacccgtggctgaaatcatggggctgtcaggcaacactgatcgaattaacgtgggttttgataatgtgaaagccggctacgatatgaccaccatgttgctggccagcggtaaaaaacgcattatctattttggttcaatgtctgatatccgcgatgaacagcgttacacgggatactgtcaggcaatggctagccatgatttacctaccggccgtatttcccccaataaggtctcttccatttcgattgggacaggcatgatgacgcttgcaagccagatgtatccggatatggacggtattctctgtaccaacgacgatctggccgtgggagtgctgcaggaatgcctggcaaagggtatcagcgttccagcgcaaattgccattgccggatttcacggccttgagatcgggcagatcattaccccccggttagccagcgtactgacgccacggtatgagatggggaaagtggcgacagaaatcataataaaaaaaattaaagggctaccgaccattgaacgtgtcgatctccacttccgcctgtcaatgggggagaccatatag

SEQ ID NO: 427587 - DNA, 1233 bp, Serratia marcescens
atgatctttacgcccgaactcgcccgacgccaattcagcgctctgtctcagcacatcgacggcaaaccggcgatctttttcgacggccccggcggcgcacaggtttcacgcggcgtgctggaaaaaatgacggactacctggggaaatacaacgccaacctgggcggccactacttctccagccgagtcaccggcgaggtgatgggccaggcgcgggaatcggtgcgcgccctattaaatgcgccgtcgcccgacaatatcgtcttcggcatgaacatgaccacgctgactttccatctcagccgcatcatcagccgcgactggcaggccggcgatgaggtcatcgtcaccgcattggatcactacgccaacgtctccagttggcagcaggccgccgccgataaaggggccgtggtgcaccagataccgctggaaagcgccgactgcgcattggatgcggcgaaggtgtgtgaacgcatcaacgcccatacccgcctggtagcggtcagctacgcctccaatgtcaccggcagcatcgtcgatatcaaaaccatcgtcgaagccgcgcatcgagtcggcgcgcaggtgtatgtcgacgccgtgcactacgcgccgcacaacctgatcgacgtgcaggcgttaggctgtgatttcctggtgtgctccgcctacaagttctttggcccgcacgtcggtatggcctacatcgcgccgcagtggctgcaacgcctgcggccgtacaaggtcgagccggccaccgatatcggccccggccgtttcgagaccggcacgcagagcttcgaagcgctggccggcgtcgcggcggcgatcgactatctggcgcagtggggggcgccgggcgcgccgttgagggagcgtttgcaggagagcttcgccgcctaccaccggcatgaagaggcgctgtgccgccactttttgcaacggctgcagcaactcgacggcgtccggttatatggcaaccctttggcggacagcgcacgccgcacgccgactttcgccctgaccttcagcggccatacgccagacgctatcgcccgccgtctggggcagcacaacatctgcgcgggcagcgggcatttctatgcattgggtttggtgaaacagttggggttgcaggacggcggcgtactgcgcatcggcatgatgcactacaacaccctggacgagatcgatacgctgttcaaggtgatcgccgaagatatcctcagctag

SEQ ID NO: 427588 - DNA, 477 bp, Serratia marcescens
atgcagcatgtcagaaaattcgtcatttcctgtctgtttgcttcgataatgctccccggcatggcgttcgcggaggatgctcccgtgacaccgttggctaccgggatcgtcagcagcggggtggccgaagcgcaagtgaccgaggccgtgcgccacggtgaaatcctgactatcaaggtgcgtttcaaagggttgaaagacaaccttaacgggcaaggcttgtacagcagtctcgataaaagcagtcttgagaaatccttctatcttctggtgggtaataaaaaatacctgctgcttaccgatagcaataatgtcccattgacctctcccagcgtgtcattcagctcaagttcaggcattccctatgtcgccacctggtttggcagcttccctgcacctccgcctgacgtgaaggaggtgtacctgacgatcgccaacgtcgagccgctcgggccgatagccattacggatcgttga

SEQ ID NO: 427589 - DNA, 612 bp, Serratia marcescens
atgaacggcctcctcaggaaagccgcctgcgtgggcggggtgctagcccttgggctggtgtcattcggttcatgggctgacagcggagagccggcatcggtagggaaaccggtgatactcgatctcaaggctacccggctggatttggtggggttgccctcggggctgaatgccggcgtccttgatctgcagagtaaggccgcggatctggctaaacaatccgccgacatttccgtcagaaacagcaaaaatgccgtcacgttatcgatgcgcagcgatgtgctgttcgccttcgacagcgatgcgattgccgctaaagcggagcctgcgctgcaacaggtggcgcaatttatcgctgccgaaccggtagggaaggtggtgatcgaggggcataccgatgcggtgggcagcgataaatataatcaggatctgtcgctgcgacgtgcgcgtgcggtggctgcctggctgatcgcgcatggcgtagagaaatctcgcctcagtgagcggggaaaaggtgaggttgagccggtggcttccaacgacacgcccacgggccgggccaagaatcgacgggttgattttgtgttgccgaaaaccgctgctgccgattaa

SEQ ID NO: 427590 - DNA, 450 bp, Serratia marcescens
atgattgaaatacgcgagattaaccgcgacaacctgtttgacgtgtgcgaactgacgtcgaatcaagacggtgttggcaccgtgtttgaggcatttatttgctgtaacgccatctccatttccgaggcggcgttttttcctgaatgccagccccgcgcgctttaccgcgacggcgaactcatcggttttttcatgtacaagcgctggccgcataacccgcatgaggccgagctgtgccgctatatgcttgaccataagtttatggggcagggattggggcgtgagagcttcgccgcgatactcgcgcacttcaggctgcagggcgtagagcaggtgacgttaatgattgatgagcataatctcgtcgccaaaagcctgtatctcgcctacggttttcgctttaccggcaagattgaaaaggaagagcattactacagcctggcgctttag

SEQ ID NO: 427591 - DNA, 339 bp, Serratia marcescens
atgacaacccattccaacccgttaaactcgcgggaagtctgcctgcaattacgccacttcaatcaggtaatcgggcaacaatgccgcaatatggcacgccaaaaaaccacctgcccatgctgcctgacggacatcgccaccggctgcgacgccggtatcaaactgtgcgggcaacagttagccaaacccagcccgcaaaccccgttattccagcagattcgcaacttgctgctcgatctgcgcgccgaagcgaaaggggttcgccgaatcgagacgcttaatcgcaccaacaatgaaatatcgtggctgttgcgcgagctgtatttcgagacgttctga

SEQ ID NO: 427592 - DNA, 570 bp, Serratia marcescens
atgttgaacctcgaccgcaataatctgcccctcctgagcgaagaactgctcaaaaagcaacgcaccacccttttgatcatcgccttcctgctgctggcgggcggcatactgtgcctggtcaatcctttcgcctccggcgcagcgctgagcatcgtggtcggcatcctgctgctgttgagcggcgccgggctgattatcgccatgatcgctaaccgggcgcagaatacctggccgatgatcggcggcattctgctgggcgtggcctacctgattatcggctatgtgttcatcaccagcccgctggcgggcattctggcgctggcggtgtacctcgccgtgctgttcgcgctcggcggcattgcgcgcctggcagcgggctacatgcgccgtgggctgccgggcaactggctgcagttcgtcatcggcgtactcgatttgatcatcgcctggatgctgatcggctcaggcccggcggcgtcggtcacgctggtgacggcgatcgtcggcatcgagatgctggtcagttcctttgcgctgttccaggcggcgaatctgtttaaacgcgcctga

SEQ ID NO: 427593 - DNA, 162 bp, Serratia marcescens
gtgaacaaaaagcaggctaaaaaccgtgagggcgcccagcgtcgtgcgcagtccaaaatcccgccttcgtgggtgttgagcgatgagcaacgcgcctttattgaagacttgtggctggataacgcgcctgagccagtgcggcccatcgcccaacggcgctag

SEQ ID NO: 427594 - DNA, 975 bp, Serratia marcescens
atgtcatcactgcagtgcattcaacgtgttcccgtcggcttctttgggatggttttaggggttttcggcctcggcagcgcctggcgatacgccgccacgctcggctatgggcccggctggctgggtgagtcgctcatctttctcggcagtgctatctggctggcgttggcgctgatctatctctgccgctgcctgattgacccacgcgcggtgcgtgacgagtttcgcagcaacactcagttcagttttatcagcctgcttccggcaggcggcgtgttggtgtccatcggtctgcacccctacagcctgccactggcgaatgggctgatggtcgcgggctccgtcggccagctcatcttctcggcctggcgctgtgcgccgttgtggcgcggcgagttcgcgtcggaggccacgacgccgggattctacctgccgacggtggccgctaactttatctgcgcgatggcgtttggcaccgccggccaccctgatatcggcatgatgtttcttggcgccggtttgatttcatggctgaccctcgaacccgccatcatccaccgtctgcgtaccaaggccgagctgccggccgccgcccgcggcgttatcggtattcagctggctccggcctttgtcgcctgctacgcgtggttatgcgtcaatggcaacgacttcgatacgttcgccttaatcctgttgggctacggcctgctgcagctgttttttatgttccggttggtgcgttggttttttgccggtggcttcagcccgggcatgtgggctttctcgttcggcttatcggcgatggcgaacgcgtcgctgcggttgttacagagccagcgcggggcagatatgcaagtgttggcctgggggctgttcgcgttggctaacctgctgctcatcggcctgatggtgaagacgctgtggctgctgttgcgtgggaaactgctgcccgccaaaacgccggtggcgggatga

SEQ ID NO: 427595 - DNA, 921 bp, Serratia marcescens
atggcggaccagaaattactcagtattgtcctcaccgcgcataactgcgaagcctacttggacaaaacgctggccagtttggtgggttcacttgccgagctgaacgaagggtatgaaatcattctgattagcgatgcttctaccgatcgtacggcggacatattgcagcagtttgccgagcaccaggcgcatactcacctattccaggtcgattttcgcaatatcggcaaagtcaggaattatggcgttcaacagtgttccggcgactatatcacgatgctcgacggggacgattggctattgccgggtgcgttgcgcgatatcgtgcccttcctggccgcatcgcgacctgatgtgctgctgacaaaacttaatgaagtccatgacgatagcgatctgaacgtctcttgggacggactgcgcccccaatcgtggtcaggccaccaggcaataaagaaatacctcatccacaaggacatacaagcgcatttcatcggtcagttcgttaaacgcgagcttctgtcagcgcatcctttcccagccttccgttgctatgaagacgcttttctcttcccaacgatattgacgctcagccagaacaccgtcttctctcgcaacagcccctacctctacttcaaacgaggtaatagtctgtcaaatcagatcgacaaccaaaagatagatctgctgatcgaggcgatggaagagacggaacgcgtgtttggcaaacaatacgccaatttactcatgtgccactggatcaatatcttccatcgttatggcaggtcgatggagaattcagagagcagaagtaaaatcataagcaagatcaaaagcataaactcgctttctttcttgctggatcccgccattcgtctgagtttcaagaagaaatacctgaaggtccgcaatggaaagtaa

SEQ ID NO: 427596 - DNA, 1023 bp, Serratia marcescens
atggaaagtaatgctatcgatgacctgtttcagtcgttgcaaaacgctgatggaacgataaaagaaacgctgtatgcaggcaacttacatcagaatgcgcaagaacagtaccacgtcgcgtttggcgtggacggcaattttctccgccatgcctgcatcaccattcaatcgctcattggacaggttgataaagggcaacttcattgccatctgattacctcagaagagacggttggcatcgcagacaccttacgcgcgcttgtcacgggtacagcacacagcattcatgtacaccaactgcccgagcaatttttctcccgtttgccttcgaccgaattattcagcaaagcgatatactaccgtctgttggccccttatttactccaagataaagccaccgtcctgtatttggatgcagatatggtttgcttgaacgcctttactgacttttataacagcaggacatccagcgaagagatcgctcatgtcgtcagtgaaggggaaaaacaggcgcccgccttagcggccaatattggccttccgccaggaacgaactatttcaactcgggcatgctgctcattaacgttcagcgttggctccaggaaaagatcagcgcgcaggttttgtccgtactcgagtcgcgtggccataccttcaagtacatggatcaagacgcactgaatattgttttggcgggacacgtcaagtttgttgagaaaaaatataactcgatatttatgcttggacatacggaacacgactatcagcttatgcccccctctgacactgtctttctgcactatgccggtgcagataagccgtggcaacaatggaataaacaagccggcaccgttttctacacccgaatatatgccaattcgatgtgggcttcccacgtctttgacataccaaagaatgatgctcaagcaaagaaaatgtataaacttatgcttagagagaaaaaatacttatcattcctgcgttggtatctagcctattataaacttcgttacagtaagtga

SEQ ID NO: 427597 - DNA, 1242 bp, Serratia marcescens
gtgccgacagcatcacgtaacagcactattatttttaacctttgcttttttgcattggcgtgtgctatttctctaaatcttctcattaatggatattcagagaagattttttatcttgtcagctatgtcgccgttatttataccgtcatggtcgcataccgtaaaagagaaacgttatacggcaataaaccgctgatgcttttttgcctctcgctattgctctttgccgccagtaaaataatttgggcgcagctgtttaaagatacccaatttatcgatatcagagataactaccgtaccgtcggtaaacgctttctgctcgcggccttcgtgattttttatttttatcagtgtcgctgtttaatccaaaagaacacgctcaaagccagcatcgccgttcttttcataggcctcgctgccgcgctctggtttggctacctttctcgaaccgaactcgaacccagagtgaagtggaccactgatgcagccactaccggagcctatctggttgtatgcatttccatgctcgccattatcctgatccgtaaatgcttccaaaaatcagcactctccttgctgctttttctcggtatctttatactcagcatgatcatggtactgttaacggaaactcgcgcagccatattctttgcgccggttctctatctggtgttcttcctggtctattaccgtggaataagcaaaaaagtacagtcattgctgacggtggttatattatcaggtgcgattacggtattgtatttttcttgggatcgcatttcccaaatccaaacggatattgcagaatatcacaccaacaatgacacctcagtgggtgcccgcctctctatctggaaagccggttggtatagcgtgcaacctagcctgttcggtcaaaacacagatgaccgctatcagaaagtagaggattatgttcgtttatatgaacgggataacccggaagcagcgcggaatttagtttatcatttgcataatgacatgttggaaacgctgtctcttcagggcattttcggcattttctcactgctgtgcttttacggttttggcgtgtattttgctgtgaatcggcaacaaaggtgtgaaaacggcaatctgcttttcgttattattcctgtattcaccttcggccttaccgacgtggtattgatacagagtaacagcgcattagtgatcattattgcattagcgctttcacttccgtttttgaaaaaagcgcagtaa

SEQ ID NO: 427598 - DNA, 1083 bp, Serratia marcescens
atgaaaaaaaacaagattgacaccgtcaatcgctttctgcgttcttacacccggctttttgggaacttaaaagacgtaaaaagcttgggtgccgagcaagaattcaagagtatcgttatttactccagcacagcgcttggcgatctgatgtttaatacaccggctatccacgcgttaaagaaacgttaccccagcgcaaagttcacgctggtctcgagtgataaaaatcgccacttggtgatgaatagtcgttattttgacaaaatcatctattgggacaataaggttaaggatattttcagcctggtggcacgcctgcggagaatgaagcctgaactttcggtgatcttacactcttatattccctatgatgttctaagcgctgtgttatctggtagccaatatatcattcgtgataattacagctgtgatggtgactatatgaaccattgggtatatcaccatcagggacagtatgacgggcatctgattcagcgaaagctggatctgttgaaggttcttggttgcgataaccaggatacccgcatgcatattccggtgagttttgactccttgccgaagatgactgaccagacgttgatcggtttccagatgggtgcttccgaagcctcgcgctgttggcctaaagagcgatttgtcgccctggcccgtcagctttttgccgccaatgagaagtaccatattgtgttgattggcagcggcaaagaaaaagaacttgggcagcagttcctggcggcattgtctgaggaagagcgccggcgagtgaccagccatattggcaagacctcgctgccgcagctgttggcgattatccagcagctggacgtattgattaccggtgataccggtccactgcatcttgccgtggctctacaaacgcgaacggttagcctgttctatacggctaatccgcagcataccgggccatatcaagatcctgaacggcaccgcattatttatatcaatccggatgagaataaggcctcgttgaacgccaaatacccattggaagtgattgatgaagacgtggtttaccgtttgctgcgagagattttgaactga

SEQ ID NO: 427599 - DNA, 1224 bp, Serratia marcescens
gtgggcaaacttacggatatacagataaaagcttgggtaaaggcgggggaacgcttcgaaggcagggccgatggtaatggtctctatctttgctaccgcgatagcttcgcaacaccaaaatggcgcttccgctacagtttggcaggtaaagcccgagctatgtggatcggatcctatggggagctttcccttgctaaagcgcgtgaaacagtcaggatgctttccgcaagagtagctctagggtatgacgtggccggtgagaaaaaagagcgtaaggcttccgccattgcaaagatcgaggctgacaaaaatgcacgcaaggtatcagatctagcaactgagtattttgaacgccaaatccttggtcgctggaaacatcctgatattctccgtcgtcgtatcgataaggatatcaatccgcatattggtaatctcaaagccgacgaagttaagccacggcatatagatgaaatgctacaaaatatcgtttcacgtggcgccccaaccgtagccaacgatgtcttacgttggactaaaagaattttcaattacgggattaaaagacatattcttgaggtaaaccctgccgctgcattcgaacttgcggatgcaggtgggcaagagaaatcgcgggaaagatttcttactgatgacgaactatcccaattattctcggcaatgaaaaaagccaaaggattcggccgacaaaatgagctcacgtttaaactacttttactcctttgttgtaggaaaatggagctatgctcagctcgatgggaaaacatagacttaattaatgccatttggcacctaaccggtacaaaaaatggtgatgatattgatattcccctccccgagaatgccatattatggctaaatgaactcaagattatgtcatgcaacagtgaatgggttcttcccgcaaggaaaatgcaaaatcgtatgatcccccatattgtagaaagcaccctcccagtcgctcttgcaaagctacgacctcacttacatggcattgataatttcactattcatgattttcgacgtacagccagaacacacctcgcctcgcttggcgttgaccctatagttgcagagcgctgtcttaatcacagaatcaaaggtgttgaaggtatttataataggcatcagtactttgatgagcgcaaaaaagcattactattatggcaagataaattaattaagttagatatggactctgattaa

SEQ ID NO: 427600 - DNA, 708 bp, Serratia marcescens
atgaaaagttttcagcggatgacagaattcgaaagattcgcaacattaccgtctattactatcgatgagctctctaaatgcttggtcggagtatcaccatacgcaagaagaaaagacataaatgatgaataccttgaaataataatccacattagagtgagaataaaaagaacattagaagagatttttaaaaacgagaaaatacctagggttacaaactatggtgaatacaaaccgcacccacacccaatagatatggatgagaaagtaaaatcagatattatattctcagtcggatttaactgtcgggatgatgtaacaacaccaagtgcaattattgatagatgtaaagttgccattactaacttagcaatgcactccaaaacaaggccacttcttcaattcattggtggcgaggctgaatcactaggaaaacaattagtcgcaaacaatagagggctttacaaaaaagaagaggaagttgttagcctcaataaaattattggtataaccgtaagcttactggcgcaggagaaaaataaatccaatccatcaaaatggctaaaaaaagacaacaccgtatgtgttgagcatgttaaagacctaattgatgactttgtcgaacaaaatggaatttccagcgatggattaagagcttcttcaatccgaagtaaaatatcagccgccataaagacaatttacgattga

SEQ ID NO: 427601 - DNA, 177 bp, Serratia marcescens
atggctacatcaaagtgtacctacatctttgccgcaatcaaccgcacccagcgcaaaatccgcccggtgatgttgcgcattaccgccggtgacgaacgcagcgcccgccgccagttggccggtgactacgtactcctgttcgccggtcgtctgccacagggaggctgccatgcgtga

SEQ ID NO: 427602 - DNA, 354 bp, Serratia marcescens
atgcgtgagtttccccagcacggcgagcgctatcgccatcagcaaggcagaacggtgcgtatcctgagcctgtatcgcgccgatgaggcaacggcccgtaataacccggagttcgcctatgaagtggtgtttgagtatgacctgtccggcaacgtgacctttatgccgctgccgtggttcagcgaggtgtaccgcaaaatcgccgatgcgccgcgcaaccttgctccccggcctgccgccggtcagtcgccgctccggctgcacccgtctgtaaaggtggtctacagccgccagtgggagacgcgacggccgacaccggagcacgacgacacccattattcccgcttcctgtaa

SEQ ID NO: 427603 - DNA, 282 bp, Serratia marcescens
atgacttcatcacatgggcaatcatcagctcagggcacgctgttgccgccatcctgccgctacctgtcttacggcatgaccgaagacgcctttgaaaaacttaatcgcgccaagcaggcgtgttcgctgctggatatgttgttcgccgggcaggccgcctctacgccgttcccgaccggtatcaccacgcaggaaatggccgccatggtggcttacctgtcggaggatttggccttcgttcaggcgcagtgcgccgcaattaacggggaggtggtcgcatga

SEQ ID NO: 427604 - DNA, 351 bp, Serratia marcescens
atgacgctggataacggttctgcctcctgcattccactggaagtgcgcaccgcgctgtttcgccgtgcggtggccgaagcctatctggccgcctgtgcagcgcagggcatggcacttccccacacgctggacagcctgcagatgctgattgccagcgacatcgaagcgctgtttgtgaagctgcacggcgttgacgaaggcatggcgattgcctgctcgttgctgggcgatatggtggccccggacattctgctggcggcaccgcagctcacggcgcaaggttgcaacatcatggcggagctgtgcggcgtggcggtcacatccggccatccggcaccgacgctgcattaa

SEQ ID NO: 427605 - DNA, 2682 bp, Serratia marcescens
atgaccaagttagaacagaccaaacaggccgcccgcggccgctgggacgttatttttccgctgctgggggtcacggtaccccctcacggtcagcacggcccctgcccgtcgtgcggcggcaccaagccgtttcgcatggacgacaagaacggcgacggccgctggatttgtacgcactgcacacacggcgacggactggacttgatggcgaaggtcaacggcctcagcctcggtcaggccgtcaacgaagtggccgacgtgctgcaactgagtcaggtgcagcaacagccgcccaagcccgccagaagagaagccgccaaaccggcaccggcggtggccgacacggtagcgcagtggctggccgcctgcacggaggggcaaagcgagtatctcaccggcaaggggtttgccagcctgccgcagccgctgaccaccacagcccgtaagagcggcggtgtggactttccgccggggtcgctgctgctggcgctgacggacatccacggcgccgtgacgggcgcgcagttgatttctccgctgggtgataagcggctgttgccggggacggtgcaaaagggggcatttatcgccctcaacgcgcccccacagagcgacacgccgccgacgcaggtgattatcaccgaaggctacgccaccgcgctgacggccgctcagctcgccgcaggctgggtggtggccgccatctcggccagcaatctgccgaacgtggcgcaggcggtgcacgcccgctggccgcaggcccgtatcgtcattgccggagacaatgacttctacgacggcaaagagaacaccggcaaggtctgggcggagaaagccgccaaggccgtcaacggctgcgtcacgctgccgccgacccgccataaggcggactggaacgactttatgcaggagaacggcccggcacgcgccaaagaggcatttaacgaagagctggtgcaactcggtaagtcggcggtgaagctaccgcagggcttccggctgacgcaggaatacctgtggttcgacaagcaggtgcagaagtcggacggcgacaccgaaatccgcaacatcaaaatcagcaacccgttgcgggtgacggccatcacctgcgatgccgacggcggcaacttcggccgtttgctggaatgggaggacacctacggccagccgcgtaaatgggcgatgccgatggagatgctgagcggcagcggcgaagagctgcgccgtatcctgctggttaacggcctgtcgtacatcagcaccaccggcgaggcccgcgcccggctgatggagtacatctccctgtgcaagccggagcgcaaagtcacctgcgtgaacaaaaccggctggcacggcgacgtctatgtgttgcaggacgaggttatcggcgacggtgcggaagcggtgatactgcaaaccgccagcgtgcagggtaaggattttcgcgtggccggtacgctggacgactggcaggagcagattggccggtactgtgtcggcaactcccgcgtggcctttgcggtcagtctggcgtttgccgcgccgctgctgcgactggtgggaatggacggcggcgggtatcacctcaagggcgaatccaccgacggcaagaccaccaccatgaaggcggccacctcggtgtgcggcggcccggactattggcacacatggcgctccaccggtaatgcgctggaaggcaccgccagccgtcgtaacgacgcggcgatgatgctcgatgaaatccgggaggtggacggccgtgaggccggaaacatcgcctatatgctggcgaacggccaaggcaaggggcgggcaggcaccgacggcgagttacgcgcccgcaagcagtggcggctgttgttcttctcgacaggggaactgtcgcttaccgagcacgccgcccgtgccggcgagcgcacgtttgccgggatggaagtgcggatgctccagataccgagcgactccggcaaatacggcgtgtttgaaagcctgcacgggttcgacagcggcaaggcactggcggaacattttgaagttgccaccgcgacggtgtacggcacgccgttccgcgcctggctgaaagccctcaccgccgacctgaacggcatgacggccagcgccaaggcgctgatgaaggagtacacccagctgctgatgccggataacgccggtaatcaggtcggccgcgccatcaaccgctttgcgctggttgccatggccggggagctggcgacgcgactcggcatcaccggctggccggagggggaagcgctgcgggcaacccagacctgcatgcgggcatggctggctgaccggggtcacagtgccaatcaggaagacattgctgcgctggagcaggtgcgcaccttcttcacggccgggcagttcagccgctttgccgactggcataacgagatgaaccgccccggcaacatggtgggctggcgcaaggtggagaaaggcaaccatgcccggcaggtggaggcggtgacgacgttctatgtgatgccgtccggctggaaagaaatctgcaagggctacgatgcgcggaaggtggcaaggctgtgtgcggaagccggttttctggttccggccaaggacggcaaaatgcaaacggccacccgcccgccagagatgggcgtcaagaagctgtatgtcttcaccagtgacgtcttagggtaa

SEQ ID NO: 427606 - DNA, 750 bp, Serratia marcescens
atgaccaccaagaccccgcttgtcgcactgtctgaacgcttgttgcagcagcaacccggctttgatgacgcacgtagcagtttttacaaaaagaaaacggagctgaatgatatccgtcaggtcattgcgaccacacacgataagaaacgcgcagcggaagagcaggccgtcatggacgacaaaggctggcgtaagcggttccgcaaggcaaagggcgaactgacgccggagatgcaagacctgcatacccaacgcatcatcaaacgtgaactggtgaatgaatacgacgggctgctggcagaactggaagatgataaggaagaggcgatggttgcggtctgcaacgccgccaatgcttatgaccagaagcaccgtgcgcttttgcgcacctactccgaaatgacgctggaggttgcgctggatcaagcctcaatcctgatccgcgcggttgctttacgactccatgcccagtcgcgtctcggccacgatgaacagcagttccataacaacaacctgtgcgcgcgagatccacacggtgtcgtgatgcaggaagtcatgcaggcactggttgaacgtgccgctaatttccatctgagcacggagagtgaccctattcttgaggcgattgggttgtacggcccggatttcagtggccttgaccagaggctaattaacagtccggcctcacgaatcaaactcggcaaggaaatcgctgcccgcaaacaagccaaagcggaagaggaggaataa

SEQ ID NO: 427607 - DNA, 246 bp, Serratia marcescens
atgatgcgctgtcctttctgccgcagcggagcacacacccgcaccagccgctatctgacggaacagaccaaagaggcttactaccagtgccagaatattgactgctccagcacctttaagacgcgagagagtatcgaacacgtgatccgccagccattgccgccacaaccgctcatggcgccggtgtcaccgccaccacagcagcgaacgctgaaccgctacggaagccaccaccacgtacattga

SEQ ID NO: 427608 - DNA, 1695 bp, Serratia marcescens
atgcaagagctagatttatttacagaacaagcagaatacatagagaaggaatctttcgagaaatggacaactacccatattgatgaagagctatacataaaaaaactaagtcaaggtggagctaaactgatagttgggcctcgtgggtgcggaaaaacaacacttatgctaaaaacatactatggttgtttaaagaccaaaacgactcttggcgtgtacgtgaacttcaaatcctcattgaaattagagcctttatacaaaaaagaggctagcgcacagtattggttcaatcaatggatgctattcaaggttattgaaggattactagagacactggatattattagtaaaaaaaggacatggaaggggcgattttctaaaagcgccgtttctaaatacctaaacatccttgagatgggtcgaattgacttattaaacagtgaacagatggtaactattgaggacattatatccgagatagagttctcactggaaaacacaaaaaggaagaggtgtgtcatattactagatgatgcagcacacgccttttcaaatcagcaacagcaagattttttcgaattctttaggcaaataagaagaaaaaacatctcacctaaagccgctgtttatcctggtgtaactaactactcgccatctttccatatcggtcatgatgcagaggaaattgatgtttggatgcgtccaaataatgatggttatattgagttcatgcattcagtattaaaatcaaggtttaatggagggatttatcaaaaactaacgagcgatattagcttactgaatttagtctgctatgccgcttatggttctcctcgtatgctcctaaatatgatatctaagttatgcaaagaaacaaataatggaaaagaagatattgaaatcacagacttcaatagtcagaaagtaattagatccataaaggactcgtttagaaatacatataatatatatgagtcattaagagttaaactgcctatgtattctcagttcattgacgtaggtggaaaggtttttgaaaacatactatcaatattaaaagaattcaacagaaaccatagggcttctccaaacaagcagtcttcaataatagcaattaaaagacacattccatctgaacttgaaaaagtcttaggcttctttcaatatgcaggtatattatcccctatagccccaaacaatcgaggggagaagggaatatatgagttattcgagatacatagtgcggctatagtagacagaaacgtcttctttagtaaaagcgcaataaataaagatgattattgccaagcatttggaaacaaaacaacacgcttggttcctcaacattctgtagagtcgcttgttggtggtgataacatacctacgatgtttaatctatctttgccaccatgctcagtatgtaaaacccctagggtttcagaaaatgcaaagttctgctctcactgtggagcttatttaacagaggcatctgtttttgaagatatcgtgcaacaagatattgacgtattacccattaccaaagagcgtgctgccactataaaaaaacacagcaaaataagaacaataaaagatattttgatggattacgataatagtgaactgcaaagcgtaactatgattggtcctttctggtgcaagaagataaaatcctatgctgaagaggtgattgcataa

SEQ ID NO: 427609 - DNA, 843 bp, Serratia marcescens
atggctccagtaaattggaaaaaaagcgtcaatggttctgctggaactataactcccaccctgcttcagagctgtattgttcataaagcgcgaaatggtgaagctcctatcgatacattttacactgaaacaagagcaattcagggaaagtttagaccagaaaattacgaagattgtgaatggcttgggtcctatcttagtcttggtatcttttcttcaactgagaattatttcagggaaatcttctccgaaattttattcttgtgcccttcatctcaaaaaatggcagcagatgcacaaataaatctcggttctttattatggcatccaactacagactacccgcgaggagctttcgaaaacttttcatttgctgatgcaaaggtcatagtttcgactgcaaaaaaatatattaaggtagatttagagacgccagagttaaaagctgaccttgaaaactatgacaatatttgtgaactgcgacacggaatcgttcattctagtagaattattgcagggaaaaacgccattaagctaggtattgacagttcaaaaaacaaaagctgtatagttatcaaatatgatgaactacaggaaattttagcaatctgtaatagtttggttagttctgttaatacatttttatttgaaagattgtgccaaagatgggcaacagattggaggagattaccatcgtggagaagagaagatgagcataacaaatttaaaaaaatatggagcatattacattcatccatagatgagagacaacaaaggatacctacaaatatcagcatgagaaaatgtaaaaatcttgtaaaggcaacttataacattttgtag

SEQ ID NO: 427610 - DNA, 816 bp, Serratia marcescens
gtgtcggcctcggcggtgggtaaaagcgtggcgcggctggaggcgtcgttgggcgttaggctgttcaaccgcagcacccggcgcatcaatttgacggaggaaggggcgctattttacgaacgctgccggcgtattgttagtgacatcgagaacgctgaagccgagatggcacgtatttcagaggcgccgcgcggcaagctgcgcgtcagcatgcccgccatcggttaccgcatgctggtgccgctgttggctgattttaccgcgcgttatcctgagattgagttggatgtggacttcaacgatcgcatcgcggatctgatcgccgagggcgttgatgtggcggttcgcggcggagagctggctgattcccgcctgatggcgcggcgtcttggaccgtttcgccaggttttggtcggcgcgccggactacttccgccggcgcggaacgccgttgaaaccggcggatctgctcgcgcatgcttgtttgcgttatcgcttcccgggcgggcagcagttgcaggcgtggcggctgagcgccgacgatgaggcgctgtcgttaaggttgccggtgacgatgagtttcagcagcgttgaggcgctaatccttgcggcgcagcagggattgggcatcgcctatctgccggatttcactttgagccaggccctgcgcggcgggcagctaacggcggtgctgcaagacagcacgcccgagcgcggcgcgttttctgccgtgtggccctctaaccggcacatgttgccgaaagtccgggtgttcgtggattatctggcgcggtacatgctgccggacgatcagtga

SEQ ID NO: 427611 - DNA, 1524 bp, Serratia marcescens
atgaacgctcatccatcccggaatgcgcccccgcagcgctggctcatactcttttccgtgtgtctcgcaggcctgatcatgccgttgagctttaccggccccgctgtcgcgctcaccgcaatcgctaaagatttgggcggcggactggtcgcgctcagttgggtcaccaacgcgtttatgctgaccttcggctgcagcctgatgctcgccggagcgctcgccgatcgttttggccgcaagcgcgtgtttatctgtggattggcggcgctcgtgctcagcgctctgctcatgagcgcggcgcaagacattatgtccttcgacgcgatacgcgcgctgcaaggcatctccgccgcggccgcactggccggcggcaccgcaagcctggcccaggtatttaacgggccggagagaagcaaggccttcagcctgctgggcaccacgttcggcatcgggctggcattcggtccgctgctggccggcacgctgacgcagctcttcggctggcgcgcattttttctctgcctggcgctgctcagcgccattgcgttgttcagcggccagcgcgatatgcccgaatcgcgcgatcccgccgcctctcgcctcgattggcccggcgccatcgtctttacgctggcgctgtcgctgttgacttacgccgtgctgctggcgcccgacagcggctggagcagcgcgcaagtcattaggccgctgaccggcgcgctgctgtttatgctggcttttatcctgatagaacgccgcaccgctcggccgatgctcgatctgtcgctgtttcgctacccgcgctttgtcggcgtacagctgttggcggcagcgccggcctattcgtacgtggtgttgctggtgctgcttcccctccgatttatcggcatcgagggttacggcaccgtggaaaccggcatgatgatgctgacgttgtccgcgccaatgctggcgctgccgctgctgagcggggcattcgctcaccgcttttccgccggcgccgtttccagcctcggcttgttgatttgcgccgccgggctggcatggctggcgcactatgcgccggggcaatcgctcgcgcggttactgctgccgatgctgaccatcggttgcggcatcagcttgccctggggattgatggacggtttagccgtcagcgtcgtgccacgagagcgagcgggcatggcgaccggcattttcagcaccgttcgcgtcgcgggggaaggcattgcattggcgatcgtcggtgccctgttggccttgttggttgggcgccatctcgctcccccaaccgcaaacgccgccggcgcgcacgccctggccatgggggatataccgcgggcgaccgccctgctcaatgcggacgccgcacggctgaagcacgcctacaaactggctttccagaatctgctgtacctactcgccctgacgacgctggcgtccgccgtcattatctttctctttctccgccaccccgcacgggaaaccccttcgtccgccccacgcattaccgacgcgccgtaa

SEQ ID NO: 427612 - DNA, 855 bp, Serratia marcescens
atgattagggaagcgcaacatcatgagaaaataaagctctcctgtgggatatctatcaacgtgacatcttggggggaacaggaggcgccggcgtgcctgttgatccacggattagataacaacgcgcgtatttgggacaatatagcaacagaacttagtgaaaaatatcgagtctacgccatcgatattaggggacacggagattctgattggagcgacagcaacagttacacattgcaaaccttcctcaaggatatagaacaagttagagcttacttatcgctctcagactttataatggtcggtcactctctggggggaagaatagctacctattacacggccgaataccagcagcacgtcaaaaaattaattatcatagacatggctcctgagattgggaaaaatatcattgaaaaactgcaatcagacaacagaggccagccggcaaacttcccaagcatccaaagttgttatgcctacatgcaggccatctaccccctgtcccatcaagcgttactctatgatttctgcctgcatagcttctcgcaacagaatggctattacaccaataaaacagatcccgcattcaagcataaaatgtttcagccatcagatcgggatggatatatcaaccctttgcaggacgaaaaaatatgggacgccctgccgcagatcaatataccgacgctaattattcgcggtggattttcggcggtattgtccagccaggttgcagacaatatggcgaaaaaactgccaaatgccaatataagcattatcgagcgagcgggacatgcggtcatgctcgataacccgcaacagactaccaatgcgatcataaacttcatctaa

SEQ ID NO: 427613 - DNA, 1059 bp, Serratia marcescens
atgcgcgacaatccggcgctgagagagctccccatcgccatcggcggcccaacaaaaacccaagggatcctttgcaccagtaactataaagccagagagtttggcgttcgggccgctcagtcaacgtacgaagcttttaaactctgccctgaactcgtgttgattcatccagacttcgctaaatataagttgatatccaatcagctcagcgttatttatcgtaagtattcagagaaaatacagcttatttcgcttgatgaggcatatattgatgttaccgatagccacctgcataatggttcggcaacgctaattgcacaaagcataaaaaatgatattttcgaaacattaagcttaacggccagtgccggtgtgtcgtttaataaaatgctcgcaaaaatagccagtgactggaataagcccaacggacttttcgtcattacgccggacatgcgtgatgattttatgaaaaccctgccgttgataaaaatacccggcgtggggaaagtcggttatgagaaactgaaaaaaattggattatccacttgcggcgatgttgttgaacgagacattaccgaactcattaatctttttggcaagcgcaccgcattgaagctcttagaggcgtgtcacggcgtgtccaatgccgtcgttaaggaaaaaagccagcgaaaatcatttggaatagaaaagacattctacgaccccatttacgataatgaagaaatcaccaaagaaatcgatggattagtatcaaactacaacctaaggctggcagagctggatgacttccatttttggcagcgcagaatatcacatgtatcagtgaagataagatttaacgactttgagacccttacccgagccattgggatccccccccatgaatctgacacgctcataaccaacaggctcattaacaaagaaaccgctgaaatactcaaagcgcaactgctctccatgcatcatgatgtcaaaaaaccgatacggctcatcggcattggcatcaagtttgaagagagcattgatagtcaattagaacttttttcgacgcaatag

SEQ ID NO: 427614 - DNA, 5667 bp, Serratia marcescens
atgaagacgatggaaaaagtcagcaaaatttcacctatcgacgtgcttgcccaggttttagacatccccctttctgaattagtcaaaatggcatcaactctgttcggcatgcttggcattgactcattaacggctacgcgggtgcgcggcatgcttaaaccggcaccctcataccaagagctctacggtctgactgttgggcaagttattgaaagacttggcgcatctttttatgcaaccgatgacgacgctgctggccagcgccgagagcgcaacgattctgactccatcgcaccactgacgcctatgcaggaatcttatattctgggagccgaacgagattgttcatgccaggtatacagcgaatttgatgttgaaggtcttgatgtagacgcttttaaacgcgccgtaacgtctgtcattgatgatgaacccatgttacatgccgttattgttaatggtaatcagcaaaaattaattgaccgctatgcaaaacgtcatgagttctcatttcctgtcgacaatgtcaccgatttagatttgcgccgctcagaatgcattagtgctgtgaagcataccgacgaggttttctgggggatccaattgacgcgaataagcgccaagatgactcgtatccacattatgctggatatgctgttcattgatgcgaccagcgcaatgatattatgtcagcgagtgattgaaaggtataacgcgtcgattgatggcattgaatttaccgcgcaagagcttccaccattaagattttttgattactgccgagctggagttaatggagacgtatcacaggcgtcattatcatactgggaagaaaaggtgaaaacgattcccggcccgccgcagatccctcgagttaaatatgaagttagtcagaatgcaaattttgatcgatgtgccgctacgctaaacggcgatgattgggagaggataaagggtatcgccgggcatttgcagattacgcctaattcaattttattatcggcatttgcggaagtgctgcgtctgtattctgaaaaccctgaattcacgattaccgtgacgatgtctgaacgcccggttgcgataaataacgattattccggcgttgtcggcgagttcaccaacgtcttgttgtgcccggtcacatcggccgccggcaggggcattgttgagcaggcggtaagcttccaccagacgctgtcggctgggctggagcacagcgatattaatgggttggatgtgattcggatgttgcgtaaacaccacaatgatccgcacctgactttccctatagtatttacgtctttcatcggcattatcaagccaggtttagaattaaccggctgtaacacgaaacttaattatcagcagacacaaacgccgcaaatttctttggaccatcaggtttacgaaacggataacggcctgcagattaattgggactacgatggacgagtgcatcagggcgaacagatcgctgaaatgctccggtgtttccattgtgtattggagaatgtcgcgcttaaccagtcgcaatctgtggtattgccgccggagctcatgcaattacgtgaagaaatgaatgacacgggttgcgaatttgatgaattggagaaggggttgctgcatcaaccggtaataaaggcggcgaaagcttttccggataaaatcgccgttatcgatcagtcggtgagcctcacttatcgttcattaatttccgtggcgaatgcaatagcggtaaaactccaggatatcggcatcgggcctgggcattctgttgcagtcgtgctcgagaaaggatgggagcaagtcgcggggacgttagggatattaatgacgggggcctgttacctgcctttaaaccccagcaatcccgacgatcgcctccgcagcatcatgcagctggcaggttgccaggtcgctttagtccatgacaggacattgtcgccggagcgtgattggtatgtcggcggcgacgggcaatcaccgacgacaatcaacgtgcatgtcgatttggcccgagagattgaaaatagagaagcagcgtcggttgccatcgatcctcattcattggcctatatcatctttacttccggttcgaccggcgtgcccaaaggggttgagattgcgcaccatgcggcgttgaatacttgcctggacattaaccaacgctttgctcttggccaggagacggtgacgtttggcatttcctccctcagtttcgatctatccgtatgggatatcttcggcacattagccaccggcggtacgctggttgtttgcaagccggatggcacgcgcgatccggactactggtggcagcagatccaacaacatcatgtgacggtctggaataccgtgcctacgtccttcgaaatgctgattgcggccagccaaccggagtatgtcatgccgctgaaaagggtgatgctcagcggcgatgccatcagtatggccatggttgacaatgcgatggcacgttatccacagtttcaaattattgctctcggcggcgcgaccgaagcgtcgatatggtcgaactatcatgtcgtgacggccgattctcacttgcttggcacggagctggtaccgtacgggcggcctttatccaatcaaacgatgcacgtactggatgcggatctgcaatatcgaccgacgggagtggtcggcgatatttacatcggtggcaaaggggtggcggaagggtacttccgcgatccgacattaaccggcgagaaatttgttcacaccgaacgctatgggcggctgtatgaaaccggcgatcttggccgatatctgccgaatggagaaatagagattgtcgggcgcaaagattcgcaggtgaaagtgggcgggcaccgtgtcgagttggcggaaatcgaaaattgcgcgcagcaactcagcgaagttcaacgcgctgttgcggtacatattcctggtgccggtgcccgcgtggtcggctttgcgaccgctaatgccgatgaggcgaagacgggcctggaggaaaaactccgtatccatgttgaacagctgttgcctgattatatggcaccccaggtgtggattgtgttggatgcgatcccgttaacggctaacaataaagtggatatgaaaaagttgcgcagcatcgcgcaaaccttgccggcggagggggaggaaagcgacaccggcgtggaaacgtccagcgaggccgctctggtgctgcaactcgccgcacaggtactggatgtgccggttggcacgctttcggcgagccgcagcttaatcgaacaggggctgacctcactgtatgcggttcaactgattaacatgttgaaaaaagcctggaatacgcctctctcttataccctgatctttaattacccgagcgcggtgaagctggcggcattccatcggggccaactgagcaacccgcatggtgccgcatcggcggcaacgcgtccgacacccaattatcatgcagagccgattgcgattatcgcgcgagcatgccgtctgcccggcaatgtcggctctcccgatgaattctggcatatgctgtcgtccgctaccgattgcatgtccgacatccccgcttctcgttttgatatcagcccaatatatgacacgaatcccgacacactaggagcggcctatacccgtcgcggcgctttcatcgaacgcgccgagagcttcgactatgcctggtttgacttgcctcaggcggaggcaagaacgatggatcctcaacagcgcattatgctggaggtggcctacgaggcgtgtctggcggcaggttatgacagggaaaaactttcaggctcttcaacgggtgtgctcatcggccagatgaactacgactggatgatggatttcggtcatacgaaagagtacgcgggaaccggcgccgcaccgtccatcacctctaaccgcatctcttacctgctcgatctggccggccccagcatgaccattgattcagcctgttcgtcctcgttggtggcggtcgacgctgcggtggccaagttgcgcagcggcgcctgcaggatggcgatcgccggcggcgtcaacttaatcctttcgccagaaccttacgtttttacctgtcaggcgaagatgctgagcgtcgacggacggtgtgcaactttcgatgctcaggccaacggcattgcccgcggcgaaggcgtcggcgcggtggtactgaaacgtttgtgcgatgcggaagccgacggcgatccgatcctgggcgttatcaaaggttgtgccgtgaatcaggatgggcgcagcgcttcacttactgcgcctaacggcctggcgcaagaggccgtgatccgacaggcattgcaggaggcgggatggcagggtgccgacttggactatgtcgagtgccacggcaccggcacgccgttgggcgatccgatcgagatagaagcgttgaagaatgtgttggccgtcgatcgcaaaaaacctgtggtgctgggatcggtgaagaccaatatcggtcatctggaaggcgcggccggcattactgggttgattaaggctctggaggtcttgcgccatcgtgaagcgccggcgaaccttcatttccaaacccttaatccaaaaattaatttgagcggttttgcggcggtggtgccggtcaaacctacccgtatcggtagccacgatcggaaggaggccgtccgggtgggggtttcttcatttggttatggcggcaccaatgcgcacgtggtgctggaatcctacgaccagccgtcaggcaaggcgcgcgcacgccaggatgcctggctgtttaccggtcagggggcgctgcagtccggcgccggcgccgcgctgtacgcggcggatccggtgttccgcgaggcgctggaagattacgtcgcgcagctggcggcatgggtggacgcgccgctgctgcaatggttgctggaggcgagcgccgagcattcggcgcgcctgcaggagacgcaataccagcaaccggcgttggtggcactgcagttggcgcaggtggcgatgtggcaggcgcgagggctgacgccgtcgcacgtgctggggcattcgataggcgaatttgcagcggcagtggtcgccggtgtgatggagagcggtgatgcgctgatgctggcggcgcggcgcgggcaactgatggccgactgcgagccgggcggcatggcggcgatacgcgattcggcggagaacgtccgtcgcgtgctgccggcggaggtggttatcgcggcggagaatggcgcgggaatgacggtggtggcggggccgcacgcggcgctggcggcgttcgtgcagcggcattatgcgcatgaacacacgccgttggcggtttcgcacgctttccattcgccgatgatggcagcggcagcggcggcgtttggcgacgtggtgagtacggtggcattgcgcgcaccgacggatggggtgcggtttatttccacgctgacggggcaagcggcgacgggagggctgcagacggcggagtactggagtgagcaaatcactcagccggtgcgtttcctgcaggcggtgcaaacgttgctggggcaaggcggcacaccggacggcgtgtttgaaatcggaccgggtgcgacgttgatcaacatggcgaagcgtatcgcgcccgatgtgcggacgcagtgggttacctctaaagatgagttttatttcaattaa

SEQ ID NO: 427615 - DNA, 3840 bp, Serratia marcescens
gtgagtaaacgatcgcctttatttaaacataagccattagcttgggctaagtcggaagtgaaacctgcgacgcacatcgatacgccgatgggaaaggtgcctgacccgctttacacaacgatctgggttgagcaggccctgcctgaaatgggagaggtgaacatcgggccccacttgctgttgtcgcgtcatacggtgccgctgaacttgccggaggggtggatcggtatggttgccgttggggccgaggcggtaggcgccgtgctcgatgaacaagcgtggcagaccgtggcggtattgagcgaaggggaagaggaggatgtcgcgcaggcgttagccgtgttgcaggcaaagcctgttccgcgtttagttctgttgaagcgaaccggcgcactgggtgatgcggggttgagcgggttggtgcgcacggcgcggcaagaacaaccggaacgcgtgctgcggtatatcgagtgcctgccggaacaagtggcgctggcgctgtcactgtgtcttcgtgaggatatcgaggaagaatgccgccttactgagtcaggcggcatgcagtcgccgcggctccaacgctaccaaacgcagaagtgcgacagcgcgggaattcgggcggacgccacctatgtcatcagcggcggtatgggggcgttggggcaagtcgtcgccggctatttggcgaaacagggggcggcgcatgtactgctgctgtcgcgaaccgcttattccccggcggatttaccgacgttgggggaaaacgtcgcggtcgccagcctggcatgcgatgtggcggatcgtcggcaagtggaggcgatccccgcctggctgaatgcgcagggttggccggcgatctctggcgtgattcatatcgcgggtctgttgaccgatggcactttgcttaagcagacaccgtcaatgctggacaatgcgcgggctgtgaaagtgaatggcgcgcaacatctgcatgacatcctggcgcccggcgattttatggtgctgtattcctctgccgccgcggcgttcggttccgttggtcaagcgagctatgcggcggcgaatagcggcctggacgctttagcggaacagtgggcgcaggctggagaaaaagcactttcgattcagtggggagcctggtctgaaaatggcatggcggtgcgccatgatgcggtacgccgcgcagaaagcgccggttttggcgccatcagcaatacgctgggctgtgaaatgctcgacaagcttttatcgtcggacagcgccggcactttccttgtctcgccgataacatgggcgcgcgtcaaactcacaagcccgctgattgaaggattgaaaccgcgcccgagcgctgctccggcggagggcgtccaggacgttcgtcagatgatacgcgaggccgtttgggaaacggtcggggaatcggtcgatgacgatgtcgctttgctggagaatggtctggactctttgggcagcatgtctttgcgcaaccggatagcgtcctctttgaaaatggggcttcctgcgactttcgcgcttgaaaatcccgatatcaacgccatggtccgctatgtcatggctgaacaaccggccatcggcgcagccttgtctaacgcgcagccggaacgcgcgacgccgtcattgccggtattggtcattggcgccggcgtcggcgggttgggctttgcgcggcagctggagaaaaatggcctgtccgtcgtggttctcgagaaaaacgactgggctggcggggtgtggaaaagcctggcgaatgatgattcgaagctgcaaatagactcccctgcgtatgacttcgacagcaaccatctgccgttaatcggcgatcatcggtggagtaaaggattccctggccgagccgagatcctcgaaggggcggagacgatcgcagaaacattgaaaggggacgttattttcggctgtgaagtgcggcaggttgaaaagaaaagcgagaacgaatacctcgtcacttatctgaaagatgggaagtcgcacagcatgctggtgtctggggtcgcggcgatgacaggggggttgcatcgcccggtgcagcatcgtttcccggacgaagagcgtttcctcgggcacgttgggcaggggatcagcaacgataccgcggtcacggtctttaacggggcttctgtggtgattgtcgggcacggcgcattcgctatagaaaatatgcgtacagccctggaaaacggcgctaagcacgtcacattgttatgccgccgtcgcaatctcgtcctgtcaacgttttgcaattggctgctcaacgccaacaacggcgttatgccggttgccgacgtcgtcgagatcatgcgtcccttttatcaggcatgcggtatcgatatagaaacgttaccgtcgatcagccgcgacaaaagcggtgatctgttgctcgaccaaaccacggttccgccgggatccgatctgttcttcctcgcccagatgctgggtaaactcaccatcgtcgaggatgaggtcgccaggatgaccgacaatggggccctgacccggaaggggcaagagattaaagcggatgttttcctgaagtgtttggggtcggatacggacaccactttattgccgggcatatttggccaagacatggcggtgaaagggctttggatcaacggcgatcccaacctcttcacttacaatgacggggctcaggtgccaaggaaagtgcgaacgctgctttgctccagctatgcattcttcgtacaagcgtttgcccgcgcctatattcatttccgagagaatccgtcggcattcaccaactccctatcacgcatcatgacggagtcccaaaaaaccacgaatgcggaacgcatttttatggagctatgggatttcattgagccggccaaaaaaacagtggccgctcgtaccgccgagctgtatcccttcgaccgcttccaggttgaacgcgaaaatgaatggcgaaattatgctcagctgctgggcgcttcagagggcgagatgacggcgctttggcaattgctggagcccgcaatgtcgatattgcaccgccgcaatccggctatgccggtagagaagcgctatatccataagcgattcggggccatgtccgtctatgtccctcgacgtcgccgggtgttgttcctgtccggtcagggaacgaatgcccggttagcgaaatcgctgcttgaacgcacgggctggagtgctcgtacggatcttgaattcgtcatcccggatgcgccttatgaaatgccggcgtttactaatgaaattcagctgcagcaaattggcttaacacagcttgtcgagagcggggtatacgacacgcaagggaaatacagagagtggaaggcggggttcgaaagactgtgggaagagttccatgggacggcgcctcaagagatatccgcgcaagatcgagacatatggcgctcaacgctgacttacgttagagagctgacgcaaaattacggcccttttgagggtattgcaggattttgtgaaggtgccgcagtagcgtctgtagcgttgcatctccagcatctaggcgaagacttggggttgaagggcattaagttcttcattgcgatgtcaccctggcgttcaccgattcacgaacgcgatgggttattcaacaaggtgggcggattgcagctacctatgttgcagattgtcggcgataacgatatgccggtatttctcgccgaagcgccgcatttcaaacgcggctatgaaggggcgatggaatatcggcataccggacagcatgtgtatccgccgttaacgacggcattggcgcaaaagttgaatcagctgattatgcagagcgagcagtag

SEQ ID NO: 427616 - DNA, 786 bp, Serratia marcescens
atgaaagtttacgcaatctcggatcttcatatcgactttgatggcaatgccgagtggctctttaatgcatttgatgctgactatactgaagatgtgttgattgtggctggtgatgtgagcgatgaattgagcaggcttgaacagtgctttacctacctggcctgccgtttcaaaaaggtgctctttgtgccgggcaatcatgagctgtgggttgtgcgcgatcgcattcttacatcgattgaaaaatttgagcagatttgcctgctcgctgagcggtgtggcgtttccatggatgtctaccaccatgccggcgtatcaatcgtgcctttattcagttggtatgatttttcctttgcatcacctacggataaattgctcagcagctggatggatttctatgcatgcaagtggcccgataattgggatttacggcacgcgacggattttttccttgataaaaacatcccgcgactcaatacgaaaaatgatgttatcatttctttttcgcatttcttgccgtctgcaaaactgttgccaaattttgttcccgaggcgtttaaatatctcttcccggtgttaggttctgaaaaactgtcggagcagatttctattcttcagccagatatgcatgtttatggccatagtcatatcgccagaagtctcagagtcgatgatatcgactatgtaaataacgcattgggatatccaagagaaagaggtcttggaggtaatggactgtattgcctatataattctacggagattgaccgcaaggaggccggttga

SEQ ID NO: 427617 - DNA, 570 bp, Serratia marcescens
atgttaggaagtaataaagacgttgagggagcttggtttgccgatccggcgcaagggagaattccggttcaactttctgatataataaacgatgtgttattgcctgccggaatccgcatatcggaacctcaacgagaagctgagagcggcgagtatggcgcctgtcagcttgaagtggaaggcaagcgagcattattccgcgtcgccaacacgaccccaactaaactcggccagtttgtgactatatggaaaagaccgcatgtgcaggatgagattatgcccatcgattttgacgatggcatcgagttcgtattggtgagcgtttttgaccatactcatagaggattctttatattcaacagacatgtgctggcgaaaaaaggggtcatgtcagttaagggcaaagaagggaaaagggccattcgtgtttatgctccttgggttaagcccattgtgaagcaagctattacaacgcagaaatggcagttgcagcacttcgtttcagcaacgtgcggtgacgtgaatgccaacaaactcaaggcgctgctgaccatcgatagccttttctaa

SEQ ID NO: 427618 - DNA, 459 bp, Serratia marcescens
atgctgcctatcgccatcggcgccgatgatgccgccattgaattgaaggatctgatcgtcgcccacctgcaacaacgagacatccccgtcattgactacacgacggatcgcgccgcagaagcggggatctatcctgatatcgcctatcgcgtcgcgcaggcgatacgggatgaaaaacaccggcgggggatcctgctgtgcggcaccggcattggcatgagcatcgtggccaataaagtgcccggcattcgcgcggcgcaatgtcacgatacctactccgcccaacgggcgcgcaaaagcaatgacgctcagatcatcacgctgggcgcgcgggtcatcggtgccgagctggcgaaaactatcgtcgatgcctggctggaatcggagtttgaagggggaggatcggcaccgaaagtcgagcgaatcggctattacgaaaacgcggtcagacggcgttaa

SEQ ID NO: 427619 - DNA, 1113 bp, Serratia marcescens
atgtgtcagacctgcataacagaggcgaaaatggcggacggtatccccgagatcatgaaagcggtcgtagcctacgccccaaaagattaccgcctggaacaggtgccggtaccgaagatcggtccgaaagagatcctggtgaagatcgaggcctgcggcatctgcgccggcgatgtcaaagcgttcgagggggcccccagcttctggggcgatgaaaaacaaccggcgtacatcaaggcgccaatgatccctggccatgaatttatcggccatgtcgtggggtacggtgaaggcgtcgagggcttcaatctcggcgatcgcgtgatatcagaacagatcgttccctgctggcaatgccgcttctgcaaccgcggtcagtattggatgtgcgaaaagcatgacttgtacggtttccagaaaaacgtcaatggcggcatggccgagtacatgaagttcaccaaagaggcgattaactatcacgtgccggccgatctgccgatcgaaaaagccatcctcatcgaaccttacgcctgttccttccatgcggtgcaacgcgccaatatcaaactgggggacgtcgtggtgctggccggggccggcactctggggttgggcatgatcggtgccatcaaaaaatccgggccctcgaagctggtggtgctggatctgtccgacgatcgtttggcgttggcgaagcgcttcggcgcggatgtgacgctgaatccaacccgtgacgacgtgcccgccgcagttaaagcaatgaccgacggctatggctgcgacatctacatcgaggcgaccggtgcacaaaagtccgtggaacagggcctgacgctgatccgcaagcttggcaccttcgtcgaattttccgtgttcaaagatccggtgaccgttgactggagcatcatcagcgaccgtaaggaactggacgtgctcggttcgcacctcggtccttattgctatccgctggtgatcgaaggcatcgccaatggcgatctgccgaccgaaggcgtggtgacgcatacgctgccgctggaacagttcgccgaaggtttcgagctgatgaagcgcggcgtcggttcgatcaaagtggtgcttaatcccaacctctga

SEQ ID NO: 427620 - DNA, 1278 bp, Serratia marcescens
atgttgcatggactgattcatcgcattggtctgtcaccgaaactgctgctgggctatgccggcgtgttggtgttcatgatgggcgaagggctggaacagggctggctgtcgccttatttgatcggcaagggtctgagcattcaggaatcggcgctgttgttcagcgtttatggttttgctgccgcgatcgccgcctggttttccggcgtgttggcggaaatctttaccgcgcggcgagtgatgttggccggcctgttgctgttcttgttcggttcggtgtgttttttgacgttcggcctgccgagcaacaacctgtcgatcatggtgccaacctatgcgctgcgtggcttgggctatccgttgtttgcctacggttttctggtgtgggtggcgtatgaggcgccgccggaaaggttgggttcggcggtggggattttctggttcgtctacagcggcgggctcagtgtgttgggcgtgctgtattccagcatcatgctgccttatctcggcgagatccacacgctgtggagcgcgcttattttcgtcgtgctgggcgcggtgattgcgctgatgcttaatcgcagcgaaggcgctgcggagcgcggcgatcgggaaaaagcgtcgctgggttacgtcttgaaaggcatcaccatcgcgtttgaaaacccgaagatcggcctgggcggcatcgtacgtaccattaatacttctgcggcttacggcttcgtcgtattcatgcccatgtacatgatggatatggggttcacccgcacgcattggttgcagatgtacgcggctctgtggacggtcaacatcattttcaacctgattttcggcgtgatcagcgacgggctcggctggcgcaatgtggtgatgtggtttggctgcgtcggctgtgccttgaccacgctgatgttctactacgtgccgcaattcttcggcgccaactacctgctgaccgtttgcgccgccgggttgttcggcgcctgcctggcggcgtttgtgccgttgtcggccattatgccgtcgctggcgccggacaataagggtgcggcgatgtcgattctcaatctgggcgcaggcctgagcacctttgtcggcccggcggtcgtagggctgtttatcggcagccttgggaccgttggcgtgatctggatctttaccggtttgtacctgttcagcggcgtgctgatgaaatttgtcacgctgccgaaagaaagctcgacggcgcaggaagaacgggcgcgagtttggcgaaaatatcctgaccgctcgtga

SEQ ID NO: 427621 - DNA, 771 bp, Serratia marcescens
atgattaatcatcaaactacggtgccgcgcgaactctcgctgcagggcaaggtggcgctgattaccggcggcgctgcgggcatcggtctcgctattgccgagcgctatctgcaaaacggcgcgcgcgtggcgctgctcgatcgggcgccgcaggttgcggaagtggcgcgacagctggacgccgaggcggcggtgggcgtcgtggccgacgtcaccgatgccgcgtcggtggagcgggcggtggcgcagattgaggcgcatttcgggcggctggacgtgctggtcaacagcgccggcatcgtcgcgctgcatccggccgaggaactgccggaagcggcgtgggacgcaactctggcggtcaatctgaaaggcgtgtttctcacctgccaggcggtgggacgccgtttcattcgccagcgcggcggtagcatcatcaatctcgcttcgcaggccggcgtggtggctttgccgaatcacctggcttattgcgccagcaaagcgggcgtgatcggtctgacccaggtgctggcgctggagtgggggccgcacaatgtgcgggtcaacgccatttcacccaccgtggttttgacggagctgggccgtaaggcctggtcaggcgaggtggcggaacaaatgaagcagaaaatcccgctgaggcgtttcgccgagccgcaagatatcgccgccagcgccctgtttttggccggtgacgcagcgtcgatgatcaccggcgccaaccttgtggtcgatggcggttacaccattcaataa

SEQ ID NO: 427622 - DNA, 1002 bp, Serratia marcescens
atgaacagaatcattaacgatcccgatcacgtagtggaagacgctattcagggctacaggctggcccacccggactattacgccgctaccgataatgcgcgggtattgaaatatccaccggcaccgatcgccggtaaagtgggtatcgtcaccggcggcggttccggtcatgagcctgcgttcctgggctatgttggtaagaatatgctggatgccgtcgcgattggcgaaattttttcctcccccacggcgggcgcttttctcgatgccttcaaggcggcggacagcggcgtgggcgtggcttgcctgtacggcaattacgccggcgataacatgaacgtcaagatggcgatcaagaaggcgacggcggctggtatacgggtaaaaaccgtggtggccaacgatgatgtcgcctcggcgccggccagtgaaatcgataaaaggcgcggcgtggccggcgaaattctgatgtggaaaatcggtgccgcggcggcggcgaagggatacgatctggacggcgtgatcggtgcggcgcaaaaggccatcgaccattgccgttcgatcggcgtcggtctcagctcctgcaccattcccgcggtcggcaaacccaattttcatatcgaagacggcaagatggagatcggcatcggccatcacggcgagccgggcattgaggtgtcgccgatccagtcggcgtcggcaatggccggcaccatgcttgatttcgtgctcaacgatatgccgctggaaccaggccaggaggtggcgttgctgatctccgggcttggtgccacgccggtgatggagctgtatatctattatgccgaaatagagcgtcgtttaacggcgaagggcgtgcgggtgcatcggcgctacgtcggcaattactttacgtcgctggaaatgatgggtgtgacgttgacgctgatgaagttggatgacgaactgaaaatgctgctggatatgccggcgcaatccttaggtttaacccaggtggagtga

SEQ ID NO: 427623 - DNA, 657 bp, Serratia marcescens
atgacggaacaaatttcaacccggtacggcagtgagatcgtggcggggctgatagacaccattgtcagcaaccgcgaatacctgagcgaaatcgacggcgccatcggcgacggcgaccatggcatcaacatgtcgaagggattcacgatgtgcggcgacgccattcacggccgtgagctcacgctggcgcaggcgttcgatgctgtttcggatgcgttgatggagggtattggtggctcgatggggccgctgtatggcagcctgttcatgggcatggcggagagcgtccgtgagcgaaacgaactggataagcaggcattcttggcgatgttgcacggcggactgagcgaactgcaggacatcagcagtgcgggcgtgggtgacaagtgcctgatggatacgctgataccggcggtagcggcgtttgagctggcggtggggcggagtgacgattttaccgctgcgctggcgcaaatgaggatcgccgcagcgcgcgggagggattccactcgcgagctggtggcgaaaattggccgcgccagtcgtctgggcgagcgctcgcgcggcgtgttggatgccggcgcggtatcttgttgtttgctcttgacccgactggcggacgaggtggaacaacgactgaataccgttgccgcctga

SEQ ID NO: 427624 - DNA, 963 bp, Serratia marcescens
atggaaaaacaaactgtgtcccaggataacgaactgctgaccgaaatcgccgttgcttattatcaggatgagatcacgcaggaagagatcgccaagaagttcggcatctcgcggatcaaagtcggtcgcttgctcaaacgcgccaaggaagaaggcatcgtcgagatcaacgtgcgttatcatccggtattcagtacccggttggaacagcagatgatggatcgctttcctatcagccgtgcgctgatcgcgctcgatcaccaggacgaagaagagcagcgtcggcaggtggcggcgctggtgtctaactatctggcgatgtcgttgaaagacgatatggtgttggcggtcggtcaggggcgcaacgtggcggcgattgccgaccacgtcggcaacgtgacggaacgcaactgcaagttcatctgcggcatcggcggcactcaccgtccgggggatgcgatcaatgccgaccatatcagtcggcgcctggccaagaaattcggtggtagcagcgagacgctctatgcgccggcctacgtcgaaaatcgcgcgctgaaagaggcattcatgcagaacggcacgattaaggaaaccctggatcgcgcgcgtaaggccgatgtggcgctggtcggcattggcgacatgaatgaaaacagctatatggtgaaattgggatggttcacgccgcacgagattatcgacgccagccttaatcagggcgtgatcggcgacatcgccggctatgactttttcaatgctcaggggcagcacgtcgacacggtgatgaacgacagagtgatcgggctaagcatcgatgagctgcgcaaaatcccttgcgtgatcgccattgcttctgagaacaccaaggcgttggcgattttgggcgctttgcggaccggcgccatcgacattatcgccaccagcgcgctcaatgtgcgtaccctcctcaatatgtcgcaatag

SEQ ID NO: 427625 - DNA, 2229 bp, Serratia marcescens
atgatagcgagcctgatcggcgcgggactggcgctgtacgggtcggctgcggccgcgcaggaacaggcggaaaataataaaggcaacgtggcgttcagcccgctcaacgtctcggccgccgacagcggcaagagcagcgaaaaagacgcgttggcccggccgggtgcattcagctcgcgcgatgaaaacaaaaatctggagtcggtggacagcattctgcgcagcatgccgggcacctatacccagatcgatcccggccagggatcggtcagcgtcaatatccgcggcctgagcggctttggccgggtcaataccatggtcgacggcatcacgcaaaactactacggcaattcgccgaacgacgcggcgcacgggggattgcccaccagccagttcggggcgctgatcgatcctaactttatcgtcggcgtcgacgtggcacgcggcaacgccaccggctccgctggggtgaacgcgctggcgggcagcgccaacttccgcaccatcggcgtggacgacgtggtgttttccgataacccgttcggcgtgcgcaccaaattctcggtgggcaataacggcatcggccgcagcggcatgatcgccgtgggcgccaaaaccgccgcctttgccgacggcggcagcctgggggcgatggcggcgatcagcggcagttccatcacctccaactacaaaaacggcgccggtttcgacagcgagatgtttaacgttgataaaacctaccgccagaacccgaaatcccagctgttcaaggtggacatcaagccggatgccttcaacagcatcgaactgtcggcgcgcagctaccagaataaaatcacccgccgccacgtcgacagcgacgatttctaccttaaatatcactacgcgccgttctccgagctgatcgatttcaacctgaccgccagcaccagccgcggcgagcaaaagttcatgtccgacaacatggcggggttcagcgacagcacggcgaaaaacatctccgatgcgctggatatcaacaacaccagccgtttcagcctgcaggatgtcgatttcgccttcagctacggcggcaagctggtgcgcaacgagtataagaaaaaggcctccggcttggtgacggatgacaatcaggcggaaagttcgccggtgggaatgtcgggcaagcaggatatctccagcctgtacagcggattgcaggccaactacggcatctggcaggggaatttcgatctgaactacaccgcctatcgcctctccggctataagccagcctgtgacgagcgcgtagagtgcttcccgcagggcgccggcaatatcaaccgcaacgaacacggcttcaacccatcggtcatgctgtcggcgcaggtgacgccgtggctgcagccgttcgtcagctacagcaagtcgatgcgcgggccgaatatccaggaggtgttcttcgccaacagcggcggccagtcgatgaacccgttcctgaagggcgaaaaagcggagacctggcagggcggtttcaacgccaatgctcacgatctgttgttcaagcaggacagtttccagctgaaagcggtctatttcgaaaccagaatcaaaaactacatatccagccaaacctaccaggtgtgtaaaaaccgccagaagtgcaaccgttcgcaggcgacgcaggaagaatggaaggatgcggacgtcaacgtcaacatgaccatgtacagcaacgctcccgatccggtcaaaatgcgcggggtggagctcgaagcgctgtacgacgccggtttcgccttcaccaagctgtcgttaagcaaggagcatacctcccagccgaccaaccaggccagcaacgaattcggcgcgggcgatgtcagcgaactgccggaattctacttcacgctggacagcggggtgcgcctgctggacgagacgttgacgctgggcggggtggtgaaatacaccggcaagtcggtgcgcctgtcgcctgattccattcgcgatgaaaacgaacagttgatgaaggagccggcgccgcatattccgaccattatcgatctgtacggcacctatcaggtgaatcgcaatctgctgctgaagctcagcgtgcaaaacctgatggacaaagactactcggacgcgctgaacaaaatgaactcgctgccgtcgcagtcacaagatttcacgccgaccaacaccgcccgtgggcggacttatatcttcggcggggaggttcgtttctaa

SEQ ID NO: 427626 - DNA, 1038 bp, Serratia marcescens
atgagtctgccccacacgttgcatatcggccgcccggacggcgtcatcaactggcgcatgccgctgcgcctgctgctggtcaatctttcgctgctggcgttgtgtctggctatggccgttgccgcgctgtgctacggcacgctgccgctttcgctggagcaggtctttgccgcgctcagcggcgaggcgccgaaaaatctggtcaccgtggtcacccaatggcgtttgccgcgtatcgccatggcgctgttgttaggcggcgcgctcggcatgagcggcgccatcttccagtcgattatccgcaacccgctcggcagcccggacgtgattggctttaacatgggggcttacaccggcgcgctgatcgccatcaccctgttcaacggcggctattactacatcgccggcggtgcgctggccggcggcattctctccgcgctggccatctatctgctggcctggcggcaaggcatcgccggcttccggctgatcatcgtcggcatcgccatcagcgcggtgctggtctccaccaatacctggctgatcatcaccgcctcgctggagcgcgccatggacgccgccatgtggcaggccggttcactcaacggcatgacctggcagaaagcccagcccgccacggcgttcatcgtgctggcggcctcggccgcgctgctgatgggcaaacggctgcagctgctggaaatgggtgacgacacggcgcgcgcgctgggcgtgaacgccgaaggcagccggctgtggctgatgctgttcggcgtcaccctcaccgccgccgtcaccgccaccgccgggccgatttcctttatcgcgctggcggcgccgcagatcgcccgccgcctggccggacaatcctcggtcaccctgacgtcctcggcgctgatgggcgcgacgctgctgctcggcgccgacgtggtgtcccaacatctttttgcgccgatccaactgccggtcggggtcgtgaccgtctgcatcggcggcctgtacctgatttggctgctcatccgtgaggcccgcagataa

SEQ ID NO: 427627 - DNA, 273 bp, Serratia marcescens; identical to SEQ ID NO: 427276

SEQ ID NO: 427628 - DNA, 1503 bp, Serratia marcescens
atgttttcccgtttgaaactgctgtatatcgccgatgatattatttcacctgatgaattcccccgtatagtcagcccttcccgcgcctgtcacggtctttcatacatgccggacaatgacattctgtcgcttttttctggttttcgcggtggcgaacggatccgccgtgaagtcggcgttacgcaaaacggaataagctctaacctgcgcgcaagagtgcagagcgacctgatgagtggcgttgtcgtagcggtcgaaacccggcccggcgtgttggcgacgatggggccattttacgccgacatcgacggctacctgataccgcaggggagacaagagcccaactacccggtggacaggatagtgaagcggtacgaagaggccgtgaagtcttatggcggccgccgggcgcgcccgtccgtcttccccgcacaagtcacgcgggccaaaccggcccttggcccggatatcccgacgcaaggtggaagagcctcacagtcggtcgtgtctggccccttgaccaaggcgcaacgctggcaggagcgaaaatacctcattggccgcgggcaacggagtatctacccggacgcccgaatcgcctcggaacgcctggcggcaaacaatgtcgccgtcgagaaggcaaaactggcggagaatatctacaagaccacgaatccgctaaaggagactcccggcgttcccgaaggttggaaagatatcagtaacgataatgctgccctgagtaaaattgggctaaacagaaatatgctcttcgacagagatgaatctccggattttttggcaagggtatatcaacctgatagcactgtttttggtaaagagatgaacccaacggtcgtgttcagaggatcaagagcgccagagttcccggagggaatcggcagcgccgccaaaaaggcccttaggggcgacttctcaggtgttaaaaatgtgaatgactggataaataatggtgctcaggggatgggggcgaactcagattattataagcaggcggttaaaataggattacaagtaaagaattcctccggcgtcgatatttctggtcattcattgggcgggggaatggcctccgccgcatcaatgaccagtggaaaacccgcctggacgtttaatgcagccggactccatcatggaactgtagggaaatacggagctgaaatgattggttcagccaagaacatacaggcctatcgagttgagggagagctgttaaccacgttacaggaggttaataacgaaagtgactatgagcttataagaaatgccctgcccgatgctttacaaaaaccctggggcgtagcattgcctttcaccttgaaagagtggtcatcactggcggtgcctgatgccgctggcataccgcacacgcttgccggagggacaggaaccctgctcgataaacacggtatagaccagacaataaagttgattgaagatcagaaagacgaggatgtcgccactatcagggggagaatatga

SEQ ID NO: 427629 - DNA, 135 bp, Serratia marcescens
atgattatggtcaatcaggcggagaatctggtgatcgtccagtggtctacctggccgcaggcggagccgtccttcagcgcgcaaccgctggaggcatcgctgatgtttagtgcgatagcgaaggaattgcgttaa

SEQ ID NO: 427630 - DNA, 156 bp, Serratia marcescens
atgacaggttactcttcatcccagtacatctacggagggataaatttcagccgtcatgtttcaattttcagcttgttccagattgttaaagagcaatatcttaaacatgactcgcaagtcatgtttaagatttttccggttatcgctaaccggtga

SEQ ID NO: 427631 - DNA, 300 bp, Serratia marcescens; identical to SEQ ID NO: 34001

SEQ ID NO: 427632 - DNA, 216 bp, Serratia marcescens; identical to SEQ ID NO: 118659

SEQ ID NO: 427633 - DNA, 171 bp, Serratia marcescens; identical to SEQ ID NO: 34003

SEQ ID NO: 427634 - DNA, 345 bp, Serratia marcescens; identical to SEQ ID NO: 118661

SEQ ID NO: 427635 - DNA, 621 bp, Serratia marcescens
atgccatggcaccggcacgccgttgggcgatccgatcgaggtgggcgccctgaagaacgtgctgggccgccaccgcagcaagccggtggtgctgggggcggtgaagaccaacatcggccacctggaaggggccgccggggtcgtcggcctgatcaaggcggtggaagtgttgcgccaccgccaggcgccgggcaacgtgcacttccgcacgctgaacccgaacatcgatctggacggcttcgacgccatcatctccgccgagccggtgccgctcggcggcaagggtccgctggtcgccggggtctcctcgttcggcttcggcggcaccaatgcgcacgtggtgctggagtcctacgaacggccatcgggcgatacgtacccgcgcgcccgctatactccccacttcctgccgtggcgccgtctgcccaacccgctgctcagccgcggcgacgcgggcggctttgccgccacgctgaacgccgagctggcttccctgtggcgggatcatcgcatcggcggtcaggtgctggtgccggccgccagtcacatcacgatgatcgccggcgccgccttgctgcagtaccggggcgccctgccggcgaccggcgtggaggtgcgtga

SEQ ID NO: 427636 - DNA, 399 bp, Serratia marcescens
atgaaaagatttaagacgaagtccttattgttaagcgtacctgcattgttattattaggctgctcaagttacaaagaaaaagatcagctaaagtatgtagttgggcaggatagttttaccctaagtcataaatgtgtcgcaacagcaaagttacaagataataaaaagactaatcaaaccggtgtgattataaatttaagtaacaatgaccagtgtaagaaaaagttaaacaatttgataaacagcaacgagggtaaggatgtttccgtttattttaacgaaacaccagtaacatctcctgtaagaattcattctaaaatagatgttggcaacgaatattatcagtctgtcaccaacaaagaactcgctatcgacatactcagtgcttacgaccaataa

SEQ ID NO: 427637 - DNA, 207 bp, Serratia marcescens
atggaaaacgaaaagtcagttttaatacaacgcattctcttttcttataaaaatgagaatggcaccgaaattagttgccagtcagatattgttgcaacaaaagaacaagcactagactatttcttcaaggcttttgaaggtgccgatgtttcaattatagatgtatctaatgacaaacaatggcaacagcactcacatgaacattaa

SEQ ID NO: 427638 - DNA, 219 bp, Serratia marcescens
atgctcgcgatgcaataccgtttcaccctgcccgccgattacgacatggcgatcgtccgccgccgcatcgccgatttcggccatcggctcgacgcctgcccgcagctgatcgtcaaagcctatctgtacgcgcagcgcagcgaaggcagcgccactgcgaggcgagcatgccaccaaccggttgtcagacaagcgccatctgatggagaaaaaagatga

SEQ ID NO: 427639 - DNA, 549 bp, Serratia marcescens
atggccaataactctatctatcctgccagcgaattatttgtattcgatggtgaaggtagcgttagagtttgcctgaccggcagttaccagatcctggaaggatttgtaacgagcgcgcaggttgaaagtcgcagcgcctgggttatcgccatcagcggcaacagtaacggtagctggggtagccacttcctgagagataggcagagtagagccgttgttgtccagaatttcaacgccaacgccagtcgcgccgccagttacagccaacagctctgggtggccggctggagtgttaccgtcgaaacgcagggtgtagttacccgcttcacatttctccaggctgatatcgaaagctttagcaccgctggtagaaccggcagttgggaaagcggtagtaggatatttacccaggtaaacttctttattctggtctttatcaacaactttacaggtggactgtacaatttcaccggtgaatttaacgttgccgtttgctgccattgcgttggaagcagttgcagacaataccagggcagccaaaggcaataa

SEQ ID NO: 427640 - DNA, 684 bp, Serratia marcescens
atgaaaaaaattctgactggtattttattcgcattctctgttaatgccttcgccggcatccaggttgatgcgacgcgtgtcatctataacagtgcaagtaaatccgcatcgctctcaatcagcaatgacagcgacgatacctacatggtgcaaacctggctggatactggcgatgcaagccagatgcccaagaatttgccgatcgtggtgacgccacccattttgaagctggctgccaagaaagacgccattttgcgttttatctattccggcagcggtttgccgcaggacagagaatctctgctctgggtcaacgtacaggaaattccgccaacgcctaagcaagataacgtgctgcaggtggcgatccgtacccgtatcaaactgttctaccgcccggattcgttgaaaaccaacctgcaacagcaggcggaagcgctgaagtggaagcgccagggcggcaatttggtcgtgactaacgatggcccgttgttcgtcactctcggcgtgttgaacctgaagagcggcggcaagagctggaaagtgaacgccgacatggtcaagccacacgacagcctgcgcatctctctgcctcagggcgcgcaatcagccaacaacatgtcgtttacctatatcaacgactatggcggtcacaccgagattaaaaacgtcgcactgaattga

SEQ ID NO: 427641 - DNA, 2616 bp, Serratia marcescens
atggcacacaaaagaataacaaccctcgcgccaaaacgtttggttaagctgattaatggtgtaatttatttttctgccgtgccattttcattctcgcatatggccatggcggaggagcagttcaacacctccttcatccatggtgatgacaatattgctcaggtggcggcgctggccagcggagacgatattttgccgggtaaatacccgtttgatatctatctcaacggacagcgtgtcgatcaccgcgagatagagttcaagaaagaatccaaagactccccggtagcgccatgcctgacggctgtggactaccaggattacggcgtaaagctgcccggcgatctgaccaccgccggtgccgagcaatgctacgcattgccgcaacagatctccggtgccaagctgagctatgacgctgccgtacagcgtatggatctggaagtgccgcaggtgtttctgatcccgcgcccgcaaggcgccatttcgccgaaagtttacgatcgcggcatcaacgccggctttgtaaactataactttagcggcacccataaccgctacggcaacaaccagaacgacaagacttctgactattacttcctgagccttaacaatggcctcaatattggcgattggcgcctgcgcaacaactcgacgctgaaccagcagtcgggtgccggcacgcactggaagaacatttccagctgggcggaaacggatatcgtttctctgcgcagccgtctggtgatcggccagaccaacaccaacaacaacgttttcgacagcatccagttccgcggtgtgcagatgtccagcgccgacgacatgctgccggaaagccagcgcggctatgcgccggtggtgcgcggcgtggcgacgaccaacgcgcgcgttgaggtgcgtcagaacggctataccatttacagcaccaacgttccgccagggccgtttgcgctgacggacattttcccaagcaccctgagcggtaacctggacgtgacggtcatcgaagccaacggctcgagaacctctttcgttgtgccattctcctcggtgccgaacatgctgcgcgaagggatttggaactatcagctgaccgccggtaaataccacgacggcaccagccgctatcagcctaaatttgtgcagggcaccttgtcgcacggcatggcgtatgacatcacgccttacggcggcgtgctggtggcggaaaactatcgttcagcggtcgtgggcctcggtaaaaacctggggaactggggggccgtctcctttgatatgtcctattccgacaccaacctggtgaacggcgatgacaaacaaggggagagtttccgcttcctgtattccaagtcgctcaacgactgggggacggaattccgcattgccggttaccgttactcgacctccggatattatgatttctccgatgcggttgccgagcgcgaacgctatgagaacggttattaccgtaacgattactacgatcaaaacgatcgcaacctgggcgtgccggactgggcggaatctcgccgtcgcagctattataccagccgtttcaacaacaaacgccagcgcgttgagctgtctgtcaaccagcgcatcgccggtaattcgacgctgtacgccaacctcagcaaccagtcttactggggcggatccggtgaagatcgcaccgtacaaaccggtttcaacagcagctataaaaatatcagctatggcgtcttttatcaggacagccgcagcaactacggctataaagaccgcagcgtcaacctgaccgtgtcgattccgttcagcttcttcagcaaggattcgtcggacatgaccgccagcttcaacgccggtcacagcaagcagagcggcaatacctacagcgccggcctgagcggcaccgcgctggatgacaaccgcttgaactatgcggtgcaaagcggtcatgatcgttattcgggccaaaccagctcggccaacgtcggttatcagggcagcatggggaccatcaatgccggttatagctacagcaaagattatcagcagtcttcgttgggcgtggcgggcggcatcgtcgcacactccggcggcgtgacgctgacccaaccgctgcagaatacgtttgtgctggtggaagcgaaagacgccaagggcgttcgtatcgaaaaccaaccgggtgtcgccatcgaccgcttcggttacgcggtgatgacctctgcatcgccataccgccataaccgcgtggcgctgcgcaccgaagatatcggcaacggcctggatatcccgatggcggcgagagacgtggtgccgacttacggcgcaatcacccgcgtgaagtttgaaacgcacacgggccaaagcctgttggtacacagcaaaatggccgacggcagcgtaccgccgattggcgccaacgtcttcagtgcggacggcaagaacaacggtactgtcggtaccaacggcgatatttatatttcaggggcttccgcaggggatcgcctgctggtgaaatggggcaacgacgcgggcgaaagctgctcactggtggtgccggaattgaaagcggcgaccgaacagctgatgggttatcaggaactttcgctgacctgcggaaaaccgtaa

SEQ ID NO: 427642 - DNA, 1041 bp, Serratia marcescens
atgtcttctttattaaagcataagaatctcgggttggcggctgggctgctggtcacgctgggtacgttttcgcagagcagctatgcgctgtcatgtaagcagaacggcagcattcgccaggacatcgtgctggataaagccatcaaggtatcgaccgccaataccgcgccgggcgcattgctgtggcgttcgcagacctttacctcgactttccaatgtacggatgactggaacaacccgaaaggggaaaatgcctacctgtactgggatcctcagtcccggatgagtcagatccataactcgatcgaagtgggtgtcacttatcaggggattgatgtcaaaccaacgaaaggcgcacgtcaggatgtggggccaggaacggaatgccgccgttcaggcagccgttgtctgtctccggccagatcgctgacggtaaccgtgtcttacgctatctatattaaagcaaccggcaaggcgcctccggctggcggcaagattaacgacaacaactcgtactcggtatttcaggttgatggcgtcggcggcttgaacggcacgccgaacagcaactttaacgcctatatttccgggttgggcaatattcagtttatttcctgcaacccgaaaatcaccgtggtggccaacaacggttcgacggttaattttggcactatcccgcgtcagaatgcggtggtgggcaaaatcgagaaacaggtgccgttctcggttgccgccaatatgtccgatccgacgaccgggcaggactgccagggggagacgttgcaggccagcttcagcagtacttatccgctgcaggataacagcgtgatcctgccgaccagcgacagcggcttcggtattttgatctcgcaggcggcgacgccgaatacgccgatcatgatgaacagcccggtcgatctgggtctggttaacggcaccatcgttgaaaagaacttcatggccagcctgaaatggttgagcaccaacccgaaagtggggccgttcagcgcatcggcgaatattgacgtcaccttcaaataa

SEQ ID NO: 427643 - DNA, 1191 bp, Serratia marcescens
gtgactactgacgttccaataaaaaaaagctcatcaggtatatcatcgttagagtctctctcgaagactctaggaatttcattgttagaactgagtgaaattagggggataccaacaaacaaacgttatgaaaaaattctagttcccaaagctgatggatctcagcgcattgtatacaagccccattataaaattaaaaagatacaaagaaggataaactctaggatttttagagaattagttatttggcctgattttttatttggttcaattccgaatgataatgacactgaagaatcaataaagagagattatgttagttgctcttcattgcactgcggtgctaagtctatattaaagatcgatatcaaaaacttcttcgataatatccataaggatttggttagcgatattttttgcaattttttttgtattaaaggagatgcgttaaatttcctagtagatatatgtgtgaaagatgattttattgttcaaggcgcattaacatcaagttatattgcgtcgttatgtcttcacgacgttgaaagtaaaattgttcgaagagcgagaaggaaaaacttagtatatacaagattggttgatgacatagttatatcttcgaaggtatttgattttgactttagtcaaataagaaaacatgttgaagatatgttggcagataaagatcttcctcttaatcacgaaaaaagtggtatattttataattctacaaaaccactaactgtacatggattacgagtcgatcaccataaaccaagacttccttctgatgaggtgaaaagaattagagcttcagttcataatttagttaccctttcaagaaaaaataatgctagaactagcttggcatttagaaaagaatataatagatgtatggggaggataaataagctaaccagggttaagcatgagaaagacaaagtttttaaaaaaatggttgagtttatttatcctatgccttcttatggtgatattatttcatgcaaaaaggacatttctagcttagaaacatcattcaaaaatggctttaacaaaacagagtggtattatagaaagtataatttagttagttataagatatctataataaaaagaagttcagcgttcattaatttggctgatgaattaagagataggataaaaaaggtaaaaccaaatgaagacagatag

SEQ ID NO: 427644 - DNA, 714 bp, Serratia marcescens
atgaagacagatagtgaatcatcactaagtacttttatgctttctttcctttttctggctgttttctttattattattataggttactcatttaacgcgacaatgataagtaaaggattctataagcttgatttttgcttaaggagtgactgcattacgttcatagaaaacaatatgcaggggacgataaaactagcacaagtgttaggctggggactcacattatttacaggacttagtgcagcatatattgcactgaaaacatatgtctcaggagttaaaaatagcaatataactaatcatatatcacatattaatatgtttagggattttgttaagctagaaatcgataaaaggaaaaggatctctccagcttctatagatatatactattggtatagttctatctttcctggttctaaaaatggcgatctcggtttttgcttagaatatttaaataacatagggaaagttggtgaggtaataaaggaatcaaataatgagatagcttctctttctggagactatatttataaagttcaccaaatgaagattatttcatcattaagtaaaattggtattgtactcaatagaggtccaaaaaatattttcatcgaaatagaaggtgaaatacttgagcttattgactcagttaactcaacatttgtctctgggcatgattctctttgttctattcctcggtgttatagttaa

SEQ ID NO: 427645 - DNA, 744 bp, Serratia marcescens
atgtggaaacgcctgatcatcagcctgttcatcatcattgcggtgttgatgggttcggctattgcgctggatcgctggatcagctggaaaaccgcgccttacgtctacgacgaactgcaggcattgccgcaccgccaggtcggcgtggtgctcggcaccgccaagtattaccgcaccggggtgatcaatcagtactaccgttaccgcattcagggggcgatcaacgcctataacagcggcaaggtgaaatacctgctgctgagcggcgacaacgcccagcaaagctataatgagccgatgaccatgcgccgcgatctgatcgccgccggcgtggcgccgagcgatatcgtgctggactacgccggcttccgcaccctggactccatcgtgcgcacccgcaaggtgttcgacaccaacgatttcatcatcatcacccagcgcttccactgcgagcgcgcactgttcatcgccctgcacatgggcattcaggcgcagtgctacgcggtgccgtcgccgaaagacatgatgacggtacgcgcccgcgagatcttcgcccgcctgggcgcactgaccgatctctatatcctcaagcgcgaaccgcgcttcctcggcccgctgatcccgatttccgccatgcacaccgtgccggaagacgcccagggctatcccgccgtttcaccggaacagctggtggagctggagcacaagctaaaagaagagaagcagaaaggccagaagcattaa

SEQ ID NO: 427646 - DNA, 1017 bp, Serratia marcescens
atggcaattttagttaccggtggcgctggttatattggatctcacactgtgttatcactgctggagcgcggtgaagaggtagtggtgttggacaatctgtcgaactcgtcagcggagtctttacaccgcgtagagaaactgacgggaaaagccgccgtgttttaccaaggcgatgttcaggatgctgaatgcctgcatcgcatctttgaagcgcacacgattactgctgtgatccacttcgccggccttaaagccgttggggaatctacgcgtaaaccgctggaatactaccagaataatgttaccggaacgctggtgttactggatgccatgcgccgtgccggcgtgcatgatttcatcttcagttcctccgccactgtctatggcgccaattcgccggtgccctatgtggagacgacaccgatcggcgggacaaccagcccttatggcacgtccaagctgatggtggagcagatcctgcaagatttcgctaaggctgaaccgcaattttcgattattgccttgcgttacttcaatccggtgggggctcacgagtccggactcattggcgaagatcctaacggtatccccaacaacttgctgccttacatctcacaggtggctatcggcaagttggaaaagctgggtattttcggcggagattatccgacgaaggacggcacgggagagcgcgattacatccatgtcatggatttggctgaaggccacctgaaagccatggatcatttgccgaagatcaacggatttaaggcttataacctgggggctggcgtagggcactcggtgctggcgatggttcaggcgtttgaaaaagcgtccggcgtaactatcccttaccaaatattgcctcgccgtgacggcgatctgcctgctttctgggcgaacgccgatctggcttatcaggagttgggttggaaagtcagccggggtatcgatgacatgatgcgcgatacctggaactggcagaagaaaaatcctaagggttaccgtgactga

SEQ ID NO: 427647 - DNA, 1140 bp, Serratia marcescens
atgaaaatagcactaataggtacagcagcaaattgtgtggttggctttagggccgatctgataaagtcattgcaccagcaggggcatacggtttacgccctggctctggattatgatgacaacacccgcatgcaggttacaaatctgggagcgatcccggttgactataaattcagccggacaggcctcaatccgctaaaagatttcctggatacctatacgcttagcaaacagttaaagcgtttagctcccgacctggttttttcctacttttctaaacccagcatatttggcactttggcagcagtcatggcgggcgttaaaaaacgttacgcaatgctggaaggtttgggctacctatttaccgaacagccgcaaggtgtgagcaggaaagtaaggcttttgaaaaagattcaggtcatgctctaccgttgtatcttcccaagccttgatgcgctcattcttctgaatcctgacgatcgtcatgatctgctggttaactgcaaaatcaacgtcaagcaggcacatgtcttaggcggtatcggtttaaatctggctgactatcctttcacgcctcctccgacgtcccccgtttccttcatctttatcgcccgtttgttggccgaaaaaggggttcacgaatacgtcgccgccgcaaaaatagttaaagccaaatacccagaaactcgtttctatatgttaggcgcgatagatacgcaaaacccaggtagcttaacaggaaaatgcctgaataatttaattgaagacgatatcatcatcgccccaggccatgtatcaaacgtggcggaatggattgcgaagtccagcgttttcgttttaccttcctactatcgcgaagggatcccgcgtagtactcaggaagccatggccatgggacgtgccgttttaagcacggatgtgccgggttgtcgggaaacagtagttcaaggcgttaacggttatttagtcaaacgctggtcacatgctgagctagcggaaaagatgtgcgaattgatcgaaaacccacaaaagataacggatatggggcttgccagttatcaattggcccaagaaaggtttgacgcagacaaagtcaataatcgtctattggagttgctggagattcctcaaactcggtga

SEQ ID NO: 427648 - DNA, 1089 bp, Serratia marcescens
atgcgtatagactacgtgatcaccggtcttgagatcggcggcgccgaatatcaagttgtcacgctgcttgagaaattggccgagcgcggccatcaagtacgcctgatctcattgataccaccgacatctgcagtatttgtcgatcgactggccaccgccggcattccactccatgatctgggcatgcgttcaggtaaagacttgccgctcgcactgctccgcttgcgcaaggaacttttgcgcactcggccggatgtcgtacacagccatatggtgcacgcgaacctattggctcgcctggtgcggttgttcacgccttctttgaaattagtttgcacagcgcacaacactcatgaaggcggaaaaattcgcgattgggcatatcggttgaccaacccactcagccagttgaacacaacgatcagcgaagcggccacacgccggtttattggcgaacgtgttttcaaggctcgcaatactcgtaccattcccaatggcattgatactgccaaattcagcccagggaaagcacacagctcctcgttagagcaccctttccgctggctggccgtcgggcgtctggtcgaacagaaagattacccaacgctgattgcagcctttggcaaactctcagacagccaactactgatcgccggccaaggcccattgcttgaagctttacaacgacaggttgaacaggccggattggaaaaacgcattgaatttcttggcgttcgtaatgatattgagcaactgtatcgccaggtggatggttttgtcttgtcatcggaatgggaaggatatggcttggtcgtcgctgaagcgatggcttctgaacttcctgtcgtggtcaccaatagcggcggccccggagaaatcatcggcaatacgggcgagaatggtttgctggttccgatcaaagaccctgaagcgctcgccaatgccatggcttcgatagaaaggatgtccttgcaagatagacgacatttaggtcagcatgctcgacgtcgtgtcaaagaaaaatacgctttagatgaaatagttacacagtgggaatgtatttatacagagctaaaaaacaataattaa

SEQ ID NO: 427649 - DNA, 894 bp, Serratia marcescens
ttgagtaactttgccctaagcgtagttataactacctataaccgcccagatctgctcgcacgcgcagtggattccgttgtgaccgaaaggagtaggcacaacaagatacaaatcatagtggttgacgacgcgtccacgacagcgcagccggaacttgctatagacgacctgatctttcatcgaatgcccgtcaacggcggccctggccccgctcgcatgcaaggcttagcgttggctagctccccttgggtcttgatgcttgacgatgacgatacgctcgaacccggtacggctgagtatttggccacacgtctacccgaacctgaaacgtcggcgtatccggtgtatcaatttgccgtcagcaagcaaaatcagaaagaagaatttcgtctgatcactttcgatgactacgtaaacaaaaccattaccggcgatttcacgcccgtttttgatcgtgaacaatttttaggtaccggcttacgctatcctgaaaatcgcgccggtggcgaacacctgctgtggtggaaagttgcggagaaattcggtattccttcgtatgatcggccgttggttcgggtttccaacgatgccacagtgcgcttgacgcatttttcatcgcaaatcagcaaagccgccgaccaccagcaactggctgaaatggcgctggccgatttcggcgagcggctgcagcgcgatcatcccgaggagtttcgccggatacgtttggcgcatgttacctatagcttgcttaaccgacagcgtgcgacggcacgccaatcgttaaaaaatgctccgctcggcgacaagttaaaaatagctttatggacgatcagttggttaccgcattctctgatcaagaagttattcatttcttatcgtcagcgccaagggtaa

SEQ ID NO: 427650 - DNA, 1272 bp, Serratia marcescens
atgtcccgcgtcgcgactaataccttttggttaatgctggcacaaataggcgggttgttcattccgcttatcgaattgcccgtactggctcgcgcgctaggccaacaaaactacgggcaagtgctttatgcgctaggcatctctctgacagcctcggtgtttgttgaattcggcttcaacttcagcgccgcgcgtaccgttgtcaagatcagagaaaacaagcaacaactggcacagttggtaagcaatgtgttgtttgccaaactgctgctcagtatggccgttggtgtcgccgtagccgtcctgatcctgacaggatccggtgccacgacgatccctcaccattggttcgtgtggatatcgctattcattctggcgttcggttttacaccattatggtactacgtcgggatcgaaaaactggttttgccggcattgctggatttaggcttacgcagcacggggcttttatttaccattttgctggtgtcctcaccacaacatgctcaacgtgtactcatgattcaagctactgtgggcatcattaacaccctacttccaaccttgctgatgatgcgctccactggtttaggtcgcatcagctttcgcggcgccgttaccgttctgcgtgaaagctgggaactctttttatacaaaggggctcaaagcatcatggggtcgatcgcttctaccctactgggattattgggtggagctcgtacggttggcgcctttgtacccgccgaaaaactggttcgagctgcgagcggtttagctgcccccgttctgaatgctgcgtttccccatctggtcagactgcaatccgactcgacgcataccgcaaaacgggttgttaccctcgcactgggagcgttgttcaccgtaacggtcgccttcgctctgctgaccgtctggctagccggttggctggtgaataccatcttcggccccggctatcaggatgctattgagctattaagcattttggtatgggttgtccctttacgcatttgcagcatggcgttggccatattgtggtttattcctggcggtaaagagcaagttgccagccgggtcatgatgatcaatatagcgattatctgcctgcttgccttcctcctggttcctacattaggcgggttgggcatgactatcgccttcttggttgcagagataaccatgttttccttattgctttttttattctgtcgaaaaccgtcaggtgtcgcgccacaaacacctacacttgcccgattgcggcaccgacagtaa

SEQ ID NO: 427651 - DNA, 723 bp, Serratia marcescens
atggcgctcgacggtagccgcacctctatgctgtggctggcgttagtatggggtgccctggcaatgattgccttctttgctcgcgtgcaaacccagcctgtgcgcggtcattttagcctgatagtcgtgaccttgctgtcgttctcacttattcagcccgtactcctgggctgggtttcaggagattatgacaaactgcttgttcaattgatggagaagcaaacgagcgatcatcccgatacggccaatctcagtattagtcatactctcgaagaaactttggccgcgccaaaagaaacgacggcagaccgtttggtcaaaggcgacaacagtatacgtttgcaaatgctgcacacagggtggcagcaaaccgtagataaattcccatggggaggcggttttggcagcacccgggtcgatgattttggcaccgacagcgtgattcacatgacctatcttcagttattggctgatgagggcgttttatcgttcatcggctacctgctgtttattttgactcctctctattacggtctgaaattcgtcttcgaaaagcgggagctttttgtcgaacgtttcgagtctatgttgagtcccttatcggtgctggctctgttcttgttcatgggatgtttccaccctctcagcaatgagttaaccgaatgggccatcgttttaaccgcaatttctattgtgatatgccatgtcccgcgtcgcgactaa

SEQ ID NO: 427652 - DNA, 906 bp, Serratia marcescens
atgctcaccaacctaagcgatatcgatctgaaactgctgcgggtattcgtcgcggtggcggaagctcagggcgtcagcgccgcgcaggaagcgctgctgatgaaccagtccaccatcagcactcacctggcctcgctggaaacccggctgggttttcgcctgtgccagcgcggacgctccggcttccggctgacgcccaagggcgaacgcatgctgattgcctgccgctcgctgttcaacgccgcccgcgacttcacccgggtcagccagtcgctgaacggcctgctgaccggcgatctgcagatcggtctggtggataatctggtttcgctgccgggcaatccgttcagccaggccatcaaacatttccagcgccgccaccaggacgtgcaattgcagtgccgcatctgttcgccgaacgagattgagcaagggctgctgcaccggcagctcgatctgggcatcggctactttggccagcagttggaggcgttgcgttatcagccgtggctggaggagacgcaggcgatctactgcagcgcggatcacccgctgttcacggtggaagaaccggagcgcgagcagattgaaaacgcgcgctgggtcaagcgcggctacctgctggcgcagcagctgtgcccgatcgcgccgcctcacctggcggcggtggcccaccatatggaaagcgtcgcccatctggtgctgagcggcacctgtctcggctatctgcccacccactacgcggcacgctgggtggaacaggggctgctgcggcaactgggcggcgcggcgctctcataccgcgccacgctcagcctggtcagccgccccgttcagcccgacgaggcgttgaacgcgctgctggaggatttggcgcgcgccgcacgccaatcgcctcatcgctga

SEQ ID NO: 427653 - DNA, 1386 bp, Serratia marcescens
atgaatctcgatctgctggtcgtggtgttttactttctggtgataggcgcggtggggtggatgggcattcgccgcgccaattccaaagaggcgtatctggtcgccgggcgcaacctggggccggggctgtatctgggcacgctgtcggcggtggtgctcggcggcgcgtcgaccatcggcagcgtcaagctcggctacacctacggcatctccggcgtctggctgtgcggcgcgctggggctgggcatcgtggtgttgagcctggtgctggccaagccgctgctcaagctgaagctgtataccgtcagccaggtgttgtcgcggcgctatcatccggcggcgcgggttaccagcggcgcgatcatgctggcgtatgatctgatggtggcggtgacttcgatcatcgccatcggcagcgtgatgcaggtgatgttcggcctgtcgttcagcgcgtctatcctgctcggcggcgggctggtggtgctgtattcgacgctggggggcatgtggtcgctgacgctgactgacatcattcagttcatcatcatgaccgtcggcatgatgctggtgctgatgccgatgagcatcgtcaaggccggcggctgggaggcgttcaccagcctgctgcccgccggttactaccaactgtcgtcgatcgggctggacaccattctggtgttcttcctgatctacttcttcggcattctgatcggccaggatatctggcagcgggtatttaccgcccgcagcgccaacgtggcgcgcttcgccgggctgggggcgggcgtctactgcgtgctgtacggcgtgaccggcgcgctgatcggcatggccggcaagatcgtgctgccgtcgctcagcaacaccgacggcgccttcgccgctatcgcgcaggcggtgttgccggtcggcgtcagcgggctggtggccgccgcggcgttggcggcgctgatgtccaccgccagcgcttgcctgctggcctcttccaccatcgcgctggaggacgtattgccggccatccggcgcaaaccttccggcgggttggccgccgggcgcttcaccacgctcctcatgggcgcggtcatgttggggctggcattcgtggtgcgcgacgtgctggcggcgctgaccctggcttacaacctgttggtgggcggcatgctgatcccgctggtgggggcgatcttctggccgcgcgccaccagcgccggcgccatcgccagcatgctgaccggcagcctgtgcgtggtggggctgatggtctggcacggcatcgacgccaacagcccaatctacggcggcctgctgggcggcggcatcgccttcgtgctgggcagcctgttgagccgcccggcgccgcagctgcagccgcaaaccgagcgctga

SEQ ID NO: 427654 - DNA, 864 bp, Serratia marcescens
atggacaatcgcaatgtggcgtcacgcccaaaaattgaagtgcgctcgatagactatgtgccccgtcacgagcggcatggcaaggtttggcatcaggcgccgttttggttcaccggtaattttgttttgacgacgatggtggtcggtttcaccggcccggcgctggggctgggtgcgctttattcgatgctggccattgccgccggcgtagggttcggcacgttcttcatggcgtgtcatgccaaccaggggccgcggatggggctgccgcagatgatccagtcgcgggcccaattcggcctgcgtggcgccatcgttccctttgccgccgtggtgtttgtctacatcggtttcaacgtgttcaacgttattctcgcgaccgatgcgatcaacacggtgttgccgggccaccgtctgccctggtatgcgttgctgatcgcggtggccgtgctgttggcaatcgtcggccacgatatgctgcatgcggtgcagcgctggctgacctatgtgatgatggcggtgtttggcgtgttgacggtcggcgccgtgttgtcgctgcggatggacgccgccgtcggcgccgggcatttctcgtgggcggcctttttgattcagctgtcggccgccgccggctaccagatcagctacgcggtgtacgtttccgactactcgcgttatttaccgcatgaaacgccgtctgccaacgtgatcttttggacttatctgggggcggccggatcggcgctttggctgatgtcgctgggcgcatttctggcctcagccctaccggcccccgatgcgatcggcagcgtacagcggtgggtaatgccgtttacccggggtttggcacgctggccgtgctga

SEQ ID NO: 427655 - DNA, 609 bp, Serratia marcescens
gtgggtaatgccgtttacccggggtttggcacgctggccgtgctgatcgctgtgccctcgctggtcggcatcatggcggtcaactgttatggcgcgatgctgaccagcctcagtgcgattgacgcgttccgtaaagtgacgccaacgttgaaattacgcatgaccggcattggcgtcgtcgccctgacggtgtttgcggtggcgttggccatcccggcgagctacctcgccagcttcaatacctttgtgctgctgatgctgtatttcctggtgccctgggcggcggtaaatctgatggacttttacgtggtgcgcgacgggcattacgcgattggtgaaatcttcaacccggcggggatctacggccgctgggggcgccccggcctgacggcctacgcgatcggcctgctggcgatggtgccgttcatgacgttgggcttttacaccggcccctttgctgttttactgggcggtgcggatatcgcttttctgatcggcctgctggtggccgggagcgtttatgtcgtgatgtgccggaagctcgatcttgaagccgaacggcgggtggcgttgcgcagcgagggtttattggaaggagagccggagtga

SEQ ID NO: 427656 - DNA, 420 bp, Serratia marcescens
atggacattaccgttaccgacgcgattgacgaacacactctcgatgcgatcaggcaaggcctgcgcgcttacaacctgccgcatatcgatgcccgtcaccgcaagccgctcagcgtctatgcgcgcgacgaggccggcacggtgatcggcgggctgaccgccgaaacctggggcaactggctgagcgtcgaatggctgtgggtggcggattcccagcgcggcagcggcctcggcggccggttgatgcgcgccgccgaacgcgaggcgcaggcgcgcggctgccgctacgctcgcctggataccttcagcttccaagcgcggccgttctacgaaaaactcggctatcagctgcaaatgacgctgaaagagtatccggtggaacatgagtgttattttcttaccaaaaccctgactgattaa

SEQ ID NO: 427657 - DNA, 621 bp, Serratia marcescens
atgctgaccatttggggccgtgagaattcgaacaacgtcaggaaggtgctgtggtgcgccgccgaactggggctgagctatacccacatcaacgccggcggcgcgttcggcaaggtgaacgaagagagttaccgcgcgctgaacccgaacggcctggtgccgctgctgcaggacgatgacttcgtgctgtgggaatccaacaccatcgtgcgctatctggcggcgaaattcggcgacgcgacgttctatccgcaagatctgcaggcgcgcgccgccgccgagaagtggatggactggaccacctcaaccatcgtcccggccttcaccatcgtcttttggggcctgatccgcaccgcgccggaattgcgcgacatggcgaaaatcgaagcggcgatcgccacgctggaaaagcacttcgacgtcatcgaacagacgctggcgcaccagccttacctctccggcgacgcgttcggcttcggcgatatcccgctcggcagcttcgcctacgcctggttcgaaatgccgatcgcccgccgcccgcggccgaacatggagcgctggtatcagcagctgcgcgcccgcccggcctatcagcgcggcgtgatgagcgaactcacctga

SEQ ID NO: 427658 - DNA, 774 bp, Serratia marcescens
atgaagcacattactctgattatcaccgtggtgctgtcgatgtttgtgatgcagggatgcaaacaaggtatggatttacaaccgcaggattattttgaagggacgcaactggacatcgccaacatcatctacgagggtgacaggcaaaagctggataagattttaccgacggtaagcaaagaaacgttaaatcggccggccaaggcggagatgacgttgctattctgggcgataaataacgctatctttgacaagaacacgccagagcgactcaagatcattacagatttggtcaaggcgggggcagacccactacagcctaggccggaagggagaagtagccccgctgaatttgttatgaaagcagataagggagtctggataaaatccatgttagatggggggctctctcctaatgcaaaagataaaatcaacaataagccaattatatttaaaagtattcttgcgaagaatacagagacattagaggtcatgttggattatggtgcggatataaatataagaaattcactgggtgatacgctgctcatcgatgctttagactatcactcctatgaccacgtcattcttcttttagaaaaaggtgccgatagcgatataagaggcaactcgggttggacgatgggcaatcagctgcaacggctgattaataggagtcaggacggcagtgaggcgaaagagtctcttgagcgcatcagagacgagctaattaagcgtggcgggaaatggccgcctgctcctgtcagtcaataa

SEQ ID NO: 427659 - DNA, 897 bp, Serratia marcescens
atgaaaaacgacaagtatgcagcactgttcgaatcgagaagaccgtttctgatcggcctcgcctatcgtattttaggttctctggccgacgcggaagatgccgtgcaagatacctatatcaaatggttacatgcggatcgccacagcattctgaatcatgctgcctggctgaccaccgtctgcactcgtcgttgtcttgacctgctgcgcaccgcgcagcaggctcgcgtcgattatgtcggtatttggctaccagaacccattcaaaccgccgtagccaaaacgcccgagcaaacgttggaactctcatcgtcgctgtcgacggcctttatgctgttgctcgaaagactcactccccgcgagcgcgcagcctatttgctgcatgacatctttgacttgccctacgcggatctcgccatgacattaggtggagaagaaacggcgtgtcgtaaactggtgtcacgcgcgcgcgaaaaagttggccgcccagaggagcgtaaaacccagcccacagagcggcaggaagccttgcttatcgctttcaaaacggcggtggaaacggcagatatcgaaccgctttcgaccctgttgtccgaagacgttaagctcagtgcggacggcggcggcaaagtgcccgccaacctggctgaactcgtcggcaaacgtgacgtgctcgaatttatcggcggtaaattgcccgtattttggcgagcctatctctggcaacacgcgctcatcaatggcgtgccaggcgccttgctatccgaacaaggccgtattacggcgtctgtcagtctcagtttgaatgccgaaggccgactggctcaggtatttatcgtgcgcaacccaagcaaactttcgcaactcgaccgtctgtggacaatgcctctgcggtaa

SEQ ID NO: 427660 - DNA, 441 bp, Serratia marcescens
atgactacgccagtgaataccgaccctgtcaatcatgcgcaaaccattgccaacgttttttccgcgctgctgaaagtgcatggcgctatcgacgcgcacaatctggagcgcaagatctaccatctcgtcctcctgcgcgcttcgcaaatcaatggctgcggttactgtgtcgagatgcataccaaagaagcgcgtgaggacggtgaaaccaacgcacgtctggacaggctggtggtatgggaacacgttgatgatttcacgcctcgcgagcgcgccgcatttgcctggacagaagcgttaacgcggcttgaacgccataccgagtatggcccactgcgcgcggcattgcgcgcgtactattccgaggaagaaatcagcgcgctaaccgcaaatatcactatgataaatctgtggaatagaattcatatttccggccactaa

SEQ ID NO: 427661 - DNA, 732 bp, Serratia marcescens
atgaaaaaactaataatcgccgccgttctggccggcatcagcgtttccgcctccgcagccgaaaccatccgtttcgctaccgaagcctcctatcctccatttgaatttattgacgccggcaacaagattcagggttttgatgtcgatctggccaacgcgctgtgcaaagagatgcaggccgagtgcaccttcactaaccaggcgttcgacagcctgatcccgagcctgaagttcaagcgtttcgatgcggtcatggccggtatggacatcacgccggagcgtgaaaagcaggtgctgttcaccaagccgtactacgataactcggcgctgttcatcgcgcagaaaggcaaaatcgccgacgtggcggcgctgaaaggcaagaaagtgggcgtgcaaaacggcaccacccaccagaaatacctgaccgacaagcacccggaaatcaccaccgtgccttacgacagctaccagaacgccattttggatctgaagaacggccgcgttgatgcggtgttcggcgataccgcggtggtcaacgagtggctgaagcagaatgacgcgctggctgcagtgggcgccaaagtcacggataaagactacttcggcaccggcctcggcatcgcggtacgccagaagaacaccgagctgcagggcaagttcaacgccgctctggacaagatcaagcaggatgggacctatgaaaccatctacaaaaaatggttccagcagtaa

SEQ ID NO: 427662 - DNA, 258 bp, Serratia marcescens
atggaactgaaaaaaaacatcagtgattacactgaaattgaattcaaaaaactaattgaagcaatcattaattgtgacggtgatgagaaaactcaagataacaacctcgagagttttatcaatattactgagcaccctagtggttcagatttgatttattatcccgagggaaataataatggaagccctgaagccgttatcgaagaaattaaggagtggcgaaccaaaaatggtaagccttgcttcaaacaagggtaa

SEQ ID NO: 427663 - DNA, 261 bp, Serratia marcescens
atggaaaagagcactatttcagaatatacagaaactgagtttttaaatttcgttagaaaaatttgcaatgtctctgattataaaacagaaaatgatcacactatcgccgttttgaaatttgaaaatttaacagaacaccctgacggttctgacctgatttattatcctaaagatggtcaagatgatagtcctgaaggtattgtaaaagaggtcaaagaatggcgcgccaaaaacggtaagcccggtttcaagcaggggtaa

SEQ ID NO: 427664 - DNA, 429 bp, Serratia marcescens
gtggtcacgaccttcccggcggatgtggtgcaggatctgcaagactttatcctgtggcagccggatgcgctggaaaccggagttgaagctgtctatgtgatggtcagtgatccgttggactcggggcgttttacgcgtcagcaactggataagaagtacaagcacgcgagtgactttggtgttgcggacaccagaaaaaacagagagactctgactcaatatcgcgatgcgctcgaggcccatttgaatgataaggacacggtagaaaaagggacttacataagagagaaagactccaaagtcttttttaactcaaggaccaataatgttgttgtaattagacgtgatggatatttctcgacgggaatgaaattaagccctgggacgccacagtataaaaactatatggaaaaaggagtgttgttatga

SEQ ID NO: 427665 - DNA, 282 bp, Serratia marcescens
atgagtatgaggttgattgaaatcgcgcaggcattactcgactctaaattaaccgctgatgagtatgagtcacagtatcttaatgtgtggagaaaagaacgcgatgacgggacattaagaaaagatagtaatgatgttgggtattgtgcagcagagcttttcagcttggctgattgctatacatcttctccaaatcgggatggtagcgatttggatgagaatgaactcaagatagaggtaaaaaaaacgcttgagaagtataatttcctcaaaaaagagtaa

SEQ ID NO: 427666 - DNA, 786 bp, Serratia marcescens
atgcaaattatttatcctgatgattattcaaacctaggcagaccggatgaaaattttgccgaggaatttacctgcgtcaaagatagaggaatacgctgctttctactttcctcagaagccgcagcattaggaaaaacccgtttttcgggccgctttgaaccaggcataccggtaatctggcgtggttggatgctgaatgcagaggagtatcgccaactgcaccgtacggtagcagctaatggaggggaaatgcttgaatccccggatgactatttgcgtaatcaccatataaccggctggtatgagccatgtaagtcatataccgcagagaccgtgctcgccacggctgataccgatttcgacactctggtcacccaactttgttggcccgcctactttgttaaggattatgtgaaatcgctgaccacatcccgaggctcggtagctcacaatgccgccgaaatcagagaggttattaaactgattgcgcattaccgaggggagcttgaaggcggcgttagcttaagacgctttgaaaacttgattgacgacagtgagcgccgatacttttcgctaaacggccaggttttttccgccgatggcgaaatacctgatatcgttcatcagatcgcatcgcgtattaaaacgcctttttattcgatcgatatcgccaaaaatgccaatggcgaattgcgcctaatcgaaataggcgatggtcaggtatcggataccaaagagtggaacgttgcagacctggttactgcattttgtatagcgggcggttaa

SEQ ID NO: 427667 - DNA, 339 bp, Serratia marcescens; identical to SEQ ID NO: 422900

SEQ ID NO: 427668 - DNA, 681 bp, Serratia marcescens
atgtggttgacgaattcacagataagcgaaaagatgatgactcaagagaacctcaaaccgtgttacgaaatacaacctctccttgatgaagtgtccgtgaatcgactgctgcatgaaattgcaaatgtcttgggcagtttatcgtttaatgagcatgagttagacgataagtggatcaaaggatgcagagcatatgcttgggttaagaaccatctagaagcgaactatagaaatattccaggtgttgcaattgttagcgatcggatggatttcgtttttagcctccatagtgtaccacttcaatttgttacggataaagtcgatactcctcgcaaaaggcaccgtctgttgcgaaatgaagccgaattccgacaaatgtctttattctcggatgcagaacctgagcaagaaacgacatggcgaatttttgctgagaaattttttgatctagggaatcctgatgaagatatgttgccaacctggatcgtgtctttagcagggtttaactcatatggcgctatgataagtaaggttgaattgcattctaaagtcagcgcccctgtagaaagtactgatgtaagtgaccttccagaagcggctgatattcctgcggcacctcttaaacgtcgcgtgaaagatgatcagaagcgtaacgatagtgatcaaaatggaactgtttga

SEQ ID NO: 427669 - DNA, 903 bp, Serratia marcescens
atgcctcttgatagtgagaactgtcattttagaagtaagaaatcgcgtacccagactttaactaactgcgtcctttcgcgtgcagaaattcttgatgttttagtggggaatattgaagaggaaatagagcttccagcactgaatattccggatatttcccatatgccactatctaatgatactgacattgagcgagtttcagaagagtgtcgtcgttattgggggttaggtttaggccctatatcttcaatgattaattttgttgaaagtataggtgttgtcgttgcgcatgtatctggagtggatgatagagttgacgcttttactgtgcataataaacgaccattgataataagaaatagtgctaaaaaaagcgtatgccgttttcggtctgatcttggtcatgagttaggtcaccttgtattacatgagggaattattactggcgataaactgacggaacatcaagctgatcatttttcaagtgcatttttagttccaaggctgtcatttattaaagagtttcctaaaatgagaggaagccatttagactggaatgcattggttgagtttaaggttcgatggaaaatcagcctcagaatgtgtctctatcgcgcctctgtgcttggcattataagtcctgagcaaatgagacgaggatttatccatcttaattctagaggttttgttggtatagaaaaaggcgatgatagaatccctaaggaagaaccaagcataatagctaatgctgttggcatgttagatgattatacttggagctgtgtattggaaaaatcagccttaaaatcatcgtttgtgaaagaagtgttctcaattgatagaccgctttttggcgatgatgggaaattggtttcaatatttaagtataagaattttggttaa

SEQ ID NO: 427670 - DNA, 1128 bp, Serratia marcescens
atgatgggcaggcctcgtaaatttgcgttaaacatcccagggctgtattgcagcacagataaaagaacacagcgcatatattggaaatataaacatccgctcacaggaactgttcatggtttagggacaaatgccgaagaagcgaaagcaatagctattgaagccaataatcgattatcggaacagcagctgcgtaacacactggcggtacgggacaagctgagccgtgcggtcggcgggagcatcagcgtttcaacatggctggatcgttatctggttatccaggaggagcgcaaggccgcaaatgaaatttctgagaacactgtgaagcaaaagatagcacccgttaaagctatgcgtaacgcattggcctctaaacctatatgtgatgtcgatacccgcgatattgctgacattctggatgattacaaaaagcagggccactcaagaatggcccaagtcgtcagaacaactctgatcgatgttttcaaagaagcccagcacgccggcgaagttcctccagggtacaacccggccgaggctacaaaaaatccacataaccgcataggccgtgaacgtatgatcttagatgaattcaataccatgcttagcgtaacgccaccaccgttcgagtacatgaaaaatgcgatgttgctgggcctcgttacagcccagcgacagggcgacattagcaaaatgcagttttctgacgtgtgggacggccacctacacgttgaacagataaaaaccggggctaaggtcgcgatcccgctatcccttcgctgtgatgccattggcatgaccctggaacaggtaatcactcagtgccgggatcatatcgtcagcccttaccttgtccactacacgcacaatacggcaatggccaggcggggaggtatggttaagcccaacactatcagcacaagttttaaaaaaatccgtgagctatcggggttgtcttggagtaaaggtacccctcccagctttcacgagatccgttcgctggcggagcgcttataccgggaacaaaaaatcaatactaaggatttgttagggcacaaatcccaacgtcaaactgatcgttataatgatgcccgaggtaaagaatggaaggtcgtagccatttag

SEQ ID NO: 427671 - DNA, 504 bp, Serratia marcescens
atgagcaccagaactatcgatttagcaatcgaaatgaaaaagcttcaggcattggccgaagatggcgagcttaccccagagatgataaaggacaccctcgaagggttggaaggcatgatcggcgacaagctggatgcgaccatagccgttgtacgtggttttgaaggccaagccaatgtttgcgatgctgaatctaagcgtctcgcagcccgcaagaagagctgggagaaccaggcggggctgcttaaaaaatatatacttgaatgcttgctaacatcaggttctgacacgattaaaaccgatctgaacacctttacagctcgtaaaggttcgcaatcgctggttatcgatgacgaggaattactaccggatgagttcgtagagtcattcactgaagtggttaataaggtaaagaaagatgaacttaaaaaagcaatcttggccggcactgagattaaaggcgcacaccttgaaaccggccctcgctctttgcaagtccgataa

SEQ ID NO: 427672 - DNA, 2109 bp, Serratia marcescens
atgcctttatttacttgtgggttcccccctaaaaaatcagctgcggcaaatggcaccgtagcattagcaattgccgttgaggccaagaacgccaagctggcagaaatgaaagcgacaatgttactggaagaggctttccccaattccaccagtaactttttcaaacccaaaatttgcgctgatcgcgaagggctaccacggccgcccgttgatcaattcgacgctgattggatgactaaaaatcagtggaatgaagaaactaaagaatacgaggcaatcgagcttccagagcaggatggaaatggtgaggcaggactcacatcgtcaaaaacgattttcgaactgcctatcgacgtccgggtcgcatatatcttgatgtacggtgcagagcctgatgctgtcgatatggagcacctttctaacgcatatgacctgatcaacgatgacgaggctgaaccacgtctgcgcgcgattgttgatgctctgccccgcgtaccacaagttaagtcgatgctggttacctcagtggaaaagttgattgaagctatccaggcgaaatcaccggcgatgacaacatggccagaggtcaaaaagtttgcagatacctgggtacaaaccgcaaatgccgacaggacaccagcagccggtaatatagatgtgaccgttactcgcacttacgacatgctcgacaatgaaatcgcattagcaatcaaaggcgttaatccattacacgccaaagcggcagatgtaacggcagcaaaggagttgatcaaccagcgagatcaaacatggcgggcatggagcatgtcgttgcgtatcgtcggcatactcgacatcgatcgcgaaatcattttcaaaatgatcacagctgggctttcatatcccgagttttccacaaactcggacctgaggcggaaattcattcacaaatgcctctctgaacgctgtgggataacttttgatgcagaagaaaagcctggctcaaatgcggcaagcaaggccgctgatagcaagccaaaagagccatcaggtcaggatgaatcgctcaaagtacagagcctgggtgatggcaaatttagcattgacggattgatgggtaattcggataaaacaattgaaccagccaacgaaactgtggttgccccttcccaatctgtgacgacagctaaagcagaggtgcaatcagaaaataaagcaccaaccgctgatgatgcgattaccacagacgatttccaaactcgcgcatccgtactcgaaaaggaacttgactcaaaagaaggcgatgcagcgaagaacctcgatatttggaaacgcgtccagcggactgacccagctcgaactaaacggaaagagacccgcgacaatagcggaaaagttattcgcacagtaacgagcattcggccgacataccaatatatgcgcgccacggaaatattcggcccattcggtattggttggggcgttgatgtgcttgaagaacgcttcgatcccggtatccctttaatggaaggcattattgatagcgccggccgtgaaacgggtaagaaagtcatgcgtgatggggatggaaaaatccttacgtctctcaatcacacgatgaagataatgctctggtacatccatgctggtgcacgcggagagatcatcgcatacggccacaccaaatacctgtatgcaagtaagtttggtctgagcgttgaagaggaaccaagcaaaaaaagcctcactgatgccacaacaaaagccctgtcatcgcttggatttagcgctgatgtttatttgggtatgttcgaagataacgaatacacacaagaaaacgaatatgagcacaacataaaaaatgccagtgccaaggctgacgactcagtccgattaagaaaagaattggacgaacgttttaaggccaatacaaaaacgatgcgagaagcggttacaagcaatgaagtgacaaaaatttgctcatcccttactcgtgtaattggttctcatattaagagcgccaaggctgttgcagatacggaacatgttaaatacctcgaaagccgcctgacccggctggaggaaattaaggttgaatgtctggctaaatttgaagaggagaaaaaataa

SEQ ID NO: 427673 - DNA, 321 bp, Serratia marcescens
atggcttccaccactggacgccgcaagtatagcgagattcagatgagaaagacaacctttagcgttttagcctgctcggtgaacattatcagttcagaaagcaaccacccaatgcaggcaattatcaccacatctaataatgcggttatttcaaccgtgaaagacctggtggaagtcggtttcattaccgtcgaagagttgctttcattggctatcgagcaagtaaagaactgtgatgcgatttcactgaggcatgttttaccacatgccgttctcaatgaattaatagcagcacataactctatttccaaagaaatgtaa

SEQ ID NO: 427674 - DNA, 294 bp, Serratia marcescens
atgagcaaggaaataattttcaaattagcgcaggtcagcaaaaacgtagccaaagtgttttcaaatgacgaaaccgccggttacatcgccctgcccgaaaatgagcatcaaaaccagcatcctttcgctatcacccacaatggcaaagatattggttacgagcattgcgaaatgtgtgcgattgaagctgttatccgtcgttttgagcgtatacctcttggcgaaaatatcgatctaatcacccccaaagccggcattcgctcattaaatatcagcgtgttatcaatccagtaa

SEQ ID NO: 427675 - DNA, 195 bp, Serratia marcescens
atgaaagcaacagtcctatgtatcaccccaagcgaagaggctgtcggctaccttaccgctggtaagcaatatgacatcgaaagcacttgctctgatggaaagtgcgtgcgtgttatcgatgatcaaggggatgaaatcagcatttttgttgatcagtccagttacggtaaattccgcgaactgccgaagttataa

SEQ ID NO: 427676 - DNA, 573 bp, Serratia marcescens
atgaaagaaaaaatatcgaatccagtgttagcattcgaagagcgcatggctcttcttatgcatatgaaagacctgaaaaaagctgatcttgcgcgtatggcaggagtcagtgctcaggccgttaatggctggttcaatcggggtgaggttggaaaagcctccgctaagaagattgcagcggctactggcgtatcggtggattggatattggaaggtggccctgaactccatgagttgaacgcgcatcgagccaagcgccttgctgattggtttagcgagcctggattccccgaagaagaagctggattttttgaagatctagttaatgggaaagcagccttcactgataaaactgccaggcggattgagcaagattatggattacctttcaatcacttagatgccggcaatagttctgtttcaccaacaaagttaaatgatgaagataaagaacttttattttattttcataaacttacaagcaaagccaagcaagaattcctagagaacgtaaaaaagcaggctgatttttacgacagcatgttcgaagaactaaaaaaaatgagaggataa

SEQ ID NO: 427677 - DNA, 246 bp, Serratia marcescens
atgacagtgctagacgaagtaattaaaaactttaggagtgcttctggtttagctaaggcgctagaagtaacacctatgaccgtaagccaatggaggcatcgagataaggggaaagtgccagaacgacacttgatgaaaatttacgaactcacggggattacccctcatgaacttcggccggatattcatcctaaccctacgtccggattgccactgaatatcaacaatagcatcgcggacgattaa

SEQ ID NO: 427678 - DNA, 432 bp, Serratia marcescens
atggaaatcaattatgaagcgatctgcattgagctacgccgctgggccaatgcgacaaaacgggaaacggtggctgcggagattactcagcactatttcgagttaggtggcggtgatctgcctttgtatccgatcgaggctcctggggcgacacataacaacatgcaaaatattttccgctggttggatagtggcagtaggaaagcgaaagtaaaaatcgaagctttaaagcctgcaattttgaaggcgttggagcagcggcgttacggaacaatccagtatcaggtggcaagggcacaaaaggaatttgccgaggccgtcagtgccgcactgctggagttgccggaagcggacgaggaaatcaacgacgcaatagaagcgttgcatgtgttacgaagcagaccccataacggcatttactgccggggataa

SEQ ID NO: 427679 - DNA, 231 bp, Serratia marcescens
atggctaattttacgaaagaacaggtcgaggtgcagatccgcgatcaattggtgcgtgaaggtatttcaatcgatgtggctcgttcggcggcaatgcgtggtgctaatcattacgcgagccggccaaatgcaactatcgcaagcagtatagcgatcgccaaaacctatgcgaaaccattaaagcgtgtgaaagggaagccaaattgcaacgccaattctcgcaaaaagtaa

SEQ ID NO: 427680 - DNA, 936 bp, Serratia marcescens
atggcatcaagttggataaaagtcgaagtaattactccagataagccggaggtataccagcttgctgaattgttggaattagaccctgatgcggtactcggtaagctaatccgcctgtggtcttgggcagatcaacaaacaattgacggtaacgcagattgtaacgcagttagcgttactaaaagtgcgatagatcggatcacttttgtgagaggtttcgccgaagcaatgctgaaagttggatggttggcactggatggcgaaaagctggtttttccaaacttcgagcggcataacgggaattccacgaaaaaacgggcacttacaaataggcgcgttgcaaatttacgcgattcgcaacgcagtgaagcaccaaacagtaacgctcacggcgttacaaaaaaggcacaaaaggggttaccagatgaagatgaagaggaagaagaagatataaaagatccccccttaccccccaaggggaacggggaggggcaatttgattttaattcgattgaactacctgaatggctatcgcctgaaatatggcgtcagtggggagagttttgcatcgagctggggaaaccggtgaaaacaaaacgtgcggcaatggcgaacattaagcggctggaggagtttcggcagcaggggcattcacccgactcggtgattttgcactgtatcgcgaacgactggaaaacgttatcaccaccgcttgtttcgcatccggtatcaaattttattgatttcgatggggcgtttaaccggctaattacttctcgcaagaagcctcagaacagggcggaagaaattgccaaggaaaaatactcgaaagctggattgcggatggcgaaagaattcgagtgccgtaacgcatggcggggctatttaagcctggcatacaaagaaaccggcgagcagccgtacgtgggaggttag

SEQ ID NO: 427681 - DNA, 138 bp, Serratia marcescens
atgaagcgggcggacgcgtaccaatggctggccgagcaactcggcattcctggggctgagtgccacatcggcatgttcgatatcgatatgtgccgtcgtgtgcagcgcgtggcgacggaatacaagaattccctgtaa

SEQ ID NO: 427682 - DNA, 822 bp, Serratia marcescens
atggcaaactcatttaacaaaatgattgacgagaagatcattaaacgtgggaaaactggttttttaatccagttggaaaatattcacgtcaatcctgaattcgatatccgtgtcaagaatgaacgctatcatgaggctggtgaaaaattatatcaatttatgttggctggcggcaaagtcccgcccttggaggttatacctcgcgatgatggtggagtttggattattgaaggccatcgccggaatgaaaatttccatcgcttacttaatgaagctggccgccccgtagattggattcgtattgacccattcgaaggcaacaacatcgagcgaatcgcgcgggtaagaacgagtaacaatcagctaccaataactgactatgaagaggcgttattagttagggatttgcaaaacctcaatcttacggctgataaaattgctgaggttttacatatacctcgttataaggttgataatgcattggtgttgctctctgctaattatgacgttcaccaattagtagaggagggcactgttgatattccattggctgttgaacgtgtgaaaaaacacggagaaaaagccggggaacttctaaaggatgatgtcgctaaagctcagaaaaagggaaagccaaaagcaacaaaatcgacagctatcccgcagttcagcgcgacaaaaagccgtaatgccgtgaagatattttcgcaagcggaagtgcgggaaattgacggggaaacggcatacatactgccagcaggcaccgcgcttgatgtgctattcattctcgatgaatttcgccagcaaggagcgggagaatga

SEQ ID NO: 427683 - DNA, 327 bp, Serratia marcescens
atgagattccttcaatttttcagaagaaaggccaaaaaaacgccggtgaaacacaattacaccaagatgttctgggggcacgcaattcaggggctttctgacaatttcaacaccaaaaggaaattcaatattactggacatgggccgatcagccttccttttgggccggcgatttcagctggtgacttcattctggtttcatcgaatcaggggccagtaatccggcttcgggtggttaaggcagaatattttagagatccgtcggatatgttctccgcaaccctaaaatttgatggcgttgaaaatcaggaggttctccatggttaa

SEQ ID NO: 427684 - DNA, 231 bp, Serratia marcescens
atggttaaacctgtcgtaagaacgaaaactggcgcaaaggtaacgctcactcttgagctgacaaacctcggctcgtgggggcctgaatgccaaattaaccaagtatacaaacaagcactggatcaagccgtcggcaaactggggcggattttcaaagggcagtctgatattcggattgttggccggccggtagttcaggccatcacaacagatgttgaggtgaaatcgtga

SEQ ID NO: 427685 - DNA, 231 bp, Serratia marcescens
gtgaaaaactcactcgctgacctggttaatcaccagttcatgatgcttgaaaggttgggcgacttgtcgctgaaaggtgaagaactggcggaagagatcactcgcgctaaggccgtatcggaagtggccggcacgatgatccagacctaccgtgtcgcgttggatgctcagaaagctgtttatgacggctatgctgggcgggtgccgaaagtattggggatcgaagaatga

SEQ ID NO: 427686 - DNA, 651 bp, Serratia marcescens
atgagtcaaaaatatacggacgcgcaaaacttatttcttgaaactcattgcaaagggaaaacatttcgcgaaattaccgatttgtttaatcacaaatttgggacaaataaaaggcctgccacaatgagggaagtgctacgccagcgtggactagaccggtatgctgcaaaacaatatcgttacagtgaagagcaattaacttacctttttgttaatagggatgttggctggaaaaaattgactcagatgtttaatgagcaatttggcgcgaaaaaatccgtcgattctatcaaggatgtaatggccagcaggggatggaatcagaaatgtaggcacggaacagggaggggaatgaaatatatttatgccaatgataaaagaatgcgcctcgacgtttacgtatgggagtgtgtcaacgggccgcttcctacaggttacggcgttattcatttggataatgatgtgaaaaataaccagattggtaatctccgactcgcaccgttgcacatcaaatcgatgttcgtacgcgcaggctattccgatgcaccgaaagtcttggcgccaggactatatgcagcagtgatgttgaaggaccttattgggcaaattgaaaggagacgatctggacaggaggcaggccgtggaaaataa

SEQ ID NO: 427687 - DNA, 330 bp, Serratia marcescens
gtggaaaataatctgagcaagccggtggcgtatgactatcagattgcgagtgcatgtattgcagatggccataatgaaaatgggaaatgggttgactggaataataagttaactcgtcattgcccgcctgattggatgatggaagaagggaaagtcacagggctcaagctgctctactcgcaagagtacgtctccgccctgctggcagagctgaaatcttcacaggcaattgccaatgagtaccagcaactgatgtatcacatggacgccggtggtgacttctacgagtttcagcgcgacaaagccatgaaggagcagagcaatggataa

SEQ ID NO: 427688 - DNA, 600 bp, Serratia marcescens
atggcgcagttaatacagttagtgaaatccgcaccaacaatcctgaccccggcgacgatcgaggccagcgatttcgtgcaacgtgtgaaactcggtgaatggatacaagctgagtttcgccgagtccgtaactaccaatatcacaagcgttttttcaaacttctacaatttggtttcgactactggacgccaaccggtggcgcattgacgctccctgagcgcgagcttatcgacggattcgttgggtatctcgttgagatgtcaggccagcagcatggcgaggttattaccgccgttgccgatgaatacttgcttaaggtcggccagcttcgcactcaagaaatcgcgttactcaaatcatttgagccatacagggcatgggcaaccgtcgaggcgggttactactatgaggtagtgctccccaatgggctacgccagcgcattcctcaatcaatatcattttcaaaaatggatgaggatacattccagtccctttataaagcggtgttcaatgtgctgtggaatttcattttattcaggaaatttaattcacagcgagaagcagaaaacgtcgcaatgcagttaatggagttcgcatga

SEQ ID NO: 427689 - DNA, 690 bp, Serratia marcescens
atgaatgcacagcagctggaatttatacgcttagagttaactcatgccttattggatgattcagggggtactaaaggacagctagaggcatttagcgagcatcctcctgctgataacaaaagctaccctcgacaacacatccataaagttgagctggagggcgagcgttgggttaataccgataactccgccgtatatgtgttggaaacacgtagccggcgacgtcctatgccgccgatgaaagagcatacatttgcaacttgttcttggcggcgagcggttatgatgctggatgaataccagcaggcgtgggtcaggtattgttacggatatgacctgagtttcagataccaaattgcgatatgtgaatatatttggaagggttatcaagctgagcttgcagataagaatatccagcgccgcgtgaaaaacaaactggtgtcattggtttggcttgctgtccaggatgtagccgcaaaaaacagcaacgagtcatatcgggaatatgccggttcggcattggctaaccttatgagcatcactcggcaaacatggggtgagtgttacgccaggcattggcatgaattaaaggagagggcaatggcgttagatcttactgcgctgcaagcgactctaatccgccatgagcaggttaatacgcagcggatattgcaaaacctgacagaatag

SEQ ID NO: 427690 - DNA, 276 bp, Serratia marcescens
atgtcgaaacgtattactgagagtctcgtcttcaggccggcgagtgaactaccgaccgccgacctcgatggtaagagcgtgctggtgctcaacccctgtgatgggtggctcgaggggcatatacgggcattcgaagaagacggcgaggtttaccacattggaattcacacctggctgatggaagaaatgatcccacatgacttctacgtcgcctgggccctgttgcctgacggtatcgcgttaagcgagaagttcgagtcagagaagcaccgttga

SEQ ID NO: 427691 - DNA, 264 bp, Serratia marcescens
atgaaatccatgccggaaaaaatagcagatagtgccacgcatggcggctggttggttggcctgctgctcggggcaataaattatttctcgcccagtgagtggatggtgattggtattttcgtcggcatcctcagctctgtcatcgggtgcgttgtgggtatttggttccgatgccggcgagaaaggttgctgaaaatgtacctcattgatcgctcacacaagaacatcagcgcgcgggacgttgacctgatagggggcgagtag

SEQ ID NO: 427692 - DNA, 498 bp, Serratia marcescens
atgctggcgctgatcgctgccggcgcatcggccccggtgatgatggcgcagtttcaagatgaaaaagaaggccaacgcctgactgcataccaggacggtgtcggcatctggacaatttgcggcggtgtgacgatggtcaacggccaaaaggtctttaagggccagcgcctgaccgctgagcagtgcaagcagattgacgcagtcgagcagaaaaaggcgctcgactgggtagaccgcaacgtcaaggttacgctgactgaaccgcaaaaagtcggcatcgcgtcattctgtccttggaacatcggccccggtaagtgcttcacctccaccttttacaaaaagctgaacgccggtgaccgcattggcgcctgccgagaaatccgccgctggatttacgatggcggccgtgattgccgcatccgttcgaacaactgctacgggcagatagtccggcgtgatcaggaggccgagctggcttgctggggattggacaaatga

SEQ ID NO: 427693 - DNA, 405 bp, Serratia marcescens
ttgctggggattggacaaatgagcggctggatcccaaaactggccggcgggggaatgttgctcctgctggtgacggccatatgcctgggtggttacagctcgctgttgtcgcaccggttggatctggcacgccagcaggttgcagagcagaaaaaaacgctggcgcagcaggcaggactgatcaccacactgcgcgcggatgacgcccgtaatcgcgcaatgatggccgaacagcaacggagagagcagcagctgcgccagcagggcgaaaactaccagaggaagtatcgtgaagcaatccagaatgacgagtgcgcccgccgcgctgctcctggtgctgttcttggcctcctgcgcggaacggacaccaccgccgccggcgccgctcgtgctgtttccccctga

SEQ ID NO: 427694 - DNA, 240 bp, Serratia marcescens
atggcgaacactggaacgaaaaaactggctgacacttatattttcaccaacgagaaaccttcgcgagtgaaatatgaaatttttaccgatggcaacaacttctctgcacaactaacaatttatcgtgttagtcctctcggggtgcagtcatacgacgagatcaaccttaacgcagatgtaaatcaacccggccttgcgtacaacgaagtcaaacagcacttcgaacagcactacgcttaa

SEQ ID NO: 427695 - DNA, 1005 bp, Serratia marcescens
atgtcacaaccggaagaaagcggcctcgagcgcgattactgtgccggtcaactttctctccgcgacttggcagagatatacggcatcagtgagggggcaatcaggaagcgcgccaaaaaacatggctgggtacgcaagggaaagagcggtacgcaaaaaggtacgcaggtacgcaaaagcggtacgcaaaaatcaaaggtgcgtaccaagacggatcccaaagtcagcgcagaagagctgatatcggaatcaggcttatcaccacagcaaagccttttcgtagcggaatacctgattgatcagaatgccactgccgctgctgagcgtgccggttacagcgacccaaactacggccgtcagcttctggcgaatcctaacgttaaacgtgccatcgatagtcaactggttgcgtcggtatcgcgcaccctggcaaacgctgatgaagtgctcgaaaaaatgtggcagctggccacgttcgatgcaaacgagatttcgcagtaccgccgcggcgcctgccggcattgttggggattcggccaccactaccagtggcgggattcaatcgagcatgatgaaaaatgcgaagaggccaaggccaggaacaagccggaaccaccagacaagggcggctatggctacgaccacaacagggagcctaacccagcttgcccgcggtgcaacggtgatggtattgggcgggcgcacttcccggatacacgaacattatccggtgctgcgcgactggcttactccggcacgaaggttgtcaaaggtggtatcgagatctctgcgataagtcgggaaaaaatgttcgaggcgatcatgcgtcgcatggggcttaccgaatccgaactggcgcagcgtctgcttgagctggaaatccgaaaacgcaccgccgaggccgaccgcctggagcaagaggttgaactgaaccgcaaggggaaagggaaaaacgacgagccgacggtggtgatcaaattggtgaactctcctgatggcgactga

SEQ ID NO: 427696 - DNA, 1272 bp, Serratia marcescens
atggcgactgaacacacgatcacgttcctgccgttccacgacgggcagaagaaaatttatcgctcgccggccaaaaggaaagtgatccgcgccgggcgccggtttggtaaaaccaccatgctggaacaggctggcggcaattgggcggcaaaacagatgcgcgtgggctggtttgcgccgtcctataaaatcctgcttccctcgtttaaggccattcgggatctgctcaagccgatcaccaccagttccagcaagacggattcgataatcgaaacgatcggcggtgggcaggtggagttctggacgctggacaacccggacgccggccgctcccgtaaatatcacaaagtcatcatcgacgaaggcagcctggttaaaaagggcatgcgtgatatttgggaacaggcgatagagccgacactgctcgattttgacggcgacgccgtgatggccggtacgccgaagggcgtcgacgatgagaattttttctatcaggcctgcaacgataaatcgatggggtgggaagaacatcacgcaccaacagcggcgaacccgacgatcaaccccgcagcactggcgaggattgttgaaggccgcccaccgatggtggtccagcaggaatacaacgcggagttcgtagactggcgcggccagaattttttcaagctggattggctgctggaaaacaacgccccggtcgattacccgtttgcctgcgacaccgtgtatggcgtggtcgactgcgcgcagaaaggccagcttcataacgatggttcggcgtgcatctggttcgccctgaatacgctgccgactccgcaccttgtgattcttgactgggacattatccaaatcgacggctatttcctgaaagaaataatcccgcagtggatcggcaaaaccaaatcgttgagcgagatctgcaatgcccgcatgggtaccaccggcctgttcattgaggataaggccaccggtatcacgctattgcagcaaggagctaacgagggttggaacgttcacccaatcgacagcgagctcacatcgctgcccaaagagtcccgcgccatcaatatttcagggtatgtggcgtcggggaaagtacgcatttcgaaatacgcctatgacaagctggtggaatacaagcagtcgaagaaaaatcaccttttgacgcaagttctccagttcatcatcggcgaagaaaaccaggacgacgatctgtttgattgcttcaactacggcgtcgcgctgggccttggtaatggagagggtttctga

SEQ ID NO: 427697 - DNA, 1434 bp, Serratia marcescens
atgcaggataccgatgatatttgcatgggcagcactactggcgtcctcagtcagatccttgagggcgacggtattgagcctggttcacaagccggctatgagctgtgcaagctgatttaccttttccacccgctgggcggaaaaatggtggaccggccgattaagctggccatgtccgaatcgcgcaccgttcacgttacaagagggccagaacagcggctgcgtgaagcgtttgagcgtgaatggagggcgatcaacgccgaccggatcatcgccaacacggcgcgccaatctcgcatttatggcgttggcgccgtggtgatgctgatcgacggcgagcccaccaacgaggcagcgaagtttgatgagatttataaaaagtcggtcacctttaacgttctggacccgatgaataccgcgggttcggtggtgcttaatcaggatcccaatagcgaggatttccagaaagttggcggcgtcaccgctgccggcaagccctaccaccaaagccgctgctgcgtgatgatgaatgaggatccgatttacctgtcctacacaccgtcgtcgttcggtttcgccggccgcagcgtgtaccagcgcgcgctctacccgctgaaatcctttatccagtcaatgcgtgcagatgacatggtgacgatcaaagctgggctgctggtggcgtttattcagcaagccagttcgatcgtcaacaacatgatgcagaaaatgtctggcattaagcgctggatgctgaagcgcggcggtaatggtgatgtgctgcaggtggggcagaacgacaagatcgaatcgctcgacatgcagaacctggagaagccgctggatactgcgcgaaaccatatcctggccaatatcgccaccgcggcggatatgccggccatcctgctgaacagcgagacgtttacgcgcgggtttggtgagggcaccgaggatgcgaaagctgttgcgcagtacatcgatgacgtgcgcaaggatctgcagccgctttacgatttctttgtgcgcatcgtccagtaccgcgcctggtcgccggagtttttcgaggcgctgaaaaacgatatcccagaatacaaaaatgttacctggcaatcggcattcagctcgtgggtggggaatttcgattatgtctggccgtcatccctgaaagagccggaaagcgaaaaggtcaaagtcgatgaaattcgatttaaggcgatcactgaaatgctgaatgtgcttttgccgcagctttcaagcgatccagcaaaccgggcgacgctaatcaagtggggatgtgaaaacgccaacatgaacgagcatttatttgctgaccgcctggaactggattacgaacttcttgaagagaatccacctaaggtgatcacaccaccagacggagaaaaccccgatgagcccatttctcagagagctgcgtga

SEQ ID NO: 427698 - DNA, 876 bp, Serratia marcescens
atgagcccatttctcagagagctgcgtgacgccatcaaggattttctggagcatggctacagtagcgaggaacgcctgctgatgtggaccgagcgcctgagaaacgccacggaggaaaaaataggtggggaggatttataccgctatgcagcccgccggctaacggcggcttacgatctggagattgggcgtgaaagggcgcttaaacgacatcctggcattgcccggttcacgctgaattacgttgaacccaagctgcgtgcggagctggaccggcggatcatggcctctgctgacctgataaaactgaaccgcacgcaggcggtgaatcgaaccattcagcgatttagcggatgggccaccagtatcccgccgattaacgccctaagccctgggctttcagcgtcatcgcgtagcggtgtgatagacaccagccagcacatcgccaaatctgccaggcagattgattttgagcagcggcgtgtgatggtggatcagacgcacaagctgatcgccaatatcgacaatatcatcgccaccgagggcggcgcgattgctgccgtttggcacagccactggcgccagcctaattacgattaccgggagccgcataaggaccgggatttaaaggtatacgccattcgcgacaactgggcgctgaaaaagggatttatgcgcgccggcacggcgggttatctcgatgaagtcacccagcccggcgaggaagttttttgccggtgctatctcacctacatctacaacgtgcgcagcctgcctgacgagatgaaaaccgataagtggaagaaattcaccgaagggaatttgtctgttggccggcgcgcggcgaattttgagggcatacgcacaggagggtaa

SEQ ID NO: 427699 - DNA, 1569 bp, Serratia marcescens
gtggaaacctacgctgccgggattttattcaaatccgccggaaaggtttttctggttaagcgtggggatgacggttcgtgggcggtgccgggtgggaagctcgaagagggggaaacacccgaagccgctgcaaggcgtgaggtgctggaggaatgcggcgttgactatgccgcaccgctgacgccgcacgctctgattgatggctatgtcacctatattgccgaggggggcgaacaattcgaggcagttctgaacgaggagaatcaggcgtatggctggttttcgctggatgaactccccaagcctttgcaccccggcatggtggctatgcttgaggccgagccgcttaacgaaatggacgtcgccgggctgatctccggcggccagctcacatccccgcagtttttcagaaatatgtatctgtgggcgctgcgtatcaccggcaccggtgttacctggcgctccaagttcaggcagtacgcctatcgttcacccgaaaattatctcactgacgagtttctcgcccggtgctcaggcctgccggttatctggtggcaccctgaaaaaaacgtactgaacagcgaggaatttgccgcaaggacaatcggggcgatcgcctttgcctggatccagggtgacgaggtgtggggtatggcccgcatctatgacactgacgccgccgccaacctttccacgcggcaattaagcacatcccccacggtgacgggcggcgacgacgttttgatcaacgtcgacggcgaaccgctgctgctggaaggaaccccggttttactggaccacctggctatttgcgagcagggcgtctgggacaagttgggcgatcctgctggggttaaatccgacacattgaacgaggtccagaaaatggatgaagaaaaggtattagttctcattaatcaggcgctggatgctcgcgattcccgtgccaaagccgatgctgaggagaaggcgaaggctgacgctgaggcagaagaaaaagccaaagcggacgcagcggaggccgacgagaaagcgaaagccgatgcagctgaggcggaggaaaaagcgaaggcagatgcggcagaagcagaagaaaaggccaaggccgattctgaactggccaggatccgcgccgatatggaagagctgaaaaatcgtgttcctctagaggttagtgacgaggagcgcaacgaaattgccgacacgcagtgcaaggcagatagcgtatttgcgtcattcggcgagcgcgcgccgcagccaatggccggcgaacgcgccatgccttaccgccgtcgcatcatgacgcgtctgcagaaatactccaccgattataaagaggtggatctgcatgcgattgctgacagccaactgctgaccattgctgagaaaaaaatctatgcggatgcgcaggcatcggcggcatccagtctggaacccggcgccggattgcgcgaagtggttcgtactgatgccaccggccgccgtatcagcaattttatcggcgatccatccgcgtgctgggcgccattccaggcggttagccgcaaactcgctggtatcaaccagtaa

SEQ ID NO: 427700 - DNA, 879 bp, Serratia marcescens
atgtcgagcgttttgacagttaatcccatgcagaccaccaacgcccgcggaacgttttatacgaaatccgatggtctgattcagggtgtggcgctggatgacccggcagcgcgttatgcgctggcctccggtacgttggcaaatagcgaaacccgcccactgtggggcggcgtggccgtcaatgagttggttcctggcgtctcctcggcgccgcgtggcacaaccattaagcgggcgacctcgatcactgaactggtggggatctcggtgttcaaccaggcgcacaacggcctgacgacaccacaatcgccagtgccgcttttcctcagcaacatgagcgtgtcgttctatcgtttcggatctggcatgcgtgtacccgttaaggcttccgatgccgtaatcgccctgggcagtaacgccgcgggcatgtcagttaatcatccactggtgtggaatttcgcgaccgacagtcttgatgtgttcagcaccgcggctgccgacgttgaaaccaccgcaattgactggacagcgcctgccaggaataccgccgggtttgccacggcgacgacggcaagcgcgcataacctggctgtgggggcttacgtcactattaccggggcggagccgtcagcctataacggcacggttcaggtgctcagtgcgccaaccgcaaccagtttcactttcaccccggtgtcggtgccagctggcaacgccaccaagcagggcaccgttggcgcagcagataaatccactgtcgcgctgccggtaaaaatcattgaaatgcagatgggtaacagcaaaaccgtttcttacgatcctgatacgggctttgctacctggaacgacagcggaaacgctgcagtaattctgctgtaa

SEQ ID NO: 427701 - DNA, 1032 bp, Serratia marcescens
atgccagccattacacccgcgtaccaagttgtaaatccgtcctacatcatgccggaaatgatcctgagctatcagcaggcatccggcgccttttcggttatggccagcggtaatccgctggttcgcctgtcggaaggtgatcagtacgtctacatgaagcgcctggatattcgtacccaggtgaccagtagccagtccggtaatgccaaccagctcccctccgttgcgctggatacacggatgattagcaccccgacgtatatgttccgcgcacgcgctatttacgatcatcacgacatggccgccgccggcaactggggaattgctctgccggcagcgcagcgcctcggtacccgccaggcgattttccagcagctgcgcaatgccttgctctatggcatgaatccagcgggtggcgaaggcgtgctgaataccaacggcgcgtccacgatcagcctgccggccgacagcggcggtaatactaccgtgctgacctatgaccacgggcagatggcggtattcctgctggcgcagatccaggcgatccgcacgcgaaccatgcaaatggggcgcccatctcgaatggttattttggggccgcagcgcacccttggcacgatggagatgcaacaaatcgtgcagttgaccagctatcagcgccctggcggtggcacttcaacagtcaagggtacggtggcgaatgtagccgatgaagcagattgcggtattgactgggtatacgacgacacgctgatcggtgccggcgccaatggtactgatgcggtgatcattgcgatgccggaagttgaacggccggaggtgaatgcgacgatcaacaccaacgaattcgccaaactgagcccgtcacttgaggccacgtcgctgatgctttgcgacatggccgcgccgcgtgaaattccgaccccgctcgccggtggtgctatcgacgtgctgtcggaaatgcgttcgacgccgggctgggtacttcgccctgaggcgctgaccattatctcaatgaagtacagcgactaa

SEQ ID NO: 427702 - DNA, 486 bp, Serratia marcescens
atgaaactttatatcgccaataccaccaagcaacgccatgacttcgcctatcgccagccggaaaccggccgtctgatctacaacccgatcaatgccggcgcacaatccgtcgtgatggacggcacccacgcggaaattgatcaggtgatccaacagcatgctgtttacggcctgatcgacgctacgaaaattgaccaaaaccgcgtgtatatcggcctgtgctacagcgtcgacaagccggtgcagtcgcgcatcatcgaaaaagcgatgcgtgataacggcgatcacctgaaccgcgccgcacatgaacgccgccaggcgtctgtgatcgccaccaacaacgcgctgagcgaacaggaaagcggttaccgtggtgagctggaaatgagcgcagagcagcggatgaacgccaacgaggacagggaagaaacccaattcgttgacgaaacactggccgttagcacggccaaaggaaagaaaaaataa

SEQ ID NO: 427703 - DNA, 426 bp, Serratia marcescens
atgcctgaactggccggttttatcctgtttattcgaaacacgatgggggttaaagcggaagaattgcccgatgacgccccgagcattaccaccagttatgcgttgtcgattgactgggttaaccggcagatcgcctgcattagccccgttctttacgcgcaggcggtgtacaaccttgcggcgtctttcctcatcaacttcggtccaacggatgttttcggtgagctgcgtaatacccttggcatcaataactttaccgcgggggtgatcagtgcctctgctgatgagtcgaccagccaaacgcgggttgtcagtgacgctctgaaaaatctttctctggccgacctgcagcagcttaaagatccgtatgggcgctggtatctggcgattgcgcagcagtacggggatttgtgggggctgtcatga

SEQ ID NO: 427704 - DNA, 432 bp, Serratia marcescens
atgaaactccatcttggcgtccttgatcttccctatgagaacgaggccacgacgaccggcgacgtggccgacattctcgaagggaaatatcacatcatgcaaacgttcttcgatcggtatggcgaggatattgcgcggatgatgagcgatgacctggccgccgggctggaaaatctgctggcgggcgcaccgttgccttcggatccgttcgcggaatccatgtcgcaggtgcatcacctctttgtggcgtttctggacaatgccgagatgaacggcacggaaggcgtacccacgaaacgcgcgctggacggtatcagcaagcgtttcaaagggaaaaagggtgaggtgcggccttcatttatcgataccggtatgttccaggcctcaatgcgcgcctggataagcggggtgctgaatgccttccctcaatga

SEQ ID NO: 427705 - DNA, 888 bp, Serratia marcescens
ttggtgcaggggctggaggatatcagccgatcggcatcggtgacgttcaccaaatacgtccgcaaggtgcttccgctggatggctttgtgttttgggtaaaggcgtcgattatttccgatgatccagacggtgaaccggataccagggacgtaaaaggctacctgcacctgacaacggaaagcattcaggatgaggagcagctctacgacaaaaacgtggtgacgtttaccgcgcaggccgatatcgatcccttcaatgatattggctccgaggtgctttacatcggcgagttctacggcatccggtttgcattttcccgccgctccgggttgaacgaaccggccaatatttaccactacaccgggcacgccatttacccgcacatgatgtcgcagatcatcaactcgccggccgatatcgatctggcggatgtggtggtttccagttcactgccgatctggctgtcattgaaccagtacatgccgatgtttccggccatgctgtctatgcagaacctggcgccgccgtatgccacggtgaaatgcagtgacccggtaccggtcgccggcgctttttacctggatgaaaaatccaaccagtaccagctggtttccgaggatgtgacgatctcggtaactggtctgcgcaatgcatccgtagaggactttctccgctacgtccagcaatacacgctcagcgatgatgccgagatgggcgtgatgaatattcccgtggtgcaggatgagcgcgtgacgcaaaacgagctcaacatcatcgccatgcggaagaagattaaatttcgcgtcaattactatcagcagcggatgaggaacgtcgcccgccagttgatcacgtccgccatcccgtccatttatgtggagaaataa

SEQ ID NO: 427706 - DNA, 1395 bp, Serratia marcescens
atggccattgtgaatattaatgtatcggtcaccaaccctccgaagccgagccagctgctgaaatccggcgcgctggtctctgtcggtgggacgacgctggcaccaggcagttacgagctgctgacgtcaaaagacgacctgaaaacgattgtcgcgccggcgaaaacgatcacggcaatcgcctgggcaacgaataccgtcacggtgacgctacccgcagcgcatggctgggccaacggagacaacgtgccggtagtgatctccggtgtggagccggagggatacaacggcgcgtttaccgcaacggtgaccggcgacaaggcgtttacctatacgttaagcagcaatccgggtaccgcaacaaagatgggaaccgtgctttccgtagccgccggtgaaattcagcagatgaataccacctactgggcgcaggggagcagccgcgcggtttatgtgctggagttgggcgaacttagcgccgcagatgcgatcaaggcgttgagcaagtttatcgacgaagatatttcgctgggcaacacctatcaaaaattcttctcctacctggttccccgcgaatgggacgaagaggccacattcaagacgctggcgaacaactacacctcgccgggatcgctggtgaagttttttgtcaccaccaccattgccacctatgaagcgtgggcgacgggtaaatacccgaatgtgttcgccggcgttgaagctccggggattggcgctaccgagttttcgatggctgcaccgttccagtcgtcgctggccaacgatccaagctcgtcgaatatggtgccgccgatggcgttccgcttcatgtatggcgtgacggattatccgcctgccgggaacggcaagctgctcaaatccctgcaggacagcaacatcaactacatcggaacggcggccgagggtggtttaagcaacaagatgctggtcgccggccatatgctggacggcatgccgttcaactactggtatgcagtggcctggtgcgccatcaatctggagatggatctggcgaatgaggtgatcaacggctccaacaccaccgttaacccgctttactacgagcaaaacggcatcgaccgcttgcagcgccgtgggttaaaaacgctgcgatctggcatcagctatgggctgatcctcggccaggtgatcgacacgaaactcagccaggacgtcttcaacgaagagtacgagaaaggcacctacgccggcagcgcggtgatcaacgccgtgccgttcgccaactacaccagcctgaatccgtccgattacgccgatgggaaatacagcggcctgagtgcggttgtcacaccgaagcgtggtttcgagtccatcaccttcaacctcaacgtaaccaattttgtgggggcgtaa

SEQ ID NO: 427707 - DNA, 438 bp, Serratia marcescens
atgccaaatccattagttccgcagggattccttaaccgcgtccggggcgcggtgagcattaccgacaagccggcgttaaacgtcacggcgtcattcctgggcaaagaggggatcagcatgcggccggataccgccgccactgacattatccccacgatgaccggcacagtgggcagccaggcaccttaccagcaggtgaccttgacggtgcatttgctgaaaacgcaggggctggccgccagctatcaacggcagtttgcctccgacaccgccctgggggaggtggtggttacgccggatgcaaccactttcggcaactacaccattctgaactgctacctggtgaattttaacgaaatcaccctcaacggtacggatgccggctttgttgcgacaatttccggctacctgaccaccaacgacaagatgtgggattga

SEQ ID NO: 427708 - DNA, 582 bp, Serratia marcescens
atgaaaattgacagaaaactgaatttcgtcagcacgatcacgcgtgaggacggatcgctggtgtacctgcacgttgtgccgttcccgtatgaagtggttcaggagaactgcgtgctgttggggaacatgttccacaacttcttcacgtcagtagggacaaccgctgcgccgcgcgttgccgcgatgatgctgagaaatattctgaaagcgcatcaggaagccggggatattccagcgggtacgccgacgcttgttgatgatattcagcgcctgaccaccgtgatcttcaacgataacggcgtatggcggccggtgccgctagaggtggcgtttaagcaggagatcatcgatccggatgaataccgcgaggtcgagggcgaagtggtgttttttatggtctcctctgctattcagaaagccaacctgatcgccccgacggtggggaaaacgctcgaaatgtacagtgggcaactcgtctcattgaacgctacggcgtttcgcgattctttaccgacgtcgaagacggctaccgataccccgaccccgccagccccgcaggaactgtcgtacattccctcctga

SEQ ID NO: 427709 - DNA, 2010 bp, Serratia marcescens
atggcagctaaatccgttgttgaaattgatgttcaggacgagaaatttcaggcgttcctcgaaaaattcaatgaataccagaaggcgctcgaagaactgccggaacaatggcgaggtgcagcgcaggggatcggtgattcagccaagcagacggaaaaggtgctgggcagcacggaggccatagcccaggcctttaatgaagggatcgccgccgtcgcgtccattaacgaggggctcgatcgcctgaatggcaatctcgaaaaggccaataaaacgcagtccgagttcaacaagaaaagcagcggcgcgcgcaaattcctgagtaaggccagcaaggacgcgaagagcctggccggccacatgaaggacgccacgacgagcctgctttcatggggggccgtgctggggctgttttctggtctggccggtgcgggtgggctgtggggtatcaaccgcctggcgggttctgctgcttcgcagcggttcacggctatgggattgggaaccactgccggcggtcttaatgccagcgcggtgaactatcagaaggtgctcggtaaccccgtcggcacgctgggcgccattcgggacagccaactggacctgagcaaacgctggcagtttaaggcgatggggattgataaccccaatcaggatccggcgaacctgttgccgcagatgataaaaagcgcgcgcgatatcttcgtgcgtaacggcagcacccagcaaggcgcggaagcctacggcctgaccaactacttcaccctcgacgatctcaatcgcttcaaaaaaatgagcgacgctgagatcgatgcgatgaccaagcaggcgcagaaggatacgcagcgcctgcaactgacggaccagcagttgaagcagtggcaggatttcaacatccagctggatcgaagcaaggtcggcattgaaaacaccttcatccgtggattggcaccactgacccctgagctggggaaactctccgatgctttctccggcgcggtggataccgtccttaaatccccagagttggggaaatggctggatgggctggcagacggcatccggcggttcggtaattatctggcctcgcccgagtttaaaagcgacgtggaatcgttcatgaccggtgttgagcggttagggcgactgatcggcaaggtgattgactgggtaacgggaaaaaccgatatcacgctggacgatgtgaaatctaattcttccatgctcagcgacgaaaagcggacggatccgcagagcggtcagacatacacgccgggtactgacgacgatccgcatgtttggggatggctgaaaggcgtcaaacactttttctccagtggcaaagttgagcctgtcgatgcacgtccggcggacgtgagcgccaggggcaggaccattgccgatcgcttcaataacccggccaatctgcgcgctgcggccgggtatcaaacggcgaacaccaagagcggaaaattcgcagtgttccccacgctggatgagggcgtgctggcggcggccaaacagctccaaatttatggcaccagaggcgtcgacaacatccacgatattgtcggcaaatgggcgccaccgaaggagaacaacacgcgggcgtacattgatcatgtcaccaaggcaaccggccgctccgagtttgaaaagctgaacctcaacgatccgaaagtgttggcccagctgatttcttcaatgtcggtcaaggaggggatggggaatcgcctcagtgaggaaaaagtcacccggataatcaataacgccggtggcgcggtcggcagcgtgaaagagcagtatgcggctgcttatggggagggacgccccggaacccgtcaaaacctccccgcggcagcccctcaacaggcatcgggtaaaaccgatcagatattgcagcagatcctggataaccagaggcgaaacagcagcgcaggcgtggtggtgtacaacaacaccggcggcagcgcgattgtctcgagcacgcaactcggaggattcggttaa

SEQ ID NO: 427710 - DNA, 717 bp, Serratia marcescens
atggcatttacccgcgagctctacaaattggggtttgaaatctccccggtgatcctttgcgacggcgtggcgcagagcatccctggcgggatgttgccgatcgtggcgctgacgcagagcgccagttatgtcagcaacctgctgggcggcgcggcgaatctgacagacctggataaatatttttgccactggcgcgccgcgcagggcgcaagcatggtggattacgatatcggccgctatcccttcgctaaccaggcggtcgccgcgaatgcgctgctggcgcagcccctgcgtattcccatgctgatggatgcgccagtgaatgataataccggtgcgctgacaaagctggtcacgctcagcgcattgcaggccgtcctgcaggcgcacgccaaccttggcggcacgtttgttgtggccacgccgtcgctgatttatagcggctgcgtcctgcgcaccgttcgggacgtaactggctcgaatgatccgctgccgcagcgtcaatggttgtgggactttgaacagccgctgataactgaaaccggtgctgaacaggcgatcaacagttatttgagcaagattgataacggcgataaaaccacggaaagcgcctggaccaatacggtttccgcactcgggaatacttccctgggtagcagtgtttcggatgcggtgaccgggcttatcggtaaattgagcggggcgtttaatttatga

SEQ ID NO: 427711 - DNA, 231 bp, Serratia marcescens
atgattttcacgccgatgctcgatggcgaggtgtataactgccagaccaaatggaatattgctgcgcagcgctggtatctcaatattactgacaactcaggaaatcgcctgctaaccacacccatgatcgactcgccggtgggctacgacattaatttgcttatcggggcatttacgaatacgaaaatggtgtggcgatcttcatcgggacaaatagaggtaatcaactga

SEQ ID NO: 427712 - DNA, 1044 bp, Serratia marcescens
atgaggtattacgatattcagatttttaccccgcctgataaagacggcaatcccggaaaactcttcaagcaatattccagcctcaaaaatggggttttcaatcccggcaatttaatgattgagtttgatatccagcgatttggcgagtctacacccaaagggcaaagctgcatcacgatttgggggatcggcccgaaagatatgcagcaggacagacaaaacatgtttggcatgacgataaaaatgtgggtgggtatgtcgaaggggttgccgttggccaaacctgcacagcaagggctggtcttggagggaacggtgtggcaggtgctggggaactggcagggcaccgagctacggactgacctgattgtaacggcgggggctgtctctgcggtgaatcccgcgccgttggcaccgatcaatttaacgctgccgtggaataagggaataaaactgtctgtcgcattgacgcaatgtttccagaacatgggcggtgattatcgttactcgataagtatcagcgaccggctggtgaataactacgacagcaacatgttttgcggcagcctgtccgagctggcggcaaaattaaaatcgctgagcagaaatatcatcagggatgataaatattctggcgtagaaataacggtggtgaatggtaaggagatccgcgtcttcgataatgattttgacaaccatatcgacaaggattcgaaaaaaagcgccagttaccgcaaccaaaatccaatccagatagcgtttaccgatttggtcggtcaaccaacgtgggtgcaatttggcacggtcagtattccctgcgtcatgcgcagcgacattcaggtgggggattatattcggatgccggaaaaactacggccgatgatacaagcctcctcctattctcaattccgtgatgatgccgcctttaccggtgactttctggtttcttctgtgcggctccttggcaacagtcggcaaccggacgctaacagttgggtgacggtgcttgaggcccacccgacgggaggaatggctgcaacatga

SEQ ID NO: 427713 - DNA, 717 bp, Serratia marcescens
atgagcattgaaaaaaaacagagtttcgccggaaacatgcatcggttcgccgaacaaaaaatcgcggacgccatgcagatggccggtaaggtgctgccggcctcggtggtgagccgagcggggaatatggtcacggtgtccttcctgctgcgcgatattcctttcatgttgccacaggtcaccgtcccattatttgggccgcagtatatccgctatcccatgcagccgggggatcgggggatcgtcatcccggcggatacgtatctgggcggtgctagcggacagggcggcggtactgccgacctcacgccgccggccaatctcagcgcgctggtgttcttgccgatcagtcacacggaatgggagagcgtcgacggccaagtgctcacgctgtatggcccggaaggcgtcacgatacgcgatgccggcagcaagacgacgttcctgctgacgcctcagagcatcacgattgccacgcctgagcagttcaaggtcacggtgggcagtaccgtgttgacgctgacaaatggctcatggtcgttgaccggccagagcggaaccctggcggatgggcaggccagcaccagcccggccattatgcatgagggctggcagcagttgcttacctgggtgaattcccatcagcacagtaacggcaacggtgggcaaaacaccggcgggccgacaacgagtttcgacgggagcattaccgaatga

SEQ ID NO: 427714 - DNA, 333 bp, Serratia marcescens
atgagaacgtacgggcaagacgaatccggcaagtgggtcacaatcgccactgatgcgaacggcttcaacgatgccgtctatctcaccacgctggtacagaatctcaagctggcgccgcaggagtccccttttttcgcgaatcacggcattcctgccaacggttcggtgatccagcagattatccccaccttttacgtgaaccggctgcagcagcaattcagcggccatttttcttcacttcagattgcactgaccgaagttgatccgccggtgtacgacatttcggttatcaccaactcgggctcgaaaatagtggcgaaggtgtatgtatga

SEQ ID NO: 427715 - DNA, 1227 bp, Serratia marcescens
atgagcgatttacccgttatttatgatattaccggccccgtcgccaaaacggcggaagagctgcgccagcaggttatagaaacggcgacgcggctttcacctgggatcacgaccgatttaccgggttcattgattgaggacatgaccagcaccagcgtcggcgcgctgctggtttgcgaccaagcgcgcgttgatctgatcaattcttgcagcccttacggtgcgaacgtacacctgctgaaacagctgggagctatctacggcgtgcagcagggggaagggacgaacacttcggtgtatgtcgtattctcggggccgcccggctttggtattcaaaaggggtttaccgttggggatggcacctatttgtataccgtgagacgggacacggtgatccccgacagcgggcaaaccgagccggtgtattgtctggccaccacgacgggaatatgggcggtgccggcaggcacggttaaccaggtgaaaacctccgtgccggagtcgtaccaggtaacttgcaccaacctgacggcgggtctgccggggacggacgaacaaagccccgcgtcgtatcgtgctcaggtgatgcaagcagggatgttcggtgtgcaaggcacgcccgactgctaccgctccgcgctgaaaaaagtgaacggcgtacaggaaaacctgatttcgttccgccaggcaacgctcggaaaatgggtggccgttgttggtggcggagatccttatgaagtcgcttatgccatttataaagccgtgccggatatttctattttgaccaacgatgtatcgaatccatcgggggcggaggtggaaaagaaaaccataccggtaacggtctaccccgacgtctaccaggtgcctttcgtggtgccatcgtcgcaaaacgtggtggtgctgatcacctggaactcagcgtcgacgacctacatcgatccggccggcgttgcaaaagcggtgcagcagaatatcgccgattacgttaatgctatcgccgttggccagccgataaacattttccagatacaggacatttttctgaaatcggttgagggactcgttgccgcgtcgctgttgtccatgatccaggtgcaaatcggtatcaatggcgcaattaaaccaccggcaccggagtcaagcctggtttatggcgacacctacgcctatttctccacctcggcggcgcaaatacaggtgaagcaatatgcaagctctaattga

SEQ ID NO: 427716 - DNA, 627 bp, Serratia marcescens
atgcaagctctaattgagaaaatcattcctgcttacccgtatacgcaatataacgccgatcccaacatcgtcgcgttcttcacagcctataacacgttggcgcaggggtatctcgactacctcaatgcgcttaatctgccgtgctggacttctccctccatcacgggggagttgctggactggatagcgctcggcatttacggggaagggcggccattactgcaaatatcggaggatgcgatcgcccgcggtgcctataacaccatcgagtacaacgccattccttatgccgccctgaaaaattacgtaccgggttcggcgtcatacgtacccgatgattattttaaacggatcttgacctggaatttttataaaggtgacggctcgcacttctgtatcgactggctcaagcgccgtctggcgcgatttattcatggcacgaatggcatcgacccgccgttgcaaagcaccttcgatatcagcgtgacggtcaataacggcgtgttcaccatcacgatccccgattatggcgatggcgtcggctatttcctgaaagatgcgatcagccagtccctggtcaagctcccctttgtttatacctactctgtaacggtggttgcacaatga

SEQ ID NO: 427717 - DNA, 1983 bp, Serratia marcescens
atgattattggatttggaaacaacgtcgtgtcgtcgttggcagcagatattacggcgacccagaccacaatacaggtgatgccaggcgcgggcgcgctgttcgcggggcttctcacttacgactacgccaacgactcaaactccctcaaggtgtacgcgaaaattacgcttacggatgcgaaagaaaccgtgttcgaagtttgccacctgacggcagtcaacaacgatatgctgacggttgtgcgtggtcaggagggcactgcggcgaagggctggtccttgaacgatgtgatcgccaactttgcgacacgcggttcagaaaatcagttcgtccagattgagcaactgcaaagcggccattacacgtcggcggtggccggcggtacggcaaacgggctaacgctggcgctgccggcaacctatttcctaaacggatcaacggactgggcattaaaaacgccgatcctcatttacccgaccctgaacaataccggtgccagcacgctgcagttaacgatgggcggccgtgtgatgggaacctacccgctggtgaagggcagcaacacggcattacgcgcgggggatatcgttgccaaaaatcctttcctggcggtgttcaatgcggatcaggggcggttcatcgttcttaacccgaccacggatgttggatccgtccggtcggttaacgccatagggccggatgtaggtggcaatgttacgttgaaggcactcgatgttggtgcattaccggtgtatccaaacgcactaactgtggaccttaacaccttaggggcaaccagtcaggcaggggtttactgtcagacgaaaaacgccggcgcgacggacgagtaccattacccgataaagctcgccggttcgttgctgctgaaacccagcgcctacggctgccagcaggagtacaccgaatacaccgctggtcgcaagtttgtgcgagacctaacaggtttatggaacggcaaagatggtccgtggggcgattggcgggagtatttcagtgagaaccacctgccgccgtcatacggctgggggatgggaccacagcaccgtgataatgcttacaataacgtggccatggtttaccgtattaatggcgcatctgccaatgcaccgggtcctaacgtttatggcgtggtaagtctgccgtgtgacggtggtccctcaacgagctatctggcagtgcaaaatagcggtagggcgtttttcgggtattccaacaagccagagaacggtgtgatttggacggaggcttataccgtcaaaaaaccgcctacggctgacgtcatcggcgcggtcaataaaagcggcgacaccatgacggggcaattaatcgccccctccgttgccacaacgccaggggccatcccgtggggagctgggccattttccgaacaattgaacaatcaggcgccattctttcagcctaattggcagtggcctgttaccgccggcggtatttttgcaccgatagcaaaaggggttgtgacccgtaagggccaaggctaccccaccgctgtgagctttggctacttgcttaatggtactcccagctttgctattccctgcatccatgccaaaggagataacgttgatgttaattggagattcgacccaaattccggccagttctattcaccaggggctgttttagccagtggggctatattccacaccgatggaaatattaccggtaatatctggggtgggtatctcagtaactggctgaatcaaaatatttcgaatgcacaaaataacgcgcaaaattgggcatatcaaaatcttgtccaaaacgtcaggcttactgggcgaattaaccaacctgatactggcggccagataagggttcctgatggctgcgtgtttaccggaatgtcgggcgccaactatgacccttcaatctgggcatcatattcttacgtccaaattttaattaatggttcttggcgaaacatagggacttcttaa

SEQ ID NO: 427718 - DNA, 552 bp, Serratia marcescens
atggttaaatttgaaaatttcactatttacaaacctgagttcaaatccacagaagaagatgagccagaatataggcctgacattctttacgccagagataaaaatgggcgagactggtatgattgtcaggctgattttagttctgactcgctgaaggtcatgtatgacgagaatggcgttatcgtctgcatatctaaagacgtcacagcaattttccctcctggtttctcagtagcagaagtggcgattagcgaaactcctcctgaagcgtgcaacgatatgacatgggtatatcgtggcggaagggtgattaagcgcatctacagccctgctgaaaagcgcaagatggtacagggggagaaagagcgtcgtattgcgcgtgttaaccaggttacgcaaaccctcaatagtaagttgctattgggtatggctacagatgcagagaaagccaagttgcggacatggatggactacgttaacgagatcgagaagatcagcgatgacgcagatcctgaaaaaatcgtgtggccagcggtgccagaggaacaatga

SEQ ID NO: 427719 - DNA, 921 bp, Serratia marcescens
atgatacggaaatttatttcttatgcgtctggttggcgcataggcacagcagaagaatatagaacatgttatagcctttatggcggtagttttgtgactcaccctgacgttttatcctttatgcaacgtcaacttaacttacgccataaatactacatcaaacgcgattccaatggctcactgctcggcggtatgtgtaccaacggaagaaaagagatcgctatcgtcggacgtcagtcgaaaaaaatcgggattgatatgttcccgtttaacaaagacgaaatgattttaccaattagcagcagtgttaaaacagtgatcccatatcgctctaaaatcctgtcgtccttaaacggccgttcaacattgaactccacgttttcgcttaatagtcagcgtgaaatttgtctggctaaaacctgcggcaaaggtggatattcatcatcaacaaaaaacagtcggaaccgcgagctaaaaaaattcctgaattcaggtggcgaagtagtagaccaggcgttattgacacccgttcaaattgtagacatttactttgaactgtatgccaagcgttgggggcatgagcccggaaacaaacgtcaaatgatggaaatgataacgtcactgcgtgaaatgatattcggctttgtgctgttctataacggcaagccgtgtgcttttcaattaattactcgcgcagacagtccggaatggatctgctttgattatgtgaatggtggatatgaccgcgaacataatggattttgccctgggacgattgtcacctggttaaacgttcgggccgcatacgagttatgcgaacgggaaggaaaggagatgcgctattccttcggcaagccgacggaggcatataaagataggtggtgtgagcgcgcgccgctggggcgcacgctgtcgatataa

SEQ ID NO: 427720 - DNA, 180 bp, Serratia marcescens
ttgctctgttatgtgctgctgcgccacatgggctggttcgaagcggctgacctgatcgttaaaggcatggaaggcgccatcgccgccaagaccgtgacctatgacttcgaacgcctgatggaaggcgctaaactgctgaaatgctcagagtttggcgacgctatcgtagagcacatgtaa

SEQ ID NO: 427721 - DNA, 2043 bp, Serratia marcescens
atgcctctgacattttccacccggctgcgtttttccgctttgagtctggcgattgcctgcgctctgcctacggtggccttggcacaaaacaccagcacaacatcctcttccaacgcggcgccggccaaaaaagccaaagccgccgacgagaccatgaccgtggtcgccaccggcaaccagcgcagcagctttgaagcgccgatgatggtcacggtcattgaaggcaactcgccggaaagccagaccgccacctcggccgccgatatgctgcgccgcgtgccgggcatcaccgtcaacggcaccgggcgcagcaacggccaggacgtgacgatgcgcggctacggcaaaaacggcgtgctgacgctggtcgacggcatccgccaggggaccgataccggccacatcggcggcaccttcctcgatccggcgctggtcaagcgcattgaaatcgtgcgcgggccctccgcgttgctgtacggcagcggcgcgctgggcggcgttatcgcctacgagaccgttgatgccgccgatctgctgctgccgggccacgatagcgggttccgcgtctacggcaccgccggcagcggcgatcacagcctgggcatgggcgccagcgcctacggcaagaccgataacctcgacggtttgctgtctttcggcacccgcgacgtcggcgatctgcgccagggcaacggcttcgatgcgcctaacgacgaaaccatcagcaacgtgctggccaaaggcacctggaagatcgacgacaatcagtcgctgagcggcgatctgcgctactacaacaacagcgctcaagagccgaaaaatccgcagacgccgggcagctcgagcggcaacccgatgaccaaccgctcgaccatccagcgcgatgcggcattgagctataagctcaagccggtcggccaggattggctggacgccaccgccaagttgtacacctcggaagtcaaaatcaatgcacacaacgccggcgcgaccgacgaattccgcaagcagaccaccaacggcggcaagctggaaaaccgcacgcgcctgttcgccgacagctttgcgtcacacctgctgacctacggctccgagatctatgaacagaaacagcagccgggcggcgccaccaccagcttcccgcaggccaagataaacttcgcctccggctggctgcaggatgaaattacgctgcgcgacattccggtcaccgtgctggcaggcacgcgctacgacgattacaaaggcagcagccagggccacgaagacgtcaaggccgacaaatggtcgtcccgcggagccctgagctactcgccgaccgactggctgatgctgttcggctcctattcccaggccttccgtgccccgaccatgggcgagatgtacaacgattcgcgccacttccccggcaactattgggtgcccaatcctaatctgcggccggaaaccaccagcaccaccgaagccggtttcgggctgcgcttcgacgatctgctgctggcggatgacagcctgcaattcaaggccagttacttcgataccgacgccaaagactacatcttcatgtatgtcactcgcacgcagaccgcctcagcgaatatctctcgcgccaaaatttggggttgggacacctcgctgaactatcagaccaagtggtttaactgggatctggcttacaaccgcacacgcggcaaggacaagtctcgcaatggcgagctgaacgcgaaaagcggcgattggctggccgacatcagcccggataccgttaccagctcgctggacgtgccgctgggcgaaaccggtctgtccgccggctgggtcgccaccttcgccgaacgcgccaagcgagtgcccgccacctactcggaacaaggcggctatggcgtcaacgacttctatctcagctacaagggccgcgatcggctgcagggcatgaccaccaccgtggtgctgggcaacgccttcgacaaggaatattactcgccgcagggcgtcccgcaggatggccgcaacgccaaactgctggtcagctaccagtggtaa

SEQ ID NO: 427722 - DNA, 2379 bp, Serratia marcescens
atgtccaacaatggcccagacttgcgtaatgtgctttggtacaaccagcttggcatgcacgacgttgaccgtgtcggcggcaaaaacgcctccctcggtgaaatgatcaccaatctttccgatttgggcgtggccgtgccgaacggttttgccaccaccgcacaggcgtttaacgatttcctcgaacaaagcggtgttaaccagcgcatctatcagctactggatcagaccgacgttgacgacgttgcacaactggccaaggccggtgcccagatccgccaatgggtgatcgacacgccgttccacgccgagttcgaacgcgaaattcatcaggcttaccaacagctcgccgacggcgaaccggaagcttccttcgcggtgcgctcctccgccacggcggaagacatgccggacgcgtccttcgccggccagcaggaaaccttcctcaacgtgcagggcatcgacgccgtaatggtggcgatcaagcacgtgttcgcatcgctgttcaacgaccgtgccatctcttatcgcgtgcatcagggttatgaccaccgcggcgtggcgctgtcggcgggcgtacagcgcatggtgcgctcggatttggcctcttcgggcgtgatgttcaccatcgataccgagtccggttttgatcaggtggtgtttatcacctccgccttcggcctgggtgaaatggtggtgcagggcgcagtgaacccggatgagttctacgtgcacaaaccgacgctgcaaaacggcaagccggcgatcgtgcgccgcaacctgggttcgaaaaagatccgcatggtgtacgcgccgtcgcaggatcacggcaagcaggtgcgcatcgaagacgtgccggaagcgcagcgcagccgtttctcgctgacggatgacgaagtgcaggcgctggcgcagcaggcgatcctgatcgaaaaacattacggccgcccgatggatatcgagtgggcgaaagacggccataccggcaagctgctgatcgtgcaggcgcgcccagaaaccgtgcgctccaacgaacagaccatggagcgctaccagctgaacggctccagcccggtgctggtggaaggccgcgccatcggccaccgcatcggcgccggtccggtgaaagtgatccacgacatcagcgaaatggatcgcatccagccgggcgacgtgctggtcaccgacatgaccgacccggactgggaaccgatcatgaagaaggccgccgcgatcgtcaccaaccgcggcgggcgtacctgtcacgcggcgatcatcgcccgtgaactggggatcccggcggtggtgggctgcggccacgccaccgacgtgctgaaagatggccagaaagtcaccgtctcctgcgcggaaggcgacaccggcttcgtttacagcgatatgctggacttcagcgtgcagagctccgaagtgaccgagctgccggatctgccgctgaagatcatgatgaacgtcggcaacccggatcgcgccttcgactttgcgcgtttgccgaacgaaggcgtgggcctggcgcggctggaatttatcatcaaccgcatgatcggcgtgcacccgcgtgcgctgctggagttcgatcagcagacgccggcgctgcaaaacgagattcgcgcgctgatgcagggttacgatcatccggtcgagttctacgtcggccgcctgaccgagggcatcgcgacgctgggcgccgccttctggccgaagcgcgtgatcgtgcgcctgtccgacttcaaatccaacgagtacgccaacctggtgggtggcgacaagtatgaaccgcacgaagagaacccgatgctgggcttccgcggtgccggccgctacgtggccgacagcttccgcgattgcttcgcgctggagtgcgaggcggtgaaacgcgtgcgtaacgaaatggggctgaccaacgtcgaaatcatggtgccgttcgtgcgcaccgtggcgcaggcggaagcggtggtggccgagctggcgcgtcaggggctgaaacgcggcgaaaacgggctgaaagtgatcatgatgtgcgagatcccgtccaatgcgctgttggcggatcagttcctcgaacacttcgacggcttctccatcggctccaacgacatgacccagttggcgctggggctggatcgcgattccggcgtggtgtcggagctgttcgacgaacgcaacgacgcggtgaaagcgctgctgtcgatggcgattcaggcggccaagcgccacggcaaatacgtcggcatctgcggccagggcccgtccgaccacgaagacttcgccgagtggctgatggagcagggcatcgacagcctgtcgcttaatccggacaccgtggtgcagacctggatcaatttgtcgaaaaagaaataa

SEQ ID NO: 427723 - DNA, 1275 bp, Serratia marcescens
atgtttcgccaggaagcgatcgataatcagaaaattaaatggcgtggtcgggccctcctgctacccggtattcccttttggctcacggcagggctctgcctgttttttctcattgcttttctcaccttcgcaatcgccggcacctatacccggcgggtcaacgtgaccggcgaaatcagcacctatccccgagccgccaacgtctattccgccgtccagggggtggtggtcaaacaattcgtcaccgaagggcaggtgatcgccgccggcgcgcccatttaccagattgacgtcagcaaaagcacccgcagcggtgtagtcagcgataaccagcagcgggatatcgacggccagctggcgcacattgcgcaaatcatcagccggctggaaagcagcaagcaggccacgcttaccatgctggaacagcagaaggcgcaatacaccgctgcattcacccgttcaaccgacatcctcaaacgcgcccaggaagggatacgcatcatgaaggaaaatatggagaattaccggcactatcaaaccaagggattgatcactaaggatcagctcaccaaccaggtggcgctgtattaccagcagcagaacaacctgctgggcctgtccggccagaacgaacagaatgcgctgcagatcaccgcgctggaaagccagatccatatccaggccgccaacttcgacaaccagatttaccagatggagctgcagcgccacgagctgcagaaggagcggctcaacattgatgccggcggggcgatcatcgttcgcgcgctggccgacggccgcatcgattcgctgagcgtcacggttggccagatggtcaacgtcggtgacagtctgctgcaagtgatcccccacaatatcgctcactacgccctggtgctatgggtgcccaacgacgccatcccctacatcgccgccggtgacaaagtcaatgtgcgttatgacgcctttccggcggagaaattcggccagtttgccgctacggtagccgtcatctccaaagccccggcctcaccgcaggaaatgctgacctaccagggggcgcccaaagcggcgctgaccgccgccgtgccgtactacaagacgatcgtcattccggaaaaacaggtcattgcctatgacggtaaacgtctgagcctggaaaacggcatgaaagcgcaaagcaccctgtttttggaaaaaaggcagatttatcagtggatgttgtcaccgttctacgacatgaaacacagcgcgacggggccgatcaatgagtaa

SEQ ID NO: 427724 - DNA, 1305 bp, Serratia marcescens
atgagcaacgccttgaaagggctgttatggctgattatcgccgtggtggtgttggcgggaggatatgcgctgtacacgctgctgcggcccaccggcgccgagcctgcggcgccgatcgccggagcgccggccggcatcaccgataaactggcgcgcggcgagtacctggcgcgcgccgccgactgcgtggcgtgccacaccgcgccgggcggcacgccttatgcgggcggcttcgccttcaaactgccgttcggcaccatttacggcaccaacatcaccgccgacaaggagaccggcatcggcaactggagcgacgatcagttcgtgcgcgcggtgcgtgagggcatcggcccgcagggcaacctgtatccggcgatgccgtacacctcctacaccgggctgagccgcgacgacgtgctggcgatcaaagcctatctgttcagcctgccgccggtaaagcaggccaacccgcaaaacgatctgtcgttcccgttcaaccagcgttggggcatgaaattctggaacctggcgttcttccatgagcaacgctttacgccggatctcaacaaggacgagcagtggaaccgcggcgcctatctggcgaccgcgctgggccactgcggcgagtgccacacaccgcgcaatctggggttcggcctcaaccagagcaagcacctgagcggtgaagtggtgcagggctggttcgccgccaacatcacgccggacaaacagaccggcatcggcggctggagcgaccaacagctgtcgcaatatctggccaccggccatgcgccggggcgcagcagcgccgccggcccgatggcggaagcggtggaaaacagcctgcagttcctgacgccggaagataatctggcgctggtgaaatacctgcgcgatatcgaaccgatcgccggcgacgccgctgcggcggtgaatctgcagccgaagggcgcgggggcttccaccccgatcctgccgggcgggcaagagcagtcgctcgggcggcgggtgttcgccaacgactgcagcggctgccaccagtggaacgggccgggccgccagagtgagtacgcctcgctggtgggcagcacggcggtgaacgatccgcaggggcgcagcgtggtgcaggccatcctgaaggggacgagcatcagcatcggcgatcggcatgaaatgatgccggcgttcggcagcgcctattccgacgaggaaatagcggcggtcgccaacttcgtggtcggccacttcggcgataagcagggcaaagtcaccgccaaacaggtggcggagcagcgcaagcagtaa

SEQ ID NO: 427725 - DNA, 756 bp, Serratia marcescens
gtggagtccgataagaattattataaaggtacatgtgaactcatttctggcgaagggaggatctataccgagtttaatggcgatgctgcaacaagacaaataactataataaatgatttgtattattcatcctcatctttggaagattggcacgaagatataggttttttactttatgatggtaagaaaagtgagcttgatctttctgagtcaaagttgataactagtcttgagtttgaaagtgaatggaataagacgatcacctctgatgttttgaatgattatgtcagttttagctatggtgatgcatctattccttcgtcaaaatctaaaatgatcattcatattgtgaataacaagggtaagtggggaaaaggctttgttgttcctctatcaaaacgctatccagcagtaaaggaagaatatttaaagtggttctctgaaaaaaaggatttttttctcgggaatgtacaattcatctgtgtgagcgaaaatgagcggatatatgttgcaaatatgttggctcaggatggactaaagaaaagtaaagatgataatgctcagtatgtttcatatgaagcacttaaagaatgtctaagtctggtttctgattatgcattaaaagaaaggcttagtatacaattgcctatgattggtgcaggattgggaggtggtgattgggatgctattttttctctaatcaaagagcgcttagcaagaaagaaaataaaatgcaacatcgttaagttaagttaa

SEQ ID NO: 427726 - DNA, 552 bp, Serratia marcescens
atgaatgtattcctccgtaagaaaatcgaacaggtaaaaattcttaattttgcggcgctgaaaagcaattgctcgccgaatgcgcggccgccggtaaaaccgctggtctatactgggaagacgcctcgcggaggggcgcacactctggagaccgccatgtccgatctcgtttccgcatccggcaaaccggtgaaaatccccggcccggatcacccgatcaccttgatccgccacccgacgcgggtcgtggtgcgtgccggcggtcagaccctggccgacagccacaacgcgctcattctgcaggaagccacctatccgccggtgttttactttccgcgtgaggacgtgaatatggcgctgttgcagagaaacgagcacgtcagctactgcccttataagggcgactgcagttatttctccctcgcgcttaaaggcgagcagggcaccaatacggcctggagctatgaaatgccctacaacgccgtggtggcgatcaaggatcatctggcattttatcccgacaaagtggcggaaatccgtgccgaagcctga

SEQ ID NO: 427727 - DNA, 888 bp, Serratia marcescens
atggataatatgtctggggtaagcgtctttgtgcaggccgcggagacgctgagtttcgttgaggccgggcgtgtgctcggcatttccgcttccgctgtggggaaaagcatcgcccgcctggaaaaccggctgggcgcgcgcctgtttcaccgcagcacgcgcagcatgacgctgaccgccgaaggccggctgtttctgcaccgctgtcagcgcattctcggggaattggcggcggcggaacgggaaatcagcgatacgcacagcgcgccgcgcggcaagctgcgtgtcagtttgccgctggtgggcggcctgttgaatccggtggtggcggaatttgttcggcgttacccggaaattgagctggaaaccgatttttccgaccgtcgggtcgatgtcatcgaagaaggttttgatgccgtggttcgcgtcggcgagaccgaagactcacggctgatgagccgccagctgggcacgtttcatctgcagctggtggcctcgccggattatttgcgccagatggggatcccgcatcaaccggcggaactgcaaggccatgcctgcctgctgtacaaatttccctcgagcggcaaagtggagccctggccgatcgccggatgggaaaagctgctcgccgaggggatcaacgcccggctggtctgcaataccgtcgataccctgatttacctggcggaaagcggccagggcatcgcctgtttgccggattttgccgtaaagcgcgcacgggaacaggggcgattgcaaccgatcttgtctgagcattgccaccacaccggcagctttaaagtcctctggccttccagcaaacacctgacgccaaaactcagggtgtttatcgatacgctgagcgcccggctttttcgggattag

SEQ ID NO: 427728 - DNA, 1158 bp, Serratia marcescens
atgaatgaatacggatcctccactaacgcgatcgacggcgcgctagagaaagctttgcgcgaaaaacgcttggttggcgcggtcgttttggtggcgcagggcggtgagatcgtttatcgacgcgcggcgggcatggcggatcgcgaagcgggcaagccgatggcttgcaatacgctgtttcggctggcttcggtgtccaaaccgatcgtgtccacggcggcgttggcgctgatggcgcaaggcggcatgcggttagacgatccgatcacgcgttggctgccgaattttcgcccacggctggcggacggcacccaaccgttgatgacgctatggcatttgatgacccacaccgccggattaagctaccgttttttccagccggaagggggattctacgcccagtcggcggtctccgacggcatggatgaggcggcggtaagcctgcaggaaaatgtgcggcgtatcgcttccgcgccgttgctggctccgcccggcgcggcgtggcgttattccatcgccaccgatgtgttgggcgcggttattgaacaggcgagcggcctgccgctggcgcaggcggtcaaaaaatgggtgaccgggccgctggcgatgacggataccgatttcctggcggtggacgccgcgcgtttggcggccgcatacgccgaccatcccggcgagccacgccgcctgcgccagccggatcgcttaccgttcatcgacggcagcgccggttttcatctgtcgccggcgcgagcgctggatccgcaggcgtacgcctccggcggcgccggcatggtcggttcggcggaggatttcctgcgcctgctggaaacgttgcgccaggggggcgggcaggtgctgccggctgattgggtggcggcgctgaccaccaaccaaatcggcgatctgccgatgccgttttggccagggcgcgggtttggcctgggcatcaccgtgctgaaagatcccgtcgccgcgcaaacgccggagtccgttggcagctggcggatgggcggcacctatggccactcgtggtttgtcgatcctgcccggcagctcagcgtggtggcgtttaccaacacggcgctggaggggatgtccggcgcctttgtcggcgagatttgtcaggcggtttataccgcgacgggagcgatgtga

SEQ ID NO: 427729 - DNA, 1380 bp, Serratia marcescens
atgttatcccatccttcgccgcagggcgtccgcggcatattggccgcactgtctctgagcatgctgctgtcatcgctcggcatcagcatcgccaacgtcgggctgccggcgctcgccgccgcgttccatgcttcgttccaggcggtgcagtgggtattgctctgttatttactggccgtcaccacctgcatcatcggcatcggccgcctcggcgacagccttaatcgccgccgcctgctgctggcgggcatcgcgctgtttaccgccgcttcgctcgcttgtgcgctggccccgcagctttggctgctgctggcggcgcgcatggcgcaggggctggggggcgcggtcatgatgtcgatcgccatggcgctggcgggcgaggcgctgggcacggataaaatcggccgcgcgatgggtctgctcggcacgatgtcggcagtgggcaccgcgctggggccgtcgttgggcggcgcgctgatcgccggtttcggctggcgggcgatgtttcttatcaatctgccgctggggctgctggcgctgtggcttgcctggcgatacctgccgaatgggccgcgcccggcagcgcgccaggaaacgttcgatcgcgccggtacgctgctgctgggcggcgcattgctctgctattcgctggcgatgacccttgggcgcggcaacttcggtgcgctcaacctggcgttgatgctgggggcgctgttggcgggggcgctgttcatcggcgtggaacgccgcgccgcatcgccgctgttggcgccggcgatgttccgccatccggccctgacggcggggctggcggccagcgcgctggtgatgacggtcatgaccgccacgctggtggtcgggccgttctacctgtcgcgcgcgctggggctaagcgcagcgcaggtcgggctggtgatgtcggcggggccggcggtggcgatcctgaccggcattccggccggttatctggtggatcgtttcggatcgcagcgcattggccagtttgggctggcggcggtggccgccggggcagcgttgctgtcgctgcttaaccgctggggcgtgctcggctatgttggccccatcgcgctgctgaccgccggctatgcgctgtttcaggtggccaacaacaccatgctgatgaaggatctgtttcccgaacggcgcgggctggtcgccggcatggtgaacctggcgcgcaatcttggggcgatcaccggcgcttcggcgctgggggcgctgttttatctggcttcgcagcgggtggcgggcgccgccgccgcggcttacggcatgcaggtgacctacggcgtggcggcgctgttggcgttggcggcgctgctcatcgccttcggcggccgccgcccgcgtcggcgatga

SEQ ID NO: 427730 - DNA, 792 bp, Serratia marcescens
atgggattcgaagtcgacaacgccgaaacgaaacgcatcgacctcagcagccacgaaaactcctcgttcgaggtgacggggctggtgaaacactatccggcgggcttcgtcattccttaccactcgcataggcgctgccacttgctctattcgcagcagggcgttatggcggtcgaggcgagcagcgggcgctggatcgtgccgcccaccaccgcagtctggctgcggccgggggtagagcatcagatcgtcatgcagagcaacatctgcgtttacgggattttggtcgatgaaatcaccgccgcgcgtttgccgctgcgcgacggcgtcttgcaggtctcaccgctgctgcgagagctgatcgctcagctggcgacgctggcgcccgaaggggcggagacccaacgcaatgcgctgctcagagcgttgttccttgaggagttgagcctgcagccgcagctggcgctgcacctgccttggccggcagaggcgagaatggccgagatttgccggcagttggtcatcacgccggccgacgatcgcggcattgaggcctgggccgattcactgtcgatcagcgtaaagacctttcaacgccatttcagccaacaaaccggcatcaccttcggccagtggaaacagcgtctgcggctgctgtcgtccattccgctgctgttggccggccactcgatcatccacgccgccttcgaaagcggttacgagagccacagcgcctattcggtggcgttcaaaaaactgtttggcgtttcgccttcgcgctttacgctatag

SEQ ID NO: 427731 - DNA, 1299 bp, Serratia marcescens
atgagtaagatgaaaaagatcgccgggtggggcggggttacggtgctcgccgtggtggtggccggcgttgtcgccagttggcaaccggaaatcgcgccgctcgccgccgatgcgacgcacagtttcagcgaggcgcagatcgcgcgcggcaaaacgctggccgatctcggcgattgcgcggtgtgccacacccgttcgggcggtgagcgcaacgccggcgggttggcgatggagatccccttcggcaccatttacaccaccaacatcacgccggacgtggaaaccggcatcggtagctggagctacgcggcgtttgaacgcgccatgcgccacggcgtcgatcgccaggggcgctacctttatccggcgtttccttataccgcctttacccgcacgagtgacgacgatctgcaggcgctgtacgcctacctgatgtcgcagccgccggtcaattaccggccgccggccaccgatctgcactttccgttcaatatccgccagggcatcttcgcctggaacctgctgttcctgacgccgggcgcgatgcaggaagacccggcccaaagcgccgcctggaaccgcggcgcttatctggccgaagggctggggcactgcagcgcctgccactcgccgcgcaacgtgttgttcggcgagaaaaccggtggcgaccacctggccggcggcgtggcggaaggctggacggcgccggcgttgaccggccgttcgcccgcgccgctcaattggacgcagcaggatctggtcgatttcatgcgtaccggctactcggccaaccacggcgtggccgccggcccaatggcgccggtgatcgaagaagggttgtcccgcttgccgcaggccgatctgcaggcgatagccgtctatctgcgcagctatcatcctgaaacggtggggggcgcgacggcggccacgttgaacgctaaggcggagcggcaggtggagcccctgagctcgcaaggcgcgcggctgttttccggcgcctgcatggcttgtcatgcgcaggaaaagggcgcgcagatggcgggggtgcggccttctctggcgctgaacaccaacctgttcgccgaggcgccggacaacgccattcgcgtggtgctggatggcatacagcggccggcgaacgccgaactgggctatatgccgggcttccgccataacctggatgacgcgcagatcgccatcctgctcaactatctacggcagcactacgccggtcaggcgccgtggcccgatctggcggcgcaggtcggccgtttgcgcgccgaaaccgcgcagaaatag

SEQ ID NO: 427732 - DNA, 474 bp, Serratia marcescens
atggaaatcaatgttaacggccgggtggttccactcggcgatatctcgcccgagaccccgctgctgtatgttttacgcaacgatctgcaattgaacggccccaaatacggctgcggcctgggggagtgcggcgcctgcacggtgctgatcgacggcgtcgccgcacgctcctgctcaatgccgctgtccgccgtaggaaacaaatccgtcaccacgctggaaggcctgggcaccgcggaagcgccgcatccggtacagcaagggtttattgatgagcaggcggcgcagtgcggttactgcgccaacggcatgatcatgacgctggtcgcgctgttcgaacgcgagccgcaggccgacgaacaaaccatcaagaaagagctggcctacaacctgtgccgctgtggcacgcatatcgagatcttgcacgccgccgagcgcgcccgcgatctgctggccgcgcggaggcaagcatga

SEQ ID NO: 427733 - DNA, 126 bp, Serratia marcescens
atgcggccctttctactgctgacagaggaggaaaaaacgcggtttttcctcctctgtggtgagcagccgaaaatcaatgaattgattttccttattttttatatgcgccttctattaatccgataa

SEQ ID NO: 427734 - DNA, 408 bp, Serratia marcescens
atgctggaggcaaagttggcgccggcgaagccgcacagcagggaaatgatgacgaacacgctgtacggcgtgctgctgtcttgcaccgcgaaccccagccacaagcacggcaccagcaggaagcaggtgctgatggcggtccagcgacggccgccaaacagcgggatcacgaatgaatacggcacgcgtaaaatagcacccgacaccgacggcagcgccgtcaggaggaacagctggtcggtggtgaagttgaagcccaccttgttcaggttgaccgcgacggcgctgaacagcatccagacgcagaaggccagcagcaggcagggaatggaaatccacaggttgcgggtggcgatgcgatggccacgctgctgccaaaaggcgctgtcttcaggacgccagtcctga

SEQ ID NO: 427735 - DNA, 870 bp, Serratia marcescens
atgagccaatatctctctgaacacgaaccgcaaagcgagccagccgtcggttaccgccgtggccggcgcctgaccacgctgacgctgggcacggcgctggtggcgattctgatcgtcaccgcgctgctggctccgtggctggcgcctttcgatcccaatctgcagcatatcgagctgcggttattgccgccttccgccgtacattggctgggcaccgacggttttggccgcgacttgctctcccgcgtgatttacggcgcgcggccgacgctgattctggtgtcgctgattctggtgttgactattcccatcggcctgctggtcggcattggcgccggttacctcggcggctgggtagagcgcattttgatgcgcctgaccgacatttttctgtcgctgccgagcctggtgatcgcgctggcgttcgtggcggtcatggggccggggctgatgaacggcgcgctggcgctggcattgaccagctggccggcctttgcccgccaggcgcgggccgaaaccctggcgctgcgccgcagcgattacctggcggcggcgcgcatgcagggcatcaacgggctgcggctgatggtcggccatattttgcctttatgcctgccgagcgcggtggtgcgcgcagcgctcagcctgggcggcatcatcctgtccgccgccggtctggggttcctcggcatgggcgtcgcgccgccgaccgccgaatggggctcgatggtggccgaaggcagtaaagtgattttcgaccaatggtgggtcgccgccgcgccgggcggggcgatcctgttcgccagcctggcgtttaacctgctgggcgatggcctgcgcgacaaaatggatcctcgtcatgggcactga

SEQ ID NO: 427736 - DNA, 1236 bp, Serratia marcescens
atggcacaagtaatcaacactaacagcctgtcgctgatggcgcagaacaacctgaacaaatctcagtcttctctgggcactgcgattgagcgtctgtcttccggtctgcgtatcaacagcgcgaaagacgatgctgcgggtcaggctatctccaaccgtttcactgcaaacatcaaaggcctgactcaggcttctcgcaacgccaacgacggtatctccctggcgcagaccactgaaggcgcactgaacgaagttaacgacaacctgcagaacatccgtcgtctgaccgtacagtctcagaacggttccaactctgccagcgacctgcagtccatccaggacgagatctctcagcgtctgtctgaaatcaaccgcatctccgagcagaccgatttcaacggcgtgaaagtgctgagctctgatcagaaactgaccatccaggttggcgcgaacgacggcgaaaccatcgatatcgaactgaaagacatcaacgctaaaacgctgggtctggaaaagttcagcgtggctgatggcattgataaatccaaagtagctgcaaccgcacctgctaccgtgaaaaccggcaccagcgtggctatcaacaccggcaccgttaaggctgatactaaagacatcaccggctacgaaaaagtgggtgacgatgtattcgctatcaacacggatggtgactactacaaagcaactttcgataaagcgaccggcgatctgaaatctgttggcaccaaagaagccactaaaccaactggcggcactgcggtaaccagcattgagaaagaagtggctcctactggccctgatgcggctaacctgcgctcttacgacagcggtaaatcttacgtgatccaggaaggtaccggtgccgatgccaaatatttcaaggcgaccgtagacgcttccggtaaagtgaccaagggcgcagagcagtccaccgagccaaaaactgccgacccgctggcgaccctggacaaagcgctgtctcaggttgactccctgcgttcttccctgggtgcggtacagaaccgtttcgattctgttatcaacaacctgaacagcaccgttaacaacctgtccgcttctcagtcccgtatccaggatgccgactacgcgaccgaagtgtccaacatgagccgcgccaacatcctgcaacaggctggcacctctgttctggcacaggctaaccagtctactcagaacgttctgtccctgctgcgttaa

SEQ ID NO: 427737 - DNA, 327 bp, Serratia marcescens
atgttgagagaactgaccagagaagaaatgcaacggatgagcggcgccggcgacggcaataacggcggcgaccgagatcgcgactatagccgaagctcctacggcgcgcaggcgaacggcttccagcctaattgggcggcgaaagactatgggctatttcaggatccttgtaccggcgctgtggttaccggtgccattgccatggctggcgcactggccagccgtaacggcagtgcgattggcactgcggcggcctcagcctttgtcaacataggcagtcaatgcactaaagggtccggcaacgatcgcggcgtgcctttccgctga

SEQ ID NO: 427738 - DNA, 2700 bp, Serratia marcescens
atgactcagattaatgaaagaacgcgtcgccgtgataaagacgcggtgacctacgccattgcggaagaagcgaccaacagcatcgcccaaacgctggcgaacctgaagtgcaaccgcaacggtttgacccaggacgacgccgatgagcggctggagcagttcggcgccaatcaggtcgcccacgacaaggcgccgcatgccttgatccagctgatcaaggctttcaacaacccgtttatcttcgtgctgatggtgctggctgcgatcagtttctttaccgattattggctgccgcgccagagcggtgaagaaactgaactcaccggcgtcattatcattctcatcatggtcacgctgagcgggctgctgcgtttctggcaggaataccgcaccaacaaagcggcggaagcgctgaagtcgatggtgcgcaccaccgccacggtgctgcgccgcagcagctacagcgcgcatccgctgacgctggaagtgccgatccgcgaactggtgccgggggatatcattcagctctccgccggcgacatggtgccggccgacgtgcgccttatcgcctcgcgcgatctgttcatcagccaggcgatattgaccggcgaagcgatccctatcgaaaaatacgatgccatgggcagcgtggcgcagaagtcgagcgaaggggaagtgtccagcgagaacgcgctgcttgagctctccaacgtctgcctgatgggcaccaacgtcgccagcggcaccgccacggcggtggtggtggcgaccggcgggcgcacctacttcggctcgttggccaagtccatcgtcggttcgcgggcgcaaaccgcattcgatcgcggggtgaacagcgtcagctggctgctgattcgcttcatgctggtgatggtgccggtggtgttgctgatcaacggtttcaccaaaggcgactggagcgaggcggcgctgttcgcactggcggtggcggtcggcctgacgccggaaatgctgccgatgatcgtcagctccaacctggcgaaaggggcgatcgccatgtcgcgccgcaaggtggtggtgaagcgcctgaacgccattcagaacttcggcgccatggacgtgctctgcaccgacaagaccggcacgctgacccaggaccgcatcattctcgagcaccatatcgacgtcaacggcgccagggataacgaggtgctgcacctggcctggctgaacagtttccatcagagcggcatgaagaacctgatggatcaggcggtgatccgctttggccgcggtaaaccggggatcgaagccctggggcgtttcagcaaggtggatgagctgccgttcgatttcgtgcgccgccgcttgtcgatcgtggtggcggacgaaaatggcaagcagcagctgatctgtaagggcgcggtagaggagatgctggagatcgccactcacgtgcgtgaaggcgacaagacactggaactggatgacgcgcgccgtgcggcgctgcaggcgctggcccgcgagtataacgaagacggtttccgcgtgctggtgctggcgacgcgcgagctggatgcgcaacgcccggccaacccgctgagcgtggccgacgagcgcgacatggtggtgcaagggttgctgaccttcctcgatccgccgaaggagagcgcgcagcaggcgatcgccgcactacaggaaaacggcgtgacggtgaaggtgctgaccggcgacaacccggtgatcacctgcaagatttgccgcgacgtcgggctggagccgggtgaaccgctctccgggctgcagattgaacagatggatgacgaaacgctggcgcgcgaagtggagcagcgcacggtcttcaccaagctgacgccgctgcaaaaatcgcgggtgctgaaaatgctgcaggccaacggccataccgtcggcttcctcggcgacggcatcaacgatgcgccggcgctgcgcgatgccgacgtcggcatttcggtcgacaccggcaccgacatcgccaaggagtcggcggacatcatcctgttggaaaagaacctgatggtgctggaagagggggtgatcaaagggcgcgagaccttcggcaatatcatcaagtacctgaacatgaccgccagctccaacttcggcaacgtgttctcggtgctggtggccagcgccttcattccgttcctgccgatgctggcgatccacctgttgattcaaaacctgatgtacgatatttcccagctgtcgctgccgtgggacaagatggacaaagagttcctgcgcaagccgcgcaagtgggactccaaaaacatcgggcgctttatgctgtggattgggccgacctcgtcaatcttcgatatcacgacgtatgcgctgatgtggtacgtgttcgccgccaacagcgtggaacaccaggcgctgttccagtccggctggttcattgaggggctgctgtcgcaaacgctggtggtgcatatgctgcgcacccagaagatcccgttcattcagagcaccgcggcgctgccggtgttgctgaccaccgggttggtgatggcgctcgggatctacattccgttctcgccgctcggcgccctggttggcctgcagccgctgccgtgggaatacttcccgtggttggccgctacgctggtcagctactgcgtggtcgcgcagttgatgaagcgtttctacatccgccgcttcggcgagtggctgtaa

SEQ ID NO: 427739 - DNA, 876 bp, Serratia marcescens
atgatgaatgaacgtctcccgctgcatgtcttgccgacctttgctatcgccgctaggttggagaatttgcgcgccacggcgcagcaggtgcatttgacgcatggcgcggtcagtcagcaaattcagctgctggagcaggcggtgggctacccgctgtttgaacggcgcgggcgcggtgtgcgcctgaatgccgccgggaaagagttgctggcggcggtagagccggcgctgcaggcgctgcagcagggcgtcgcccgcgcccggcgcttggcggcgagccagacgctgcgcatcagcgtgctgccgtcttttgcccattactggctgttgccgcggttgccggcatttcatgcagcctgcgccgatattgcgctggatatcgatgcctcgctggcgttgcaggatctgtcgcagcgcgggttcgatgcggcgatccgcattggcagcggccagtgggcggggctgcaggcgcagcgcatcgcgtcgggcgacgtgctgccggtcgcctcgccggatatgacgcggcagtggggaacggcattcgagaacggcggcgacgttcccttgctggagcatgacgtcagcccgtggcgcgactggttcaatgcgcaagggcgctcgcggtgcgggcggcaacaggcggtgttcaacgatgccgggttgttgattcgcgccgcggagcaggggttcggcatcgcgctggcgaaaaagctgctggtgcaggatgcgatcgacgcggggcggctggtggcgctggctgcgccctgtcgcctgagcgaggacgacgtttatctggtgtggccgcagaccgccgggctgacgccggcggtcacacgcttgctgcaatggctgcagcaacagttggcggcggtttaa

SEQ ID NO: 427740 - DNA, 1014 bp, Serratia marcescens
atgagtatcagcaaacttgactctgggcagtacctggttgatgtccgcccccaggggcgtaacgggaagcgagtacgtaaaaaatttgataccaaggctgaggcccagcagtacgaacgctggatcatcgcgactcaacataacaaggaatggattgataagcccaaagatcggcgacctttctctgagctgattgaactatggtggatgcactacgggcagacgctgaaggctggtcgttgtacgcacctcgcgttgatcgccttcgatgtatacatgaagcacccgcgggcagatcaaattacacatgagttgttctcagattatcgcgcggctcgcctcactgaaggtatcagcccgcgaaccattaacaacatgcaaatccgggtgagtggtgtgtttactgcgttggcagcagctggcaagtttcagggtgacaacccgatgaaggggctgaagcgagcgaaaacaaagcgttctaaaatggcgttcttaaccaagccccagatcgcgcagctgttgcaggaaacgcacccgaatgacatacgggccgttcggcttgctttggctactggtgcacgtttcggcgaggtcgaaagcctgttagatgaacacatcattaaaaatcgcgtcacctatgtggaaacaaagaatgggaaggatagaaccgtccctatctcgccggagttgttcaaggacatcaaaggttccatcgttgggcgtcgagtgttccctaagttgagttacacacgggtgcgccagttactgaaaaaactgatccccgacttgccgaacggtcaggcgactcacgtttttaggcacacttttggttctcactacatgatgaacggggggaatatccttgccctacagaagattttaggccacgccaccattgagcaaactatgacctatgcgcactttgcgcctgattatctgctcgatgccgtaagattcaacccgctggaatatcaccaggatggcagtgtccacattttgccaacattaggttga

SEQ ID NO: 427741 - DNA, 483 bp, Serratia marcescens
atgaaaaatacttttggtgattggaatgggattttgctcgtcggcatgctgttagctccgatcgtcacgcatgcacagaccgaacagtacaccgatatcaaaacacaatgcagaatggcaaacgctgaactcaatgaagcaggcgagctttttaatgctttcacagggaaatggctttctggtagtcaatctgacctgaagattgaccgtaaggagtttgcggaggctagggtcaaaaacttcaacaaacaacatgctgcaatccgttcaaaatattcagaccgtgccaggcccggccttgataacccgatgaatattgctgatgacgtagctttaaggatgctgtttgttgtaaatgcattgcaacagttttctatagatggcgacaaagcagctttaaagacctcttggaaggaacaacacaaagcgatgacggaggactctgaaggaatcaaaaaactatgtgctaagagtggtcgatag

SEQ ID NO: 427742 - DNA, 294 bp, Serratia marcescens
atgacactaagtgaaaaaatcaaagccatcagaattgcagaaggtcttagcaaagcggagttttgccgaataacggagatcccttcgagcacaatggaaaaatatgagatggggaagttcgaaccaggcggggcggcgctgaccaaaatcactcaaaacagtcggtttgaaaaatacacaatgtggttgatgactggtaagacgatgcctgaagtggggcagatctctccggctctctcccctgatgggcaaagcagcacatccaaccaccaaagcgaccagaaggctggctaa

SEQ ID NO: 427743 - DNA, 360 bp, Serratia marcescens
atgaaagtcacgacacaaagaaaggcaagcgaagttaatcaaaggaatgtgaatccgtgcgctcgtcgaccgtcgaaatctatatctgtgtcgaccgctgaaaatcgtgccaccgaaatggcactggaatacatcaccaaaaacggcatcaagccacgcatgactctgaaggagtttgcggagttcttcaaaatgccactggaacaggtgcaaagtgatgcccgccgtaattacctgccattaatgccgcgcaccaccccaggccgccgcgaactgctgcaggtgaacatggttgcttactatgcgcatagtttggcggccagcggtaattacattgcaaatgcaacggcattccaatga

SEQ ID NO: 427744 - DNA, 249 bp, Serratia marcescens
atgaacgccccattctacgccgctgctaaccgtgtgctccgcatgtatgagctgcgccaacagcagataactcgcagggcgccacactcacagactgaaatcgagtgggccgccgatctgctgttgggcctggctggtgcggctgcattttctgccagcaaagaagccgtttcgctacgcgatgccgccgaatactggaagcgctacggcaaacaacccgactttttccccgaaacaatcgaggcttaa

SEQ ID NO: 427745 - DNA, 219 bp, Serratia marcescens
atgacgatcacagcacattgcccatcactggccgccatgctgaccaacggccagcagatcacccaccgccgccacactcgcggctggctggaactgccggacggtcgtcacttccaaccgaaggccaccgacgtgcagttcatacccggcatgcgtaagccgtttatgtcgcgcccccgtccgcgctggttcgcccgtctgatggggatcttcggatga

SEQ ID NO: 427746 - DNA, 213 bp, Serratia marcescens
atgaccccgaaactcgccgagctgatggccaatatttcagcgctcgctgtaatggtgtttttcttccttttcgacagatcacagggctgggcggcgggatggaaaaaattcaaagccgattttctccaatacggttggccgattatcaaaccgattggagccgcgatcgcggtcttcactctggtttatgggctgttgatggtttgggcttag

SEQ ID NO: 427747 - DNA, 435 bp, Serratia marcescens
atgggatttcttggatttggtaagaaagtcgccgcggcgaaagttgagctgaagaaggtggagaaccgcgatctgatggaagccatcgtcggtggctgtctgctggttgctgcagctgacggcgagatcgagaaagaagaaaccgccaagctggatcagctgctgcgttctaacccgcgcctgggtcactacggcaacgagatcaccgcgctgatcacccgctttactgaacagctggaagccggtttccgcgttggccgcatgaacattctgcgcgaaatcgaagacatcaaaaacaccccgaccgaagccgaagaggtcttcgtcaacatgctgacgattgccgaggccgacggcgagatcgaaccggaagaacagaaagttcttgaagacgttggccgccgtctgggcctgcgcgtggaagattacctgtaa

SEQ ID NO: 427748 - DNA, 174 bp, Serratia marcescens
atgcgcgcgctgctcggcaatctgcgcctgattggtgtgctgatcctggcattcatggttgtggccgtggacttcaccagttatgtgctttcggtcgttggcgatctgttctttgtcggcgcgctggttgcactggcatggccggcgctgaacaacaaggcagcatcagaataa

SEQ ID NO: 427749 - DNA, 312 bp, Serratia marcescens
atgggcggcatgacaacagagcaagtgcaatcagttggcaagttcctgacaaccgctaagcagcttcttgcctcagcaaaatgcgtcaacccgacagccgttttttatgacgggttgatggatagccagaaaaaagccgtatgcaccctgggcaatattgatggccgggtgaagctttccgccaaacatatatcaatgaggtttgaggaaatgagcaaagaagaacggcgcgcggtttaccgcggcattaaagaattgcaacgcctggggcaacgagtgccgacgctttcaaatatcggtgactgcgactaa

SEQ ID NO: 427750 - DNA, 237 bp, Serratia marcescens
atgacagacaaaaccgtaaatcaaccgacctttatcggcctcgatcttgccgcgggaattatcggcaatgaacgccgctctgagcgtctcgccttgctggaacagctggatcgccgcctcgacgagctggagctgcacggtggccagcgcgagcaaatcctgatccgcctgcgccattgggttgcatcccgtaaggcgccgacagacaccaccgcgcaagacgtcacgccatgctga

SEQ ID NO: 427751 - DNA, 840 bp, Serratia marcescens
atgacaccacaacagcaagcacagcaatgtttgaatagaaattgtctggttttggatacagaaaccacaggtcttgatgataaagcagagatcatcgagatagccgtaattgacgccaccggcaaggtgctgctgaacacgctggtaaagccatcaaaacctattccggcagaagctaccgcaatccatggaatcactgatgaaatggtaaaagatgccccaacatggccggaggtcaaccctcagctgtgcagcttaatcagtggaaaaacgattgcgatttacaatgctgagtatgacatccgtttgcttgagcagacagatcgcatctggaaggtaacgccgaaaattagcgtaacgccacagatcgtatgtgccatgcatgagtacgccgagttttacggccagaaaagcgaccgaggcggctacaaatggcaaaagctgaccgccgccgctgaacagcaaggcgtcattatcgaaggaacgctgcatcgcgccctttctgactgcctgaccactctcggcgtgattaaggcaatggcaggaggagatcaccgcgcatcacacggagtaacggcacagaaagctgtcgatatccttaacgggttattgcaggtagaccacgccgcgattacagcactggtcaataaccgtgtcttttgctctgagaaattggctaaagaaacatcggttgacttttatgatggccactacctcataggcatggcgggcatcatcaatgctttggttgcgcccgacaccatcggggcaatttatgacgacatggtgctgatcggattcgagattgtcgattccagcgtcgaaggcggtgacctatga

SEQ ID NO: 427752 - DNA, 822 bp, Serratia marcescens
atgaaccgcgcggcgctgaagtggctcggcagcaaagcccgcattatcgacacactgcgccagcacctgccggaaggtaggcgcctggttgagccgttcgtcggctccggcgctgttttcctcaataccgactatgaaagttatctgctgtgcgatatcaacagcgatctgatcaacttccacaacgtcgccaaaaaccatcctgaggtgctgatccgcgaagcgcgccatctgttcaacgcacacccggatcaggagggctattacggcgtacgcgctgacttcaatctgcgctgtgacagcaatttcatctaccgtgcggcgcagttcctttacctgaaccgccacaccttcaacggcgtttgccgctacaacctgagcggcgagtttaattcgccgttcggtcatcgaaaagcgccctacttcccagaagacgagatcagagccttcgcagaaaaggcacaggccaagaaagctattttcctgtgctgcagcttcccagaggcgatcaggatggcccaggccggcgacgtgatttattgcgatccgccgtacatcccagccagcgccaccgccagctttaccagctatcacactgacggctttaccagcgagcagcaacgcaagctggcgcgcatgcttcgtatcgcagccaagctgggccgtcacgtcgtggcatcgaacagcgagacggacgtagccaaagcgctgtacgccgatttcgctatcacctcgatcaccgcccgccgctctgtcagcgcaaaagctgccagccgcgcagacgttggcgagataatcgcaactatgaaggcatccgcatga

SEQ ID NO: 427753 - DNA, 2364 bp, Serratia marcescens
atgacaagcaacgctcgcggacggcaccaaccttccccgccgctaccctatccgggcagcggcgcggttgcttttgaatatgcgtactcctggaaccacaagcgcgacgccattgtgaccgagcgcgccgacgaaccggcatcgatccagctattcggtgccaccaaccacgccggcgagccggtgcgcgttcccctgtttgatatcgccggtcagtcccgcgttgccgatcccgcgccgcgccgcctgcgccggcggctggcctctcttccccagtatgtccgacgctattacaccctgcgtctgaatagcctcgagcaaggcaaaggaatgaaggccgccaacggctggctggtcaatacctttgagcgccacgtcctgccgcgcatcgatgcagtcaacgaacagtaccagattggccaggtgccgccggcgctgatcgccttccgcgatgatttcttccgcatcccgtacagcgggaaaaaagacctcaagcgcctggcgcacaggctggccgactgcatgacaggcgagtttgtgcgcctttgcgattactgggcagccgcagctgacgatctggcctttgccgtgatctatgcctatggccgcatcgggtatttaaccaagagcctgaatatgtttgctccgggctggcagcaatattgcagcggtcagttgagcgcggaagatgcaacgcgcgccgttgcgcgcctcgaatcaccggcatggtggttgcgccgtttgcgccgcctccatgaccagtggcgcgagcacctcatgattgccgcgggctacgtcagcgataaggcgacgccctactgcagcgatccatgcctgaaagaatggcacgcccagaagaaagccaaccgcgagtttttgaagtcgcgggaactcgaagacgtggacaccggcgaacgcgtttcgctggtcgataaggtggacggcagcgtcgccaatccggcagtgcgccgcgctgagctaatgaaccgcatgcgcggctttgaagatttggcgaaagcccgcgatctggctggcgagttttacaccctgacggcgccgtcgaagtaccacgcgatgcaaagcaagaccggacgccgtaataacaaataccgtggcgccagcccgcgcgaaacccagcgctacctgtgcaaggtctggtcaaaagtgcgggcgtcgtggaagcgcgccggcattcgcgtgttcggcttccgcgtcaccgagccacaccacgatgaaaccccgcactggcatttgttgctgtttctcaagcctgagcacatcgagcaggcacgcgacatcttccggcgctatgcgctgcaggttgatggcgatgagccaggcgccgccgaataccgtttcagcgttaagccaatggatgagcaattcggctccgccacgggctacatcgcgaaatacatttcgaaaaatatcgacgggtacgcccttgacgacgagctggatcacgacaccggcgaaccgctgaaggatatcgccaagcgcgtaaacgcctgggcgtctcgctggcgtattcgtcagtttcagcagattggcggtgccccggtcacggtataccgcgagctgcgccggctgcgcgatcgcgacctgttcctgcacccggagatctcgcccgcgcatatcgcggcagatgccggcgactgggccgggtataccgacgcccagggcggcccgttagtcgagcgtcgtcacatccgcgtgcgcatcggctacgacatcaccgagaacggcaacgattacggcgacgacatcagcaagatcgccggcgtttactcgccgttcgccaggacgcaaccgatgatttacacccgcttgaacacctacaaaattgtcccggccagcgccgatccgggttcggccgttgaccttcaggcggcagcgccgcccctcggagttctgtcaataactgtacgcggaacgcagcaggaggaagacagacagggcagtaattacggccttttgtctcctgatatagatgcaaatgactgtgccagctggccgcctgggggcgattttgaggggatgacgcgccgagaacggcgggcctttaacgaatacctggtagcagaagcgaaaaaaacgcgaagcaaacagccagcgccgcaccagcatgcaaaaaaatcggcgcagcactttgagcggctaaccgatttcgcggcctcgatcggcctggagctaaccgagctggaggtggaaaagctggccgccggtgatgatttgtcgctgaacggcaagcgctggcgggctggtgccgatggaactatacaaggcgcatctaccacttatgcagagaagtgcagtaaactaatggcaaggatatatgatttggcacgtaatagaataaagtag

SEQ ID NO: 427754 - DNA, 882 bp, Serratia marcescens
atgaaagaaatagtcgatgatacgattgaaggagtaaaaggaagattgtctggactttatggctatatagccacctcactatttttattcaactggtcaaatatttatttcctgttttttagtcaaaaaaccgccgagcaaaaaataagttcactctatatatcctttgacatctgggtaaaccttgtgattccgatattatttgggtccattatgtgtgcactagctccgcgtgtcaatgtagtgatgaagggcattcataaaaaagctacgcttgatgataagaaaattcaattcgataatgataactacatccccagattgaaattagatgaagagttgagaattgatgaaaaaaaggcagagagggatagtttagtcttagagattgaaagcttaaaagagaccttaacaatagcaacaaagcagttagattctgcaataaaagccaaggatgaagttgacgcacaaaaagttagtttaatgcttgaaatatcaaaaatacaagatgaactaagcagtatagatatagagttaacagctttaaaaactgattatggcagttatcaaaaattaaaagattcttatttaaacgccagtaactctttaatgtctagcaatttaaaaagggatgagcaagtagatatacttttggggataatcaaagcaattatagacaatggatatgtgacgcaagaagtagaagatttaattaacaaaaggatagaagatactggatatcaaattccaactgaaaacccattacgaatggtgcctcgaaaacaccaagatgctaaaacatttgatgaggctgttcttattggtagagatccggaaaaaactacgttacctccaaatccattgatgtttgacaagaattaa

SEQ ID NO: 427755 - DNA, 270 bp, Serratia marcescens
atgtcacgcaatctgaaagtcatctgcaccgagtgcaacgcgccggcgatcatcagtaaaaccaaccggaaaacggcccagtttgccgatctttactgtcagtgcaccgatgtggaatgcggtcacactttcgtgatgaatatgacgttttcgcacaccctcagccccagcgcgcgaagcgggcgcggcctggtcaaatcgctgctcagtttgctgcgaccggaagataaacagatcgccctcgacttgctgcagggccagccaggataa

SEQ ID NO: 427756 - DNA, 888 bp, Serratia marcescens
atgcacggcatcaactcaggtaaaaattattatggttaccgcgatccggttcctttcactatctggacgccggaaagtttgttcgcggcacataaggcaagggtgactgccggcggcggcatcattccagacgaagccggttgcctggctcgcttcagatttattgttgataacggattgctcgaccggatcgtaacctggataaatccggcgtttggcgtgaagaaaaatgcgagcaaccagattgaaaaactctttgcgctgcgcggtagcgattttaccgcgcagatgcagaagtccggcgccgcggttctttatgatgacagcggggcggcgccggcggcagtggtgcaaatcacctctgcaggcggaggctatctggtttcagaaaacgtgaccgtccagcgtggtgacgcctatctcatcggcgctaaattgtctgacaagaatcgcgccgatgtcctggggctgaccgttgggcaaagcctgaataatctgccgatggcttacgcgcgaaccatgatccagaatcagcaagccattaccgaggcctggcgctatggtacgcgcgacagcgattggaaaaacggcaatccgacaggtggcccggtgggggcagcgcgcatgccttatgatgactatatcccgtccgccggcttgttcgatgtcgttcacggcaaggttgatggttatgagagcggcaagctggtgaattcggcggtttcaactaccggcaaactggctgatttatctgcgcaatcggccccgatttatgtcggcggtggttttgccggaggtgaggtcggcgcatgctatggcaccttgcgcgaggctgttttcctgcacaccgcaaccaaggccgaagccagccttatctcgcgactttaa

SEQ ID NO: 427757 - DNA, 2076 bp, Serratia marcescens
atgactgacgagttgacgcaaacaacgcgcgtttccgacttgggcatggctggggcgcttcaggataacgacctgattctgttaactgtccagcgcggtgaagctttcgagtcgcaaagcatatccgtactggatttaaagcgcatgctgcatatcgcgacacaagaaacattttattctgacgggcattttgctgcgcgttctatggatggggaaaacggttttgtgctggacgctgacttcggcgcctggtttgccggactgccgcgcccgctacaagaatatttaacgggcacaatgccgagcagcgagggcaatcagtaccccgattatcatgaggtttttctctctgcagacaaaaaggcattgcggctcactgatgacaatggcggcctatggctgtgcggcattgatgaggctatccagaataggcttgacggcctgctatcgtcgagtgtcagcaaagggatttcaggctggcaatggctggcgctcagtaaaaaccgtaagggattgtttggtactgacgataacggcggcttccacgttccgggcatcactggcccgattcaggatctgttattggcgctgagcggcggcagcgggccgaacgtgaaacccgaggccggcacctatgtgttgatgtggggggatcgtaaaatctggggagatcgccccgtacttggcacagagaaaatcactgataccggtgcattgttgcgttacctgcccggcggtgaggctacaagcggcaccggtgttgttttccatcgtggcggccgggagatgccgatcgaggcctccgcatttcgcattatcgcgtttatgggccaatcgttgatgattgcatccgatgccggcaacattcccaatcctggcagctataacaaggtgaatcgcgatccggcgttgcgtggtcgagccattaccgttaacggcggtaagccggaattttccggggatgctgacaccattatcagcgacgacaatctggataagttggctgacatggtcaacgcgaactatcggcaggggcaggtgataccactgaccaatcgcctgatttatgactgcgatgcggcaggcctggcaccgtcaattttctattccgcaaacagcgccagcggcggtaaatccttcgctcaaatctggaaaggtacagtcccttacaccaacggtctgcgcctggtgcaacgcggggcggacatcgccgcgggtatcggcaagccctgcagtgtcgatttcgttttatttgcacatggacaaacggacaacgggaacggcaccaatacctcccccggcgcctatgccagccgcatgacgcagcactttgcgaatgtgaccgctgattatacggcgatcacccatcaaaccaccgggccgctgtttgttatcgaccaatgcggcagcaggatcagcacagagcgcggcgaagtcgacgaagaaggcaacgtaaccgatcctgagattttatttaacttctctatctctgccacagaccagtgggattacgtcaaggctaaccctgaaaccgccttgatgaatgcgtcggaatggccgcttaattggcaactttctgacggctcgttatcgcacataaataactggggcaaagtgatccagggtgaatacatggagcaggcgttattttggcattacgaccccgcgcagacctcgccctggttgccgacacacgtcaaatctatctcactgcaaggcacgacactgatcacccagtggcacacgccgcggggcgggttggtgcgcgatgtcgccacgttcggcgattgcccaaatgacagcttttccctgcagctggccagcgccaacattttgcaggtcacgcaggagggcaacacggtttcaatcgagttggatgccgttccgtccacagatgacgccttgctcattggtttcaccaacaccactccggcgccaaacggtcatatttatccgatggtgccttatcgagattcttcaacgctgacatctcgctggtataagccggacggggtaaatttctatccgctctacaactgggggattttacagcgcatccccttggaggatttataa

SEQ ID NO: 427758 - DNA, 1050 bp, Serratia marcescens
atgagcagaaagaacaaaaaaccagcccagaaaccggcccagccggcgaaagccttctcggcagggttacccattcccggcgatcgcagcacgatattcatcgggccgcccgaactggtgctgaccagcggcactgattaccaggatgtctggtatgacaacgattacgaccactggactccaccgatcagccgcctggcgctggcgcgcctgccgaacgccaacgcgcagcacgacggcatcctttatgcgcgcaaaaacatgattgcgtcgagctataccggcggcggactgacgcgcgaacagatcggcgcaatggcgttcgattatctgctgttcggcgacctgccgttactgaaggtgcgcaacggctggggccaggtggtgcgcctgcagccgctgccgtcgatgtatatgcgcatccgccgcagcggtgaattcgtcatcttgcaaaagggtgagccgctggtttacgcccccgacgacatcatctttttccgccaatacgatccgcagcagcaaatttacgggctgcccgactatatcggcggcatcaatagtgcgctgctgaacagcgaggcgaccatcttcaggcgccgctattacaacaacggcgcgcacatgggcggcattctctacaccaccgatccgaacctttcggaagaagtggaagccgagatcaaaaagaaaattgaaggcaccaaggggctgggcaacttccgcaacatgtttatcaacatccccggcggcgataaagaaggggtgaagtttatcccggtgggcgatatcagcgccaaagacgaattctccaacgtcaaaaatatcagcgcccaggacgtgcttaccgcgcatcgattcccggccgggttggccggcatcataccgctaaacaccgccggccatggcgatccgatcaaggcgcggggcacctatcggcaggatgaatccattcccgttcagaagatgtttgctgaacgcgtcgccgccgatcctgaagttccgtcccatctgtatctcaatttcgattactcaacacctgcaggggaataa

SEQ ID NO: 427759 - DNA, 1800 bp, Serratia marcescens
atggctatataccctgactcgattaaaaaggtggctcgttcgctttatttaaaaagctggacgccgaaagagatcgccgccgaattgaaattaacatctgcccgcattgtttatcattgggcggagagatacggctggaaccaattattagttgaggaaaccgtcgaggattgcattcagcgccggatcaggacactgacacaccgcgataaaaaaaacgatctggagatgcaggaacttgaccggctgatagagcatcacgtcaagttaattgctcagcgaaacaagcacgcggaaaaattggcggccgcgcaagcagctgcggcgccaggtgacggcggggcagtcgggtttatggcggcaggcgaagacgcgccagcgcagcgcaagggccgccggcaaaagaatgacgtcagcacgatgacgaaagagcgtttcgacgagttcgccgagacgggcctttttagctaccaaaaaacgttgcgggccaacaaagatcactcaatccgcaatttgctcaaatcccgccagatcggcgcgacctggtatttttcatgggaagccctggaagatgccgcgctgaccggcgacaaccagatttttgtttctgcatcgcggcgccaggctgaaatcttccggcgctacatcgtcaagtttgcccgcgaaatgttcggcgtcacgctgaccggcaacccgatcacgctcagcaacggcgccaacctgattttcctgtcgacaaacaagaacaccgcacagggcgagacggggcatttttattgcgatgaatatttctgggtgccgaaattccaggtgttcaaggacgtcaccagcgcgatcgccacgcacgacaaatggcgccggacgttcttctcaacgccgagcgcgaaaacccatgacggttacccgttctggacgggcgatgagtggaaaggtagcgacaaaaaacgccaggcgctgaagttccccgacttcgacgaactgcgcgacggtgggcgcctgtgccctgatgggcaatggcgctacgtcgtgacgctggtcgatgcctgcgcgggcggtctggataaatacgtcaccgtcgatcgggtgcgcggcgagcacagcgtcgatgccttcaacctgctttacatgtgcatttttgtggacagcggcgacagcgtcttcaagttcgaccagctatcgcgctgcgaggttgacccggcgacgtggcaggacttcgaccccaaagcgaaacgcccctttggcgagcgtgaagtgtggggcggctttgacccggcgcgcagcggcgacacgtccacctttgtggttatcgcgccgccgctgtatgacggcgagcgcttccgcgtgctggaaacccaccactggcagggttacagcttcaagtaccaggccgagcagatcaaaaaaatcatgcagcgctaccggatgacctacatcgggatcgatgtgaccggcatcgggcgcggcgtctatgagcgcgtgcagtccttcgccccgcgtgaagtgcgcgacattcattacagcctcgaaacgaaaacccgcctggtactgaaaatggtcgacctggtggaaggtgaccgcatcgaatgggatgccgaaaagcgcggcatcgccggcagcttcctggctattcgaaagaccgtgaccggcagcggcaacgcgatcacgtttgtggcagagcgcagtgccgaaaccggccacgccgatgttttcttcgctatatcccacgcagcgattaacgaacccctcaactttgacacccggcgtaaatctacctgggcattttcacaggcggccgcatga

SEQ ID NO: 427760 - DNA, 888 bp, Serratia marcescens
atgagcggcaaatcatcgcaattaatgactgactggatttgcattgcaaccgaaggcgagaccgtcgacggtcgcgagatcccagcgtcatggctaaccgaaatggccgagacttatgatccggcattgtataccgcattaatctggcctgagcatgaacgctactgggggaattccggtgaagtgctggaactgaaagcggaagccaccgacgccgggctgacaaaactgtatgcccgcctgtgcccaaccgatgacctgatttactcgaaccgccgcaatcaattgctgtttgcgtcaatcgagccggtcgagaacttccgtggttcaggcaagacctacctgaaagggctgggcgtgacgaacaccccggccagtattggcactgaccgtatgcggttcgctgctgaacaaaacaacgcaatctacggtgctccggtgccgtttgtaatcgatatggtcacaaaacggccgggagataaagatatgtctgacgaaaagaaaccgctttggcaaagtatttttggtgcaaaaccacaagagccggcaactcctccgcctgctgcgccgcaagacaataaagaattcaccgaagcgatgaaaggcatggcgcaagccgtggtggatctggagcaaaaatataacactctgagcggtgacaaagaaaagatcgcccaattggaaaagaccgtcggcgatatcaaagagcaaatcaccgaaatcactcagctgtttaataccgaaaaggccaaagagcaggttaaagaattgtttactgccctgcctgatttgctgccgaaatttaaaaagctggatgaaacgttcagcaaagtgccagacccgaacccaggcgaaaaagagaaaaccaccgcctcaatgatttgctaa

SEQ ID NO: 427761 - DNA, 1053 bp, Serratia marcescens
atgtcgcaacaagtctccgtgttgagcgatagcgcccgcaaggcgatggacgcttatttcagcacgctgtttaaaaatctcggtcaaccggaaaactccgaccgcaccaagtattacgcggtcacgccgccgatggaaaccgccatccgcaaaacgctgcaggagtcgctcgacttcctgcagttcatcaccatgaaggacgtggatcagatgagcggccaagtggttgatgtgggcgcgtcgcgtctgcataccggccgctccgcaaccgggcgattccatcgcaacattggcgtaagcggcaacgtttacaccctggcgaaaaccgactccgcggtcgatctggactgggaaaccctgtcgaactgggccaacagcggcgacgtcaacgagttcatgacgcttgtgaacgcgttcaccatgcaggcctttgccctcgacatcctgcgtattggcttcaacggtatcagcgtagccgcgacctccgatccggatgctaacccactgggccaggacgttaacaaaggctggcaccagcttgccaaagagttcaacggcggttctcagatcatcactgacccggtcaccatcgggccgagcggcgattacaaatcactggacgccgccgcggccgacatcatcaacaccaagatcccgcaggaattccgtaatgacccacgccttacgatcatggttggtgctgacctggtggctgctgagcaattccgcctgtatggcaaggtcgacaagccgaccgagaaaatcgccgcgcagctgctggccgattctgtcgccggccgccgctctaccatcccgccgtttatgcctggcaagcgcttagcggtcaccattccggccaacctgcaggtgctgacccaacgcaacacccgtcagcgcaaggttgagtttgttgaagaccgcgcgcagtacgaaaacaaatacctgcgcaacgaaggttacgcgctgggctatcgcgagttgtacggcgcgatcgatgagtcagccgtcaccatcgtgggcgaagaagccgtcacgccgccggctgggggctaa

SEQ ID NO: 427762 - DNA, 804 bp, Serratia marcescens
atgagcatgtcgcccggtctgcggcataacgcccggattgccgcacagcaaacgctaagccaggggcaggcgctgagcgccaaccctgacagcctgcacatccagttgcgcgagctgcagcttgatgtcgagcgcctgcgccagctgccgacaatccgcgaccgggtagacatgaagcgccgcaagctgctgcctaaatgggcgccgaccgtcgagcgctatctgagcagcggcgagcattacaccaacatggtgttttcgtactgcgtgatctggctgttcgacatcggcgagtttgatcaggcgctggactgggccgacatcgccatcgagcaacaccagcccacgccggacaacgtcaaacgcacattttcggcatttgtcgccgacaccgtgctggcctgggcagaaagtgaagccgaagccggtcacagcgttgagccgtatttctcgcgcacctttgcaaacgtgcgcgagaaatggcgactgcatgaagaaattaacgcgaagtggttcaagttcgccgccctgctgctgctgcgtgacagcaacggccggccgctgccgtcagcggtcgaggacgtcaacatcctgcaggccgccgaagaactgctggcgcaagcgcatgcctatcacgcccccgtgggggtgaagacgttgcgtgaaaaaattgagatgcgcattcgtgcgctgaacaaacgactgccgcacggcggagcggacgcagcggagggtgacgccgatttggctaatcacgccgtggatgctggtcagtccgcttctttaacagggggtgcgctgtga

SEQ ID NO: 427763 - DNA, 492 bp, Serratia marcescens
gtgagttctctcagcttcagcggcaagagcctgaactatcaggacgaaaccatcgcacaggagccgggcagtttctggccggatctgaacctgggcgagttccagctgcagcgcaaagtgccgccgcagctgcagggggataccgctattcaagcgctgctcactgcgatcggtgacatcaaccgccgcctgagcaatttcgaggcgacaaagcgggccgaagggttcgccgccgctaacgatctgccaggcgcccgcgccggcaacgagaaccagacgacagcgcaatataaaaaagcggtctatgcgctggcaaaggccgatctgatcggcgaagtgaccagcgtcagccgcgtaagcaaagccaccgcgccggaaggaaccggcagcgatgccgccgaatcctttacccgtagcgggttgctggccgaggccagccaggcagtgcgcgcgatcctgggattggggcgcgcgacggtttccttgtcatga

SEQ ID NO: 427764 - DNA, 498 bp, Serratia marcescens
atgagccagttatcggagttgacggcgttcatgaccgcgcacctgccgccacgggtgccgactttcgccagctggatggacaaccagaagctgacaccgtcgctgaaaaacctaggtaaaggccagcggcggatcgggataaccacctatgacggcgtgctggagtgggacaagtatccgtaccgcgagttagatccggccgtgctgttcgccctggtgctgtcctggttgatggaaggtgccaacgaggcccgcagcgatctgaacctgagcgatccggatgtcgacattgagctgtacgacgaagaatcggccctggtcacgatcaccatcccgttggtcgatgagattgtcctgttgcccaacaaggacggcgagatccctctggacgggcaagcgtggggggtggtcgatgcggtttacgaccacgcgcaagaggcggtgattttcggagcggacgccaccggcgcgccggtgaaagatggcgacgatcgttga

SEQ ID NO: 427765 - DNA, 714 bp, Serratia marcescens
atggcgacgatcgttgatggcgagctgaatagaaaccagctgcgcgcgctaaagcaggcgctgaaagacaacgagatgcccagagcgaagcgccagcggctgctatggcgcatcgccaaacgcgggatcatcacggcatcaaaacgcaatgcccgcaaacaacaggcgcctgacggcacgccctgggcgccgcgcaaacgcgggcggcgcaagatgttgcgccagctgccgaaactgctgaaggtgcgggaaatgccggagatcgaagcggtgcgcatctacctgcagggcggcaattatcgcagtggttcgaagcgtatgccggcagggacgatcggcgccattcaccacgaaggcgcgcagataacctccagggctagcagctaccagggccagccgagccaggaaggcaaaccggcaacccggcgccaggccaagcgcctgcgcgacctgggttacaaggtgtggtggaacgggaagtacgtcaagccggcagtgagttacatcaccgcagagctgtcgatgaaaaaagccggctttctgattaagaaactggcgcgcaaaccgagcaagcaaacgtggacgattgatctacccgcccgcgcattcctcggcgtaagtgacgatgaatttaacgtgatcctggcccgccagctgcaaggcatcgggttcggctgggaagtcaaagcacaggatatcaaggggaaactatga

SEQ ID NO: 427766 - DNA, 1122 bp, Serratia marcescens
atgacctggccgagtgtagatattaaccagctgaaccagtaccagggcacgccgaccgaaatcgagcgggttgtcctgttcgtcggcatcggcgccaccaatgccggcacgctgcaaccgctgaacagcaacaccaatctggacaccgtgctgggcgctgccgacagcgtgctgaaaagcaacatcgccgccgcccgccggaacgccggcaataactggtttgcctatgtcgccatcctggccgcagatgcaaaaaccgccgactgggtggccgccgtcaaaagcgcccagcaaaccgcctcagtggaggggtttgtcctgtgcatggacattgccgacaaggcggacatcaacgcggcgatcaccctgcgcgccgatctcattgcgcaaaacagccgctggctgtgggcgattttgtccgtgggcggccccggcgaggccgagacgtgggcgcaatacggcgcccgcctggcaaccctgcaaaaagacatcgccggccccagcgtgcaactggtgccgcgcttgtgggggaatgaaccgggcgtcctggccggccgcctgtgcaaccgttcggtaaccatcgccgacagcccggcccgcgttcgcacgggcgcgcttatcgatctggggcgcgacgagttgccaacagacggcgccgacgtaccgctggatctgtctgtgctgcaggcgctgaacgccaaccgctacagcgtgccgatgtggtatgtcgactacgcgggcctctactggtcggacggccgcacgctggaagttgacggcggcgattactcggtgatcgagtacctgcgcacggtagataaagcggcgcgccgggttcgcctgctggctatcccgaaaatcgccgatcggtcgctgaactcgtcggatagcagcatcgccgcgcatgaaacctatttcagcaagccgatgcgagaaatggcgatttcatcccagattaacggggtgacgttccccggcgaggtgaaaccgccaaaagacggcgacgtaacgatcacctggctgaacagcaccaaggtgcaaattttcatgaccgcgcggccgtatgccagcccgaaagagatttcgatcggcatcctgctcgacaccagcctgacggagtaa

SEQ ID NO: 427767 - DNA, 456 bp, Serratia marcescens
atgagtaaacgtatttcaggcatgagctttgatttcgatatggaaggcgccgccatccatgccgaaagcatctcgctgaatatcaccgacaacaccgccgtaaccaaaacccgcggcgtgccggacgggtacaccgacggcgatgtcgaggcggacggcgagatcgagctggacagcaaaaacctgatcgttgcccagaacgccgcacgcagtgccggcagctggcgcggcattccgccgaaagatttcctgttctacgccaaggccggcgacgaggaaatgaaggtcgaggcgttcggctgcaagatcatgatctccgatctgctgaacatcgacccgaccagcgcggacaaaagtaagcacaaaatcaagtacatcgtgacgtcgccgaactttgtacatatcaacggcattccgtatctgtccgctgacgatacgcgcgatctgttgggctaa

SEQ ID NO: 427768 - DNA, 300 bp, Serratia marcescens
atgcaagaccatgaaaagaaaatcctgaccctggccgccatcggcgccgttatcgccctggggcaggtgttgaacagcaaagacccgatcaccccgcggctgatgattggccgcatcatcctgggatctgctgtctcgatggtggccggcgtcgcgttggtgcagttccctgacctgtccccggtggctatcaatggcatcgggtgcgccctggggattgccggttatcaattcgttgaacgctggctacgccgccgcggcaacaagtgggtacaaggggaaaacaatgacgttaagtga

SEQ ID NO: 427769 - DNA, 342 bp, Serratia marcescens
atgacgttaagtgaaaagcagcagctgtttaccaagctgatcgcccagctgattttatgggccgatgagaaaggctatcgcctgacgttcggtgaagcataccgcacgccggaacaagccgcgctcaacgccaaaaaaggcagcggtatcagcaacagcctgcacaccaagcgcctggccgtcgacctgaatctgttcatcaacggccagtaccaaaccaacagcgcggcatacctgcccctgggggaatactgggagagcatcggcggcagctggggcgggcgtttccgcgaccggccggacggcaatcacttcagccttgagcatgaaggcgtgcgctga

SEQ ID NO: 427770 - DNA, 381 bp, Serratia marcescens
atgatccaggcgaagccgttcatcctgctggccgccgtatttttggcgggctggttcactgccgggctgtacagcgacagccagcagctgatcattgagcgggccgccaccgccggcgccgagaaatcgcgccggtataccgaacagatggcgggcgagtcggccaggctgctggaaagcaaattagcggagctaagcgcaaatgaaacgcacaccgaacgggttattcgcaccgaagtggttaagccgattttcagcaacgtgtgcgctactgctgagtatgtccggctgttcaacgccgccaccgaccgcgccgagcgtgccctatcaggccaatttgttggcccgctgcccggaaacgctgccgaggctaagcggtaa

SEQ ID NO: 427771 - DNA, 267 bp, Serratia marcescens
atgagcgataaagtaaaaatcgagattaaagtcaacggtctggatctggtattcgagccgaatgtcatcgccttcaacaaatttattaacgagatgtcgaccgacaacaaagtcgcgccggcgtccaacttcctgcgccgcatcgttcaccctgacagcaaagacgcgctggacaagatcctcgccctgccaggcggcgcggtaaaactggccggcaaggtcaacgagatttactcgccagagctggaatttgaagtaaaaaactag

SEQ ID NO: 427772 - DNA, 1914 bp, Serratia marcescens
atgaaacagctggaagtgatgctatcgctggtcgacaagttcacccagccgctaaaacaagccggggccgggttaaaccgctttgccaaccagacaaaaaatggactgcatcaagtcggagctggcgccgtggggttgtggggagccggacaagcaattaagggatttctgggcccggcctacgacatgaaccgcgcacttggcgaggttcgatccctgggcgttgccgagaaagctttgtccaatctgtcagacgccgcgctgatgttctccatgcaatacggtggaagcgccgccgatgtcgtgcgctcctcttacgatattcaatcagcgatcgccggcctgcagggcaacgagcttagcgatttcaccgtcgcttcgggcgtattggctaaagccaccaaagcagacaccgccgttatcacgaagtacatgggcaccatgtacggtattttccagaacactgccgacgcgatgggccggtcaaactgggtaaaacaaatcgccggtcagaccgctgaagcagtgcgcgtttttaaaacctccggtaacgatatgtccgccgcgtttactacgctcggcgccgcggcaacctcaagcaaaatcgacatcgcggagcaaatggccgtgctcggcatgctgcaagccaccatgagcggcagcgaagccggcaccaaatacaaagccttcttagccggtgtgggtaacgcgcaaaaagcccttggcctgtcgttcactaacaccgatggctcgatgaaaagcgttgtccagatcatggggctgatccagaaaaaatatggtgacctgtcgaaagttgccgactctgatctgattaaaaaagcctttgggagtgatgaggccgtcgcgatggtgaagctgttggcgacaaacaccgcgggactcaaagaaaacatcgattcgctcggccgtattaccggcatgaagaatgccgagaaaatggcaaagtcgatggtagatatttgggaacgcctggccgctatctgggaaggttcacgcatcatcatcggccgcacgctgttgcccgtcctcgatccgctgctgcaaaaggtggcggccgccggtatgcaattcgccaaatggatgaaaatgttccccaacatcgcgcgctggctcggctatatcaccctggcgatcctgagtctgaccgccgtcggagcgttggcaaccatgatgatcggcatcgcccgcgtcgcctggggcggcttcatgatcttgctgaagctgttgcgcccggttctcttggcgctgcgtctggcgttcttcctcactggccttgcggtcaacttcatgtcatggccgctattgttaatcatcggggctatcgccctgctggccgtcggcgtatgggcgctgatcgcttattgggatgaactgaaagccgccatcatggacaccgccgcttttcagtggttgatggggatcgtgatggtggtcggcgccattttccgcgtcacctgggcgatgattaaggcgggctggcaggacgtggtcaacttcttcaccggcctgtcgcccgtgcaggcgttcaccgactttaaaaacaccatcatcgacgtcttcaagggactgtgggactacctgaaaaacagcttcgcgcaaacctacaactggatcgtggaaaaactgaacatgatccccggcatcgacatcgagatgaaaagcgtggcgccagaagcgaccccagccggaagccaacccggcagcgctccgctgctgaccggcgcgaataccgtttcaaccgggcgcggcggcatcatgggccaggtgagccagtcaaccaacaacagcagcagcgccagaacccagacgatcggcaccgtgcaatataacgtgatgcagccgttaaccccgcagcagctgcaagaaaacatggagctatacgggcatggctga

SEQ ID NO: 427773 - DNA, 339 bp, Serratia marcescens
atggctgacgaaaaactgtatatcgacctgctgatcaccgaccgcgattttacgctgaatgccggctttgagccggtgctgtgcgacaacctggtcagtatcggccaggacatcaaacacgcgatcatggaaagcggcctcgccacgttgctggtcgccgagcgcagcccgacgctgcgcgctgacatcctcttgcaaattacgttgctggtcgaggatgacgtgaggctggttcccagcaccatctttgtagctgaggaaacccgcggccgcctgctgatcaccgccgacacctatgattttggcccgctcaacaccggggtgacctatgaccaataa

SEQ ID NO: 427774 - DNA, 1185 bp, Serratia marcescens
atgaccaataaaccagccgttgattttgaggccgcactgcgcgccggcggcatgccgaccacggaagccgaggtaaaagccgagtttcagaaggtggtcgacgccgagggcttgatcaccaacacctcgaaaatgtcgcctttctggcgcctgataacggctatcgtgaccaagcctgtgatctggctgaaagacatcctcgttaacgtcgtgatggcaaacatgtatctcgccaccgcttcaggggcttatctggacttgttcgcctgggcggtcaacctgtcgcgtaaagacccaaccttcacccagggcgcgatcactttcttcaaggctgacccgacactgttgatcaccatccccgccggcaccgtgatccaaacggagcgcatcgacgataaggtttatcgcgtgatgaccgttgcggaggtggtgatccccgcgggaacggccagccaggcaattgccgtaaaagccgaacaaagcggcaccgcctacaatctcgcgccgggctacttccgcatactgccgacggacattcccggtattgcgcgtgttgagaacctcgacgactggctgacgcagcccggcgccgatcgcgagtcagatgacgagctgcgcgaccgctgccgaaatcaatacaacctcgtcggctcataccatatcgatgcggtctatcgcagcatgatagccagcgtcgccgggttgagcaccgatcgcgtgtatttcgagcacgacgccccgcgcgggccgggcaccgctaacgcctatttgctgcttgataccggcattccggcggactcgttcatcgccgcggttaacgatcacatcatggtgcagggctaccacgggcacggcgatgacatgcgctgttttgccatgccggagacgcagcacgatttaacggtcaccgcgtacatgttcgccacgctgaacttgagcgacgacgaacaggcggacttgaaacaggatattgaaaactttgtccgctgtgccttccgcgataacgccacctacacggtaaccaaaacctggccgcacagccgctttagcttctcgcgcctggctgaagagttgcacctgcagttttcggcgctggaatcggtcaccttctcactggatgacatcatcagcggattatcgatcccgcgcctggcctcgttaaatgtggtgctgaccaatggataa

SEQ ID NO: 427775 - DNA, 603 bp, Serratia marcescens
atggataaaccgctgatcaccctgcccagttggatgaacaaaggcgagccgaagaaactggcggccgcctgcgtcaacttctgggagaaggtcaaaggctggatctcgtttccactggcccagggcgacccggaaacctgcacggttcagatcctgaacctgctggcataccagcgtgatatcgatcgctttgagggtgagccgctgtggttgtaccggctgcgcgtcaaacacgcgtttgttaacgcgcaggacagcggcagctttatcggcttcaagcgcatttttgaacgcctgaaaatcggcgacatgcagcagcttgagcgccagccgggcgtcgattgggacgtcatcattattcgcatcaacgacaaccagctggccgctaacgccacgttgatgaatgagatcatcaggaaatacggccgcacctgccgccgatatcggttcgaggtgcttaacgtcgcaccgctgggcatgcgtgccggttggttcgataacgatcaccagctgatcgccgcgcggccaggcaaagacgcggcgattaccaccgaaagccggctgtatatcatgaccgaagccggcgagattttgacagtttaa

SEQ ID NO: 427776 - DNA, 1548 bp, Serratia marcescens
atgtcagccattatcaccagaaaatacgagcagtgggcggcaagccaggcggccaataatctgccggcgcgcccggatacgtttgtttttgcctatatcccagggcaagaccctgaagccgagatcagccgcgacgagccattgccggcgccggccaacatcgtgcacaccgcaccggtcatgcaatacggcatgctcaacactgacgcggtggttttctctgtggtgctggacacctcagtcggcgattttgattacaactggatcgggttggttgaccaggccagcaacacgctatgcatgattgtgcacacccgcacccagcgaaaaatcgcaaccagcggccaggaacagggaaacaccctgacccgcacgctggcgatggaattcaacggcgccgccggcaccacgcagatcagcgtgaccccgcaaacgtggcaaatcgatttttcagcgcggatattcggccaggatgaacaactccgcctggctaattgggacgtctacggcgaaggcgccttcttcggcgatgccttccttgtcgttcgcagcggcgacacgttcaccgcgacagcgggaagcggctacgttggcggtattcgggctgagcttgagactgacacccccatcgacgttaccaaatggacaaccacggtctgggccgatgtaagttggcaaggcgccacaaccagccgctggtcggcacacatcgcactgaccgccgccgacaccctggccgactacaacgacgcccagggattcaggcattacgtcacggcgatcgcgcgtatcggcgctgacggtgcggtgaccgacctgcgcaaaaaaggctctcaaggcgagcaggaagccagccggctgtttctgcgcaaagccgccaacctgtcggacatgaccgaccccgccgccgggcgcgataatctgggcctgggggagctggcaacaaaagacgtgttgtacgcgcacgacgtcggcgcctacacccagggcgaagccgatcagaagtttttcccgcgcacaggcggaacaatcaccggcccgatcaatgttctgggtgatgttggcacacaaggcggcgttttcgttttccgcgaccaaaacggcattcagaccggtttgctcgctgcatatgatgacggctctctttcagtcatacgcagtgatacagggcgtggattcggtattgacgttaacgggaatttttacacgacggacaacataccaatttatgaatatggcgcccgtgtatatagcccacacaacacccccaccgaaggggctatgggtcaaatctggtggtggcgagacaaggtaacaggtctgatcaggcaaggtggctacattgaagattcgaaaagcgaaaagttcttaacgatcaactttgcgatcaattttccgaatgctgcaacggggttttcttttacacctgccgcagtaccggacaccagtaacatgaatatttctgttgcctcatttacaaacagcaatatgacaatttaccacggcatacaggaatataaattcttctgggaggctgttggatactga

SEQ ID NO: 427777 - DNA, 786 bp, Serratia marcescens
atgtgcgccacccgttggcatggctcgcattgcaggcaaaagcgggttgccaacgtgggcgccaactccgacggaagattaaaaatgtggaaatatgtgcagttaggttttccagatgatttcgcaccgatcagttgttccttactgactgtcaacccgtggacgtatggcgccggccaggtgacaccatccggtaattacctcagcccggagaacgccgtcaagtttttggccggtaagttaaaagccgccggcggcacgcctggcgccgttggcttcctgatcaccgccacgcaaagcgaccgttttctggatgacctggccgggtttgcggccttgctgccgatacctgatttgcaaaagactgcccgtaaagccgtggcgcaggctgagcttgcggtcagtaaaatgcagctgccggggctgcagggcattggcttgcctgacgccgcgccgctttcgctgagcacgacccgcaccgcgcagaatgcccagcgcatccaggccgccgccgaatctgccgccgccggcctgtcatttgacgacatcaacagcgcgctgcaaagccttgaagacgccgccagccaggcgcagcaggcagcagaacaagcgctaactgaactgaaaggccgccgggttaacgcctggatgttcaccgatgaggggcatccgtccaacatcgctaacaacatgctgaacggtatccctgaacctgacgcgattttcaccctcggcgcgctgtttgtgggcgatgtcggcgagctattacggatggtaaaaccatga

SEQ ID NO: 427778 - DNA, 558 bp, Serratia marcescens
atgacgatcatcatgctggcgctcgatggcgaggggatcccgctcaaggacatcaaggtttccccgaaaatgaccatcgaaaccaaggacaaatcggggcaatcatccagcaccacgcaatcagaaaacggcatcaaggccaaagagctgagcgtgtccggcctggtcgacttcaaggataaagccctgctgtcgcgcatattcgcgctggctgaagccaaggacagcggcggcgccgggcgacgctatcgcatcgccagcccggtggcgcaggcgatcaacatgaaacaaggcatgtttaccggcacgattgaagccactgaacagaccgacaaattagcctggcaggtcagttttacgctgacggaacaactcagtaccgccgagaaggccaaaggccgcaaagccgccaacgccccggccagcaccacgaaaacgcaaacggccgccggcaccaccgccacagcaccgtcagacgacgccgacgagcaggaaaaggaactgaccggatttgaaaaaatcttgaaacgtgttgatgaccagttgggggcgctatga

SEQ ID NO: 427779 - DNA, 1668 bp, Serratia marcescens
atgaaacccgtcgttacgctaaaaatcggcgccgtcgatgccaccgtgtcggcctacgaggtggtaaccgacctgaacgataccggccgcggttttgtcacggcaaaaatcgagggcgacgccaccggcgcgatcgtccgtctcgatctggggtacaacgataattcgtatcgctggtttaccgggtatgttgagcgcgatcaggtatcagataacggattccgccgactgttcgtgcgggaaatgacggggatatttgaaaagcgttggccgctttcaatgcagcacccaacgctgcgccaggtcacgcaggcgctaaatcaggcgagcgggatagaatttgtcttaccggtcgcggattatgtcgacacaccgatcccgcattttgtccatagcggcaccgggtggcagttgctgaacaccctgggccgcgcatttgggatcgatgattacatttggcagcagttgcctgacggttcggtctggctgggccgctggcaagattcgcgctttgctggtttgccggtcgacatcccggccgagtttgcatcgagcaccggcgcgggtaactcgttgaccgtgccgcttatcccttcggttcgacccggcgccttggtcaacggccagcgaatcacccgcgtggcgatcaaagacggcgacatgacgctaacctggacaccgcttgacgccagcggccagcccaaaattaagcctgcattccagcgccagcttgaacagttaaaccctgagatcgccgccgggctgcacttgccgaagctggcgcgcgtggaaaactacagcgagccggccgaactgggcgacattgccgacccattccggccaaagtatgccgtcggcgtgcagctgcttgacgagaacggccaggacagcaaaggcaccccaacctatcctgcagtacagctaccggtgacgatgggcggcgacgaaagcggcttcatgcaatacccgccgcctggcacgctggtagagctggcattccaggacggcaggcaagacaagcccttcattcgccaggtgctgcccagtaatgccagcctgcccgccatcgcgccgggcgagcagctacagcagcagcgcgctgaggtgttccagcgcgtaacagcgccgggcgactggcaccgtgaaactgaccaggcgatcagggaggtctcagcatcacgcaccgtagaggccgacagagaaacgcgtaaggttatcgatcgtgagatcaccgtccaggccgacgacagcaagaccgtgctgggcacggcgagaaccaccgccggcgccatgacgcatatcgctcgcggcgactacaccgtcggcaccagcgcgaacttgaagacagcagccaaggccgccgacgagaagatagcccaaagtaaaagcgttgatatcggcggcgcactgaccgaacgcatagccggtttgcgtcagagcatttccaccgcgctgcagctgcaggccggcaaaaccacgatcggcgacggcaccacaaacctgttgacgctgttgatggaaaccctcgacctgatcgacaccctggcacagcgcaccgcagagcacacccatagcaacaccggcaccccaaccaacgccagcgagatagcgcaagcgtcctcgaccgccaccgccctgaaagggaagtacggtcacctcatcggctaa

SEQ ID NO: 427780 - DNA, 1053 bp, Serratia marcescens
atgaatgcaaagcgacaggcattggtgatcggcgccaatggcgtgattgggcgccgattgattgaggagctgaccggccagggctggcaagtggtgggcgtctcgcgtaggggggggcaaccggcgccgggggtgcgccacctgcaggttgatctgctggatgcggcggcgacgcgcgacgcgctgcggccgctgagcgcgattagccacgttttctatgccgcctatcaggatgcgccggactgggcggggttggtggcgccgaacctgcagatgttgcaacacgttgtcgaggggctggagccggccgcaccggcgttggagcacatcagtctgatgcagggctataaggtgtatggcgcgcatttggggccgtttaaaacgccggcgcgcgaaagcgacgccgggcatatgccgccggagtttaacgtggcgcagcaacagtatctggcgcagcggcaggtcggcaagcgctggcgctggagcgccattcgcccgagcgtggtggggggcttctccctcggcaatccgatgaatctggcgttaagcatcgcggtttacgcgtcgatcagcaaagcgctcgggttgccgctgcgcttccccggtaaaccgggcgcttaccacagcctgctggaaatgaccgatgccgggctgttggcgcgcgccacgctgtgggcggcgaccgagccggcggcggccaatcaggcgtttaatatcaacaacggcgatctgtttcgctggagcgagatgtggccgaaaatcgccgcttactttgggctggaatgtgcgccgccgctgccgatgccgctggagagcatgatggcggacaaagcgccgctgtggcgcgagctggtgcagcggcaccaattggccgaaccggactatcgcgcggtggccggctggcgcttcgccgatttcgtcttttcctgggactatgacatgttcgcggacggcagcaaggcgcggcgcttcggtttccatcagttcgtcgaaaccgaagccatgtttttctcgctgttcgatgagttccgccgtcgcggcatcatcccctga

SEQ ID NO: 427781 - DNA, 183 bp, Serratia marcescens
atgtttaaacagattgcaccttccgcggccgattctgttccatcgctgatgggtgtctatttgcaggatcccaatccgcaaaaagtgaatttaggcattggcctctattacgaccggcagcatgattttcgcccggccgcatgtgcttgccggggctcaaccccggcaatattgactacgtga

SEQ ID NO: 427782 - DNA, 618 bp, Serratia marcescens
atgtccaccatcaccctctacggcaccccgctttccggccacgttcaccgcgtggcgttgctgctgcgcatgctggcgctgccctatgaatgggtagaagcctcggcggaggtacgccagagcgcggcctttcgccggctcaacccgttcggccagatcccggtcttgcaggacggcgatctgacgctggccgacagcaacgccattctggtctatctggtgaagcgctatgcgccgaacagccactggctgccggaacagccggcggcggcggcgcgagtgcaggcctggctttccaaagccgccggtgaagtgcgctacggcccggcctcctgccggctgatcgcccagttcgcggtgccggaggattatcaggcggcgcgggcaatcagcgatcgttttctgccgcagatggagcagcacctgagcgagcgcggctatctggccggcgaacaggcgaccatcgccgatctggcctgctacagctatgtggcggtcgcggccgaaggcggcatttcgctggcgccttaccccgccatacgccgctgggtggcgagcatcgcggcgcttcccggcttcttcgccatgccggccctgccggaaccggcggcgagctga

SEQ ID NO: 427783 - DNA, 10017 bp, Serratia marcescens
atggacgcgctcatcgcttcaccctatacccacacattttggaatgagtacatgctcaatccacactcctgcgagtacaacctggtgctggatcagacgattgagggagaattggacgtcggccgactgcgcgcggcgatcgacggggtttgccgtgactatattctgtttcaccacgttctggatgacagcgcctcgcaattacgctgggtaaggtcggcgaaaaaaattgcgctggaaacgctcgatgccgattgcgatgtcggtaagttaatcaacacgccgttcgatctccgggaagggccgctgtgccgcttctacctgattgagctggctccgcagcgctataacctgatcattgtcgttcatcacatcctgatcgacggcctgtccggacaggagttctacagcgccgtttccgcctattacaatcgcggcacggcggtgacgccgccgcaggtggatgaaacggacatcagcacattgtaccggcgctatgaggcggatatcgcggcgttgaaacacgagttcggttccgcgtcattctggggcgacatgctggccgaatgcgccccgcgcgtggcgttgccttatctccccggcgcagcggccgaagcgcccggcgctggcgaagtgcgttttgcgttgccgttcgctgagtggcaagcgctgaaatccggcgtcaggtatgccaatcctttcctgatcttcaaaacgctgtgggcgctgctgatcgcccgacaatctgcgcaggaaacggtgcatatcggttatcccatcgcgccggagggtggcgaggcgctgttcttcggcgcacaggtcaacaccgcggtgtttcccttgaccctcgccccgggagccacgttcaatcagctgtaccgcgcgacgctggcctacagcaaagcgctcaaggtggctggcaagctgcggcacagccaattaccggtttatgacatgctgagcctcagtccggtgcgtcagctgaacgtcaactttacccaggcttaccttaaagatgcgccgctggcgctcgaggggtgtcgcattggcgtcaatcatcggttcaacgtcgatctggccggttcggaactgctgctggagtatcagcccagcgagcaggcctttgagtttcgcctgcgctaccgccccgatctgttcgacgcgacccagatggcggagatggcggagcagtatctctggctattgcagcgcgcgttaaccgaaccggatgcgccgattgtcgcttggccgcagctgacggcgcaacaggttttgcgctgccgcgacgcctgggagagcgggcctgcaacggccgacgcggaagcgacgctgctcgacggcttggcccgccaggcgcgccgtcacccggaacgcatcgccgtgaccgacgccaaaggatcgctcagctaccgccagctggcgcagcgcagcgatcgtttggcgctgcggctgcaggcggagtatcaacggctgcgcggcgtggccatgccgccggagacgctgatcccgctgtatctgcagcgcagcgtggaggcggtggtggcgatgctggccatcatgaaggcgggcggtgcctatgtgccgctggatcccgccgcgccggcgcagcggctggattatatcctgcaagaggtaaacagcccgatcgtcctgaccgaaagcgcgttgcaggccgcggcgcagcgattggcgccgggcgatctttgcctgtcggcggatgaaccgctcgccgatgcggatgccgcgagcttgccgcgtgtggacgcccggcagttggcctacgtgatttacacctccggcaccagcgggcggccgaagggcacgctgtgcgaacaccggggtgcagccaacatggtgcttggccatacgcagcgtttgttgcgcaatgagccggatgcgctcaactgcctgcagttcgcctcgctggcctttgacgcgcacgtctttgaggtgttcatggccctgggcaacggccaccggctgttcatcgcgagcgaagcgcagcgacgagatccggcgttgttgtgcgaacagatgacggcctggtgcatcgaggcctgcttcctgccgccggcgctgcttggcaccttccctgaattgccggcttcggtgcgctatctcgcgaccggcggcgaggcgagcgcgcaggaagcgctcgaccattacctggcccgcggcatgcaggtcgccaacatgtatggcccgaccgaagcttcggtcagcgccagcctgaatatttatcgccgcaacggcgcgcgcaatatcggccacgccatcgccaacatgcgttgctatgtggttgacgagcacgataacttgctgccgctgggggcggaaggcgagctgtgcctggccggtgtcggcctggcgcgcggatacctgaacctgccgacgttgacggaggccgcgttcaccgccaatccttttgaactgcgtgaaccgtaccggcgcctgtaccgcaccggcgacagagtgcggcgcttggccgacggcagtctggagtacctcggacggcacgatcagcaaatcaagatcaacggctatcgcatcgaattgggcgagatagaaatgcagctgcgcgcgctgcctggggtggccgaggcggtggtgagcctacgtcccggcacggcggatcagttggcggcctggtatgtgccgcaacctggcgcggagccggaggccggcgacatcttgcaacggctggcggcgcagctgccgcactacatgttgccctcggcgatgcgggcgctggcggcgctgccgctgacggtgagccgcaaggtcgattaccgggcattgccagaaccgctaccgatcgagccgcaaacggcgtttcgccggccgtgttcgccgctggagattcgcctgtcggcactgttcaatcggctgctggggggcgatgtcggcgtggatgacaacttcttccgcctcggcggcaactccatgatggcgatcaggctgtgccacgaagtgaataaactgccgggggcgaagatctcggtgctaacgttgaatcagcacccgacggtggccgcgctgagcgagcacatcactgcccagcgtcaggcgccgccggacgagctgccgatcctccccggcgggctgcgggaggcgccgctgtcgcttcagcagtcgcggctgtggtttgttcagcaactgtcggtgaacgccacgcattatctgtcgccggtgctgctgcggctgtcgccggatatcgatgacgaacgttttgcggagtgcctgcaggcgatcgtcgagcgccaccagatcttgcgcagcctgattcgccagaatgatcggggcgaagccagccagtgggtcagcgacaccgcgttgccggtgcctgtgctggcgctgagcgccgatgaatttgacgccgcgctgacgcaagcctgcagccagccgatggatttgacgcgcgagctgccgctgcgcgccacacgctaccgttaccgcgatgcggcggagcgggaaacgaccgtttgcctgttggtgttccatcacatcgtctttgacggctggtcgcttgaggtgctgctgcaggaattggacgcgcgctatcgcggcacgtggcgcgaggcgacagagccggcgttgcaatacctcgactatgcgcgctggcaacaagcgccggaaaatgtgcagcgccgggcggaagaattggccttttggcggcaagcgctggcgggctgccagcaactctcgctgccgttggactttttgcggccggcggtcttcgacgagcgcggcgacaacagcgaagtaccgttgccagcggcgctggtgaaggcgctggatgcgctggcgcgcagagagggggtgacgctgcatgcggtgatgctggcggggttcatgttgctgctgtcccgctacagcggccagaatgatgtcatggtcggcacgccgttggccaaccgcagccgccctgaactggagaatctgatcgggttcttcgtcaatacgctgcctttgcgccggcagatcgacccgcgccatcgcgtcgtggagtttgtgcggcaggtcgcggccacgacgctgcaggcgcagcagcatcagacgctgtcgctggaagcgctggtggacgaactggcgctgccgcgcgatttttcgcgccatccgctgttccaggtcatgttcgcgctggagagcgaaggaggcgcactggcgcgcccggactggctgtcggtggtcgacctgagcgcttatgaacgcaccgccaagtttgatctcacgctcacgctgacgccgcagggggagcagatgcgcgcgcgcttcaacttcgcttcggcgctgttcagcaaagcgtcgatggatcggttggccggctactatctcgccgtgttgcagcagatggcgcaccacgacgactggccgctggaaaatatccgtctgcaaccgcagagccaggcgctgccggcgtcgcccgccttcggctatgcgtttgaacgcagcctgcaacaggacttcgtgcagcatgcgcggcgcaatccgcaggccgtggcggttgtcgacgagcagggcgaaatgacttacggtgagctgcacgcggcggcgctgacgcttgccactcagctgcgcgtgcaagggcggatgaccggtgacgccatcgccgtcatcgccgacaaggggcgccggcagccggtagccctgctggcggcgctgatgtgcggcaaggcgtttttgccgatggaggcggcatggccgccgcagcggcggctgaacgtgatggcgcaggccggcatcaatacgctgctcagcgatgcgccctgggcctgcgccgagatcaatctgatcgaactgaatgccgcagggctggcggcgcagctgccgctgccggaacagcgcctgccggcgctggatgccgggcccgacagcctggcctatatcattttcacctcgggatcgaccggtaccccgaaaggcgtggcgatcgaacatcgcagcgcggtgaatatgctggaaggcgtgcggcggtatttcggcctcaacgagcgggatcgcagcctggccctcagcgcgttgagcttcgatctggcgatcttcgacattttcagcccgttgagcgccggcggcgcggtcgtgatgccagccgagcgggatcggaccaatccgcaggcctggtatcagctgatgatgacccatcgggtgacgcaatggctgagcgcaccggcgctgatggagctgttgctggattatgtgaacggggcggggttgacggccgggccggcaccggcgctgcgggcggtgatggtggggggcgactggatcgccacctcgctgccggaacgctgcctggcctgggcgccgcacggccgtttttgcagcgccggcggcgctacggaggcggcgatcttcaccatgctgtacgaggtgccgcgcggtcagaaaattcggtcggtaagcattccatacggcaaaccgttgccgcaccagcgttgctatatcctggacgccgggcggcggcccgccgcgccgggtgtccgaggcgaaatctatctggcgggggaaggcctggcgcgcgggtattacggcgatccgcaacgcaccgccgagagtttcttctggcatgacgagctgcaggagcgggtgtattgcaccggcgatgcgggccgatggctggaggatggcaacgtggagtttatggggcgcctcgatcagcagatcaaactgaacggctatcgcatcgaactgggggagatagaacatgccgcgctcgcctatccgggcgtgaccgcctgttgctgcgtgctcgtcacgcaaccgcagccctgcctggccgcgtattacgttgccgatgaggcgatcgcccctcaggcgctggctcagcatttgagccgccaactgcctccttacatggtgccgcaggcgctgatgcagttggcgcagctgccgctgaccgaaaacggcaagatagcgcgacaggcgttgccgcagccggaaagggcggcgcgtgagttcgtcgcggcgcagagcgaatgggagaacgcttgtctggcggtgtggcgcgatctgctgcagcggcaggatatcggcgtggaggacaatttcttctcgctggggggcaactctcttctggctatccaggcctgctatcagatcggccggcggctggcgcgcgaggtcacgctgagcgagctggggcgcttcccgacgatccgctcgctgtgccgcgcgttgccgcaacaggagcagggcgccgcgccggtgtcgatcccgccgctgcggcagcgcgagtatccgctctcttcttcacagctgcagctgtggtttatcgagaatttgaacggcggcggcaatctctaccacgtgccgatgctgttccgtctcggtgacgaggtgtgcctggcggcttacgagcgcagtttgcaggcggtggtcacccggcatcaggtcttgcacagcctgattgtccagatgccatcccaaagcgccgtcgcccgtgcctgtgaactgaggctttcgctggagcgcgtgacgctggaggcggcgcactggccggacaggctgcggcaggatatcgaccggccgttcgcgctgggggcagaattgccgatccgggcagccgtttaccgggtggcgcagccggatggcgggtgggtgacttacagcctgattctggtgcatcacctggcgtttgacggctggtcgcagccggtgctgttgcaggagctggacgtgctgtatcaggcgcagcggcaagggcaagaggccgggctggcggcgttgccgttgcactatggcgactatgccgtctggcaacggcgctggctggaatccgctcaggcggatgaggcgaaggcgtattggcggcaagcgctggatggatggcaggcgctggaaatgccgctcgatttcgtgcggccggcccgcttcgatcatcgcggcgccaaccacgtcatcgcgctgccggaggccctgacgatgcaggcgacgcagttcgcccggcgccagggcgtcacgccgtttgcgctgtatctcgcggcctttaacctgctgctcggttacttcagcggccagcaagatattctggtcggcacgccggtcgccaaccggccggtggcggagacccgctcggcgatcgggttcttcgtcaacacgctgccgctgcgttcgcagatcgacgatgcggcgtcgctgaacgactatgtaaaccgggtctttgacggcgtgctgcaggcgcaacggcatcagaatttgccgttggatcagctgatcgagctgctgcaggtgccgcgcgatctgtcgcgccatccgctgttccaggcgctgttcgcgctggaggaagtgggggatgcgccggcctggctggcgccacaggatctgctggcgcactaccaggcggccaaattcgatttgacgctgagcatacagccggcgccgcagggcggcagggcgatcttcaactatgccaccgcattgttctcaccggccacgctggcgctgttgggcgagtattatctgaccatcctcacgcagatcgtcaatcacggggagcagcgcgtcagccagttggcgctggtctcggagagtgaaatggcgcgtcaacgcgccttccatcaatcctgtccgtcggcctacgattttgagcgtgccatccatcatgatttcatccgtcaggccgagcgccatccgcaacggctggcgatcgtcgatgaatggggcgaactgagctacggtgagctgtatcggcgcgcgctgacgctgtcgctgcagctgcgtcagcacgcggacatgcgcgccgataccatcgcggtgatggtggacaaagggcgggcgcaaatcattgcggtgctggcgattctgatggccggcaaggcttatttgccgctggacggcgcctggccggaacgccgccgcctggatatcgtcgcgcagtcgcagacccgaattatcctcagcagccgggagtgggcgaccagcggcgaggccaggctgttgaccatcgatccgcagggggccgtcacggcgttaccgccggcggcgccgggagagcctgtcttgccggcgccttccgcgctggcctatgtcattttcacctccggctctaccggcgcgccgaaaggggtggcgatagaacatcgcggcgcggtgaacagcatcatcgataccttgcgccagctggaactcggcgcggacgatcgcgggttggcgctcagcgcgctgagtttcgacatttcggtgttcgatattttcggcctgctgtcggtgggcggcgctatcgtgatgccgtccgaaaccgaacgctatcagcctgaggcctggcatcggctgttgatgactcagggcgtgaccttctggaactctgcgccttcggtgatgacgctgttggtagagcagttggaatccgccgcgtcgcaggcgcagtggccgcaactgcgcaacgtggtgctggtgggcgaggtgatctcccgccaactgccggcgcgcattcgtcaatggcggccggggtgccgagtcgtcagcgccgggggcgcgaccgagagctccatttggtcgatcctgtacgacatcccggagacgccgatcctggcgcccagcgtgccttacggtcaggcgatggcccatcagcgtttttacgtgctggatcgtcatctgcgcgtgctgccgccctgcttgccgggggagcaatacatcggtgggatcggcgtggcgcgcggttattaccgcaatccgtcgctgaccgaagagaaattcatctaccatccggagctgggggagcggctttatcgcaccggcgatgccggccgctatttgccggacggcaacctggagttcctcggccgtatggattttcaggtgaaaatcaacggctaccgcgttgaactgggcgaggtcgagcaatgtgcgctggcgttcggcgcgataaaatcctgttgcgccgtcgtgctgtcggaggcgcatcggcagcgcctggcgctgtattacgtcagcgaggcgccgctggatgaatcggcgctgttggcctttatgagcgggcaattgccgttgtacatgctgcctgcggcgctgatgcggctggaagcgttgccgcacaactccagcggcaagctggatcgcaaggcgttgcctacgcctgcggcgagcgaaccgcaggtttatgtcgctcccgcgaacgagctggaacagcagctgtgtgcgctgtggcaggcggcgctgcagtgcgggcaggtcggcatgacggacgatttcttcctgctgggcggcacctcgatcaaggccatttccctgtgtgtcggcatgggcgaattgatggccgcgccggtgccggtggtgcagctgttgcaaagtcgcacgctgaaaaacctgttggccgccaacgaacgccgcctggtcttgccgcttaaccgctgggcagagggcgcgcccgtcgtatggatgatccatccggcgctggtaggggcggaggcattccacgctttcgcccagccgctgcaggggcgattcaactgctatggcgtcgataaccataacctttaccatcaacccgctatcgactcgctcggcgatctggccgaacggtatctgaacgagatgatcgcctccggtctgctgcaaggcgccgggccggtgcgcattctcggttggtcgctggggggcattatcgcgttggagattgccgcccgcctggaggcgcgtggctgccgtaacgtgcaactgtatctgctggacagcttctaccggcaggctacggcggagttgcccttggatcagctgctgccggtgctgggcatcgaaggcgaggcggctacacgcgccatggccgcagggcaggcggagcgacggctgtctgaggggagtctgagccgcaggctgcagaccaccaaggtgacgctgtttaaggcgacggagaggaacccgcagttgccggaggcggtcacggcgccgctgctggcggtggcggataatgggctaggcgcggtctgtgagcggctgagggtcatcccgctggcttgtcatcaccataacatcctgctgtgtgaggaggcgatcggccaagcgctcaacgatgacgtttga

SEQ ID NO: 427784 - DNA, 879 bp, Serratia marcescens
gtgattaagggcatcactctctcggtcgtcgcctccatcttgttcggcgcgatgtattacttcacctctaccctcaccccgctgaacggcgagcaggtctacggctggcgcacgctgctgacgctgccgttcctgacgctgttcatggcgctgtccggcgattggcgcaaagtgggcgacacgctgggctggatcggccaacggccgcagcgtctgctgggcctgctgctcacctcggcgctgctgggggtacagctgtggttattcctgtgggcgccgctgcacggcaaggcgctcgacgtatcgctcggctattttctgctgccgctgaccatggtgctggcgggccgtttgatctaccgcgatcggctgtcgctgctgcaaaagctggcggtggcgtgcgccatggtgggggtgggcaatgagctgtatcaggcgggcggcgtctcgtggccaacgctggtggtggcgctgggctatccgctctactttattttgcggcggcgtttcggcaccgacaatctcggcgggctgtggtgcgagctggcgctgatgctgccggcggcggcctggttcgccttcggcgacggcggcgtggcggcgttgccgaccaatgccgagctgtattggcgcattccgctgctcggcgtcatcagcgccgtggcgctggtgtgttacatcctcgccagccgtctgctgcctttcagcctgttcggcctgctgagctatgtggaaccggtgctgctggtgatcgtcgcgctgctgctcggcgagagcatcggccaaagcgaatggccaacctatctggcgatctggctggcggtgctgctgctggcggcggaaggtgcgcagcacctgctgcgccgccagcgggtctga

SEQ ID NO: 427785 - DNA, 180 bp, Serratia marcescens
atgaaagatgcgcggttggtcgattatctgagccacatgcaacaggcggcgattgcgcacggttattttgatatcaaccttgaagtggtctgggcgacggtgcaaacggcgttgccggaactgctgacacagctggtggcggtacgccaggatgccgagaagttaaacgacggtgattaa

SEQ ID NO: 427786 - DNA, 291 bp, Serratia marcescens
atgcgaccatccattgttcttgcagagcatcgccaggcgatccgagaaacggttgggctgttccctgcggctaatccgcgtattttcggctcggtgctgcatggcaccgatcgggagggcagtgatttggatctgttggtcgatgcgttgccgggcgccacgttgtttgatctgggagggctgcagtcggaactggaagcgctgctgggtattcaggtggatctgctgacgccgctcgatttgccgccggcctttcgccagcaggttttggcggaggcccaaccggtatga

SEQ ID NO: 427787 - DNA, 513 bp, Serratia marcescens
atgtctctccgtttcagacaaacctttactcttttccccggcgttcgcctcaatattggtaagcgtggaatcagcgcgagcatcggtgtaccgggcgcgacagtcaatgttgggcaaaaagggattagagcaaccgtaggactaccgggttctggtttatcgtatacaacacctactttttcctacggcactaagcactcagttacccatccactgaatccgtctgctacagaaactcatcttgaaatgccggagacaacgcctggtaacgttccatcaaatgccaaaatttatatgcctcatgctggcatgaatgaaatttccagcgcttctgttgaagttctgacaagcacatctcttttacctttgcgagacctgctcgccaaagcacgtgagcaaagagctgaggtaaaagctgatttacaagaggccattgctgaagagtcaaaacaaaaagcgaattggctcgacgtaaatcaagcctattccgcttgttctacaagcgtcgtatag

SEQ ID NO: 427788 - DNA, 993 bp, Serratia marcescens
atggggttgttcactttggaagaaaaggaattcaaaaaggttgctaaaactacatttatgcgagagtcgatccttgaacgcagggatatccagtcagcgatagccaagaatatgagcgattttttgcctgactgcctggtaatccaggaagagtttaacaattgggaaaatagtcaacgtagaattgatttactctgcatcgacaaggcgtttaatctggttgtcgttgagctgaagcgggatgagcaaggtgcgcatatggaacttcaggcggtaagatatgccgctatgatttcgcaaatgacgtttaatgatgctgcagaatgctaccaaaaacgtcttgatagcgcaggtcttgctaagaatgcggagcaggagatactcaagttttgtgagcgagaggaaagcgagattgctgacttcaatactcaggtaaggattgtactaatctcggcagatttctctacggaagtgactaatacggtactgtggttgaacaatagtgggctaaatgtcagctgtttcaagttaagcccttatatgcatcttggtaaggtactggtaaattttgaacagataataccgctgcccgaagcaaaagatttcttggttagacagaagcgtaaagaaacggaggccagggatgccaaagaaaaaggagagaaggattattcgaaatttatctataagggagggatttataataaaagaaatttggcatatgaactgattaacgactggatcatagatgctaacccggatgatatgcaagcgatagcctctgtttttggtgatgatatccatcgcagtctgattaaggttgaacaggatgtgattgcgtcacggcgtaagcgcttccatgatgaaaccgttgagcttgcctccggtgagatagtactaattaccaatcaatggagtattggctctattcaaaagctgataaataagtttgccagtcttggctataacattgagatgcaccagcaagagtga

SEQ ID NO: 427789 - DNA, 1176 bp, Serratia marcescens
atgtctggttcttatgaagggtttcttggtgattcctttgactacagctcgcaaactttcaatgctgaaaaagcaaagcaggaagcagaggaaaaaaaagagaaattcaacattatattatttggtgcgactggcgttggaaaaagctcattagttaatgctgtttttggcgaggaaatagttaagtctggagcgggtaaaccagttacacagcacttggaaaaaattaaagtaccgaaaaaaggattagttttatgggatactaaaggaattgaatcgaaagattatgagggaacaataaatcaattaaaaaaagaaattaaatctagttttgatagctactctcatttggatgatgtcccacatcttggctggatgtgcattgatgcttcaggcgccagggttgaaccaagagatatagagcttattggaatattaaaagagtatgagatacctattgtaatagtattcactaaaactcttgaagaagacacagatgagtttgttcatgaagccatcaatgagattgacaagcatcatggaagttatgttacagataattatgtgcgagttaattcaaaagacaggaaaataggtaaattcattgttcctgttagtgggcttgatgatttggtagatatgagttttaaatgcctccccgacgctaagaggggagcaaagcaagcattaaaaaaggctcaaatggttaaaatgggcgaacgacttgaagctatgaaaaatggcgcgagaaatattgttcatggagcttctgctgctgctggcgctgtaggtgcttctcctatacccgggtctgacgctccattaattgcagcagtacaaagtggaatgatatataaaatcaatgctgagtttgaactggatacatctacatcaacaacgacatcggttgttgcgggaattcttggagttacagcagtcgctcaagttggcaaggccgttgtttctaatgcattaaaatttattcctggcgtgggttcccttctcggtggtgcaatctcagcagcgacagctgtcgcactcacccaagccgtaggccaagcgtacatacaagttctagtttcttactacaacaaggaaaccggaattgtagagttacctgaaagcgccacttcaatactatcagtatttaaagaacatttttccttcaaaaaatag

SEQ ID NO: 427790 - DNA, 711 bp, Serratia marcescens
gtggggaaaatcaaacagtctcgaattcttacaccaccacagctcattgaatatgacggtgagatcgtcggctatggctcacccgaattgcgtgtcgaaaccatatcttgttggttggctcggacggtcatttgtgccaagcattacagcaagcgaattgtcaataactcctaccttcatttaggggtattctctggccgcgaactcgttggggtgatgcaatggggctatgctctcaatcccaatagcggggcacgcgttgttactggtactggcaatagagaatatatggagttaaaccgcctctggctgcacgataatatgcctcgtaattctgaatcacgggctatcagctacgctttaaaagccattaaacagctctatccatccgttcaatgggttcaatcgtttgctgatgaacgctgtgggcgttttggtgtcgtataccaggccagtaacttcgactatgtggggagccactattcacgcttctacgagctggatggagagtggtatcacgagatcgccgccaacgccatcaaacgcggtggcgcgcgcggtagatatctccgagagaatatggatcgggcaacagttcatcgtttccagcagttccgctatatccgatttttgaacaagcgagctaagaagcggctcaacaccaagttattcactccacagccataccctaaaccagaggggcacgaatag

SEQ ID NO: 427791 - DNA, 540 bp, Serratia marcescens
atgaataaatacggcccttttgaactttatacgcccatgccaggcacgcctgccggagagatggctaagcgcatcaaagtgcaattcatctgcacccctgataaagaggattggtacgaactccagaagacatttgcactcaacacgctaaaagtggtgtacgccgagaacggcgtaatcattcaggccagcgacgatgtcagcacgttatggcccgttaacgccgccgtggcggaaatccccacagagcaaatacccaaagggtttacgctgccgctaacaagtgcggactggcaatacaacggtcagcgcattgttccgcgtgtgtatacaccaaaagagcagcaggcaatggcagaacgccgcaaacaggcgcttatggtggaggctgaatctgtcttggccccgctggaacgagcggtcaggctgggaatggctactgacgatgaaaaagcgcgtttgaatgcatgggaagtttactcggtcaaactcaatcgcgttgatactaataacgccgaatggccggccaaacccgagtga

SEQ ID NO: 427792 - DNA, 1389 bp, Serratia marcescens
atgtattttttagataataacagcggcgttaatgccatgccgccaatcgcaccggttaatagcacggcggtacgctggtttaccgaaggctctggcagccttccgccaagctggccgggcatggactggtttaatattattcaggccgaattaattggcattctgactgctgccggcatgtcgcccgataaggtgcgtgtagaccagttagcaacagcgattaaatcgattattggtagcgacgcgctgctgaaaaagaatcacctcagtgaaattaaagaggctggcgcagcggcgcagaaatcggccagggataatttagggctaggaacggcagcgacaaagaacgtagggacagccgctggtaatgtaatggaagtgggcgcatttggcctggggacggggccaatacatctagctgacgcctacggtaatatcgttgaatttttccgcgtcaacgcgagcagcgccaaccgtccgggtagtaatagcgcttacggttgcgtgaggctgcctatcgacggagcgccaacagcggcgtacttggcggttggtggcgacttaagtacttgggttggacaatccacgactcaggggaaaggcgtgacgtgggcacgtgtttataccaccggatataagcccagcgctgccgatgttgatgcttattctaagtctgagtcagatggccgctatttaaaattaaccggtggtgcacttaccggccctgtttcgtcaaccagttggctatcggcggcatcgatgacggcgcagtatcacacagtgcccacgggtatgcctgagggggccggtgcattctccgatcaactggatagaaaagcaccgttctatcaacctaattggcaatggcccgtaacttctggcggtctttatgtaccaatagctaaaggtgtggcgacccgacaaggacaaggttatccatccgcagtgagttttggatatttgctcagtggtacgccgagttttgctcaagcctgtatccacgttaagggagataacgccgattttaattggcgatttgacgcaaatagtggcaatttttactgccccggtggggtttatgctgccggagctatcctccatgttgacgggaatattaccgggaatatctggggtggatatctcagtgactggttaaataacaacatcaacaatcgcgcaacttgggactatgtcaatcaaaactttgttcgcgatattcgtttagccagccggggagaaattatcaccgatggctcattaactgaggctccatggggcgcggtcattactggcggtaacggcaatgaaggtaatcaggtagggattatgttattccgctatctgcaaaaaaacgttaacggcaactggtatacggtaggatacgcatga

SEQ ID NO: 427793 - DNA, 534 bp, Serratia marcescens
atgacaacaacgccgcaccagcaggctttcctgcaactgctgccgaacggtctggcctgggataaacgccctgacgcgccgctcagtgatttgagcctggcgctgtcaacgtctatgggtgccgctgatgccattggcgatcagctactggccgagcgcttcccgaacaatgccacgttgctgctggaagattgggagcgctttttaggtctgccggattgtgctggtgaagatgcgacgatccaaacgcgccaaattgccgctgctaacaaaatgcgcatggttggcagcctgaataagtatttctacgaagatttagccaggcaatacggttatgacattgagttgacaccgtctgacgacggccaatatacgacggatgtgaacgttaaaacgggcgtgacgtatcgcaatgcgaccgtgctggataattgcttaacaccactgcgcgtttatgacgccggcacgttggaatgtttattagagcgttataagcccgcccatcaggtatttaaatttatttacccagactga

SEQ ID NO: 427794 - DNA, 1080 bp, Serratia marcescens
atgccgtataacgcaccgtcattatcgaacttgatagcgcagacccagcaggatatcgagcaacgccttcctggctcctggccacaggtcagagagaaaacactggaagcgctggcgtatgcgcaagccgggttggcgtccggggttcatgagcatttgtcctgggtcgcccggcaaatcatcgccaacgaggccgacgaagccgagctgctcaagcattgccagttttggggcgtgaagcgtaagcaggcaagccgcgccggcggtagcctcaccgtcaccgtttacgccgccgtgaccatcccggccaatacgcgctggcagcgcccggacggggccatattcaccaatgccgaaccgctgagcaccgacaaggccggtaactttgccgtcaccgtcgcggcggtgaatgccggcattgagggcaacacgccaaaagatacgccgctgacgctggtcacgccgttggattcggtgcaggcgcaagccacaaccagcggcattgtgggcggtgccgatatcgagtccgttggcgagctgctcgctcgcctggagtttcgcgtgcaatatccgccaggcggtggcacgcagcatgattatgagcgctgggcgcgcgaatgcgccggcgtgacacgcgcctggtgtttgccaacctggaagggacaaggcaccgtgggggtggcattcgtgctggacggcaacgaagatattttcccgtcgccagcggacgtcaaacgggttgatgattacatctccgggcataacgatccggtcacgggccagcttgtcggtaaaccgttaggcccgatcgtgaccacgttcgcgttaaccccgcgcccggtcgatatgacgatccggatctcgccgtctaacgacgagacgaaaatggccgtcaagaaggcgctggtcgccctgttttacaacgaaagcaagcctgccggctccatcataccgtcgcacatcaaccgggcgattgccggcgtctcgggccttgtcgattttgagttgatctcgccgacgggcatctcctatgccggcgcagaagaattactcaccgtgggggctatcacatggcgatga

SEQ ID NO: 427795 - DNA, 438 bp, Serratia marcescens
atgaccgatatcgcgatagtttgggtgaacgggcgcggcaatattcagcaagccggcatcgatatgctgacggacgaatcgttgacaacagaagtaatcatctcactgtttactgaccggcgggcgctggactccgacgacctgccgggcggcgacagcgatcggcgcggttggtggggcgacagctaccgcgatcggcccatcggttcccggctgtggctgctgtctcgcgagaaaacactgcaatcggtactggatcgggcagcggcctacgcgctggaggccttgacgtggctaaagcaggccgggagggtgaataaaatcaccgtatccgccagccaaccgcgcgagggctggctccagttggatatcgagttgcgtctaccgtccggctctaccgttcccttttcatttaaagcacagtttaccggggtttaa

SEQ ID NO: 427796 - DNA, 591 bp, Serratia marcescens
atgaatgaaagcaccttttcgcgtctcaccgccccgatcatgcgtcgcctgcgtctcatgctgggccgggcggtggtcaatatcgtcaatgacggcctcaaggcgcagaacttgcagatcaccatgatgggcgatgatgttcccgacgacgtggagcgcttgcagaactacggacaaatcagcgtaccgctggccggtgccgaggcgatcattgcctgcattggcgcgcaaagcgatcacagtattgccctggtggtggaagaccgacgttatcgtcccaccggtctgcctgccggcgacaccggcatttaccactatgagggccaccgcctgcgtctgaccaaggacgggcgcgccattctgacctgcaagacgctggagatttacgcggaggaaggcacgacggtggataccccgaaaaccacctttaccggcgaggttgagatccagaagaacctggccgtccaaggtggtgtgaactcccagggcaacctgaccgctccgaacgctatcctgggcggcaaagatacgctgaatcatacccatgaagagcatggcgatggcggcggaaccacggggccaatgcaatga

SEQ ID NO: 427797 - DNA, 1128 bp, Serratia marcescens
atgaaccaggttgaattgcgtattgatggcaaggtatttgccggctggacgagcgtgaagatcaaccgttcgattgagtcgctgtcgggctattttgacctgggcgtgatggtgcagccggatactgacttatcgtccttggccacaggtaaagcctttacactcagcatcgataaccaatgcgtgatcaccggctggacggatggccgcacccgccgcatcagcggcgacagcctggaaatcagcattgccggtcgtgacaagaccggcgacctggtggattgcgccgccatctatcccggcggccagtggaagaaccgcacgctgcatcagattgcgcaggacttgtgcaagccgttcggcgttaccgtgcgctgggagctgaccgacagcgagtccgccgcgccgttcgccacctttacgctcgaccattccgagacagtctatgaagcgctggcgcgggccgctcgccaccgtggcgtgcttgtcaccagcaacgctgccggcgagctggtctttacccatgctgacgcccagcaaagcgacatgctggtgctgggcgagaacctgttgtcggtggattttgaggaagacgatcgcgatcggttcagcgagtaccgcgtcaacggttatgcgcgggccaacggcaaggtgggcgatacgctcaacgccagcaagatagccagtcagaaagggattgcccgcgatgccggcattacccgttaccgtcccactattgttatcgcggacaacaagattgacggcaataccgccaatcagcgtgccttgcgcgagcaacgccgggcgctggccaaatcgcagaccttcgaggccaagctcgatagctggtttcgggccaatggcgcactgtggatgccgaatctgttggtgggtatcgatgcaaaaaagttcggcatcaccgttacctcgctgttagtgagcaaggtggtgttgtcgctcgacgatcgcgacggtctgaccaccacgctaaccctcgcgccgcgcgatggtttcctggtgccgattgaaccggacagcaagggcaaaggcagtgccggcaccaacaagggcggcatcgatgcgctggcggaagaatattacaagaaacacccggagaagcggccatga

SEQ ID NO: 427798 - DNA, 1470 bp, Serratia marcescens
atgtttgaagatattttaggttccgttaacagcgcccgtaacagagtccagaacgcgctgggcgtgaccaacaacagcgccggcctcggttcgttccgtggggtgtctttctacacgttccgcgagcaacgccaaaccggcggtcgccgcatcgtcaagcgcgagtatccacttcgcgatgaaggcggtgcgattgatttggggcgcaagttgaccgagcgcacctttaccgcctgtctgctgggtaaaaatgccaaggcgcaatgcgacgcgctgcttgaagccctcgacgccgctggcgcgggcgaactgatgcacccggagtacggcaccctgtcggtgctggttgataattacgaatgccgggcggtagccgatgaactggactattacgagttcacgatcaccgtctatccggaggcgaccgccaccgccccggagatccaggacaacaccgggcaagcggtggcagcccaaaccgacagcctgttcggtgagctcggcgacacgcttaccggtgcctggagtgtggttcaggaaggtattcaggacgcaacgaccgtgctggacgccatcaacggcgtatttgatgacatttacaacgccgtggaaaatatcggcatcatggacgacgtaaaccgtctgatgggggcaatcacagccgttcaggggaatatcgaggggttaatcaacaccccgtccatgctggcggccaacgtgctcggcgcgctcagcggcatcacctccgtcaccgatgcctcatcctcttatcgggccttcgagcggctgggcgtgcacctgtcccgtcgggcggacggcatcgacaccagccacatctctcccggtgccgcgaaaaatgtgcaggcgctgtttcatgttgcctcaaccggcgcgttggccagccagacgcaggcggcatccggtatcgtgacgctggcgctcgagcgcgacagctatcaggcccgcagcctgtcgcaatcgcctacgttgttcgttaccaccgctgccggcagctctaccgcatcgccaaccgtggccgccagtttgcagcaaaacgttaaccagaacgccgcacagagcagcctgctgggcgattcgcccgcaggtacacccgcaccggcaagcgtgccgctgtttgagagcgcggcggacattgctcgcgtcgcgaccgcccttagccaagcactcgacagcgcgattttgaccgctgctgatgccggctttacccgctccagtaccgcattgcgtcagttgcgcctggtggccatcaatgacctgcaggtgcgcgggctccaactggccggcgttagcctggtcattcccaagcgtaccgagccggcgctggtgacgctgtatcgccaaaccggcaacagccggcagcaccaacgcctcgcgcgccgtaacggtatcgccaacccgctgtttgtgcctggcggcgttgctatcgaggtaatcaatgaaccaggttga

SEQ ID NO: 427799 - DNA, 2037 bp, Serratia marcescens
atggccggacaacagttacgcgcatctatcatcgttgatctcaatggcaacgtaaccacccggtcgcgtcagttcggctcatccattacacagatggcccgcagtagccaatcagcattacgcgggttacgtgcgagtgtcctgaccgtctccgccggcatcgacaagatgggtgtagcggcatcgcgctcgttcggcattatctcccgtggcgcaattggcgttgcggcggcgggttacaccgccaacaagctgtttattaacccggcttctactcgggaaaactaccgcattgcccttaactcccaatacaacggcgataaggccaaagccaaggaggcgatggactgggcgattaaaaatgccaaggatacgacctggggcctgaccggcgtcatgcaggagatggtgtcgtccaaaggctttggcatggatgataaacagacccgtgcctttatcggcatgttgcaagatcagggcgcatatcgtggttgggacttaacggcagctcagggggcctcacttcaactcaaacagatgtactcccgccagcaaatcaccgcgcaggacgccaatttgctgaccggttatggcgtgaacgtctaccaaatcctggcggataagctgggtaaaagtgtaaaagatgttcgcgctgccggtgaaaaagggttgttggggcctaaaagtattcagctgctgttccaggccatgaccgagcaggccaagggggctcaggccaatgctatgaacacctggacgggcctgaccgcccagcttggtgacgtctgggatgattttgccaacaaagtcatggataaaggcccgtttgacctgctgaaaaaacaggtcaaaggcgttctgacccaatacgacgcgatgggtaagcctggcaagggtggcaaaagcgaactcgatgttttaacagataaagtcgccaccgacatggtcggtgcctttgacctggccaaaggagccgccagtgggctatggacagcgcttaaaggcgttgccaaggccctgacttggattaacgagaacgtcgttagcctggcaacggtcggtaaagcattggccagcatctatgtggccaacaaactattgcgccttgggggtcgaactatccggggcggttatcgcattgccaccgcgccttaccgcgcctaccgcaaggcgacacgtcgtaaaggcaagggccagcctggtatcggcaacactatgccagatattaccggcgtattcggcgtgcagcaggtgtttgtcaccaactggccgatgggcggtatcggcggcggtttcggtgctgatgtcggcaccggcaaatcccgcaaaggccgccgcaaaaaaggcccaggccgcaatcttccccgcaatgtctccgtcgccgccgcgcctgccgccgcgaaacagggcttctttggccgtatgtttagcggtgccgcctctctcgccggcagtgcggcgtcctgggtaggcaactccagcctcggcaaaggcctggccaatatcgggcagaaatccagcagcatgatcggctctgccggcaaatggatcgctaacagcggtttcggccaggctgccggtaagctcgccgcccagggctcaaaagcgttgggctggctaggccgtgtcggcagcaagctcggcggcccggtgctgtcggcgctgacgctggccccgacgttgctggacgatgaggtttctacccgcgacaaaggcagcgcgatcggggcgacggcgggagcctgggcgctgggcgcggtcggttcactcgctggcccgattggtacggctgccggtgcgaccctcggcggctatctcggcgattacctgggcggctggatggcggacttgtacacccaatgggaaggcggcccgaaagacagcagcacaacacaaccgccgccggagcaaaaagtacaggctgacgcctcgctgcgcatctcgctggcggatggcttgcaactgaccagtaccaaaattaccgaggacggcatgggcctgaacgtgtatgacggcaacaactattacccgttctga

SEQ ID NO: 427800 - DNA, 480 bp, Serratia marcescens
atggaaaacgtaaatactgaactcacccaggccgacaacacggtacagcaggatccggcaacaaccgccgcactgctggagcaggaaattatggccgagctgcaagccggcgcgctgcaactcaaagacggcctgccattcggcatcggtgccgactgcgtgatgcagtacgccgtgaccttccgggaactgaccaccggcgatgtgatcgacgcacaaacggcctctgaaattccggtcacgaccgccgaggggccaatgctggtcagttcgccgtccaaaatgggcgtcgagatgttgcgccgcagtattgcgactgtcggcagcatcaacggcccgctgtctgtagcactgctgcgccagcttagccaggcggacttccatcgcctgtcattggcgctggagctacgcgatttggcgcaggccgcctccttgagcgccaaccgggggcgagtggttgcggtgtcgagcacagattga

SEQ ID NO: 427801 - DNA, 363 bp, Serratia marcescens
atgtcaaacccaaaccagtatcagggcgttgcctacatccgcgtcaatggccaggaactccccacgatggagggagccacctttaccccatccggcagtgtgcgcgaagtggtcaagggggctcgtgtctggggcttcaaggccaaaccgcaggaagcgacgctcgaatgcaagctcgccggcggtaacggaatctcggttcaggatatccagtcctgggataacgtcaccgtcgagtttgaagccgacaccggcgaaaagcacatgatggcgaacgcctggacgtccgacgccaccaccatcaccgacggcggggagatctccgccaagtttgccgcccgcgccagcaagcgcattgcctaa

SEQ ID NO: 427802 - DNA, 1509 bp, Serratia marcescens
atgagcatttcatttaaagagattggcggcgatattcgcgtcccgctcacctacatcgagtttgataacagcaacgcggtatccggtacaccggcccctcgccagcgtgtgttgatgtttggccagtgtgccatgaccggtgacaagcctgtcggcactgcgccgctcaatacacctgtccgggtgtattccgcctcccaggccaacgacgcctttgggcgcggctccatgctggcgctgatggtggcaaaattcatcgagatcaaccgctcggctgagctgtattgcattgcccagggtaacggcaccggcagcgctgtggctgcgaccatcaccctgtccggcaccgcgtccgataatggtgtgctggcgctgtacgtcgccggcaagcgtctggccgtgaccgtctacaaagacgacaccggcgcacagattgcagaacgggtaacgacgctcatcaacaaaaccagtgagttacctgtcactgccgagaccgttcccgatgccggcggcgctaaagctgacgacacccatgcggacgtgaaactgacggccaagtttatcggtcgttcgtccatcaccgacgtgcgcttcaactattacacccaggaggccacaccgcctggggtgattgcggcggtgacgtatccgacaggcaataccggcaaccccgatattgccgccagcatcgcagcgatgggcgagctgcaatacaaatatatcgtcatgccgtacctggacgaaccgaacctcaacctgctacgcaccgagctgcgcgatcgctgggggccggtgaatcaggctgacggtttcgccgtgacgtcctatcacggcacgctgggagaaattacctccttcggcatcagccgcaatgaccacctgatttcctgcatgggcgtaccgccgacgccggagccgcagtatttctgggccgccagcatctgcgctgtcgccgcacaagcgttgaccatcgacccggcccggccattgcagacgctggtgatccccaatcgtatgccgccaccgctggagagccgctttgcctggccggagcgtaactcgctgctgtacgacgggatttcgacctttaccgtcaacgacggcgaagaggtgcagattgagcgattgatcaccatgtaccgcaccaacagtttcggcgatccggatccgtcgtacctcaacgtgaataccatcgccacgctgagttacctgcgttactcgacacggctgcgcattcagcagaaattcccgcgccacaagctggctgacgacggcacccaatttgcgccagggcaaccggttgtgacgccgtccatcatcagaacggagctgctggcgctgtttggcgagtgggaggaagccggcctggtggagaacttcacgcagtttgcggacgagttgattgttgagcgtaacgccaacgaccgcgaccgcatcgatgtgctggccggcccgaacctgattaaccagttccgcatctttgcggaacaaatccgcttcattttgtaa

SEQ ID NO: 427803 - DNA, 192 bp, Serratia marcescens
gtgccagatttcacgattaaaccggctcccggtcgcgctgtgcgtgacccgctcaccctggcattgttgccggccaacggcgatcgcaagcctcgcagcggttactggctgcgtcgcctgattgatggcgatgtggtggaagtcgagaccaaaaaggccaaatcccctaaaccaaaggatgaagcgcaatga

SEQ ID NO: 427804 - DNA, 540 bp, Serratia marcescens
atgattgccaccactgaaaaagccttgctcgacgctattgagtcgctgtttggctccactttgcagcaatgcgggacgcatcccggcacctgggatgacgtggcgatcaagcacatgcttctcagcccgccggcgatttatgtcgcctggctgggatttgggccgggccgcacccgcgcggaagcagaaagccgctgggtgttttatgtggtggctgagcgcctgaatggtgaagacagcgatcacctgggcatctaccagatgatcgaccgtcttgttggcggcatcaacggccagcggttcgggccatcttccaacatgcacctgaccaaagcgcagaacctgtataccgacacgcaggatgcggcaggcgtcgccctttacgggctgtatttttctgccattacccctgtgagcatcggcccggatattgccacgctggacgatttcgaacgccactatcagacctggcaaatgccagacgggacgccggcattcaaggctcacatcaatgttaacggcctcaaccctaaggagtaa

SEQ ID NO: 427805 - DNA, 423 bp, Serratia marcescens
atgatttacgccaccgtcagcgatatgcaggcccgctataaaaaaagcagcctggatctgctcactaaagccaaaagcgaagacggcaagccggacgatgcctttatcgtgtcggcactgagcgacgcgggcgggctgattgacagctatatctccgcccgttacgtcctgccgctgtcggtggtgccgcaggcgctggcgcaacagtgctgcgccatcgccttttattacctcaacgatcagcgcgccaccgaccaaacgcgcctgcgctatgaagatgccttgcgctggctgcgtgatgttcgagacgggaagatccccctaggcaccgacagcgccggcgacgtgccggaaagcgaggattacgcccaggtgatttccgatccgctggtgttttcccgtgatcaaaaggggttcatctga

SEQ ID NO: 427806 - DNA, 447 bp, Serratia marcescens
atgtctacacaactacctgaaacacatcaccaacagcctgatccgttgggtgcaacaaatccagtcgcgttgttctgcgcggttatctggtgtccgaggccaacctaccgccgtgccggcatcacctttacccgtggccgcaccacgttggatccgcttaaggctgaacagcttgccatcctggagcaggatccgtgcctcgttgtggaatcatcttcgccggcagcgctgcaacctgcgcaacaggggaccgtggacgattcgggcgtgggtggcgtaacgccgacacaaatccgcgcggctgttgcgtcactcgatagcgagaacaccgaacactttacccaggcgggtaaaccgcgtgtggccgctgtggtcgccgccctgggggctgaggtcaccggcaagcaaatcgaagccgccctggcggaaggcggggacgacgcatga

SEQ ID NO: 427807 - DNA, 273 bp, Serratia marcescens
atgaatacacccatcatcaatgacacctcgccgacgttacctgctctggttgagcagatgcgcgcgctctacagcgagcactaccgccagtactgcgatttgcaggagttggggcgcacgttgggcgtggtgccggtcaatgagccaatcccggagcagctcccggttgaagcgacctcgttaatccctgccgtcgttgaggtggtatcacgcctggacaatctggcccggatgaaccgcgagttacaggcggccattcagacggtgttctaa

SEQ ID NO: 427808 - DNA, 957 bp, Serratia marcescens
atgccaaccccaatcactcccgcccagatcacctcgttaatgacgggctttcgccgcgacttccagggcggtctgacggcggcgccgtcgcaatatcaacagattgccatgacggtgccgtcaaccagcaagtccaacacctacggctggctggggaagttcccgcagttccgtgagtggatcggcgcgcgcgtcattcagcagttgaaagcccacggctacaccatcaccaacaagacctgggaagacacggtcagtattaaccgtgacgatttcgaggacgacaacctgggcatttacagcccgatgttccaggagctggggcgtcagggcggcgtgcagccggacttcctgaccttcaaggcgctggccgatggtgacaagaccgcatgctacgacggccagaacttctttgacgtcgatcacccggtctaccccaaggccgacggctccggtacggcggaaagcgtcagtaacttttatacccagcaggtgccgcccgccaaagaaggcgatccggcgacgccgtatgccggcccgcgttggtatctgctggactgctcccgtgccgtgaaaccgcttatcttccagaaccgccgcaagttggaactggtggcgcaaaccaatatcgccgagggcgtggccttcaccgacaacgagttcgtcttcggtgcctccatgcgtaacaacgtcggctacggcttctggcagatggcttacgccatgcaggccgaactgaccgccgacaacctgtggctgggttggcaagcgatgcgcgccttcaaaggcgacggcggccagccgctggcgctgaaaccgacgcatatcgtcgtcccgccaacgctggagaaaaaggccacgcagctgctggagcgggaactgtacgccgacggcggcaacaccgtttccaacgagctgaaaggcaagttgaaactggtggttgcggactacctgtaa

SEQ ID NO: 427809 - DNA, 1110 bp, Serratia marcescens
atgaaaacccaaaatgtacgctccattgcctatgcggtactcaattccgcgatgttcgcgccgatcggcggtgacggctggtgtcaattgatgcctgctggccgcgtcaaggcccgcgacgggcgtccggaaaaaccggcagaaggctggctgattgacaaatccacttgcgaacggcttgtgtcacgcctcgtggcgcttaatcagccaatcaaggtcgattacaaccatcaaactctttacaagggggaagccgcccccgctgctggatacattcacgccagccccgacaatttcgcctggcgagacggcgataaacccggcatttacgttcgacctgattggaatccgccggcagtgcggagcctggaagacaaagaatatgcctggctgtcgccagttatgggctatgacacggtaaccggcgagccggttgagctgcgcatggttgctctgactggtgaccctggcctgaccggcatggaatcggttgtcgcactgagtgctgacgatctcttcaatgccctccaaccctcggagtttcccatgaatgaaaaactacgccagttgctggcgaagctgggcattactgtgcccgaaaacgcgcaactgaccgacgaacaggccacagcggcgctgtcggcagtggtcgagctgcaaaccaaagctggcagcgccgacagtttgcaaacccaggttaccgccttgtccgccgaggtagagactgccaaaaccggggccgtggacttgaccaagtatgtgccacgcgacacctacgacgcactgcgcaccgactttgtcgcgctgagcgccaaccattccaccgcgacgctggcgcaagtcctggacgatgccgagaaagacggtcgcatcttcaaatctgagcgcagctacttcgagcaggtcggcggccagattggcgttgcggcgctttccgcacagttgcagggcaaacagccgatcgccgcgttagccaccatgcagacccagaccgttaacaccccggcgacccaggtcgcggcactgtcagcggaagacctccagacatgtcgcctgctgggcatgaccgaggacgagttccgtaaggccaaagaagaggacgccaaataa

SEQ ID NO: 427810 - DNA, 483 bp, Serratia marcescens
atggccgtcagcagcatggatttggccgtcgttatcgacgtgcagcgtctgaaaaatgcctttcgccggctggaagcactgggcacggatggcaaagcgatcactcgcgtggtagccgccgcgctgcaatcgtccaccgagcaggctttcgagcgtgaagccgacccggtaaatggccagcattgggccgactggagcgatccgtatttagcctggcgggaaaagcacggctatacgcccggcaagattttaacgctgggggctgatctggcgcggagcatgaccaccgattacggcccgacgtgggcgctgattggctcgccgaagatttatgcggctatacacatgtggggtggcaaggcgggtatggccccaggcccggctgcgatccctgcacggccttacatggggctggatgatgccggcgaacaggatatttacgatcatatcaaaaaccgcgccaaagacgcgctaaagggctaa

SEQ ID NO: 427811 - DNA, 1320 bp, Serratia marcescens
atgccacagaccgttgatctgggttatgcggcacgattgccgcccaaggaggccgtggcctatttccgggccaagggctacaacattacctggaactggtacgagcaactgaccgacgcgcacgcccgcgcttttacggtggccaaggcggcgcgcatggacgtactcacgacgctgcgcaccgaggttgaccgcgccattcatgacggcatcacccgcgacgagtttataaacaccctagcgcctcgcctgcaaaagctcggttggtggggcaagcaaatcgcggtcgatagccagggcaacgccaaagcgatccagctcggcagcccgcgccggttggcgctgatttatgacgtcaatacccgcgccgcctacaacgccgggcgttatgcgcagatgatgaacaccgccgacgccttcccgtattggcagtatgtggcggtgatggacagccgcacgcggcctgctcatgctgccctcaatctgatggtgttccgctttgacgatccgttctggaaaacccattacccgcctaacggctggcggtgccggtgtcgtgtgcgcgccttgtcggcggcacgcctcaaagagttggggctgaaggtcagttacggcgcgtcctttatccagaccaaaaccgtcgatgccggcatcgatgaaaccaccggcgaaatcttccagacggcctcgaccaccttcaataacggcaaggtcaacatgacgccggatgtaggctggtcatacaatcccggctcggcggcattcagcaccgaccagacgatgatccgcaaaatgattgaggttcccgatgccgggctgcgtcagcagatcgtgcagtcgctcaatggcagccgtgagcgtcaactggcctttaccttgtgggccaagcgcacgctgggggcaacgtcggcggcctccactgtgcaggcgttggggttggtgtctgagtccgtagccgatgccatcagcgctcaaaccgggcaaccggtgccgcgtttgctggcgatgaatgccggcagcctaatggatgcgcccgcagcccgtcgtctgactacggcggatgcggcgcgcctcgccaccatcaccgacagcccggcagcggtcttgtgggatccacagcagcatcggttgctttatgtgacccacagcagcgatgccgatacgatggtcgtggcagaagttgcgatcagcaatggcaaggcggcagagatgccggaggcgttaacgtctgcctatcggcaggacgtggccacattgcagcggcagattgcgcacggtgattatcagattatccagggtacgataaaccaggcagaataa

SEQ ID NO: 427812 - DNA, 1566 bp, Serratia marcescens
atggcagaaagtcggattgttgacatcaccgggcagccgttccgtttcgatgaaggaatgcaaacccagcgagaggagttatcgatggtggcaaatcgctaccaggagcacccctcgtcgggcatcacgccaaaccgggcggcagttatactgcgtgacgctgagtgcggtgatttggccagccaggcagacctggcgaccgatatcgaggaaaaggatacgcatatattctcggagctgggcaagcgacgcctggctatccagagcgtcccctggagtattgagccgccaccgaacgccagcagcgccgaaaagaaagacgccgagatgctggatgagtacctgcgcgacgcagcctggtttgaagatggtctgtttgatgcctctgacgccatcctgaaaggctacgccatgcaggagatcgagtggggctggctcggtaagttccgctgcccgaaagcgttgcactggcgcgacccggcgttgttctgctccaaccccaacaacctgaacgagctgcgcctgcgcgacaacagctacgagggccagacgctccagccgttcggctgggtacgtcaccaggctaaatccaaatcgggctatgccggcacgctggggctggtgcgcacccttatctggccgtttatcttcaagaattattcggtgcgcgattttgccgagtttctggaggtctacgggttgccgatgcgcgtgggtaaattcccgtcaggggccagcagccgcgagaaagccacgttgatgcaggccgtcatggacattggccgccgtgccggcggcattatcccgatggggatgcagcttgagtttcagtctgcggccagcggtcaggccgatcccttccaggcgatgatcagttgggcagaacgctctgcctccaaggccatactcggcggcacgctcaccagccaaaccgataccaccggcgcacgttcattgggtgaagtgcataacgaggtgcgcaaggagatacgcaacgcggacttgacccagctggcgcgcaccgtaacgcgcgatctgattttcccgctgcaagccctcaatgcggcgaccgcgctcgatcctcgtcgcttgccgcgcctgacgttcgacaccacggagccggaggatatcgcctcctatgcggacgccattcccaaactggcggtcggtatggacattcctaccgcctggatccacgataaattgcgcattccccaggcgcagtccggcgagcaagttttccgtatccagccgcagtccgagttgccgccgctgcccgtgagtgggcgcgccgcgctgtctgctaccgacttgcctgacgaaccgccggccaaagacgatatggaccagctggccgacagcgtgagcgcacgacagttgcagacggctatcgaccccgtgctaaaaccggtcattgacgccattatcgccgaggggccggaggccgccatgcagcgtgctgcctcgctctatagtgagatggacgacagtgagttgattgaactcatgacgcgcgccctgtttgttgctgacttgtgggggcaattagatgccacagaccgttga

SEQ ID NO: 427813 - DNA, 1668 bp, Serratia marcescens
atggcggcgaaaaagtccgataaaccgaccttaatcgcccgtggcgatccgcgcctgattgacctgcaggaagaagccaccaagctgggcgtagatattcagaccgatgtgtctgctctcaatccgattgctgaggcggtatttttgccctaccagcagcgctggtttgaggacgagagccagatttgtattgcggaaaaatcccgccgtaccggtttaacctgggcggaagctggccgcaatgtgcttactgccgccaagccacgccggcgtggcggccgcaacgtgttttacgtcggctccaagcaggagatggcgctggagtatatcgccgcctgtgcgctgttcgcacgcgctttcaaccagttggcgcaggccgacgtttacgaacagactttctgggacagcgagaagaacgaagagatcctgctgtacatgatccgctttcccaatagcggttttaagatccaggcgctgagttcccgcccatccaacctgcgcggcttgcaaggcgatgtggttatcgatgaagcggcgttccatgaaagcctggacgaactgctgaaagcggcgctggcgctgaccatgtggggcgcacgggtgcgcatcatctcgacgcataacggcgtcgataacctgttcaatcaatatattcaggatgcacgcgagggtcgcaaggattacagcgtgcaccgcatcaccctcgacgacgccatcgccgagggactgtacaagcgtatctgctacgtgaccgggcaggtctggtcagctaaggccgagaaggcctggcgcgatcagctttacaaaaacgcccccaacaaagagagcgccaacgaagaatacggctgcgtgccgaaaaaatccggcggcgcttacctctcgcgtgtccagattgaagcggcaatgacgcttgagcgcgatattccgatcttccgctatgaggctgccgacgactttgaaacctggacgccggagcagcgcgaggccgatgtgctcgcctggtgcgaggaacacctcgcgccggtgctggcggcgctcaatccgttgcatcatcacagctttggggaggacttcgcccggcggggagatttgacggtcttcacgcccctggcgattgacgccgaactgcgcaagcgcgaatgcttccgggtggaattgcgcaacctgacctacgaccagcagcgccaggtgatgtttttcatcttggaacggttgccgcgctttatcggggccgcgttcgacgccaccggcaacggcggctacctggcggaagctgctcgcctgaaatacgggccggagatgatcgactgcgtgatgctgtcggccaagtggtacgccgagtggatgcccaagctcaagggcgagtttgaggcgcagaacctgaccctcgcccgccatcaaagcacccttgacgatttgctacacatcaaggtggtggcaggtgtgccgcagatagacaagggtcgaaccaaagacgaaggcagcgcaaccagcggcgccaaacgtcatggcgacttcgccgtctcgctggcgatggctgtccgggcatcatttatgaatggctatgtgattgacgaggacagcgtgcgggctatccccgcgcgcgatcgcaccgatagcggtgaggacgacgatgattatcatgaatttgaacgagggtgctggtaa

SEQ ID NO: 427814 - DNA, 579 bp, Serratia marcescens
atggacaagaaacccacgcggggccgggccagcaaggttgatttattgcctgccgaggtgaaacgcacgctgcatgaaatgctgcgcgatcgcagtattccgcaagcccaaatcctggacgagatcaacgcgctgattgatgaagccggcttgccggaagacctgaagctctcacgctccgggttgaatcgttatgcgacgtcggtcgagaaagtcggccataacctgcgccagttgcgcgaaatgacctccgcactcacggcagaattgggggataagcccaccggcgaaaccaccaagatcatcctggaaatgggccgctcccagctgtttaaggccatgatgcgtcaggaagaaaaccccgaagcggaagtcgatatcgacatgctgaaaaacgccatgctggcggcccagcggctggagtcgacggcgatggccagccacaagcgcgagaaagagatccgcctggcgtatgccgaagaagcggcggcagccgtcagtgaagaactgcgcggtcaggacggcatgagtgaggcgcttgagcaaaaaatccgtaacgttctgctggggaaagcctga

SEQ ID NO: 427815 - DNA, 288 bp, Serratia marcescens
atgattgacgatattttgacgcaggatcgccgcctcgtgatcttgcgttcgctgatggattgcaacaacgaggccaacgaatccattttgcaggattgcctggatgcctgggggcataacgtttcgcgtgatgcggtgcgcaccttgatccactggcttgctgaacagcagcttgtcaccgtggaagacttgcgcggtttcttcgtcgtgacgctgaccgggcgcgggcaggatgtggccgagggccgcgttaatgtgccgggcgtcaaaaagccacgggcgcgctaa

SEQ ID NO: 427816 - DNA, 306 bp, Serratia marcescens
atgaatagctttggaatgaccgggatctacgtgctcctggttgccggcaatgcggtgatcgcctttgccttatggtatctccgacgttcatttgcgagtaccgacgctatgaaaaaagtggaagcccgcctcagcgaactggaggcgaagtatgaaaccctgccgaccgttgatgcggttagcgcgttgaaacttgaaatgatggagctgcgcggtgatatccgcgaagtggcttcacagcttaacgctttctctcatcagttgggcctgctgcttgagcaggccgtaaaccggagtaaatcatga

SEQ ID NO: 427817 - DNA, 219 bp, Serratia marcescens
atggataacctggatagggcctttgaggccgagatgcgctggcaagccgaacagctggccagacagcagcgccatacctcgcaggctttgcctgtcacggcggtgcgtgagtgtgaagattgtttgcatccgatccccccggcgcggttggccgccttgccgcaggcggcatgttgcgttgattgtcaggaactgagggagaaaaagcgccatgaatag

SEQ ID NO: 427818 - DNA, 381 bp, Serratia marcescens
atgacctggttatctactaattccgtcccgctgctttttctcctggtcattgccggcctgggcagttggggcgcttacacccaacagcgtgccgaacgtctgttgcaggataatcagcagttgacccggcaacgggatacggcgcagttcatcctgggcaaccagcagcgcgccatgaccttattcaatgcgattgccgaggccactcatgaagaaaaaagccagaacacccaacacatggagaccgtgcgtgtcatcgttcgccaggagctggaagcggtgccggctgctgctgtgcgggtgcctgccgctgtggctgaccgcgtgcgtaacgccgccgccgacattcgtggcgctcccgccgatcggcgtaagccctga

SEQ ID NO: 427819 - DNA, 507 bp, Serratia marcescens
atgcccgcattacccgacaaattgcgcttgaaactgattgccgtcgccaccggtggcgcgctggccatgacgcccgtcaccgtcaaatggtttgagggcgtcagccataccccctataaagacccggtcggcattctgaccgtctgttacggtcataccggcccggacattatccccggcaaatactactcagacgccgagtgtgaggcgctgcttaatcaggatttaaagccggttttcgccacccttaatcgccaggtaaaagttccgctcaacgagtaccgcaagacggcactcgccaccttcatctacaacgtcggcccgacagcgttcggcaagtccaccttactcaaaaagctaaatcagggcgacatttggggcgcttgcgatgaaatgcgccgctggacgtttgccggcggcgtgcagtggaaaggcttgatcacccgccgcgaggctgagcgtgcgttgtgccgcatggagtcagacgatgacctggttatctactaa

SEQ ID NO: 427820 - DNA, 426 bp, Serratia marcescens
atgcagcagaatcaaaacgacctttttgaagacgatccgcgtatcgggcaattgctcgaccacctggattgcatcccggcagcagaaatggagcgccaatggccgcagatgttggtggcgctgatggacgtgctggagaaagagctgggccgccagacagtgccgggcgataatcgccagcaggcgcgcaagttggtggcggcgctggcgcactacatggggggccgttcgtattatctgcccagcggcgaccgtctgatgaatgccctgcgtgacgatcagatatacagccgcttcgatggccgcaacgtggaacagttgcgtcgcgcctacggcctggggcaaactcaaatctataccatcattgcacagcaacgtactctgcatgtgcgccgtacacagcctgacctcttttccccgcattaa

SEQ ID NO: 427821 - DNA, 204 bp, Serratia marcescens
atggatatcatcatcgtccataagcaatcgctacgcgggcggctacgcattatccggggattggccgttgccgcctggagcttgttagtgagcggttgtgcgtggctatcgttcaacaacgctagcgtcgccaaatcggggttcgaactctatcgcggcgacaaattaatcggtgtgtttaatgtaagcgaaggaaaggaataa

SEQ ID NO: 427822 - DNA, 435 bp, Serratia marcescens
atgaaaatgaagcatttagcgggattaattttggtgggggcttgtttctctaccgtggcggttgctagtgagaaagaacttagcattgaggagcaagctgcccagattttaaaagaatctgatagcccctgggctgattctgacgaacaaaagccggtgcgcgcgcctgcttctggattttggcagtgcaatggcacccgactgcacatggggggagatttgaattcatggacgaaccttgatacagctgaggtgtttactatccatgaaaagcctaccccaacagacgacggtagagggacagattactcgttttcttcaatgagtaaccccgcttatgtcgagtactttgtcgtggacaaaaacggtaaaaaactaagcatccgtgaccgactaaaattctctaagctctacccctgcaaacgtgagaagtaa

SEQ ID NO: 427823 - DNA, 507 bp, Serratia marcescens
atggcaaccaaagcgaatctgattaagttgatccacgttgcccgccgcaaactgcaactggacgaggaaacctaccgcagcttgctggcctgtgccgttcctggcaaaaccagttgccgtgatatgaccttaccagagctggaaaaagtgctgagcgactttaaaaccaaaggctttaaaccaacctcaagcactgctaaaacacgcgtcaaagaagcgcctggggtaactgataagatccgcgccatctggcacaccatgcatcgggaggggtttatccagcatgataccgtcgaggcaatcaacggctacgtcaaacggatcacccacaacagcaacggcggtgcgggaatagcccgattggattggttgcgcggcaacgatgcgacaacagtgttggaaagtctcaagcgctggcaccagcgctgcatggtggaagcgatgggaggaagccctcctcgcggttatgacgcagtgtgtcggcagttccgccagcagcggccataa

SEQ ID NO: 427824 - DNA, 213 bp, Serratia marcescens
atgctgttgatcggtttttcgctttttgtttcctcttgtggattcgatgcctgcgaggcgctgcctgtgtccgagcggatttaccagaccgagcaacaatgccagcaaatgctgtctcgcctgcaagcacgcaggccaacggcgatgttgatgtgtggtgaagtttaccaggacgaggacggtggcgatggcaaccaaagcgaatctgattaa

SEQ ID NO: 427825 - DNA, 354 bp, Serratia marcescens
atggataacgcaaaagacaacatcgtgacgctttacgtgcagttcgatgaaccgccggcgctccacagcaatcaggatgtgctgggcggttacctgctcggtatgtcgttctgcgacacccgagaagctgacacctgggtgccggtatcccagggttccccgcatttgcaccaatcgttgctgatgttcaccagcgatgaagtattgctgccggggcatttcaataatcagggcctgtacatcaacgaaatcagcggcagccccgttgatgatgaaggtactgaagtgacacactggatgtatgcgccggaaccacccgacacggatgatgtggaggaattaccatgctgttga

SEQ ID NO: 427826 - DNA, 708 bp, Serratia marcescens
atgaatgctgatgtgattttagaaaaaatcaccgcgcttttgtcgcaccagcctatgacgtgttcgcagctggcgactgagctgaacgtcacgccggcagaaatcatcggcccgttgcgacaggcgcttaagggagaccggtttaacgagcgcaatgggttctattcggtgctaccgctaacggtagcccccaatattccctccatagtcccatgtgcggttgctacaacagcgcttcccgccggtttcaccgggcagatcctcgccgctctcgaacagagggatatgacgtcgaaagaactgtctgtattcaccgggattggctcctcacgcatttctgcttttttgcgctaccgggttgtgcaaggtgaagtctcaaaggtttccaaggacggccaaacctactaccacctggaacaacggcctgtgcgcatgagccgcaaggcttacccctgggtcgaaggacaggtcattccttcgtgggtacgcgccctggcaacgggcgttcgtgggtgcgagagcgtctatatcgtcgccgaattggatgtcggcaagcaatcgcagggctggccgcagtttatcgccgcttacatcgatatgcggctaaatcgctacatttgcggaaatacagcggaaaacgtctccgaccatgtgctgcgctacctgccatttgatcacagcgaggttgaaaccgaccatgcggaataa

SEQ ID NO: 427827 - DNA, 444 bp, Serratia marcescens
atgggggcgatcatgattgataaacagcaatgcgtgggacttgagaacgcacttaaaaatggcatgacaatttgtttcctgcatcagggccacgaaatctcggtacgccgttgccttatccaggaaacaaagctgatctacgccgtttatatcaacgggcaaatgtatctcccttgccgggaagaaggtgagccaaattatcactcaatggcggaagcctatagtcggaaaattgtttacaacccgtaccaacggattttaaacaagatgaagaaagagcgcgggtttaagcgatttataaagcaaaaagagtacgcctatttattggagaaaaaagagcgtttcgaaccgttttttccttcggctaagactgtcgtgaatcactttaagaaaatcgacggactgaccgttaaaaaacctgacttgatggagattttgccatga

SEQ ID NO: 427828 - DNA, 498 bp, Serratia marcescens
atgatgaataaacccgctttgtacgatgctgcgctggcgaaatggggctatgacgctcaggtgctggtattggccgaggaatgcagcgagctgtctgccactgcgtgccgtttcgtgacgcataaaagtaacggcgcgaagctggcagaggaagccgccgacgtggagatcatgatcgaacagctgcgccataacggcctggcctgccatattgatcgcgctaaagagcgcaagttggtcagactggccaagcgtgtcgccatgcctgacgatagtttgctgattgccgagccgacatcctccttggcgttgctggatgaagcgatttatcacgttggggaagctcaatcgctgctcatggttggcgaatgccgccgtaaatcagcccgacatgcccgtgtggcaattggtcgcctgatgtatgccgcacagctcatgatccgcgaagcccagcagcaggaacgtgagacaatgcttcatgggggcgatcatgattga

SEQ ID NO: 427829 - DNA, 258 bp, Serratia marcescens
atgaaaactcaagacgcgcaattagttgaaatgctcaacggtgttattgaatggcatcagaaccgtgtaggtaactgtcaaaccattattagtaatactgatgctgatatcgttttagatggcatggacagagtgttagcagccgattccgttgaggctaaatggctgcgagctggcgtttatctggccttgcagcaattcgaaaagttcccgttatccatccgcaccactaacgaggacgattcagatgatgaataa

SEQ ID NO: 427830 - DNA, 525 bp, Serratia marcescens
atggccgctaaagttaaacgtattaaaagcgctgctgcggtatacgttccgcaaaccaaagaagacgtcaccagcgatattcgcaaaatcggcgacctacagcgcgagatgatccgccgggaaacgcagatgaatgacaaaatcggtgcgattacccagcaatacgctccagagatcgacgagatgcgtaaagacctggccctgctgcaaaagggcgtgcagggttggtgtgaggctaaccgtgccgagctgaccaataacggcaagtcgaagaccgccaacctggtgactggcgaggtgcaatggcgcaatcgtccaccttcggttgctatctgtggcgctgattcggtgatcgaaaccctgctccgcctgggtcttgagcgctttattcgccgcaaggaggagatcaacaaagaagcgatcctcaacgaaccgagcgccgtcagtggtgtggcaggtatcacggtaaaaacgggcgtcgaagattttgccattgttccctttgagcaagatgccggggtgtaa

SEQ ID NO: 427831 - DNA, 270 bp, Serratia marcescens
atgccaaaaatcatttttgaatttaaagaattaccagaagccttcgttaaagaggctggcgtgactggcattcctgtgaatgtcaacgttagcgttgaggggcttaaccgtgatgacccaactcatgcggaacatctgatagccatcttacataaggcagcaccaaatatcattaaggctgcctgtgatctttacctggagaaactgaccgcaaccggggaagtgcaagctaaaagcacattttataaaccatcgtcaaaaacacattaa

SEQ ID NO: 427832 - DNA, 258 bp, Serratia marcescens
atggcgaaaatatttgcctatgcctgggcatctggactcattgagtttggcacagaataccccgcaggtgcgttaccgatttatgccggtgaagatgcgccactgcgcaatgcagtgacaattcacgcacggcacgccagaacaagcgagagtctgtttgtgccgggcatcccagaagccgcgaaccagcatgaagcgctggacgtattaattgatttttcagaccggattaaaacggcttatttaaggagtaaataa

SEQ ID NO: 427833 - DNA, 222 bp, Serratia marcescens
atgaatatgtttgatgcagtgaataatgttggtcgctttatgcgtttctttggcagtgagatcgagaagtcgaagcgctaccgccaacgcccggccattcaggtgactccgcctgccgtgccgccagcggagggcgtcattgaaatcaccgtgtgtactgatggtttgcgccgccgcgttcatgcaacccgcattcagggctgtacggtgtattgggagtaa

SEQ ID NO: 427834 - DNA, 954 bp, Serratia marcescens
atgaacgaacaaaatcaagtcggttttgaagaaatacgcatcgccattgccgaaatcttggacgccaccgattttaccagcgcgcagctggctcgtgaggcggggttgagtgcagctcgcttctcgcagttcctcggcaatacctataagggcgacaataagaaagtcgccgatgcgttggcgatatggctcaagaactaccacgccaaacgtgaccacttgcccgcgatgccagaattcgtgcagaccccgacggtgctgcaaatttggggagccttccagtatgcgcagctggctcgctgcatcacggtgatccacggcaaccccggtgtcagtaagacaaccgccgtcagggagtttgtcacgggacgcccgaatgtctggacaatcaaggcctcaaaatcccgcgccagcgtgctggagtgcctgtacgacatcgcattggccgttggcattgaccaacccatttgccgccgtggtgcgctgtcccggcaaattctccgacgcctcagccgcacgggtggtctgcttattatcgatgaagccgacgtgttggaatatgacaccctcgaagaaatccgcattttgcaggaagaaaccgagatcggcctggcactcattggcaaccacaatatttataaacgtatgaccgggaataatagccgcaacgtggattttgcgcgcctgttctcccgtattgctaagcgcgttgtgatcaaccagccgcgtaaggccgacattgaagcagtggcgaaagcctgggggctcgtggataacgagcgggacttaattcactggctggctaaacagcctggcgcattgcgtatcaccttctttgtattgcgcctcgcggcaacctttgcgcaggcacagcgcgagccgatgggtgaaattcacattaaagccgcaatgaaagatctcggttgcgacgctcaacaaggggtagtggcatga

SEQ ID NO: 427835 - DNA, 1692 bp, Serratia marcescens
atgtgttgggagcaggctaacgccgcgcagcgtgaacaggcagaaagccgggttaaagccgttgttttgatggccgagttagttggtagcggcctcggtgttcgctccgcagccgatctggccgcgaattcgttagcactttcacccaacagcctgcgccgctggtacggcaaagcgcaaaagcacccgcgttctgactgggggccggcattgctcgataaccgcctgatcgagcgcacggcttgtgcgccaaaagcgaatttcgacgagcaggcatgggagtttatcaaatctgactacctgcgcctggagcaacccgcactcactaaatgctatgaacggctggagctttctgccaccgcgcacggctgggctatcccttcctttgataccgtgcgccgccgtattgaaaaagagatccctgttgaggtcagagtgttactgcgtgagggtgaacatgctttaaaccggctttatcccgctcaaaaacgttctgttgccgatttgcgggcgctggagtggatcaacggcgacggctatcagcataacgtgcatgtgacctggttcaatggggaggtgctgcgccctaaaacgtggttctggcagtgcgtttacagccgcaagatcctcggctatcgcgttgacgttagcgaaaacaccgattcaatccgctattccctgcttgatgtgattcgccagtatggcaaaccgcaaaaagcgacgatagacaacacccgcgcagcggccaataagaatatgaccggcggcacaccaaaccgttatcggtttaaggtcaaacctgatgatgtgaaaggaattttgcccatgttgggcattgaggtgcattggacaagcattgttgcgggcaaaggctggggccaggctaaaccagtggagcgtatgtttggggttggcgggcttgaagaatatatcgataaacacccactttgcgctggcgcatataccggcccggatccgatgcataaacctgactacaaagcgaaaccagtcagcgccgagcagttcctgcaagccgtttccgagggtgtagccatgttcaacgcggcagtgggccgcaataccgaaatgtgtgccggtaaattgtcctttaatcaggcgtttgatgccagctatcaacagcagatcgtcgagtttctgccggaggagcagctccgtatgctgatgctctccactgaagccgttacggtcaaacgtgatggcagttttagcatgaaagctggcggcaagatccagcagcaggaaaaccgttatatcagccctgagttgcgcggtatcagatccaataaagtcgtggtgcgttttgacccgcaagacttacacgccaaggtgtattgctacacgctcgacggtgagtttatctgcgaggccttgtgtgaggcacctgtggcctttggcgatactcagcaagcccgcgagcataagcgccaccgcacgcagatggttaaagccaccaagaaagccgccaccgcgcagaaagctatggatatgctggaattaaccgaattaatgggcagaacgccagagccagaagcgccacagcgccaagtggtccgcatgttcaatgaaggaaataccgttaagaaaacacggccaatcgaagaagaagagttcagcgataacgagatcgcctttcaacaatatatttctcagctggcaaatcagcagaaataa

SEQ ID NO: 427836 - DNA, 537 bp, Serratia marcescens
atgaaaagcgagaattacgtaaaccaatggctaacacccaaaaacataactgagttgcctggaatgcccggttccatccagggggttcacaaacgagcaaagagggaggggtggttaaaaaggcctgttaaagggcgacaaggcgcaggggttgagtatctcttaggaggcattgctgacgactcaaaggcttttgaaccacaaaacactgcaaatgcatcggttaatacccaagagcttttgagagtgcttgaatcgttgattaataaactaaccagcgacgaggtggataccattgcgagaaatatcgccttacatggaattggtggtctgatgcaccaaggcgtgggctcaacgggagcggttactgaactcctcgatgctctggggctacgcatgaccgatattaagttagctaggcttttgaatgagttcccagaacagaagcgccgagagattttgtcgaactatgatgaagaaaaacatggcgacccatcggcgtcactgacaccgcatagcactggaaaagctggctga

SEQ ID NO: 427837 - DNA, 954 bp, Serratia marcescens
atgtttaacgtagtgacgcagttggaaaacgacgccgtcgaaatgcgcaaagtctacgccggcgcggtgcgtcggcagattgaggcgggcgcgccgatcatcgcgctggaggcagatctgatgagctcgatggcgatggacggcgtgcacaaggatcatccgcagcacgtgatcaactgcggcatcatggaggccaacgtgatcggcgtcgctgccgggctgtcgctcaccggccgagtgccgttcgtgcatacctttaccgccttcgccagccgccgctgtttcgatcagctgttcatgtcgctggattatcagcgcaacaacgtcaaggtgatcgcctccgacgccggggtgagcgcctgccacaacggcggcacccacatgtcgttcgaggatatgggcatcgtgcgtgggctggcgcattcggtggtgctggaggtaaccgacgccaccatgttcgccgatattctgcgccagctgatggatctgcgcggcttctactgggtgcgcaccattcgcaagcaggcgacgcgcatctaccaggagggctcgcgctttactatcggcaagggcaacctgctgcgcgacggcgaggacattacgatgattgccaatggcatcatggtggcggaggcgctgaaggcggcgcagatgctggcgcagcagggcgtcagcgcggcggtgatcgatatgttcaccctcaagcctatcgatcgtgaactgatcaaaacttacgcggccaagaccgggcgcatcgtcacctgtgaaaaccacagcattcataacgggctgggatcggcggtggctgaggtgctggcggaagagtgcccgacgcctatgcggcgcgtgggggtaaaggagcgttacggccaggtgggcacccaagcgttcttgcaacaggagtatggcctgaccgccgagcatattctggaggccgccgggcagctattgtaa

SEQ ID NO: 427838 - DNA, 8661 bp, Serratia marcescens
gtgaaagaaaaacttatcaattggttaagaagtcaacgcaaaaacagcaaaataaagccgctcgccgccagaagcgctaaaggcgaaccggaaccgctcggcggcaccatcaaggccgagctgttttccgtcgatcagatggaacgctacggccagcgtctggcacgctctcacaaactggcgacgcgtaagaccccctactatttgctgaagcggctggatcacaacgaacgggtgctggctgagagctgccgccagctcagcaacggcaaaaaaagcagcatgacgcccgccggggagtggttgctcgataattactatttgatcgaagagcaaatccgcgtggtgcgacatcacttgcctaagacctttggccgcggcttgccgcagctgactgcaccgcacaactgcccgcgcatttacgacatcgccgccgaagccatcacccacggcgacgggcgctgggacgcagagagcctgacgcgctatatcgccgcctatcaaaaggaaaccaatctgacgctgggtgaactgtgggcgctgccgggcatgctgcgtctggcgctgatagacaacctgcgccgcgtcagcgtcgaggtagcgcaggctcagcgtgaacgcaacctggccgatgactgggtcaataaaatgctcgaatcggcggaaaacgatccggccaatttgatcatcgttatcgccgacatggcgcgatccaatccgccgcgcaccagcgccttcgtcgccgagctggtgcgccgtctgcagggccacggcaccatgctggcgctgccgctcacctgggtggaacagcgtctggcggaggtcagcatgacctccgatgaactgatccaccgcttcaaccaacagttggcggtcagccaactgtcggtcagcaacagcatcgccggcctgcgccagctgagcgaaatggattgggcggaatttgtggaaaccatgagcctggtagatcaaacgctgcgtcaggatccggctggggtgtatccgatgatgcacttcgacacccgcgatcactatcgccacgtgatcgaaatgctggcccgccacagcccgcacgacgaggtacaggttgcgcgacacgtgctcaacatggcgcgagtggcggcggaagatcccgtcggcgatgcgcgcaaccatcacatcggctactacctgatcgacgacggcagaccggcgctggaacagcagttggcggtacgcctcagccgcattacccgggtgcgccacgcgctgaaccaggcgccgctgctgtcctggctcggcagcctcagcctgctcaccaccgccagctgtgcggaactgttgcgccacgcggcgggcagcggcatcagctggtggggattggcgctgctgtttttcccgttggcgatcgtcgtcagccaattcgtgcttaacctgctcagcgaagttacgacccgcagtcgggaaccccgacctttgccgaggctcgatttctcctgcggcattccggccgagttccgcacattggtggtgatccccaccctgctcgacgagaaaaccggcatcgaccggctgctcaacgcgctggaggtctgttatctgggtaatgcgatgaagcacctgcatttcgcgctgctcaccgactttaacgacgccccgcatcagcggcaggctgacgacgccgcgttgctggcttacgtcagtgaaaaaatcggcgcgctgaatgcacgctatccctgtgaagggccgggccactttttcctgttccaccgcgatcggcagtggaatgacaaacagggcgtgtggatggggctggagcgcaaacgcggcaagctgaatgcgcttaacgactggctacgcaaccgcgacaacgccttctccagcctggttggcgccggccttgaggctctgaaaaacgtcaaatacgtcatcaccctcgacagcgataccgtattgccgcgcgacaccgctcaccagctgatcgccgccatggcgcatccgctcaaccagccgcagtatgacgaaaacagacagcgcgtggtggaaggctacgccattttgcagccgcgcatggccgaagagatcccgcgttttggtcagggacgttacgccgccttatgcagcagcacgccgggcaacgatccctatacgcgcatggcgtcggacatttatcaggatctgtttggcgaaggctcattcatcggcaaaggcatttacgacgtggacgtgtttgcgcgcagcctgcaaggcacctgcccggagaatttagtgctgagccacgatctgctggaaggttgctatgcccgctcggggctgttgagcgatgtgctgttgtatgagcaatatcccagcaactatctggtcgacgtggcgcgccgttcgcgctggatccgcggcgactggcagttgcttaactggctgctgccgcgggtgaaaaaagcggacggctcacgctgcgccaacccgctgagcgcgctgtcgcagtggaagctgttcgacaacctgcgccgcagcctggtggcccccagcctgttgctgcttttattctgctgcctgacagggttgcccaacaccggttactggctggcggtggtctttatccttctgctgctgccttccgcgctggcgctgctgcaggacatcgcgcgcaaaccgccacgccgcccgtttctccagcatgtgcggctggcgctgaagggcacgctgcaccggttggcacaaatcggcctgcgcctcgcggcactcccgcacgaagcgctgtacagcctgaaagcgatcgccgttaccctatggcgcctgctgttcagccaacgcaatctgcaagagtggaccagctacgcccagagcaaaacgcgcctgcgggtgacgccgaccaatttctatcgcgccatgtgggtcaatccgctggccggggcggggttgctgctgctcaccgcgtggcataacccgatggcgctcgtcgtcgccttgccgctttccgcgctgtgggtattcgcgccgttcttgctctactacctgagccgcgagccgcagcgcagcaaaacggcgatcgatgaggagcaacggcgcttcctgcgccataccagccgccagacctgggactttttcaacaccttcgtcaatgctcaggagaactggctgccgccggacaactatcaggaaataccggaaccggtgatagcgcaccgcacctcgccgaccaatatcggtttgtcgctattggccaacctcaccgcctgcgatttcggctacctgacgctgtgcgaggcgctgcgccgcattgaactgacgctcgatacgctggatcacatggagcactatcgcggccatctgtacaactggtacgacacgcgcaccttagagccgttaaacccgcgctatatttccagcgtcgacagcggcaacctggccgggcatctgctgacgctctgcgccgggctgccggcgctggcccaacagccggtcatcgatccgcagcggatagtggccggtctgggagacagcctggaactgctggaacagcagtggggaaacgcagcgccgaaaaacctggccaaactgcgccaacattggcaacaggcgcaaaacagcccgtacgccgcgctgctgcttgaattggacgccatgcgcaactacagcaacgggttgcaggagccggcgttaaaccacggcgaagaaactaaacgctgggccggcgcgctccatcagcagcttaatgaactctgtgcggaatgggcgcaatggtatggctggctgagcgatgcgccgccggatctggcgcagccgcccagcctgcgctggttggccgacgccccggcgaacctggggctttcggccgagcaacaaagccggctcgatgccgccgccgcgctggcgcaacagcgcctggcgcaactcggcagcctgcggcagcggctggaaaaaatggcgcagatggacttccacttcctgtatgacgaatcgacccacctgctgagcgtcggcttcaactgcgaccataaccgcatggacagcagcaaatacgatctgctggcgtcggaaatccgtctgaccaactacgtggccatcgcgaccaatcaggtgccgcagcgcagctggttcgcccttggccggctgttcaccgtcatcgacaaagagcctgcgctgatgtcgtggagcgggtcgatgttcgaatacctgatgccgcagttggtcatgcccgcctatcccgattcgctgctggtgcagatgtgccgcgcggcggtggcgcgccaaatcgcctggggtaaggagcgcggcgtcccctggggcgtttccgaatccggctatttcggcttcgacgcgcagcaaaattatcaatatcacgcctttggggtgcccggtttggggctgcggcgcggcctggccgacgatatggtgatcgccccttacgcgacgctgatggcactgatcgttgagcccgtcgccgcttgcaataacctgctgacgctggaacacaacggcgccaaagggcgatacggtttttacgaagcgctcgattacaccaccgcacgcctgagccgcgggcaactgtacacgatcgtccgctcctacatggcacaccaccagggtatggggttcctggcgctgtcgcacctgctgctggatgcgccgatggtggcgcgtttcgcccgctatcccgccttccagtcagcgcgcctgctgctgcaggaacgcgtgccggacgcagtcgagctctatagcccgcgtcgtcatttcgaaacccacgaaggcaccatccagccggccagcttcagcgcgcgtgaattcacccgcgtcgatacgccgatacccgaagtgcaactgttgtccaacgccaactatcatctgatgctgtcgcaggccggcggcagttacagccggtggcaaaacctggcgctgacccgttggcgcgaggacgccacccgtgataactggggcgctttctgctacctgcgcgatccgcaaaccggcgaagtgtggagcaatacctggcaaccgatcggcggcggcggcggcgccaaagactatcgcgcggtgttcaacgacgccggcgccgaattccagcgccatctgggcacgctttcggtcaaaacgcaggtggtggtttcgccggaagatgatatcgaactgcgccgcctgacgctcatcaaccgcggtaaacagccgcgcatccttgagatcaccagctatgccgaagtggtgctggcaccggccgggaacgatctggcgcacccggcctttagcaatctgttcgtgcaaaccgagctactgccagaccaggaagcgatcctgtgtcatcgcagaccgcgcgagcccaaagagacgtgcccgtggctgctgcacatgatgacggtacagggaaacagcgcgcaaacctcgttcgaaaccgatcgcggcatatttatcggccgcggccgcacgccggccaatccgcaggcgttgtaccacaatgcgccgctgaccaacagcgccgggccggttatcgatccgatcatcgccatccgccagcgcgtggtgctggaacccaacgttccgctgacgctggatgtgttttacggcgtttgcgaggatcgcgcctcctgtctggcgatgctggaaaagtatcgcgatcgccacttggcggatcgcgtcttcgaactggcctggtcacacagccaggtggtgttgcgccaactgaacgccaatgaggaagacgccaatctgttcaaccgtctggccggcgccgtggtgttcccggcgcaggaaatgcgcgccggcggcggtgaaatcatcagtaaccgccgcggccagtccgggttatgggggcattcgatctcaggcgatctgccgatcgtgctgctgacggtcagcgacgcggagaatatcgcgttggtgcagcagctgatccaggcacacaactattggcgccttaaggggctgcaggtggatctggtgatcctcaacgaagacgtcggcggctaccgccaggatctgcaaaatcagatcatgggcttgatcgccgccggcatggaatccaccctgaccgacaagccggggggcattttcgtgcggaccagcgaacatatgtcgccggaagaccatcgtctgctgctcagcgtggcgcgcatctatctcgacgaccgacgcggcggtttggcggagcagctcaaccaacgcctgcagctgccgcaaaccctgcaacagccgctgtctccggtcaccgcgtcgtcgaagctggcgacggtagacaacctgccgcgcaacctgcattcgccgcagttgcccgccatcgaagacctgcaattctttaacgggctgggcggattctccagcgacggacgcgaatatgtcattgcgatgaacgagaacaagatcactccggcaccctggtcaaacgttatcgccaacccgctgtttggcacggttatctcagaaagcggtcaggcctatagctggtacgaaaacgctcacgagtaccggctgacgccgtgggataacgatcccatcagcgatcgcggtggcgaagcgttttatctgcgcgacgaggaaagcggccacgtctggtcccccacgccgctgccggcccgcggtcgcggccactatttgacacgccacggctttggctacagcgtgttcgagcaccgcgaaggcggcatcgacagccagctgacgatgctggtggcgcaggacgcgccggtgaagctgtttttgctgacgctgaccaacggttcaggccgcacgcgcaaactctccgccaccggctacatggaattcatcctcggcgatttgcgcagtaaaaccgccatgcacgtcgtgacacaggccgcgacgacgacgggcggctgcggcattctggccaccaaccattacggcggcaacggttccgagcgcaccgcctttttcggcgttaccggcgcccactgttccatcagcggcgatcggcgtgaattcctcggccgcaacggcacgctggccaatccggcggtgctgaaactgcgccggctttccggcagggtcggcgccgggctggatccgtgcggcgcggtacagtcggcgctcagcctgatcgacggcgatcagcgcagcctggtgttcgtcctgggactgggacaaaacgccgacgaggccgacatgctgctgcagcgctacctggatgaagatcgcctgcaagacgaacgacaacaggtcgccgcctattgggacggcatcctgaataaggtgcagatcggcacgccgcatccggcggtcgatctgctggctaacggctggctgctgtaccaaactctctcctgccgcattcaggcacgcagcggctactaccaatccggcggcgcctttggcttccgcgatcagctgcaggacacgctggcactgacccacgccgcgccgcaacggctgcgcgaacagatcctgctgtgcgcctcacgccagtttatcgagggcgatgtgcagcactggtggcatccgccgcagggcaacggcgtgcgcacccgctgttccgacgactatctgtggctgccgctggcgatgtgtcattatttggacgccaccggcgacgagagcattttgaccgaacaggtgggctatctggaggcgcgccagctggcgcccggcgaagagtccgcctatgaacagccggcgcagagcgcagtgcgggaaagcctgtaccagcacggcgcgcgcgcgctgaaacacggcctgaccttcggcgagcacgggttgccgctgatgggggccggcgactggaacgacggcatgaacagggtcgggctggaaggccgcggcgaaagcgtctggctcggcttcttcctgttttccatcctgcagcgctacggcgatctggcggaacgccaccacgatgacgacctggccgcacagtgccgccgccaggccgccgccctgaaggacaacctgcacaaccatgcctgggatggcgaatggtaccgccgcggctatttcgacaacggcgaaccgctcggctcacacctggccgcggagtgccgcatcgacgccattgcgcaaagctggtcggtgctgtccggcgccggcgatccgcagcgcagtcggcaggcgatgcagtcattggatacacatctggtcgacccgcaggccaggctgatcagactgttgacgccgccgttcgacggcaacggccccgatcccggctatatccgcggctatctgcccggcgtgcgggaaaacggcggccaatacacccacggcgcggtatgggcggtgatggccttcgccgaaatgggtgacatcgaacgcgcctggcagctgatggcgctgatcaaccccatcaaccacagcctggacagcgccgccgccgaacgttacaaagtcgaaccttacgtggcgactgctgatgtctacgcagttgagccgcatatcggccggggtggctggagttggtataccggctcggcaggctggatgtatcgcttgattctcgagtcgctgctgggcctgaaacgccgcggcgatcggctgacgatcgatacgcgtctgccggccgactggccgcaattcacgatcaactaccgcgaaggcgccagcgaatatcagctggtcgtgcgccagggagaaggcgaaacgcagatcatcgttgacggcatccctcagtcggagccgacgatcgcgctgcgggacgacggcaggatccatcaggtggaagtgattttggggaaagaagatacgtag

SEQ ID NO: 427839 - DNA, 1131 bp, Serratia marcescens
atgaaacttcgagtactctctctgatggtacccgcactgctggttgcaggcacagcaggcgcggcggaaatctacaacaaagacggtaataaactggatttgtacggtaaagtcgacggtcttcactatttctccagcaacaacggcgtggacggcgatcagtcttatatgcgttttggcctgcgcggcgaaacgcaaatcagcgatcagctgaccgggtacggccagtgggaatatcaggcgaacctgaaccacgctgaaaaccaggacaacaagaacttcacccgttatggcttcgccggtctgaaattcggcgactatggctccttcgactacggccgtaacaccggcgtgctgtacgacgtcgcggcgtataccgacttgcagcctgagttcgacggtatgacctacggcgccgaccagttcatgttccagcgttccagcggcctggcgacctaccgtaacaacgacttcttcggtctggttgacggcctgaacttcgccctgcagtaccagggtaaaaacggcaacggcgaagagaccaacaacggtcgtgacgtcctgggccaaaatggcgaaggctacggtatgtccatgagctatgacatgggctacggcatcagcgccgcgggcgccttcttcaactctcgccgcaccagcgagcagaacggcgccggcgcgtaccgcaatattatgggccgcggcgacaaggcggaaggttactccggcggtctgaaatatgacgccaacgacgtctacctggcggtgatgttcacccagtcctacaacgcggcgcgtttcggcagttccgacagcagcgtttatggctatgccaacaaggcgcagagcttcgaagcctacgcgcactaccagttcgacttcggtctgcgtccgttcgtgggctataaccagaccaaaggtaaagacctgggccgcgccggcaacggcaaggactacggcgatcaagatctggtcaaattcgtcgacctgggtgcgacctacttcttcaacaaaaacatgtctacctatgttgattacaaaatcaacctggtggacaacaacgatttcaccgacgctgccggcatcaacaccgacaacgtggttgccgtgggtctggtttaccagttctaa

SEQ ID NO: 427840 - DNA, 678 bp, Serratia marcescens
atgaaaaacgagcaaaaaatgcacctgcaggagatgcggcgagagcgcctgatcatcctgatcgataacctcggcatcgggggccaaaagcgccttgccgaggcgctcggcattgccgcagactatgtctctcgcctgctctacccgccaggcaagaaaggaaaaaaaggcatcagtggcgatatggcgcgaaggattgaacagtacttcgccgtgcaaatcggctggctggacggcctggagcaaaccggacagcgccccgtcaggcagaaagccgctcaggccttgggtaaaacgctgccgctgctggcgtggacattgccgttgtctcacgaacagctgaacaaaaggacaaccgtccactacccggcgatggtgcagtgcagcgcgcaggcctactggctacccgtacgggatgacacgatgagcggctctgccggcgccaattacccgaagggcgccttgatacttgtcgaacccgttactgccggcataaccgagctcgtgtctggcgacaaggtgatcgcgaaacgctgcgacaacgccgagctcacctttaaaaggtacgtcgaggaggccgggcatcgatggcttaaggggattatgccgggttgcccggcgctgaatgccgatgagtacgtgattgtcggggtggtgcttggcgcctggctgccttag

SEQ ID NO: 427841 - DNA, 363 bp, Serratia marcescens
atgagagatatgaatgaagtgttggagcgatggggcgtatgggccagggataacagcggcattgattattcccccattgccgccgggttcaaagggctgttgtcctataaatcgaatggcgagctttcctgctgcgatgatgacggcctggtgatcgacggttgcgtgggcagattgaagaaatacaaacccgaagagttcgatctcatcattgcccaccatgtttatggcatatccctgcgcaagattgccctgaaaaggaagtgttcagacggtacgatacgtaaagagatgcaaacggcggagggatttattggtggatgcctggcgatgctggatataaagctgagcatggatcgctga

SEQ ID NO: 427842 - DNA, 315 bp, Serratia marcescens
atgccttggaaaaatgaaccaaacatcctttcaatgctgcttgctttcggtatgacgctgctgggggcggtcgccagctattccttcaaggttttgaacggcgaaacctttagctggaggacgctgtttttgcagctgttcgtctctattttcgccggtttgaccatggtgatgattgccctgcattacgactggccttcggaggtgatgggcggcgtatgcggcatggcggggtggtcgggagcatctctgatcaaggcattggaacgtcgatttctcaataaagcgtcaggaggaaaccatgaagataagtga

SEQ ID NO: 427843 - DNA, 441 bp, Serratia marcescens
atgaagataagtgacgatggcatggcgctgattaagcgtttcgaaggcctgcggttgcaggcttatcaggattcggtcggcgtttggaccatcggctacgggtggacccagccggtagcgggacgaaaaataggggccggcatggcgatcgatgccacaacggccgagcgtttgctggtgtgcggcgtcggccaattcgaacagggcgtcgaacggcgggtgacggtgccgatcacgcaggggcagttcgatgcgctggtgagctttgcctataacctgggcctgcgcgcgctggagaactcgacgctgctgcgccgcctgaacgccggcgatcggcagggagcggccgacgagttcggtcgatgggtgaatgcgggcggcgtgcggctcgatgggctggttgcccggcgcgcggcggaacgtgcgctgttcctttcctga

SEQ ID NO: 427844 - DNA, 390 bp, Serratia marcescens
atgattgaagatgaaatccaacgctcgctggccgcgctaacccatctggcggttcatccgctgatcttgccggatccgcagcaagaaggcgtgacctatcagaagatcagcgatctgaaagtgaacaccggtctggtcgacagctcgctggtgcagagccgttttcagattgtgctgtacgtgatcgacgattactcccggctgatcgctctggataaggcggttttgaatgcctgggaaggggttcggcatggccatatcggccaatggccggtacaggcggtcacgcgcagcactcttttgcagagcgctacgtcgctggcggataaccgcgttcagtatcggatggcgcgcgattacctcatcacccattccgaggtggcggcgtga

SEQ ID NO: 427845 - DNA, 393 bp, Serratia marcescens
gtgatcgccataaacgtttccggcatggcggaattgactcgccgtttggaagcgattcggcgcgaggtagccagtcacattctgccggaggccggccacgccgcgttggccccggttcttggcaccatgcggcagtgcgccgaacgaggggcgccaaacagcgaaccctcgctgagcgccggcatcgcgatacgcccggccgttaccgcatggaacgcggtgacattgcgcgtcggccccagtaaacagcattaccgcagagccctggagcaggagtacggcacggcaacgcaagccgccgccccgtttattcgccctgcgctggatcaccacaagcaccaagtgttacgcatcctggcggctcacgtccgctatggcatcgaaaaccggtag

SEQ ID NO: 427846 - DNA, 456 bp, Serratia marcescens
atggctgataaaacttcgccagaatacgccatgctgcctgccggcactatcgtcaaatggggcaccgtcggagctgcaaccacggccatgaaggcgctgaccaactgtaaagcggtaggtgaaatggggcaaaccggcggttttgtcgattgcaccacgctgctggataccgccaagcagtttatttccgacctgccggaaggtgcggagaaatccatcggtttcatcgacgatccgtccaacgccgattttgcggcgctgctgaatgcggcggacaagcgcgaaacggtgcagttctacgtcgagctgccgaacggccgtacctccacctccatcctgtcgctgtccggctggaaaatgaatgagatcaccgccccggcgagcgaagtcattcagattaccgtccagggcaagcaaaacagcaatacctggggtacggtcaccccaaaagtgtga

SEQ ID NO: 427847 - DNA, 366 bp, Serratia marcescens
atgacagagaaatacgatctgaaagcgctgaaagcggcgctgctgaaatccgacgatcacgtgattgaaacgcagatctttggcaccaaagcctttatccgacgcctgaaagcggcggaactgcaggaaaatgaagacggcatgaaggccgccatcgacagcggtgacatgaacaaagccgcgcagcttaacgtgcaactgctgctgtcatgcctgatgacgccggacggcaaacgtatcccggccggcgccttgccgagcgttgacgatctgctggcggcgcacgataacccaacgctggtcgaagccatcggtgccgtcaagcgccatgcggtcggcagcctggaggaagcggaaaaaaactga

SEQ ID NO: 427848 - DNA, 2385 bp, Serratia marcescens
atgcggcggagagtgcccccgttcatcaatccggtcagcccgcgcaaagcagtattgatatgcagtgtgctgacgttatgcgagtgctgggaaatggctgataccgcactgttggtcgtcgggttgcaactgaatgacaccaactttaaaaacaaactgacggcggcttaccgtactgccggggaacaatccgccaaatttaaccgccaggctcagcaggacgcgaagaagaccgacgagtcgtatcaacgcatcggcggcacgcttggcggcctggcggggaaactggcggggctggccggcgttgagctgtcgctgcagggcctcgccgccacctcgcgccagtatgggcaggcacttaccgaacttgcgtccatcaccgttgccgcgacggcgcagatgaggcagttggacgacgcggcccgccaggcgagcagcgcttccggcgaaggcggcagtcgggcggaggagatgctgaaactggccggcggcctgaatgacagcgcggcggcctggcgcgatcaggctgcggcggcgcgcggggcggctcaggcgacatcgggcgtcggcgcggcgtctcgtgtcgccaacgttgcgctgggggcgctgggcggcccgatcggtgtcgccatccaggcgggattggcgctgttgtacttccatgagcaaaaccaattagctcgtcaatcggctttggcattgaaagatgcggcagtcgagacggccgaagatctcagcaaactctccagggcaaagctcgccgtcaaaattgataccttcgacgatcagttaaggacgctcagtgaggaaaaagccaagatcgaaaaccaactggcgcgtaggagcgatatccgaattgctggcttagagcgccgaagcaaagggttgttgggattcctctattctgatcccaaagaggtgaagaaagagcggaacgccttgcaagcacagttggaagatgtcattaagggcgagaaagcgatccggcttcggcgaagcaatgccgttaatgcacaaaatggcaacgacagccatgttgaggccaaacctgttaagcctaagggccatcaaacaagtgcccttcctgtcggtcgtattttcaacgataacggcaagcagctggctcttgataagtaccaactgctgcggcaggaaatcgagcaggcgcatctgagcagcctcgacaaaatcacccaggatgaacaaagcgcacaggccaagctggcgtcagcggccaaggcggccggtgccgggcaagccgatgtgcagcgtgcgatggcgctgaacgccgagaagtaccagcggcagcggcaacagcttgctgaacaatacgcgccggggcaggcggcggtgcgtaaagagcaggaggtcggcaaggagctgaaggcgctatatgacgggcggctgctgaccgaacgcgagtaccagaccgccagccggatgcagcagcaagaaacggcgcgccaacggctgaaggccgaaaccgacgcgctcgctgcgccgcgcatgaacattgccggtgatgtggatcctgccgctcgacttaacaaccaattggtgcagcagcaggcgcaataccaggcctactaccagcaaggcttgctggataaacagcgctatgaacagctgatgcaggcggcgacgcaagaatcgtcggacgctcagtatcagcaggcgctgagtctgttcggcgggcagagccgcgtgcacaagatggcgctggggctggtggacatgacgcgggaacgggcctccggcatgatgttcgatctgctgaccgggacgcaaaactttaagcaaagcatgctcggtttgatgacctccatgacgcagtccatcgttcagcaactgatcgatctggcgatgcaggcgctgttgaccagaacctttctctctacctttatgagcataggcggcggtttgctgggcggcgctgcaagcgccggcgcgggcgcggccggctcaggcgcgatgggcatgccgaccggttggcaaggctatgtccccaacgccaagggcggcgtatacgcctcgccttcgctgagcgcattcagcggtgagatcgtcagcaatcccacgttattcgcgttcgccagaggcgccggtttgatgggcgaagccgggccggaggccatcatgccgctcaagcgcggcgcggacggttcgctcggcgtgcgggcgatcggcagcggccagcagtctgcggcggcgccgaatgtctacattaccatcgagaacggcggcaacgtcagttcgcaggccgatccgggatggggcgagttcggtaaacggatggggaatatcgccgcgcaggaaagccaaaaggtgatcaaccgcaacctgatgccgggccagccgatttggaaagcaatcaaggggatgtaa

SEQ ID NO: 427849 - DNA, 339 bp, Serratia marcescens
atgggcattcagacatttgaatttccggcgcgcgtcaatgccgccggcgatacgcgctttcgcgtcagaaaggcgcagttcggcgacggctatgcgcaggtctccggcgacggcattaacccgatcgtgcgctcctgggatctgacctttgtcggcaagtatgactacatcacgccgatcatcgtctttctggaaaaccatcacggggtgaagtccttccaatggacgccaccaactcaggttcccggcctgtaccgctgcgagggttataagccggtcgccatgggcggggacaactattcactgacggccacgtttaccgaggccttccacgtttaa

SEQ ID NO: 427850 - DNA, 750 bp, Serratia marcescens
atgctgaattcagatttgcaaaagctggagccgggcaaccgcatccgcctgattgaggtagacggcacccgatttggcgccgatattctgcgctttcattgcgataccctgccttttacgccgcaagagctggccgccgccggcggtgatgaaaccaaattgccggcgaaatcggtttggtggcagggacaggagtacggcccgtggccgtttagcgttgaagggctggagatctccgccgacagccaaggcaacgcgccgaagctgtcggtcgccaatatcaatggcctgatcagcgcgctctgcctgcagtttgaggacatggcgcaggccaaggtgcggatccacgacacgctggtgcactaccttgatgcccgcaacttcccgcaggggaatcccgcggccgatccgctgcaggaaaagctgcaggtgttctacatcgatcgcaaggcgacggaaagcgacgaggcggtggaattcgagctctccagcccggcagacctgcggggattgcgcattccgacccggcaaatccacagcctgtgtacctggtgttcgcgcggtggctatcgcaccggcaagggctgcgattacgccggtagccgttactttgacgacaagggcaacccggtggatgacccgagccaggatcgctgcggcgggctgctgagcgactgccaaaaacgctttggcgagcacgagccgctgccgttcggcggcttccccggcgcggcgttgatccggcagtag

SEQ ID NO: 427851 - DNA, 705 bp, Serratia marcescens
atgaaagaaaaaaccgtggcggccattatggcgcacgccagggccgagtatccgcgcgaatgctgtggcgtagtggcgcaaaaatcccgcgtggagcgctatttcccgtgccgtaacctggcggacaaccccaccgagcagtttcatctggcgccggaagactacgtggccgccgccgaatggggcaccatcaccctcattgtgcacagccacccagacgccaccacgcagccgagtgagctggacaaggcgcagtgcgacgcgatggagttgccctgggcgatagccagctggccggagggggatttacgtatcctcttgccgcgcggcgaactgccgttggtgggtcgccagttcgtgctggggcataccgactgttgggggttggtcatgagctacttccggcaggagcacggcataacgctccaggattaccgcgttgattatccgtggtgggaacggggtgaaaaccgctatctggataactggcatgcctgcggctttcgcgagttcgatggcccgccgcagccgggggatatggcgatcatgcaggttgcggcgccggtggccaaccacgccggcattttgctggcagatggtctgttgctgcaccatatgtacggtatgctcagccagcgggtgccttacggcgggtattggaaagagcgaacggtgaaggtgttgcggcatagagaaatgatgtaa

SEQ ID NO: 427852 - DNA, 627 bp, Serratia marcescens
atggccttcgttaacgtctcaataagaacggttaaattccacgggccgatggttaaactgtttgggagagagtttaagtatcgagccataacggttccgaaagcaattgatgcaatgaggaatttacttccagggtttgaacgctacatgcttgaagctcataatcgcggattaacattctctatatttgttgggaagcgaaatgtaagccaagatgagttggagttaacccaaggtactgatgatattcatattgttccggtggttattggaagtaagagagccgggctatttcaaacaatattgggggtggcactggttgccactgctgcatatttcactgggggtgctgctattggaatgggggcggggttttccagtgctggagcatgggggtctgcttcattagttggcgcttcccttgccctcggcggcgtcgtccaaatgctctccccgcaaatgggcgggctgcgcatgcggcaaggcccggaaaataagccgagctatgcctttggcgggccggtcaacaccacggcgcagggcaatcccgtcggcgtgctgtacggcacgcgtgaaattggcggggcgattatctccgcaggtatttataccgaagaccagcaataa

SEQ ID NO: 427853 - DNA, 3585 bp, Serratia marcescens
atggcacagaacatgatccgtgggcgaaaaggcggcggcggtggcggccacacgccggtagaatcgccggacagcattcagtcgatcgccagagcgaagatgctattcgcattgggcgaaggggagtttgccggcgggctggatggcacgaacatttttgttgatggtacgccggtactgagcagcgagggaacggaaaactttcccggtttccgctgggaattccgccctggttcgcaggcgcaggaatatatccagggcattcccgccgttgagaatgagatctcggtcggcagcgaactgaaaagcggcgcgccgtgggtgcgctccgtctctaacctgcaactttccgccgttcgactgcgcctggggtggcccatgctgcaaaagcaggcggacaacggcgacgtcaacggctatcgcatcgagtacgccatcgacgtggcgaccgacggcggcagttaccaggaggtgttaacggcggcgatcgacgataaaaccacctcgctgtatgaacgctcgcaccgcatcaacttgccgaaggccaccacgggctggcagctgcgcgtgcgccggttgacgcctaacgccaacagcgtccggatcgccgaccgcatgaacatcgaggcgctgaccgaaatcatcgatgctaagctgcgctatccgaacactgcgctgctttacgtggagttcgactcgaagcagtttcccaacatcccgaagatcagctgcaaaccgcgcggccgcctgatccgcgtaccggacaactacgatccgcaaacgcgcagctataccggcatctggagcggcggctttaagtgggcctacagcgataacccggcatgggtgttttacgacattattttggccgagcgctttggcctgggcgatcgcatcgacgcctcccaggtctccgagtccgaactgtatcgcatcgcgcagtattgcgatcagccggtgccggacgggcgcggcggcgagggcatggagccgcgttttacctgcaacgtttatctgcagtcgcgggaagaggcctggacggtgctgagcgatttggccggcattttccgcggcatgacctattgggggcaaaaccaaatggtcgccctggcggacatgccgcgcgatatggacttcacctacacccgcgccaacgtcatcgacggcaagtttacctactcgtccgccagcgagcgcacccgctacagcaccgcgatggtcagctggtccgatccgggcaaccattacgccgatgcgatagaggcggtattcgacagcgatctggtgcgccgctacgacgtgaaccagaccgaactgacggccatcggctgcaccacgccgagcgaagcgaaccgccgcggccgctgggcgctgttgaccaacagcaaggatcgtacggtcagcttctccgtggggttggacggcatgatccccatgccggggcatatcgtcggcgtggcggaccagatgctggccggacgagtgattggtgggcgcctcagcggcgtggacggacgtaaactgacgttggacaggaagccgggcgctaaagccggcgatcgcctgatcgttaacctgccttcaggtaaagcgcaggcgcgcaccgtgcaggcggtgaatgatcgcgtagtgaccgtcactacggcctacagcgagacgccggcgccggaagcggcctggtccatcgatgcggacgatctggcggtgcagctttaccgcgtggtgggcatcgccgacaacggtgataacacctataccgtcaacgccgcggaacacgatccgaacaagtacgcccgcatcgataccggcgcgcgtatcgacgatcgtccgatctccatcattccgcccggcgtgcaggcgccgccgaaaaacatcactatcgacagctactcctcggtgagccagggcatcgccattaccaccctgcgcgctgcctggggcgcggttgaaaatgccatcgcctatgaggcggaatggcgcaaagataacggcaactgggtgtcggtgctgcgcacttcggcgctcggctttgaagtgccgggtatatacgccggccgttatcgggtgcgggtgcgggccatcaacgccagtgacgtatcgtctatctgggcgacctcgatggaaatctacctcaagggcaaagagggtaaaccgccgatgccggtcggcttcaaggcatcgcctttgctgtggggcatccagcttgactgggcgttccctatcggcgctgaagatacgctgaaaaccgaaattcagtatgcggacaacgctgccgggaataacgcgatgctgttggccgatatcccgtatccgcagcatacccacgccatgaccgggttgaaggcgggccaggccttctggttccgtgcgcggttgcaagaccgcaccggcaatcagggggactggactggctgggccgccgggcaggcgaacgcggacgccggcgattatctcgagaacatcggcgacgatctcttgaccgcgaaagacggcgagcggctggtgggcgatatcgacaccaacatcgacgccatcttgcagaatgcgctggccaacaacgcgacggtggatcaccagtgggcgcagtacggcacggtgcgcgccgatattatggtggtgaaaaccaccatcgcggaggtcgatcgcgggctggccgagatgaaaacccaggtgcaggcgcagattgacgacgtcgcggcggtgctggaagacaaactgacggcaacggtagacgccgacggcgccacggccatccatacgttgaaagcgggcgtgcgggtgaacggcaccttctataacgccggcatgtcgatcgcggtattggcggaaaacggcaggccggtcaccacccgcgtgggctttaacgcgaatcagtttgtgctgatgagcggcaacaacagcaatcagtattcgccgtttgccgtggtggatgggcaggtgtttattagcgatgcgtttattcgcaatggcaccatcgatagcgctaaaatcgcacagcatatccagtcttctaattggataaacgggcagcgtggctgggcgataaataaagatggcggggcacaattcaataacattagcgcccgtggagcgatatatgccgacaccggtgagtttaaaaatggcgtgattggcaattgccggatcctcgagaattgctccattgaggggaaactttccgccgcgaatatcgaaggcgcgatcatggatggctcgatgttaagctgggggtcaggatatacaaatgatagccgtaccttaaaatttagtggtaatagtgtaataccggttcgtgtgtttggacggatacaggtaacaagatacggttctccatatcctcatttttatggtggtgtaagaaaaaattcaacaagtggcagttatttacctgagtcgactggtgggtctgattctggtaaatcggtgtcaattgtttttattgatgaataccttggtaaggggcagtctattttttggcaattggccgttgggcaggtagatcagtcatcttctgccagacagtcaacaagctttttagtggagctgttttcatcgcctcagtatacggccttcagtttagattag

SEQ ID NO: 427854 - DNA, 1161 bp, Serratia marcescens
atgccagcaggcactcttactctaacgaacaattccgccgtagtaaaaggaaccggtacggcctttaataccgagttgaaagccggtgatttcatcgtgagcgttgttggtggcgtaacctatacgttgccggtaaaaaccgttgatagcgccacgcaggcgaccctgattaaagcctatgacggcccaacgcaggcgggcgcagcatggtatgccgtcccgcgcgacgcgatgaacgccataaccgcccaactggccgccgaaacggccaaagccctgcgtgggctgaacctcgataaagataactggcagcaggtcttcagtaataccggaaatatgaccgttaagttgccggatggtggcacctttagcggcccggcctggaataatatttcagcttcactcaataataagttagacaagacgattagcgctaatcaggaaattaaaggttcactgtctttacagggctctgtggtgacagggcaagcggcaaatcttgatgtggggggatattcacgcttccgtaagtcaacgacatttgatgataccatgatggggcgaaatggcattcatttgaactctggtgatacggggtcgtctaatgtccgtgctgaaaagacttttaccaaatctaccggaactgtagatggcccgacattactctctgtcatgacaactgcaggtggcgttgtcactgccatgcaaatgttttgtcgtcgcgaaattggcataactgattatggcgcgatttcatttaaggattacgccaatgtctggcatgaggtgcgcctacagaataatggagactttaataacttaacaggaaattgggtgactggctcagaccttagaattaaaactgaagtaaaagaaattgaagaccctataacactcattcgcggcctaaaactctataccggcaagcgcgatggcaagccctttatcggtggtatcgcacaagaaattgaaaagaaccttcctcaggtcgttgctgaaggcggttctttagagttgcaaaacggtgaaatggttgaacgagtaaaatccgtcgattattcaacgctgggatatgtggctctggctgcactgaatcaggctctggatagaatcgatcgccaggatgaattaatcaaagaactcatggagaaagtacaatga

SEQ ID NO: 427855 - DNA, 2022 bp, Serratia marcescens
atgacactaatcagcggcgtattaaagggcccttatggcgatcctcgctccggcgtaaccattaccatgcgcgcagtcaaaacctcgtcaacggtcttgagcctggctaaatcccagtcggtgacggatgacggcggtaaatacgctttggccgtggagccgggcgcttacgaggtcatcatctctgtgtatggcgcgcagccggagcgagtgggggctatcgaggtttataacgattccttgcctggtacgctcaatgatttccttagacggccaggggaaagcgatatcacgccggagattgtgcaaactgtcgatcgtctgcgtgccgaagcggcagcgtccgccggcaaggcttcttcctctgctgctgcggcaaaagttagcgagcagaatgcggcaaagagcgccgctcaggtggtgaccgcctttgataatgtgcggtttaagttgccggagaacaacaccaatacctctgcctggttcctgctggggcagtttaaaaatgcggggcaaaatggcgtaggaatcgccctcaatttttatggttcaaatggttttaacggttttacttataacgcgggcatgtcgcgtctgatgttgagaacgggcaatcttggcgccagcgattcgaccaataaggtcaaccgaatcggcggcacttttattaacgataccggaacggcgatcctggatattcaggttattgaatccagtcgtgataattatgatatctatttgaaagtgaatgcgtttaccctcaactgctggtatacggttgagcaaatcacctacgcgaacgccgccggcctacgctgggagcataaggcggtaaaacaatcggtggaaccggttggggtgatgaaaattgacatgcgtacgggcgtttcgttctcgcaatcccaggcgttgcccgaatatgccacggtcgcccaatctgctatcgccggttttgggagcgggccggttcatactgaggatgcattcgcgaaggataataaatcttccatccagcgctacacggtggcgacggccaatcggccgggcaatgtgtccggcgggctattaacgctgccggtggatggcggaccttcgtgcgcgtattttgccacatcggtttcgcggcaggcttgggtggggagttcatctaccgcattgccttcgaccatcacctggtcgaggttattcagctcgtccgatcaacccaccgtcgcagacattccaaacctgaaagactggggattgagtaaaggcgtgactgcggcgaataaaggcaatttcaatgcgcaaatgcaaagccggcgcggttatgtaggcacggatcctattggcaacccctttaaagacgttggcacatatttcctcgatacgcgctcatgggcggtgacgcagacgggaaccgacgacagctatcgaacggtacagacctgttacggctatggcgtgagtgccgcgcagacggggaaaattgccgtgcgcagctggaatggcaccgcgtttaccccctgggtttggatatggtcggaagccaacaccacggttgacggcaacggttttatcaagaaagcctcaccgatcgcgagattgtccgcggcgcccgagcatatgcaggctgactatctggaaggcggctttgctctggccgggtgcgcagcggttaacggtgaggcggacggggtgagcgcagagcgaatctccgtcggcgtttatcagctgaatggctcactggggttggcaaaggagggctggaccatcgaggtaccgcaggatatcaacggtaaccgcctgtgctttgtggaaaccgctaccgatagcgacggtggcatcacggtgaaaatcagcaaacgccgtttcgacatcgataccgcaacggtcgtggccggcgaagcgatggatatccccgaagggcgctggatcgatctgcgcctcgccatgccagcgcgtgaagaggtggaagtgctgccgccggaggcgctggtatcaaacgatgaaacgtcatcggaaaccaacgcggtttcataa

SEQ ID NO: 427856 - DNA, 1761 bp, Serratia marcescens
gtgagggtcgtgttattactgctgttcagtctcggctgggggatggcggcacaggcgggcgagtggtcggtcggcgtgctggcgatgcgcggcgatgcggcgaccgagcgtgactggcagccgctgatcgacaggctcaacggcagcgtcggcggagaacgcttccgcctgcggccgctcgatctggcgcagatgcgcgaagcggtcaatcggggcagcgtgcagttcgtggtcactaatccggcgcagtttgtgcagctgaacagccactatcatctgcgctggctggcgtcgttgcgcgccgccaacggcgatcgggcaacgggcaacatcatcggcagcgtgattctggtgcggcgcgacagcggcattacgacgccgcaggcgctgatgggcaaaacggtgggcgccatcgatccgcaggccttcggcggctatctgaccggctataaggcgctcagcgacgccggcatacggcccaagcgcgattttcacctgcgctttaccggtttccctgccgacgccctgctctatctgttgcgcgagcgcgccattcaggccgccatcgtcccggtctgcctgctggagaaaatgggcaaggaaggcctgatcaacccggcggattttcgcccgctgctgcaacaggccacgtcggctccctgcgtcaccagcacgccgctttaccccaactggtcgttcgccgccctgcccggcctggataactcactggtggatgcggtggcgagagccttgctgaccgcaccgccccagtctcccttcctgtggggcgcaccggcctcgaccagcgaggtggaagcgctgctgcgcgccgtcaatcagcacccggaacagcggcggctgtggctggatatcaagagctggctgatccagcatcagacggccgtcggcctgtcgctggcgctgctggcgctgctgatcgtcaaccatatctggatcgcgctgctggtacgccgacgcgggcgacagctgctccgcgccgacgagcaactgcggcggcaggaacgggcgctggaaaacgccaggcagctgaacgtgctgggggagatggcctccggcttcgcgcacgagctcaaccagccgctggcggccattcgccactatgcgcaggggtgcctgatccaactgcgcaacacggacgccgggcatccgctgctggggccgctggaaaatatcgaccggcaggcgcagcgcggcggcgagacgattcataacctgcgccagtgggtgcagcccaccgcggaggcgatagaccaaacgcgctggcgccccaccgcggtaagcaaaaccgccgagcgggtgtggacgctgctgcgcctgacgcagcgctatcccgacctgacgttgttcaataacgtggcgccttcgctgacgctaaccctgccgccggcgctgctggaacagttgctggcgaacctgctgctgaatgcggcgcaggccggggccaatgccgtctggctttccgccgccaagagcgaacgggcgatagagttgcatctgcaggacaacgcgggcggcatgacaacggccgggctggaacaggcttttcgccccttcaacaccaccaaggccggcggcatggggctggggttagccatttgccggcgcctggcccgctatggcggcggcgaaatccgcctggctaaccgcccggctcccgacagccgcaacgggctgtgcgtaacgctgcatttcatattggataacgaggaaaaccatgtcgctaatttatctggtggatga

SEQ ID NO: 427857 - DNA, 858 bp, Serratia marcescens
atgatgcaaactgaaaccgaagtaatagttgaacatagcgaggtgatttgctcgaccagcgtagcgcgaatcgttgctggccgcgatagcgctctgaaacagatagaacagctgatccatcagcttagtgacatttcttcactcacttcttcaattggtggggggactgctggcgagtgggcgatgagacagggaagccgctatgactgctggttaatggaagtgccagacaaagctataaagttgatcacccgaaatatcgatcgcagtatctggcgtgatctgatgatgaaatctggcatgctagctctcatggatgctgaagctcgcgaacagtggtataaaaatttggaagagggcgacctaccagccatcaatgaaggcaatatcctcagtacttttgaacagctacatctgaataaacaggatgtatttgagcgcggtgttatcaatgttttcaggggactatcatgggaatataaaacaaacattccctgtatgttcggcaaaaaaatcattgttaacaatctggtcacgcataaccgttggggcttcagcttaagttggggctggcggcgggaccagttagttgatttggagcgaatgttgtatctgttggatggtaagcccgttcctgacaatcgtggggatatctctgtgcggttaatggagtatatcagggataaccctcgtctgcagagctacgaggatgagctgtttggtatccgctattttcagaaaggtaccgcgcatgtgattttcaaacgcttggatctggtggagaaaatgaacgatatcgtggcgaagcactatccagggatgttagctcgagaagagtgcgccctctattcattttga

SEQ ID NO: 427858 - DNA, 369 bp, Serratia marcescens
atgcaaatcttacctgtcactccgaaacaggcggcttacgcttgcccatcacccgttattgtctggcaatccatgctcacgtatctgctggaacagcattacggattggcgcttaacgataccgagttcagtgatgacaccgtgatccacgaacatattgatgccggtatttccctggctgatgcgttgaatttcacagtggaaaagtttggcctggctcgcaccgatcgccgggggttttcctatagggaacaatccccctttatcacggctatcgatattctccgtgcccgtcgagctaccggcctgatgacccgtatgggttaccaggccatcacctcagttatccggggagaaaagcaggcatga

SEQ ID NO: 427859 - DNA, 336 bp, Serratia marcescens
atgccatcaatcattgccccggcctggggactcaaacgcaacgtcactccgcagtttggcgcccgcctggtacaagaaggcgggcgactgcacttcctggctgaccgtgccgatatcagcggtaccttcagcgacgagcagctgcgtgatgtagataacgcctttccgcagttcatcaaccatttggaactgatgctgctttctggtgagctcaatccccgttatcagcattgcgtcacgttgtatcgcaatggcttgacctgtgaggccgatagcctgggatcacacggttatgtgtatctcgccatttatcctacgccttcatcaacggcataa

SEQ ID NO: 427860 - DNA, 480 bp, Serratia marcescens
atgaacttaaccttatccccggcagtcactgaactgccattaagtacacaacgtactatcaaacgcgccctgttcttgctggaggcccatttgcgtgagccgggagcctcattcacgtcacctggtaccgtcagcgattggcttcgattgcgaatggctaggctggagcgtgaagtatttatggtgctctggctcgacaatcaacaccggctattggcccacgaaacgttgttcaccggcagtatcaacagcaccgaagtccacccccgcgaaatcgtgaaagcggcactgaagcacaatgctgctgcggtacttctcgcgcattgccatccttccggccacgctgagcccagtgttgccgatcggcaaatcaccggcaggattaaagatgcgctggcactggttgaggtcagggtactggatcactgtattgtcggcggcatgtcggtgtattcatttgctgaacacggcttgttatag

SEQ ID NO: 427861 - DNA, 621 bp, Serratia marcescens
atgaaaaaaatgataatgatgtttaccctgttggtcagcgctctgttgagccaggccgcatgcgcagcggcttatgatcccaagccgatagaataccggaatgtggtggctgacagcgtacaggttgagcatgaccgtattatggatggcgttgatgaatttatcatcacggggaagaagggaaaggttactgagaaattcaggctcacctgcaacgccgatgaagcacgtctgggcatcatgtattacctgaaagatatctatggcgataaggccgagggggcaacgggaatgactctgcagtattacccggccggggcccatcaaatgaacatcagtatcgatcatcccgatacgttgatggacagccttctgacggctaatttggcacaggcggtttctgccatgcagaagcgtaaggaagggacctttgtttttcacttctaccacaacgacagcagcttcgatcatgtccctctggcgtacagcttccaatacccggcgaaattgttgacacccgctctgggcaaggcattggttaatgccaagaccacatcatgcgacatcaaatcaggcaatagtcaactatctccactcaagcgtcttgttgatcatctctag

SEQ ID NO: 427862 - DNA, 555 bp, Serratia marcescens
atgttgaaaccttatccgtttcttaagcaagacacctatgcctggtgtttatccattggccttccggttatctggatacccttcgccattttctttcctaaagagattgctcttggcttgtatatggtgctctcgcttatttgggtgctgctcgaccgacttaacctgatgaagcaggagatcacgcccccttcaatgggatggttcttgcttccgatggtttatctccgtcaacgtgacgagcgtcaggggaagccctggcgcttgttacaggtatggctgatttgtaccgtattgtcagccgtggccggtaatcattttaaaacgcaatcaggtaccgaacggctggcgcaaagtgcttgcccggtggtcactaaaatcctgcagcgtcagggcatagaggagcactgtatccgtatcacagatattaaagaggaggtggcagggcgtttttatcaggctcaggctttgttgaataccggctcaaaagagccgctgacgatagaagtgcgttcaggcggtaatatttacgtcacgctaacggattcggaataa

SEQ ID NO: 427863 - DNA, 882 bp, Serratia marcescens
atgaataaaaaacagaaaagttatgagcctctgtcttctttgttacagactcttccccgagaaatatctcaaagagtgtttcatcgactcgatgaagtgatcgcctatgaaccgacaatcggactgatgggaaaaactggcgcagggaaatccagcctgtgcaatacgctttttacgtctcctcctgccaacgtggatgcggtgaaggggtgtacccgttttgctcaacagtacaaaacctctggtggtctgaatgctctcaacattattgatttcccagggatcggtgaaacacccacgcttgataagatgtatgcccatttgtaccaacactggctgaataaactggacctgattgtctgggtactcaaagccgacgaccgcgcctggaatgatgatatccggtgttacagacagttggtttctcagggggcagatcccgcccggtgtctgttcgtcctcaaccaggccgataaaattgagccttgccgggaatgggatattgcaactcgccaaccttctctgcggcaacagcagaaccttcaggagaaagtgacccaggtgaataccgtattttctcccgtacatcctgtcttggcggtttccgcctctgaaggtttcaatattcctgggtgggtcgaaaccctcatcaccgttttacccgacaaagccagcagtgcggttgcccgtcagcttgagcctgagtatcggacagagaaggtgaccaccacggcgcaggagggctttggccgcgttgtaggtgacatctttgacgcaagcgtggaatccctactggagtcacatacattaagaacgtggttaaaacaggtgcgctctcgattgctctctttggccaaattgctctggcatcgcttcttttaa

SEQ ID NO: 427864 - DNA, 807 bp, Serratia marcescens
atggcaagcaagtacaagataacgacctatctttccgataaggcgctctatgaacgggtcattaactcagccaagaaagcagggatgacgcagtcaaaatacgtcgagtcgcttctcatgcaagaaaggccgcatgctaacgatgtgcggaaagtcaggcctgagatagagatttatgatcactactatcccagacaggatattttcccttctcatggggcactcgttcttgaagaggcattggcttctacgcctagtgagaggaagttgttttattctgaacagataacccaagcggccaatacagggattcttgctgatttttataaggaggtgtatggggaaaatgttcataaggtggatgatgacagtgcgatttttgtgtttctcagactacagttttccgggagtctaaagaagaactcaaatgtttcaagtgtggagcttaaatatcgcgttatgtatcagcctatgataattacttctacagagtggaataaatatagtgggtattatgatttcttcaatattagatatttgaggcagtcagaacttattaataaagggtggcgcaggaatttctcaagtaagtactccggagttgtacctgtttttgagaggagaagggaacacagggataatagtggtttctttattccggtttttaaggagcctaagtttttttcagatagagtgagcgaggtaaaaaacactttcattggagataacggttttttctgtggagttaaaaatattaacaacaaagaaagatttaatttaaaatggcgggggttgttaaatatctag

SEQ ID NO: 427865 - DNA, 633 bp, Serratia marcescens
atgaaatcaagcacaacatcacataacaatcactacctaaataggtttgagcaagtcataagtctcgctttagctaaacaccccagaaccttagctgcacgtattgacctgcacttgcctaatgaagtatctcgtaatgacaaaaatgtcatatcacgttttacagatgccgttaaagcgaaagtaaaagcagataggaaaagaagtaaaaaaaccaatcccaaggcacatgactctgaagtccattacatatgggttaaggaaagtaaccaaataggaaacaaagtccactaccacgttctcctgatgttcaataaggatgcttactggacactgggcagctattcggcgagagataatctttcggacataattatccaggcatggtgtagtgcacttagtgtcgataaagaaaaggaccgttctcttgtctatttccccaggaacccttgctatcacatcaataagaatgccctgacgaaaacaaatgactaccaagctcttttagaccgtatcaactacatggcaaaacaccggacaaagcaatatagcaatcaagcacgctcctttggatgctcagtgaactctggcgttctgatggggaaacgaacaaacaagtacatgcctacatag

SEQ ID NO: 427866 - DNA, 210 bp, Serratia marcescens
atgaataccaacacaccatctctgctaaacgatcagcttgtcgacatggcgtttatcactcagttcactgcattaagcgacaaatggttttacaaactgatccagcagggtgagttcccaaaacctatcaaactggggcgcagctcccgttggctacagagcgaagttgaagcctgggtgcagcatcgaatagacctttctcgtcaataa

SEQ ID NO: 427867 - DNA, 621 bp, Serratia marcescens
atggaaaaaattgtctgtgggttgtgcaatgcggaggtcgggttaaatatgttatctaaccatctgcttagtaagcatggttggaagatggtacctaaggccacagtggaagcaccatcagttaccccagaagcctgcaaatgtccaatatgtaatgtttctcttaaagacgccagacgattaaaaaaacatctcgacaaggctcatgccaaagcaggcatttcttctcaacccctccatcacaccgctaaaaaacaaagtgtatccacgatttcttaccattgggcgctcactaagaaattggataaaaaatataccagcgtggtagataaatttgtagccgaaaaaacgttgttagaaattgaaaaggaaataacgcttatagtgaatagctatgatgctgcagatttgtcgcggcagagtttgatgtcaggtcgactgattatactttcgcatgctaagaaaagaattgaagcaaaaaacaaggcgagtaaaaacaagaaagtacctgctaagcgtaaaaaaacagggcgtgctcgttctggggacatcatggaccaatacattggtggcaggcgaatcgttgtttccggtggtttaccttctttaggaaaaagatga

SEQ ID NO: 427868 - DNA, 747 bp, Serratia marcescens
gtgcccattcacacgcaagtacaggctatgagctttatctacggagatgagtggatcaactttgaccgtgagcctcgtcctcatgcaacaagccgtgtgttgattaaggtgcatcctgattgccgggtggttgtctctgcaccggaagaggctgatgacctggccgttttgatggcagtaaaaaaacgaggacgctggatttaccggcagctccgtgatttccgtaaacagcttgagtacattacgccacgtaagtatatcagcggtgagagccattattatcttggcaaacaatacttgctgaaggtgattgaagaacctgcagggttacaacgcgtaaaaatgttgcgtggaaaactggaggttaccttgcgtcagaagagccctgaaaaggtccggcagcttcttgtcgattggtataagactcgtgccaaggatgttttcgccaaacggctcgaagccatgctcgagcaggctctgtgggtcaatgttccgcccccattgcgcattctcaccatgcaaacgcagtgggggagctgctcccctaacggtcggctcacccttaacccaaaccttgtcaaagccccccgggaatgcatcgactatgtaattttgcatgagctctgccatctggccgagcacaaccatagtgaacgcttctatcggcttatggggcaggttatgcctgattgggagaagactaagaagcgtttggatggaatggctggagtgataatggtaggttaa

SEQ ID NO: 427869 - DNA, 2442 bp, Serratia marcescens
gtgaccgggcaagataagctgttaatcagcctattgttgcctgaacgtctgctggatatggttcgcttttatacgctgtttgataaaaaagtaggcaaggttgttgctcgctatcagcaagtgtttggcatcaaacgtttgattgagcgtatcaataccaaaaggcctgatggtggccgtgaaggtggcgttatttggcataccaccggttcgggtaaatcgttgacgatggtatttctgagcaaagcgctaatcttgcatgaaagtttaaagcaatgccgcattgtggtggttaccgaccgcgtcgatttggaaaaccagcttagccgcacctttatctccagtggagagctctccgggaagagagacaagtcagcggcgatcgcgacatccggcaggcgtttggctgagcagattggtaagggcactgagcgtattatcttctcgttgatccagaagtttaataccgccatcaggcagcctgaatgcatcaataccagttcagatattattgtgttgattgatgaaggccaccgtagccaaggtggtgaaaaccatatccgcatgatgcaggcgttgccgaaagccgcattcgttgcttttaccggtaccccattgctgaaagatgataaaacgaccaataaatttggttctatcatccatgcttatacgatgcagcgagcaacggatgataaagctgtaacgccactactttatgaagagcgcattcccgatctggatgtgaatgaacgagctctcgatagctggtttgagcgaatcaccgaagggttaaacgaccagcaaaaagccgatcttaaacgcaaatatgccagtaaaggacagatctacaccgcagacgatcgtattcgtctgattgcattagatattgccaatcacttcgtaaaaaacatcgatgaaggattaaaaggtcagcttgcttgtgacagtaaagccgctgccatcaagtacaagaaatacctggatgaggccgggctgtttgaatccgcggtggtgatcagcgcccctgacacacgtgaaggcaacaccgacgttgatgaatctaccgcacctgaagtggttaaatggtggaaagagaatgttggtcagcaggatgaacaatcctacaccagaaatgtgatagaccgctttgataaagacgactcgctgaaattgctgatcgtggtagataagctgctaaccggctttgatgagcccaagaacgccgtgctttacatagataagcagcttaaagggcacaaccttatccaggcgatagcacgagttaaccgtttgcaccctaagaagaaattcggtctgctcatagactatcgtggcattcttaaagagttggatactaccatagagaagtaccagaaactcgcatcccgcacccagggtggctatgagattgacgatctcgccgggctttataatcagatgagcaccgaatacaaacgtctaccgcagctctataaaaatctgtgggcaatttttgacggtgtaaggaacagacaagataccgagcaactgcgccaggtactggtaccacgcattgaagaaaaaaatggcgaactggttgatgtgcacctgaaagtgcgtgaagacttctacgaggcactgactgagtttgccagctgtttgaaagttgcattgcaatcagccactttctttgaagacaagagcttcagtgaagatgaccgccgtcattacaaagagacggtgaagcagttctccagtttgcgccagttagtgcagcaagatgctggtgagcgtatcgactatgatgagtatgccgagcaggtcaaaaagttactcgataagcatgttgttggcgtggaggttcgggaacctgatggtgtttacgaagtaaacaagatggggcaagcgcagccagaagagtggagcgaagataaaacccgcaacgaaaccgacatcataaaaacgcgtgttactcgtatgatcgagcaagaactgcgtgatgatccctatgcgcaggaggcgttctctaagctattacggcaagctattgaagaagccgagaagttattcgaacatccgctcaagcaatacatgctcttccgtgagtttgaagaacaggtgcaggaacgccgcttgaatgatattccagatgcattcgccggcaaccaccatgctcaggcttactttggcgtattcaaaaaaattctgcctgaggttttttcgattaccgattctcaagttcaggataaatggataaaactggcgtttgatgtggaccgttcagtcgaaacctcggtggctgaaaactcaataaacccgcagaacattgaagcagatatcaggaaaaagctgctgccattgatgttcaaagagtgcaaagccattggcggcggaatggaccaggcgaagaagatcgtcgagatgattgtacaaattacccgtgtcggattgagtggagtataa

SEQ ID NO: 427870 - DNA, 1212 bp, Serratia marcescens
atggtgcctaagggatggggtaatttcatgctaagtgaaatttgcagtaagcaaatttcatatggaattgttcagacgggggacaacttacctaaaggtattccttgtctccgagttattgatttaactaaagattacattagtcttgatgatatgatcaagacttcgttagaaattcatcaggcttataaaaaaacaatcctcgaagagggtgatattgtgctggccctacgtggtgaggtggggctggctcatcttattgatgaaagtctttctggcattaatatcactagaggattagctagaatagcagcggacaaaaataaaatagttccagagtttcttttatgggcgctgcgctcaacaaagttccgaactgacttgatgcgcagagtgggggggtccgctttacaagaaatttctctttcagagttgagaaaagtcgaagcattagtgccaccattatcagagcaaaagaaaattgctaaaatcctttctacttgggataaggcaatcacaattactgagcaactgctaagcaatagccagcagcagaaaaaagcactgatgcagcaactactcacaggaaagaaacgtttggagggattcaatcaggcgtggagtacatttaaagttagtgaaatgggaagtattttttccggaggtacgccggatactactgagaaagagtattggaacgggaatattagctggttaacacctactgacgtgacatccctgaagagtcgatatgtgtttagtacaaataagacaatatcagaaaaaggtttaaaaaatagttcggccaagaagcttcctaagggagcattacttatttgtacaagagcaactattggttcgatggctatttctacaacagaaataactaccaatcagggatttaagaatctagttcctaactctaatttttctgttgattttctttactatctttttaacttcaatgttaaagagttagttaggaagtcgtctggttcgacatttttagaattgtcaaaatcggattttgaaaaattgacctttttatgcccatgcttagatgaacaacaaaaaattgcttctgtcctgattgtggttgataaccagattgcggtacaacaacaaaaaattagctacttaaaacaagaaaaaaaggcgctgattcagcaattgctcacgggtaaacgccgggtgaaaacggatgcggcatga

SEQ ID NO: 427871 - DNA, 1524 bp, Serratia marcescens
atgagcaacaaaatcgatcaagaccgtattaacagagtgctatggggcgtatgcgatatcttccgtggcaccatcagccctgatacctataaagattttattcttactatgttgttcctgaagtacatttctgatgtgtggcaggatcactatgatgaatataaaaaagagtatgggggtgagccagaactaatcgaagaaatgatgaagaacgaacgattcgttctgccaaaagaggccagtttttatgcgctttacgaacatcgcaatgaacctggtaatggagagcgtatcgacgaggctcttcacgccattgaagaagccaatggtactaagctgaaagatgctgggaaaagtgttttccaagacatcactttcaataccgataaactgggcgaagagaagcaaaagaacacgatcctcaaagagttattggtggagttcgctaatccagagctgaaccttaagcctagccgtgtgggcgggttggacgtaatcggtagtgcgtacgaatacctgatcggtaagtttgccgccaacagtggccagaaggctggtgagtactatacccctccggaagtgtctgaattgatggctgaactgttggatccgcaaccaggggacactatttgcgatcccgcctgtggctccgcttccttgttgatgaaatgtggccgtaaggtagtgcagcaccatggtagcaaacaatatgaactctatggccaagaagccattggttcaacctggtcgttagcgaaaatgaacatgttcttgcacggtgaagataaccacaaaatcgagtggggtgacaccattcgtaatccgaagttgttagataagaatggcgatctaatgctgtttgatgtggttaccgctaacccgcctttctcgctggataaatgggggcatgatgacgtagaaaacgataaatttggtcgttttcgtcgaggtttgccgccaaaaactaagggtgattttgcttttattctgcatatgatcgagaccatgaagccgaaaaccgggcgtatgggagtggtggttccacatggtgtgctgttccggggttctagcgaaggtaagatccgtcaaaagctgattgaagaaaatttgcttgatgcagtgattgggttacctgaaaaactgttttacgggacgggtattccagctgcaattctgatctttaaaaagcagaaagtagacgataacgtgttgtttatcgatgccagtcgtgagtttaaactgggtaagaatcaaaaccagctcactggtgataatattcgtgatattgttaatgcttatcgaaatggtgataatattgataagtatgcccatattgccagcctgcaagagatccgcgataacgactacaatctgaatattccccgttatgtcgatacctttgaagacgaagagctaattgatctaatgattgtacgtgccgaacgcgagcaacttaaaggacagatggcaacgttggaaatagaaatggctaagtatctggaggatctaggatatggtgcctaa

SEQ ID NO: 427872 - DNA, 660 bp, Serratia marcescens
atgggttcaaaactccggcccttgaatccccacttggcgacaagtgcacctggaatggtgcacctaaccgaggcctttatgccaacaacattaagaaagctacgtgatattgctactgtccggtctggctatacctttcgaggggcaatagagccagtgcctgacggagatgtacgcatattacaaattaaggacctcgagctggattggcaggaagattatgaggctttacctgcgataagctgggagcagcgtgttgaaccacctttcctcagacaaggcgaaatcgttgttgccgctagaggtaaccggaacgtcgctgctgtttatcgtagtgacatccctgtggtagctaccagccagttcctgatcgttactctccgaacggaagagaacgggatcgttcctgaatatctgtgttgggtacttaaccatcccgtgacacaaaaaatgtttaatcgcagtggtaccaatatccagcttattaccaaagcagcattgttagatgtggagatccctgttccatctgtgcatatccaacgacaacttattgagctacaacgagtctggcaggaagaagataaaattatcaataagttacaaaacaatcgccaccagctcgagcttggtattctgcaaaaattacttaaggataaatag

SEQ ID NO: 427873 - DNA, 1215 bp, Serratia marcescens
atgccactaacggatatcaaggtgaaaacggctaagccgatggataaggcttacaagctaactgacggtggcggcatgtatctgctggtcaagccgaatggttcgaaatactggcgactgaagtaccgttttgtcggcaaggaaaagatgctatcgatcggcgtttatccggacgtttctttagctgatgcacgccagaagagagatgaagcgcgcaaaatcttggctgccggtggcgatcctggtgaggtgaagaaggcggataagcttgcgcagaagctctctactgaaaatacgtttgaggctattgcccgagaatggcacaagcaaaaggccgatcgttggtcgttacgctatcgtgatgaaatcattgataccttcgagaaggacatcttcccttatcttggccgacgcccgattgctgagattaagccaatggagctgctcgaaacgctccggcgcttggagaagcgcggtgcgctggagaaaatgcgtaaagtacgccagcgttgtggtgaggtatttcgctatgccattgtaaccgggcgtgcggaatacaacccggctcccgatctggcgactgccttggcaacgccaaagaaaacccactttcccttccttaccgcagaagaactcccttatttcatcaaggatctggccgggtacacaggcagtgtgatcactaaaacggcgacgcaaatcatcatgcaaacgggggttcgtacgcaggaactacgctttgcgcgttggcaggatatcgactttgagaagcgtctctgggagatccctcctgaggtgatgaagatgaaacgaccccatatcgttccgctgtcagagcaggttatggagctgtttcagtcgctgaagccgattaccggcatgtatacgttggtatttgttggaagaaatgaccggacaaagccgatctcaaaggaaagcgttaatcaggttattgagttactgggttataaagggaggctgacaggacacggcttccgccacacgatgagtactatcttgcacgagcaggggttcaactcggcgtggatagagacgcagcttgctcatgtggataagaatgcgattcgcggcacgtacaaccatgcgcattacctggagggaagacgggagatgatgcagtggtatggggactatattgatgggcttgcgagtgctggaaacgtacttgctggttcgtttagcaaaacggcataa

SEQ ID NO: 427874 - DNA, 621 bp, Serratia marcescens
atgcacgatccgatgctcgaattactgttcagcgaataccgtagaaaagtgctaagcctgctgtttattgaagccgggcaggcgtttcatgtgcgagaaattgcgcggcgcaccgcaactcaggccgggactttacataaagagttgagcaggctggctgaaggcggcatcttgctcaggcagcggcagggcaaccaaatttgctatcaggctaacgccgattgcctgatttttcccgagttggcggcgattttccgcaaggcttgcgagccggctgcgcgcttacggcaggtactgactggatttggggaagacatcgaacgggctttcatctttggttccgtcgccagtggcaaagcgacggcggccagtgatattgatgttctgatcgtcggtaaactgtcttttgcggaggtgattcaggcggtttatccgctgcaggagacgctgggtcgggaaattaaccccaaactttactcgccggaagagtggcgagcggctttggccgagaactccgcgtttattcaggacattatggataaaccccaactttggattgtgggagacaaggatgacgctggacaatctggtcgggctgggactggaggtgataacgcctga

SEQ ID NO: 427875 - DNA, 1356 bp, Serratia marcescens
atgattgcgaaggtgaacaattggcggcaaaatagccgccacaactcgctcagtttgcgcttcccgccctggcagttcctttttctcttttactatcagtacaataatatgaaaacgacattaccacctgcggcacgtttgggccgacaggcgcttttattccctctttgtctggtgctgttcgagttcgccacttatatcggcaacgatatgattcagccgggcatgctggccgtcgtggcggatttcaacgccggcgaagagtgggtacccacctcgatgaccgcctatctggccggcggcatcttcctgcagtggctgctcgggccgctgtcggatcgccgcggccgccgcccggtgatgctggccggggtggcgttctttatcgtctcctgcctggcgatcctgctggtcaccaccatcgaacagttcatcgccatgcgtttcctgcagggcatcggcctgtgctttatcggcgcggtcggctacgccaccatccaggagtcgtttgaagaatcggtgtgcatcaagatcaccgcgctgatggccaacgtggcgctgatcgccccgctgctcgggccgctggccggcgcggcgctgatccacgtcgcgccgtggcagagcatgttcgtgctgttcgccgcgctggcggccatcgccttctacggcctgtggaaagcgatgccggaaaccgccacgctgcagggcgaggcgttttccgccgccaacctgtggcgcgactaccgtcaggtgctgggcaaccgccgcttcctgtgcggcgctttggcgatcggtttcgccagcctgccgctgctggcctggatcgcccagtcgccggtgatcctgatcagcggtgagtcgctgtcgacgctggattacggcctgctgcaaatcccggtgttcggcgcgctgatcctcggcaacctgacgctggctcgcctgaccggcaaaaacagcgtggagcgcctgatcaagctgggcgcgggcccgatgctgctggggctgctgatcgccgcgctggcgacccagttctccagccatgcctacctgtggatgaccgccggcctgagcctatacgccttcggcattggcctggccaacgccggcctgtaccgcctgacgctgttctccagcactgtcagcaagggcacggtgtcggccactatgggcatgctgagcatgatggtgttcaccgtcggcatcgagctggccaaggtcgcctacgtctggggcggcagcgggctgttcaacctgttcaacctcatcagcggcctgtgctggctgacgctggtggcgctgtttatcggcaaacgccgcaacggtgaccccacgccgcagccgaccggcgcggcttaa

SEQ ID NO: 427876 - DNA, 675 bp, Serratia marcescens
atgatagagctctttgacgtagactataatttgctgccagataacagatcgaaagaactattctctttaagaaaaaaaacgtttaaagaccgtttagactggctcgttaattgtgaaaacaacatggaatttgacgaatacgacaatcgtcacgccacctatattttcggcacctaccagaatcacgtcatttgcagcttgcgatttatcgaaacgaaacacccaaacatgatcagcgatggcgtgttcaacaattactttaatgatataaaactccccgatggaaattacgttgaagccagcagattatttatagataaggcacgcattcaagcacttcaactccatcaagcgccgattagcaccatgctttttctgtcgatgataaattatgcaagaagttgcggctacgaaggcatttacgccattatcagtcacccgatgcgcatcattttccaacgctccggctggcatatctcggtggtaaaaaccggatgttccgagaaaaataaaaatatttacctgatcttcatgccgatagacgatgccaaccggaacagattgctagcgcgcatcaaccaacacgccacaaaatgggataacccgttggatgcatggccattatccttccgcatcagcgagaagcggccggatgagttgcagctccacacctaa

SEQ ID NO: 427877 - DNA, 747 bp, Serratia marcescens
gtgtctaacttttttttcaataatgaaaccattaatgcctctatcaaagaagagttggaacgtggtctgagtaaatacaataatataaagtatgcctatgctataatgaataaaagaaatccggctaatttctcaatcgtttccaatagaacggagtggtttgagttttatatcaagaataactatcagtttattgatcccgttttgattaccgcatcgcatagaattaccccgtttacctgggataaagatttggaaattggctcagggttaaagttgccaaagattttcgatatgactaagaactacaatattattaatggatatacttttgtgttgcacgatcatcatcataatctggtggtgttatccattatgctggataagcattgtgatacagatgttgaacagcagattgacaataataaggccgaaattcaaatgctgctgattaccatgcacggaaaaatgacggcgctctaccaggaaatgagcacgcctgctgactttgaaaagatgaatcagcgggagtttttctccaagcgtgaaaatgagattatttactgggcgagcttaggtaagtcctaccaagaaattgcacttatcttgggaataaaactcactacggtaaaatatcacattggcaacgctgtcaaaaagcttggcgtcaccaatgccaaacatgccatcaggttaggtgtggagctgcaactcatccggccgcttctcgctgatgcggaaggataa

SEQ ID NO: 427878 - DNA, 477 bp, Serratia marcescens
atgcatgtgctacccaaagccacggtgatccgcccctgtggcccggaggatatcgaccggctgatggcgctatggctgcccagcaccatcgccgctcatccgttcgtggcggaaaaatactggcgtgagagcgccgcgctggtgcgtgaaaactacctgccgcgcgcgcaaagctgggcctgctggcatcacgacgagatcgtcggctttatcagcgtgctggacgaacagttcatcggcgcgctgtttgtcgagcgggcgtttcacggccgcggcgtcgcccaggcgctgatgacgcacgtgcagcagcgctaccgccggctcagcctggaggtgtaccagcagaacctgcgcgcctgcgcgttctaccacaggcacggttttcaggtgacgcagcgcctgttcaatgatgaaacccaggcctatacgctgatcatgaactggccggcagtcgaaaattcaacctgttatgcttaa

SEQ ID NO: 427879 - DNA, 1035 bp, Serratia marcescens
gtgagcacaggcaaggcaacgcgcgcctcaggacgcgccaccatcagcgatgtggccagcatcgccaaaaccggcaagaccagcgtgtcgcgctatctgaatggtgaacagcacctgctttccgacgatctcaaacagcgcatcgaacaggcgatccagcagctcgactaccggccaagccagatggcgcgcagcctgaagggcggccagacccgcctgatcggcctgatcctcgccgatatcaccaacccctattcggtggacgtgatgcgcggcatcgaggccgcctgccgccagcacggctttaccctgctggtgtgtaacaccaacaacgaagtcaatcaggaacagcactacctgcagctgctcagcagttaccgggtggagggcatcgtggtcaacgcggtcggcatgcgcgaggaagcgttatccacgctgcagcagtcgatgctgccgatggtgctgatcgaccgcaaaatccccgatttcgcctgcgacgtggtgggcctgaacaaccgcgaagccgccaccgtcgccaccgaacacctgctgcaacaaggtttcgaagcgattttattcctcagcgagccgctcggtacggtcaatacccgtctcgagcgcctgcacgctttcagacataccatggcgcagcaccccacgctgtcggcggagcaggccgaaacgccgctcaacgatcggcagaagctggagcaggtgctgagcgatttcagcgaccgccatcgcggcatgcgcaaggcggtgatctccgccaacggcgccctgacgctgcaggtggcgcgcgccatgcgccggctcggcattcagtggggcaacgacatcggcctgctgggcttcgacgagctggagtgggcggagctggcgggcgtcggcatcaccacgctgaaacagcccacctaccaaatggggcacgcggcgctggagcggctggtgcagcgcattcagggcctggcagcccccagcggcgagcagatgttctccggcgagctgatcgtccgcggctccaccacccgctaa

SEQ ID NO: 427880 - DNA, 357 bp, Serratia marcescens
atgaaccagatcacgccgcaacagctgacgacgctactgctggcggccagaaaacagccgtggttcgccgactggtatcgggccttgcccgtcgcgggcgagccggggttgctggtgggcggcacgctgcgtaaccgcatggtgaaaagcgcggctgccggccgcgcccacgccaagagcggttccatgaccggggtatcgtcgctcagcggctatgtcgactcggcgaccgggcggccgctggcgttcgccatcatcagcaacaactacctggtgcccggcgcagaggtgaaagcgctggaggatcgcctggtcgagacgctggcggcctgtgacgcctcggtggtgtgccgctga

SEQ ID NO: 427881 - DNA, 267 bp, Serratia marcescens
atgagtgagtggatttatcccgatgtaattaaaaaacttaggttttcctgtgtggcctttttagagggaaaactatctgtggctgaagttcaatcagaaatagataacgcaggtaacagtattgtagcgatagaggaaaaatggttacgacagttgctacttgatgcggaaagcgatattgaacttttgatcttcactattgacaatgaaaaattgacagcagctgttacacctatcgtacagaatattatcaaggaaataagttag

SEQ ID NO: 427882 - DNA, 1353 bp, Serratia marcescens
gtgggcaagccgcttaatcccaacaacgttaaactgccgcagttgagcaacggcgactggagcaaggtggcgcagcgggtggccgggcaatcggtcatcagctccagcctgaataccgccatcaatggcggcagcttcaaggacaacctgactaatgcgctgctggcgaatatcggcagccaggttcaggccgagggcgccaatctgatcggggataacggtcaggttctcaatataccgggccgggccgtaagccatgccgttctagcgggcgtggccgcagaaatcggcaagggcaatgccaaaggcgcagcggcaggggcgctggcggcggagctggccggggtgatattgggcgacaatatcatcaagccggaggagtggcagaagaaatcggaacagcaggcgcagatggcacgagtgctgggcgcagccgcaggcgcagtcttcaccggcaagtctgatggtgcttacagtggcgccaccggtggtgagaatgcgttccgatacaactatctcagccacaaacagcaagaattgatggagaaagatttggcggccgcgaaatcgccgctcgataaagcggttgtgttggcgaactggggaataacgagccatacccaggatggcgcctttgcggcaggtgtagtctcgggcatcccggttgaaatcagcgatacggtggatggtttggtcgccgtggccagtaatccacgcgaggccgcggatgcattaatagctctgataaagaacgatgaacgattctcgattatcggagagagtgtgaaacaggaatacctggggcggatcgagacattcaagacgaagtacgaacatgccggcgtggatggcgcttttggtgcaggtctggagtttggtaaactgacgatggccgggctagggctgtttgctggggccgccggtgcaggtaagctgggtgtaaaaataactagtaacacgcttaaagctacttccaaagctgccgagaaaaacacattaattgctctagaccgcatgcccaaaagtgagacgaaacttccgtgggactcttggcaaaattatccgaaaaaaacagttgatggacgtcaatacgcacgtataggtgatcgtctttactctcaacatgccgttgaccgaatgcaaccaacaagcttaggttccccagcaggaaccattggacctggaaaaaccatttctccaaatatagttgaacatgtaattaaaacaggtgttactgaaacaagcatatccaatggtattcaaaggacaatttatcgggctggtgacattggtgtggttactgaaaacaatggtaacatcataatcacaatccttcgtaggagtgaaaaatga

SEQ ID NO: 427883 - DNA, 384 bp, Serratia marcescens
atgatggatgaagaacgcatgacttatgaagaattgcgagctgagtatttagattgcttttatagctgttgtagaagtcacattaatgcttttaataaaaatggtacgacctgggagtacggtattgaagaaatagggtatgcatcttatcaatacgaaaatgcacagttatcgcctgtggaaatgttaatgctgaaagtgtttacactcatccttatagccggcagagggccaaaagatgttgagaataattaccgaaactcaatttcttccattttggaaaaaacaaaccttgagtctctaattcaaggtattggcgaagatgaaaaaagcgatttgctttatgatatggagttgcttggattgcttgagaagcctgagtaa

SEQ ID NO: 427884 - DNA, 5982 bp, Serratia marcescens
atggataagtccacttcccctttggcgcggggcgccagctatttgctgatctacctgacggcttcccagccgttgcacccggcgttcgctgccggcattacagccgccaacggcaatacgcaggtggttatcaagccgggcaacgtgccggtggtgaatatcgccacgccgaacggggcggggatttcacacaatacctacaaggattttaacgtcggtacgcccggtgcggtgctgaataatgccatccagggtggcaagacccaactgggcgtgactattgagaatgcaaagggcaacccgaatctgaaagggaagccagcagaacttatcatcaacgaagtcaccggaggcagtcgttccgagctgcagggcaagctcgaggtgttcggcaacaaagccaacgtgattatcgccaacccgaatggcatcacctgcaacggctgcggctttatcaacgcgccgggcgtgacgttaaccaccggcaaaccgcagttcgacaagcagggcgcgctggaggcgctggaggtgaaaaaaggcggcgtcaccatcggcggtaaagggctggacggcagcggcgccgactatgttgacatcatcagccgcgccaccgagctgaacggcaaaatcaacgcgcaaaacctgtcgctgacccagggcgctaaccgcatcagttttaaagacggcaccatcaagccgatcgccggggaaggcgctaagccccaactggcggtggataccaaggcgctgggcggcatgtacgccaacaagatccgcctggtggccaacgagaatggggtgggggtgaacctgaaagacctcaccagcaaacagcgggatattacgctgagcgttagcgggcggattgagttgggcaatacacaggcagcgacagacttgaacgccagcgccagggaaattcatatctcatcgggcgttaaggtgcgcggtgaacgtgacgtgacaatggctgccgatacgctcaataacaacggcaatgttacggcgcatcgcgatatgcgggtgtttgccgatacggtacgcaatgtggcactacgtgatggcgacaacaccgcattgcatagcaacaataatctctggattcagaaagacgctcaggggaataaagccaaacagatagaaaaccgctctgcacgcattcagaccaacagcggtgacttggttatacgcacggagaatttgaacaatgtcaggcaagaggttcaagccgtttggaaaaatactcccgctaactccaaagcgttcaataaatccttggtaggaagttattacgactcacggcaaggtgttgacgctattgtgctgctggagcctgaactgaaggactttggcatcggcagttggtttggcgaaatcaacctgtcgaaaggtgacaaggttaatgtggggaaagacgagtatcttctggtgaaatcgcaggcgccgggggtgataaattcaggcaacaacgcttatatcaacgcgacaacgttatggaacgatcagtcgaatatcagcgcggccaaagatctgatcctgacggggaacgattttaccgtaaagagcattcaactcggccagaaagatcggtactggcgtctgggaacgaacacgtttggcgttggggcgtttgcccgtgacgaagatgcgcctcccggagattgggatctgctgtatgtcacggaaaaagcgccttataccaagcagcaggaacttgtcgtctggcgagcaaaggggcagcaaaaatcatcgattaccgccggcaataatctcactgcggattttaaaaataagatagagatcagtacgccgacgcctcatgaaaatcagctgaatgaagtggtcacctccggcaggccagagtcgctaaaggcacggaatgttctgctgcatgccaaaaatatcgtcggtactgatgcgattcgtgccgacggcaatatcaccgcgattgccgaagatcggattgttcttgggcaaggcattttggccgccggaaaagagctgtctctgacggcggtcaacgccatcgacgcctggcaaagtgagctgaaagggcaggacgtcacgctaaacgccaaaaacggtgagataaagatacattccagcgagaaacctcactacttccgccctgacggttcgcgttggttgggcagccttgaggcttcacgcgatctgtctctcacggctggcagtaccattacgttgctgaatacgctgctggcgccgcaaagtcgcaatatcgccatgacggctaacggcagcattgcaatcgtaaaaaacagcgcgttgttggaggggtcgctattgggggggccggtttctccggctaaacggcaggaatacttcaaccagctgttggccagtggccaaatgagggcaacgggttcggttctgctcaatagcggtggctatctggcgctccgcggcgccaagattaatgcggataaggacgttacgctgttagccgcccataacgccgatcttaactaccgtgaacttgacggtcgattcaatgcgcttttccctgtgtcccgcacgcctgaactgggcagccgggtacacgccggcggcaatttgctgattaactcggcccgcgacatcggcacccagggcggcgcgctctccgctaacggcaatatcacgctgctggccgggcagaatctatggttgtcgaacctggcctattccgccattgatgccgccaacgacaacaacaaagacgaccgccatgtggtcacagccctcagcgcgggtaaaaacctgaccgcgtcggcgaataaccaactgctgacttacggcgccaggctgacctccggcgccaacatgacgctgacctccggcggcgatatgcgtttcgaggcggtgcaaaatcacacttaccgcgagggcggcaacgagttcaccgaaactcgcactcagcagggcaccgagctgaatgccggcggcctgatgacggtgatttccggcggcagcattctgttccaggcgaccaaactggtggttaaaggattaggggcgaactggaaaccgtcggtggcggtgacggattggggaagccggatagcggcggcggagcaggcggttagaaatgcagagcaaaatgttaatcaaaaacagaatgtactgaacaacgttagaaatacgcctgaaggtttgttactcgataatcctgctcagcatcctatttcatacaagcacagtagttctgtaatgataccgggtacggggacttatcacctcgatatggggaatattgaaataaaaacccgttcagatctggatagattgcttaatgagggagggaaggcatttgacccattcccttatggtgtcgatcctgcggaaacatccggtgatggttatgagattgcgctggcaattcgaaaaaagacgatagatgaatatgaaaatttgcgtcaacgcataatcaaaaaaaagaatgagatacacgccgcccaacaagcgttgaattctgttgatagtgaaaaggtaaacgcaaataggaaattagttagcgtccaacaggaagcccaagctaaacatgcggaagaaacaaggctgaaagcccaggtcgatgcccacaaccaggcagaggccatgcgtgtcggcaatatggatatcgccgccaagggcggctatctctacgcccaggcaatggaagagtccagccattacgagaaaaaggaaaccaagcgcaaatggtggggcaagaaaaccgaggttaagcagacccgccatgacgtgaccaacaaggttaccgagtttaccgccgctggcaatatcacgctgatgagccgcgacgacagcacctatgaagccagtaaaatcgccgccgggcaaaacgcgcgcctgaccagttcccgtggccaggttaacttccgcgcggtgaaaaacacctctttcgaacagaccgtcagcaattcgaaaggcttctttatcaagcaggccaataaagggtacgaagacaataagtgggtgctgccgagcattcataccggtggcgccttgaccgtagaggccgccaagggcgtcagcgccgatgtgaaggtgaaaaacgggcaggcgctgcaaagcgccatcgacgccctgggcaatacgccgggcaccacctgggtcaaagatctgaacaagcgcaacgacgtgcagtggagcaaggtcaaagacgcttacgacagctgggattacaagagccagcacctgaacccggcggtggcggcggtgatcgccatcgcggccgcggcggtgaccgcaggcagttcactggcggccacggcggcctccagcgtttccggcgccgtgggcggcggggtggtaaccagcggcgcggtcacggccgggatgtcttcgctggcctcccaggcggcggtggcgttggtggagaaccagggcaacctgtcgaaaaccctgcaggcgctgggtagcaatgagaacgtcaaggcgaccgccacggcgatggcgatcggtggcgcgctcaacggtttcgacagcgcgatgggctggagcaaggacgcggcgggcaaaccgcttaatccaaacaacgtcaaactgccgcagctgagcaacggggactggagcaaggtggcgcagcgggtggccgggcaatcggtcatcagctccagcctgaataccgccattaacggtggcagcttcaaggacaacctgaccaatgcgctgctggcgaatatcggcagccaggttcaggccgagggcgccaatctgatcggggataacggtcaggttctcaatataccgggtcgggccgtaagccatgccgttctagcgggcgtggccgcagaaatcggcaagggcaatgccaaaggcgcagcggcaggggcgctggcggcggagctggccggggtgatcatcaatgataatttggtcagaagtgaaggctggcaagagcgtcaggctcaaatcagccgcgtagcgggcgcctttgcaggggccatcgtaaccgccaaagcagcaggtgccaccagcggtgcaaatgcgggtgagtttgtcgagcgttttaatcgacagttgcatcaggaagaactcaacgccattaaagcgttggctaagggtgacaaggaaaaagaagcgcgtctgatggcggcttcatgccgaaaagtagcttgcaccacgcaagaggcgttgaactcagacgaacgcaagcagtttgaagccctgatgaataagtacccgtcaacgcgggatgaagacggcctcattgccaattactgggtacaaaaagagcgccagcgcttcggcaactatccggcgtttgccggctatgacagcgaaaagttattcacgtatgatttgggcgaccagataaccgacggccagctgtttgctcgcaaccagcagatagaacaaatcagcaagttgaccgggtggtcgccggactgggtgaatgcctcggtgatggcggtctctattgccagcacgtttgccggtatgggtaaagcgaacgtcggcaaccagtacctgtcatccaaactggtagggccaaccagcgcctggaaagggtatctggtcaatgagaagaccgttcaacaggctgctgcgtttaggcagcaggtattggatgctagggcgccatttgcggaaaaaatccgaaaaaaaggaaatgcagctgttgcacaaatcgatgttcctggtatgccgaaaacacttgcggcacacagcaggatagctaaagcagaaaaaagtttcataggtgatggaaaccaaaactttaaatatgaaaccattaaaagttctgatggtatcctcatatctaggaatacagattcagagtacaaaattctggacaacctggctgataagttaggtaacaatgtatcagctgaggggagagtcaccattttcactgaacgtgctgcatgtgagagctgcttgggtgtcgtagagcaatttcagaaaaaataccctggaataaaagtagaggttctcgacaataacgacgtaatgctgatccctgggagattgaaatga

SEQ ID NO: 427885 - DNA, 1455 bp, Serratia marcescens
atgccagaacgtgatatagaactgtttattcgtgattacgttaatgatatcaaagccggcagcgccgcgctgtttgccggcgccgggctgtccatacccgccggtttcgtcagctggaaagagcttatcggtgatatcgcttatgaattggggctggatatagaaaaagaaagtgaccttatttctctggctcaatatcatctcaatgaaaaaggcaaccggcataagataaatcaaaaaataattacagaattcgctgagcaagcggaagaaactgaaaatcatcggatcattgccagattgccgatagcgtcactctggacaaccaactacgacgatctgattgaaaaaacctatgcccgttataatcgcgtctgcgacgttaaaaccacgccggaaagtctgaccaacaatattcacaagcgcgatgttgtcttatataaaatgcatggtgattatagaacacccaaccaggcgattatcacccgcgaacaatacgaaacttactcccgtacacaccttccttttatcaacatgctgatggcggagttgaccgccaaaaccttcctgtttatcggtttcagctttgaagaccccaacctgcaatacgtattgagtcgcctttatgcgcagtacggcgaagggaaaagaaaccactactgcatcatgcggcgcgttcagcctggcgacagcggcagcgaggatcaggcgtcttatgattacaacagccgaaagcaaagcctgatgatcaacgatctgcgccgttacggcattcaaacgctgctggtggaggactatcggcaaatcaccgacctgctgtatgccatcgaaacgcaattcaagaaaagcacggtgtttatctccggcagcgccgacaactaccaaccctatgcccgtgaagagtccatccagttcatacaccgcctggcgcgcctgcttatccgcaaacagtaccgcatcgtcaacggcttcggttggggcgtgggcacggcggtgatcaacggcgcattggaagccatttacgccagcggggggaaaatcagcgaaagccagctggtattgcgccctttcccccaattcgccagcgggggcattacgctgccggcactttggcacgaataccgccagaacatgatttcgctcagcggcatcgcggtttttttgttcggcaacaagcgtaacgccgaaggcgaatgcgtgctggccgacggtttattgaaagagttccacatcgctgcggaacaaggctgcgtctgcattcctatcggttgtaccggcggcgcatccgccgagatctaccgaaaaatcaaggaggagatgaaagacaccctctatcaccgccatcccgtcgccatgaacctgctggatcaacttaacgagccgggcagcctggcggagaagaaaacatgcctgttggcacttatcgatatcattactaaggataatcctcgatga

SEQ ID NO: 427886 - DNA, 207 bp, Serratia marcescens
atgaccagaaaatgtttttacagtttccattatgagccggacaactggcgcgcttctcagatacgcgaaatgggctcgctggaaggtaaccggccggccacggataacgattgggaggaagtgaaaaaaggggggggacgacgccatcgccgcttggatcaaaggccagttggacaatcggagctgcgccgtgattctcgcgggtaa

SEQ ID NO: 427887 - DNA, 1215 bp, Serratia marcescens
atgcgaaactggcaggctccaacccgacgcaccgcgttgttcctggcgctgctggccgtgaccggcccggcgctgcatgctgaggatgcaatgaattccacgtcatctcatttcgcctatatcggcacctacaatcccaacggcgaaggcgtttaccgagtgcaggtcgatccggccagcggcgcgctgagccacactacgctggtcagcaaagtgccgaatccggcgcagctgacgctgggcgccgatggcaagacgctgtatgtcgccagcgaagtggccgatttcaacggcggcaaacacggcggcatcaccgcttaccgggtcaatccggccgacggcggcctgacgcaactcaaccaggtggattcgcagggggcggggccggtgtatctctcatcgacgccggacgggcggcatctgctggtggccaactacgtcagcggcagcgtggcggctttcccgatcgaagcggacggcagcctgggcaccgccagctcggtgcagcaacagcagggcccggcgggcgcggccaaaccggcagcggcggtgaacggcagcttcgccatcagcgatcacaatggcccgcatgcccatatgatcgccagcgatccgagcggtaagttcgtgttctccaccgatctggggttggatcgcatctaccaatggcgctttgacgccgcgagcggccggctgacaccgaacgatccgccgtggatcgccgcctcttccgccggcgcggggccgcgtcactttgtgttccatccggacggcgaaaccgtgctgctggtgaacgaagaggcctcgacgttgaccagctaccgttttgatcgccaaaaaggtactctgaaacaattgcatgcggtttccgcgctgcccgccgactatcagggcaccagcttcgcttcggggctggcgctcagcaagaacggcgacacgctgtacgtcgccaaccggctgcataacagcattgcccagttcagcgtgggcgctggcggtgagttgaagccggtggcggaaacctggacgcgtggcgattacccgcgttcgctggcgctgagcccggatggccgctatctgtatgcgttgaaccagcgcagcgataacgttacccgtttcagcgtaaacccgacggacggcaaactcagcgttgtgggcggctatctgccgatcggcagcccctcgcaaatggcgttcctgccgccgccgaagtaa

SEQ ID NO: 427888 - DNA, 423 bp, Serratia marcescens
atgattacagatgccattaaggccgccgatgcgctgctgcgcgccgtgcccttattgcagggcagcagctctcagcaagactaccgggaagcgctcgaattggtggaatatctgctggaaaacgatgaacaccatccgctgattgacatgctggcaaaaaaaatcgccgaatatgaagataacagcgccgaatttaccgcattcaaccagcgtatcgcccaactcccgcaaggagtggccgcgcttcgcgtattgatggaacaacaccaacttagccaaagtgattttgaacatgagatcggtaaaaagtcgttggtcagccaaatcctgagtggcaaaagatcgctgaccattccgcacattatggcgctggccaaacgcttcaatctgcccccggccctcttcctgccggaagcggattag

SEQ ID NO: 427889 - DNA, 312 bp, Serratia marcescens
atgcatatcatttccagggagccgttcaataacgcaaccaagcaataccctaatgaagccgctgctctcgaggccatttataaagcgttgcgacgcggcgagttccgcacgccggacgagttaaaagcgctttttccttcgctcgatcgtatgaaatacaaagagaaatggtgggtcattgacgtcggcggcaaccacctgcggattttgttcttcgccagcttcgagacacagaaagtcttcataaagcatatcgttagccacgctgagtacgacaagctgatgcagcactatcgaaggagttcatcatga

SEQ ID NO: 427890 - DNA, 858 bp, Serratia marcescens
atgtacttgctgggatgccaatcgggggagcgattaaaaacgattggcgaactggcccgcgacaacgccctgtccatcggtttgatgcaggcggcgctcaagacactggaaaacgcaggctgcataaccgtacaacgcagcgggcgcaacggcagcttcttaacccatgtggactataggtcgctgctggattacgccaacatttcccgcgttgtttgcgccatgccgttaccctatacccgcgagtacgaggggctcgccagcggattgaagcgcgagttttccgacgtaccgttctactttgcacatatgcggggagcggatattcgcgtggaatgtttgcgcaatggcatttatgacctggcggtcgtctcgcgtctggccgccgaagagtatgtaagccggccggaaaacggggtgaagatcgcggcgacgcttggagagcattcttgggtatcgcatcaaatcattcgccgccgcggggatcacggcgcggtgcgcagagtcggcgtggactgccgttcgatggaccaaaagctgctgacggatatgatttatgacccggcgacggtcgcacgggtggaaattccttaccacgactgcctgagccggctcgaaaacggcaccattgatgccgtcgtctggaacgtcgagaaccgccaggtgttggcccgctacgggctggaggccgtgcccctggaaggggatcaacgcgtcgtgctggcgacggaggctaccattttaatccgcagcgatgaccgaagcaccgggaaactgctggatacttttgtcgatacgcatcgggttcgccagcatcagcgcgccgtggtgtcagaagagattgagcccagctattga

SEQ ID NO: 427891 - DNA, 357 bp, Serratia marcescens
gtggaagagaagatgaagctgctttgccaggccggagtgatagatgaagatatcttccgcggcatgttgcaagtcattgacgatctggaaacgcgctgggggcgcccgctgcccgaggaacagggatggatggccatcgcgcatatggcgaacgcgctgatgcgttcacgccgcggcgaaatcatcgcaccgctgggcgaggattttctgcaggagatcgccgcatcgggtgaactgccccgcctgcggcggctgaatgatgggctgctggcaaagttcagcgtacggctgcatcccaacgaggaaggttatctcttggccaacctgttcggcttgtctccccaacagcggcattga

SEQ ID NO: 427892 - DNA, 1164 bp, Serratia marcescens
atgtttttagatgcgctacgcaaacaaaatcagccgctgattgacgcgtcgatcgggctgctgcgccagcacaaactcacgccggacacctgggtgatcgatgtggatatggtgaaacagaatgcgcgccgcattctgcaaacggcggaagaatatcgtgtgacgccgtatgtgatgagcaagcagttcggccgcaatccctggctgacccaacaaattatcgaccaggggttcagcggagcggtggcggtggatttccgcgaggcgcgatgcctggccaataacggcgtgccgcttcgccatctggggcatttagtgcaaattccggacggggaaatcgaaagcgcgctgcgatgccggccggaagtcatcacggttttctcatttgagaaagcgcgcaggatcgccgaatgcgcccggcgtctcggcatgcggcaacgcctgctgctgaaagtatgccagaccggcgatatcgtctaccccggtcaggaaggcggcttcctgcctgacgagctggtcgatgtcgcggcgcgcatcgccgcgcttggcggcgtggagatcgtcggcgtcacgaattttccttgcgccctggcgtcggcaacggcgggcgaaagcctcaccacgccgaactttaccacgctggtcaacgcggcgaaaacgctgcgcgcggcgggctttcctatcgagcaggttaacgccccgtcggccaatagctgcaataccatccctgcgcttgcccgcggcggcgcgacgcatattgaacctggccacgcgtttaccggcaccattccggccaatgaatacggcgatcaaccggaacgcatcgccatgctgtatctgtcggaagtgtctcataacgcaggatcgaacagcctgtgcttcggcggcggctattaccgccgcggccgcctacggaacgcgctggttttcaccggggatacccccagcgagacgcggacactgccgttcaaatcggacaatatcgattactacctggggctggagggcaatttcgcggttggcagcccggtaatcatgtgtttccgcacgcagatcttcgtcacccgcagcgacgtagcgcttatccagggcatcagcgcaggccggccaacgctggccgggctctacgacagcctgggcaatcccatcgtctcgcggcaatag

SEQ ID NO: 427893 - DNA, 1230 bp, Serratia marcescens
atgaacaaatttgtagtcctggtgatcgacagctttggcgtcggcgccatggaggatgtgccgcaagtcaggccgaacgacgcaggcgccaatacctgcggccatatcttgcagcaatgtcccgacctgcgcctgcccgcaatggaaagattgggcctgatcaacgcgctgggataccgggccaacgtgatggagcccaatccgcaggcaaacgtcggcaaagcggcgctacaacatgaaggcgccgattcgttcatggggcatcaggaaattatgggaactcagcccaaacagcccttcagaatgccgttcggcgaaatcatggataaaacggctggcgccctgcggaaagcgggctaccgggtgcagcggctcccggtgacggcgaatacggcatacctttgggtcaacgacgccgtggccgtcggcgataaccttgaaaccgaccccggcctggtctacaacgtgaccgccaatctgaacctgatcgattacgacacggtcagaaaaatcggcgccatcgttaggcgatgcgcgcccgtgagccgcgtcattgtcttcggcggagaaagcaccagcaacgaagccatcgccgcagcggcgcaaagccggcaagacatgtacgccggcattgatgccccgcgttcgggcgtctaccggcaaggcttccgggtcgttcatttgggttacggcgtcgatgaggccgtacaggttcccgcctgtctgcaacgtcaaggcatcccgacatccctgatagggaaagtggcggatatcgtcgccaatcccgacggcgataacttcggcgggattgtcgattccgcgcaaatcatggcgctgaccctgagcgaagcgcaacgaccgggccggcggtttatctgcaccaacattcaggaaaccgatctggccgggcatgcgcaggatgtggcgcgttatgcggagcgcctgcaactggtggacggatatctggcgcatctcatgtcgctgctggataaggacgacgcgttagtggtcatggccgatcatggcaacgacccaacgatcgggcattcacagcacacgcgcgagtgcgtgcccctgctggtctggcgcccgggcgttactggcgtccggctgggagatcgggccacgctgtccgacgtgggcgcctccgtttgcgacgccttcggcgctcccgcaccgcagaacggcacctcttttttctcattattgcaggggaattctcatggctga

SEQ ID NO: 427894 - DNA, 894 bp, Serratia marcescens
atggctgatcagattgaatggctcaacgccgacggctacacctatgcgcatgaacatctgcacatcgatctttcaccgtttaagcataacgatgactgtcgcctcgacagctatgctctgctgcgcgatgaaatggaggcgttgatggcgcggggagtccgcaacatcgtcgaggtaacgaaccgctatatggggcgggatgtccacttcatcgcgcgcctgatgcgcgacaccggtatcaacgtgctgctctccaccggctactaccaacaggatttctatcccgaacacgtcgccacccgagacgcgcaaacgctggccgccgaaatgattgccgaaattgaatgcggcatcgacggcagcggcctgtgcgctggcgtgattgccgaaatcggcagcagcgagggccgaatcacgcccgacgaatcaaaaatgttccacgccgccgccctcgctcaccacgccacggggcggccaatctccacgcataccagcttcagcaccatggggccggagcagctcgccctgctgcaatcttacggcgtgccggccgaccgcatcgtgattggccactgcgatctgaaagacaatctggaaactgtcttgcacctgatcgatcggggagcttgggtgcagttcgacaccattggcaaaaacagctactacccggatgaaaaacgcgtggcgatgctgaccgcgctgtcgcaacgcggcctgctcgagcgggtgatgctgtcgatggacatcacgcgccgttcgcatctgcgcggcaacggcggccccggcttcagctacctcatggacagtttcgttccgctgttgctggaggcggggatcggtcagcaagccgtgaccgcaatgctgcaacacaacccaaatcggttcttcaaataa

SEQ ID NO: 427895 - DNA, 354 bp, Serratia marcescens
atgaaaaaaatcggaattgcaggtttacagcgggaacagatcaaacaggccatcgagagcgccgccccaggcatttttgacgtcagcatcttaagcgacatggacgccgccgcccgagtcaaaaacggcgaactggactatttcatcggcgcctgcaataccggcgccggcgctgcgctgtccatcgcgatagccatcatcggcttcaacaaatgctgcacgatcgccaagccgggcattcgtgcgaaagaagagcaaataacgaagtgggtggcggaaggaaaagtcgcgtttggcctttcggtcgagcacgtcgaacatgcgatcccgctgttgattcggcaactgtcataa

SEQ ID NO: 427896 - DNA, 1311 bp, Serratia marcescens
atggaccctatcctttccgtcattctggtgtccctgttgacgggcatgacggcgctgttatctcaccgttcggcggcagtctttcatgacggcattcgccctatccttccgcaactggtggaaggccatatgaaccgtcgggaagcgggcagcatcgcttttggcctcagcatagggttcgtggcctccgtcggcatttcatttaccttgtccaccggcttgctgaacagctggctgctgtttctgcctaccgacatcatcggcgtgctggccgtcaacgtgtggctggcattcattctcggcgccatctggggtattctggtcttcaccagcctgcagcccatcaaccaactcctgacctcgctgccggtagacatcattggcgcgctgggggaactgagtaacccggtcgtgtcggccttcgcgctctttcccctggtcgccattttctaccagttcggctggaaacagagcgtggtcgcggccctgctggtgttgctgtcgcgcctgatcgtcgtgcgttatttcccacatctgttcccggagtcgatcgaaatcttcgtcggtatggttttgctgttgggcatcgcgattttccgcgatctgagagatcggcggacttccccaacgggtgaagaggcttcggccccgtcgatgtttgaggagcgcacacagcgcattatcaacaacctgccgcttatcgccgtaaccggcgcgctgatttctgccgtcgccagcatgaagatcttcggaggctccgaagtctcgatttatacgctggcgaaagcctacgcgcccggcatctcgcccgaagaatcagacgcccttctgcaccaggcggcgctggccgaattcatgcgcgggcttggattcattccgctgatcgccactaccgcgctggcgaccggggtatatgcggtggcgggcttcacgttcgtctttgtcgtcggttacctttccccctcgccctggcttgccgcaccggcgggcgccatcgtcatcacgctggaaatcctgctgctgcgctatatcggcaaatggctgggccgatatccttcggtgcgcaatgcatccgacaatatccgcaacgcgatgaatatgctgatggaattcgccttgttgatcggctccactttcgcggccatcaaaatggccgggtacacgggcttcagcatggcggcggcgctctatttccttaacgaagcgctcggccgcccggtgctgaaaatcgccgcgccggtggtggcggtcattatcaccggcattctgctcaatattttcggctggatcggcctgtttgtgccgcagtga

SEQ ID NO: 427897 - DNA, 855 bp, Serratia marcescens
atggctatattcgctctgaacataaaacgaagcgccgttacagggctcgccctgatttgtctgcaaaacgtgccggtgcatgccgagtccatcgcgcccaacagcgatacccgcgagcggtggcgggtagactattcggatatcggctatccgaatgtaggcttttctccctacatagaaggctggatcaacggttatcttacgcctgcagactatccggacggcgcggcaatcctgccggccccgccgattgaaggcagcgcggcctggaaagccgacgtggaaaccttttaccagcttcgcaaactgcgcgatacgccccggggcaggttggcggtggaggatgccaatctgtccttcaatgccatcggtcgggctttctccgcagcgttgggtacggagatatcgcgccaacgcacgccgcatacccatcttttgctgagccgcctgctcacggacgcaggctatgcttccaacggcgcgaaaaaggcccacgcccgcattcgcccctactccgcgctgcgggtggagagctgtaccccgcaagagcacagtgcgctcagcaacgatggcggttcctatccctccgggcatgccgtaaccggtttcgtatgggcgatgacgctgacggccatggtgccgcaacgtgcgacggagctcatgcgcaagggttatgagtttggccgcagccggctgatttgcggcgtacactgggccagcgatgtcgaagccggccgcgtgttggcggccggtgcctttgctcgattgcaagccagcgcggaatatcagcagcaatttcgggaagcaaaacgagagatagatcggctgttgcagcagcaaacggaagaacgctga

SEQ ID NO: 427898 - DNA, 885 bp, Serratia marcescens
atgaaaattaaaaatgaacgtaacggcacttatgatgatttcttaaatgcgatactcactttcgaaagcacgatcgatccgcaaaaagcgcaatattatgcggaaaattatgataatccaaccgcgacatcttatcaggatgtggagtatcccggccgggttattcgggcccaggatggcacgacaaccaaaagcaatgtctcgataagagaatatttcgagcgtttgggtatcggcaaatactatactcaaggttcaacggatcctcagatgttcaagcaaatgcagtatgcgacgatgaactatctcggttttatcggttatcagctcagcgaacaagacttctgggatctgggatattacacgcattatgatgaaaaccatctccctaaatattattccgacgtgccggtgtcaaattgggccaacggcgtgcgggataaggtcatgaatctgcctggcaaaggcgaagtgcatgtcacggatgtgaatacctggcaagggacctttaccggcaaacacggcattaatagttttgacgatgttctcgatccggataaacaggactatgtcgccaaagatcattttgtcgataagtacgagggcatggtgcgtttgctggcggagagaggcaaaaccctgaatgattatttgggcaccactattcgttggtctgaatgccatcccgtgttgacgccgccgccgggcgtgccggatgcggtggaaatcacgctgtcgggtttactcggcggtgcccatctgcgcggggcggagggcattaccgccctgctggtcgatcgtgaaaatcgggcggatgaaaacggcacggcgattttgcagtatgtctatcagttcgcaggctatgacacaccgtttaacccctaa

SEQ ID NO: 427899 - DNA, 678 bp, Serratia marcescens
atgagctctccagccaactttaataatcaacgcccggtgattaaccctgccgatgcggcaatgctgcttatcgaccatcaaagcggtttgtttcaaacgattggtgatatgcccatgcctgatctgcgccgctatgcgacagcgctcgccaaaatcgccactctggcgaaaatgcctgtcattactaccgcttccgtgccgcaggggccaaatgggccattgattccggaaatccacgaaagtgcgccccatgcgcagtatgtcgctcgcaccggacagataaacgcctgggataacccggatttcgttgcggcggtgaaagccacgggcaaaaaacagttgatcatcgcaggtacgatcaccagcgtttgtatggctttcccggcgatcagcgcaattgacgccggttatcaggtgtttgccgtggttgatgcctccggcacctattccaagatggctcaggaaatcaccttggctcgcgtggtgcaagccggggcggtgccgatggataccgccgccgtcgcgtcggaaattcagcaaacctggaatcgcgcggatgcggctgaatgggcagacgtttacaccttaatcttcccgaactatcgcttgctgattgaaagctacaacaaagcgcaggatgtgattaagaaaaacgagatcctggactcgcagcgttga

SEQ ID NO: 427900 - DNA, 888 bp, Serratia marcescens
atgatagatttcaatgaaatgtttatgtttgccaaagtggttgaatgtggtggttttcttgccgccagcaagaaattcggcatatcaaaatccatgctgtccagaaagatatccaatcttgaaaagaggcttaacgtcaggttaattcaacgttcaactcgaaaaataatgattaccgatatcggaaaggaatattatcgctactgtataaaaatgctcaccgccgctgaagaggcggataatttcattattaataaaatcgaaaaacccacggggaaaataaggataacatgttcaaatatgcttattgatcttggcttgccagctattttaaccaagttcatgttgcagtaccccgaggtcagtctgcatgtaaagatattcaacagagatgttgatatcattgccgaagggtttgatatctcattaaaaattgtcaccgacgtgcccaaaaacagcaatctggttatgcggaccatttgcaccataccttctgcatttatggtgagcgcatcagcattcgacaaatatgctttaagcaaacctgcggatttatcgaaagtgcccacgcttggctggctgtcttcacacgtccaggctacctggacatttcgtcaagccaagcgcgagatcaaaatcaacagcgatccatgcctggtgtgcgacgatattcgcctgataaaagatgccttggtgggcggcgtcggcgttggttttttgccgctggcgctggcggagcaagagttgatggcaggaagcctgaaaaccgttttcgacgattggtctgtggaggcgcataaaattgtcgccatttaccccacccgacaaggcctgcctcccgctgtcagagtattaattgatttcattgttgatgaattcaatggatag

SEQ ID NO: 427901 - DNA, 1998 bp, Serratia marcescens
atgagtgagaaagacacccccctaaaaaatccgcaaagccatatcaacaaagcggtattcttcacctctgcagtcctcatttttcttctggtcgcgttcgccgcctttttccccgacgtcgctgacaagaacttcaaacttctgcagcaacaaatcttcaccaacgccagctggttttatattttggccgtggcgctgattttgctcagcgtgacgtttctggggctttcccgctacggcgacatcaaactcggccccgatcatgcgcaacccgattttcgctaccactcatggtttgccatgctgttttcagcgggaatgggcatcggcctgatgttcttcggcgtggcagaaccggtaatgcactatctttcgccgccggtcggcacgcccgagagcgtcgaggcggccaaacaggccatgcgcctgacctttttccactgggggctgcacgcctgggcgatctacgccatcgtggcgttgattctggccttcttcagctatcggcatggcctgccgttgaccctgcgctctgcgctttatccgatcattggcgaccgcatttatggccctatcggccacgccgtcgatatcttcgcggtcatcggcaccgtattcggggtcgcgacctcgctgggttatggcgtgttgcaggtcaacgccgggcttaaccacctgtttggcgtgccgatcaacgaaaccgttcaggtgatattgatcgtggtgattaccgggctggccaccatttcagtggtttcagggctggagaaaggcatacgctttctgtcggagctgaaccttggcctggcgctgttgctcctggccttggtcttgctgttggggccaaccgttctgctgttgaaatcctttgtggaaaataccggcggctatctgtccgagctggtcagcaagacgttcaacctgtatgcctatgagccgaaatccagcaactggttaggcggatggacgctgctctattgggggtggtggctctcctggtcgcctttcgtcggtatgttcatcgcacgagtttcccgcggccgaaccatccgcgaatttgtcacgggcgtgctgttcgtcccggccggcttcaccctcatgtggatgacggtgttcggcaacagcgccatttacctcatcatggaaaagggcgcgacagacctcgccgctacggtacaacaagacgtggcgctggcgttgtttaacttcctggagcatttcccgttctccagcgtgctttcgtttatcgccatggcgatggttatcgtctttttcgtcacctccgccgattccggcgccatggtcgtggatacgctggcttcgggcggctccagcaacacgccggtttggcaacgcattttctgggcgtcgctgatgggcatcgtcgccatcgccttgctgatcgccggggggctcagcgcgctgcaaaccgtcaccatcgccagcgcattgcctttctcggccatcttgctggtctccatctacggcttgcttaaggcactgcgtcgcgatctgaccaaacgcgacagccaaaatatggccaccatcgcccccaccgccgcccgcaaccccattccctggcagcgcaggctgcgcaatatcgcctatctgccaaaacgctcgctggttaagcgctttatggatgaggtcatccagcctgccatgacgctggtgcaggaagagctgagtaaacaaaacacgctcagcagcatcaacaccactacggaagaccgcattcgtttcgaggtcgatttgggcgatgagcttaactttatctatgaagtcagactgcgcggctacagttcgccgacgttcgctctggccgggctggataacgatgaacagcaagccgagcagcacaagtattatcgcgcggagatctacctgaaagaaggcggccagaactacgatgtcatgggctggaatcaggagcagttgatcaacgatattcttgaccagtacgagaaacacctgcatttcttgcatctggttcgctga

SEQ ID NO: 427902 - DNA, 684 bp, Serratia marcescens
atgtcttccctagcgaaccttgaacagaagccgcagaatggtgcctcaaagtctcaacttctgagcgaaattgataagcaggttgctttgatggatgacaaacgtcgcaacgcattcgtttccatctgttgcgaagaaatgatgcgccgcaagcccgaaaccatcgccgaaatagatcgagtgctttctcgtataggctggaaattctccggaacatctctcatcccaattgaaattttcgatatcgcagagcttgcagaaatccccgaagcggctcatgcagatatccaaaaagcagcctgcagactacgagatggtgatttaagtggtgcgctatctgcagcctgtggcgctctggatgcagttactaatgatatttacaaaagatatggtctaggtgatgtagggaaggcatcgtttcaagagcgagtcaagaaatcgatcgacgctttgcaggtgaaagatcgtcttataggtgaactagccgagatcggatggacagagcctgactacaaactcctatccgcaaacatcgatggctcattaaaccaagctgcgtttgttatgcaaaaactacgatccgatatgggtgatgtgcatgggacgaagccggttatcagtgcgttggtttatgactccataaagtggtcatccttgctgctgagaatcttggtaatccgttaa

SEQ ID NO: 427903 - DNA, 486 bp, Serratia marcescens
atggacgcattgaccaacggtcgcaggttcaagtgcctgacctgcgtggacgatttcacgaaggagtgcctgacggttaccgccgcattcgggatttcaggcgtgcaggtcacgcgtattctggacagtatcgcgctgtttcgtggttatccggctacgataagaaccgatcatggactggagttcacctgccgcgtactggatcaatgggcctatgagcatggcgtggaactgcgtcttatccagccgggcaagccgactcagaacggatttattgagagttttaacggacgattcagagatgagtgcctgaacgagcactggttcagcgatattgttcatgccaggaaaacgattaatgactggcgacaggattataacgagtgccgtccacattcttcgctgaactaccagactccggctgaatttgcagcggactggagaaacgggaaatatgaagaaaaaacaaccgacattactagctga

SEQ ID NO: 427904 - DNA, 264 bp, Serratia marcescens
atgaagaagcgtttttccgacgaacagatcatcagtattctccgtgaggctgaagccggggtttctgcccgggaactctgccgtaagcatgctatttcagacgccactttctacacctggcgcaagaagtttggtggcatggaagttcctgaggtaaagcggcttaagtcgcttgaagaggagaacgcccgactcaagaagttacttgccgaagccatgctagataaggaggcgcttcaggtggctcttgggcgaaagtactga

SEQ ID NO: 427905 - DNA, 852 bp, Serratia marcescens
ttgattgctctgctattaattccaattttagtcagcggttatattattgtaaccgctgatttgtttcattattacaaactgcatagatatgatggacagctcctttatttaaaagtcgccacatatggtgctttttgtgttataggtgcagcaatttcagcggcagtaataaaatacttcctacctgacttccacctaataacagacgttgctggaaacttccaagtaacaaaaaataaagatacagatagaatatatgcatggctaattatgttgtctgttggggcaattgcaatatctatcgcatggatttctttcgttttcatgaagaatctaattaaaggatttatgtatgagaaggtatgtcattacagcataatgcatgcaatgaaactgcgggttctaagaaagacggttaatcatggaaccttcgatgccatgctgcttgacgcaatggaagaaacaccaaagcgaccggtactgataagcttatcatccagaaaggtttatgttggtatcgttaatggccttgacgaaccaactgaaagtgaaaaaccaaatcaatacatatcacttttcccgatcatgtctggttaccgagacaactcaacgttatcaatagagttcacaaacaactaccctagtgaatttaaaactcggtccgccccttcaacaagaacaatgaagaaaacacagataaatgatatggatttgataatctcatccgaggaagtatcaagtatatcctggtttgacttcgatttgttcatggaaacgaatgggtcagcggtaaagaagccagagaagaaagttagacttgggttgccgaagtacaaaaaacaagcccagtaa

SEQ ID NO: 427906 - DNA, 261 bp, Serratia marcescens
atgagtttttattttgacgaaaatggcgctgctattggataccaggtagaaggccgttggctcatcaaaggggactatttgcaagttgaacatggcccaaatatacccggtggcttatataaaatcacagacgataaagtaaagttcccatatgatttcaaggagcatgagggcgtgattgacactgaaaatctaactttcattgtgagtggcgttaaacataacatgttgaagcaaaaaaagaatccatgggatctttaa

SEQ ID NO: 427907 - DNA, 327 bp, Serratia marcescens
atggaaaaaatgcactttaaagcttcagcacagtatgacgattggactggtagtgttgcagcggatagcgcagatcaggaggattttagcggtcttctgagagccaaaggtattctcaaggaaggggaggttgttaagggtatttccttttactcagggggacgttccctgagtgtttcagcatttattactgacgaggaatatggtttacgtaaagagcacattgagataacgctcgaagagtttttcaaaacattcaaacgcttttcaatcaagatgtcccggcatggggaatttgacgatcaggaaattgagttcaaagaataa

SEQ ID NO: 427908 - DNA, 171 bp, Serratia marcescens
atgctcctggcttttccctttctctcagactggattattggccacgttgagggcgaggatcagatgtcggctaacttcgagttgctggcgattggcctagtgttgtgctgtttcgtgggtggtatactcggcaacctggcctattcaaaatcaaatacctcccccaaataa

SEQ ID NO: 427909 - DNA, 519 bp, Serratia marcescens
atgtcgataacttttaacaaactttgggaaaagcatcctcaaatcaatggggatgagtatccatgccgcactgtccatggtgataaagcctttgatgatcagtgtgctatacgcatcggtgcagctttggttcattgtgggtatgatgtcagtaagttgtcaggcgtgaacttttgttggctacacaagaaaagtgagggccatattttgcgtgctgaagaactggcaaatgccttagcacgaacaccgataccggggctaggacgcatggtaaaagtcacacccaaccagtttgaacgggtgctgaaaggcaaaaccggcattatcttttttaaagattactggcagcgagggaatgaaaactttcgcaatcgctcgggagatcatatagatctgtggaactgttctcgtttaaccacactatcgagctattttcgtattcaatgggggctttcttgggatgggcgttttagcgatttctttaaatcaaaagaagtctggttctggcaggtgatatga

SEQ ID NO: 427910 - DNA, 1557 bp, Serratia marcescens
atgaaatcaaataatccgctaaaagaggccggcacgctgttggtcatggcgctgctttcggtggtgggggcgatcatcggcgttcagctgatcaccacgctgggcgtgacgcccaacacctcgatcatcggtgcgctgatcgccatgctgctggcacgcattccgctgcaaatgtttcaacgctaccgctcggtgcacacccagaacctggcgcagacggtgatctcctccgccaccttcggcgcggccaactgtctgctgatgccgattgcggtgccttacgtgatggggcaaccgcagcttattctgccgatgttctgcggcgtggcggcggcgatgctgctcgacgcctatctgctttatcgtctgttcgataccaaagtgttccccgccgccaatgcctggccgccgggcgtcgccgccgcggaggcgattaaagccggcgatcgcggcggcaagcaggcctggcttttggtggtgggcgtaggggtgggcatcgccggatcaatgctcaagatccccatggcggccttcggcaccgcctttatcggcaatatctgggcgctgagcatgttcggcgtcgggctattgctgcgggcctacgccgagccggtggccggtttcgatatcaatgcccattttattccgcacggcgtgatggtcggcgccggcctggtggcgctgatccaggtcgcgcaggtgatccgcagccgccgcgccgatagcgccggttatacccaaccggacagcgcggtaagcaaagcgctcggcctgggcgcggtcggctacatcgccatcgccgcgtttttggctctggtcggcgggctgtttagcgagatgtcgctgccgatgctggcgctgttcgtgatttacgcggcgttcgccgctttcgttcatgagctgatcgtcggtatcgccgccatgcactccggctggtttccggcgttcgcggtggcgttgatcaccctgatcgtcggtatcctgatcggtttcccaccgctggcgctgtgcatcctgaccggctttaccgccgccaccgggccggccttcgccgacatgggctttgacttgaaagccggcttcatcctgcgcggctacggcgaggatctgcggcaggaactgctggggcgccgcattcaactgtttgcggcgctgatcgccttcctcatcgccattccggtggtttacctctcttaccacagctatttcctgcaggatctgatcccaccggtcgcgcgcgtttacgccaagaccatcgaggccggtgcgcagccgggcatcgcctggagccttttgatctgggcgatccccggcgccgtggtgcagctgatcggcggccccaagcgccagctcggcgtgctgctggcaaccggcctgctgatcaacaacgccttggccgggtgggcggtgctggtgggcatcgcgctgcgcgtggcgatcctgcggcgttggggcgatcgcggccgcacgccgatggagatcatggcggccggatttatcgccggcgacgcgctctacaacttcttcagctcgattttttccagcaagggcaaatag

SEQ ID NO: 427911 - DNA, 1008 bp, Serratia marcescens
atgggcaacagaatgtggatgattcgcggtgacggcggcaagctctatgacgattttcgcgataagcaaattgtaggcatcggttggtctcagctagctccattagtcaaacccggcctatcccgagcccagttactcgccttataccaagaggcagatcctttaacaaagctgggaactgcgcgttctggtgcatcgcaggtctggcgttttgtgaacgagatccaaaagggtgattgggttattacctattcgccagccaaccgtacttatttgctaggcaaagttacttcagatttccaatatcatcctgaatggggggatgaggggatgggaatcgctcgacaggttaaatggaatactcaagaaattgatcgcgatcgactgtctgttgctaccaagaatacattgggttctacgctgacggttttccagcttccagaatatgcgctagaagagcttttgcaggataagaaacccactatagatgttattactcagaatccaattactatggatgaagatgaaggcacttctgatctacttcgtgatatggaatcgttggcgcgtgaaggcatcaaagatcgggttaatgcactcgaaccgaaagaaatggagtatctggttgctggcgttttacgcagtatggggtataaaacacaagtatctcccgtggggccagatcgtgggaaggatattattgcctcgccagatgggtttgggtttgaaaacccgcgtattgtggttgaggtaaaacaccgtaaaggacagatgggaagtccggagattcgaagttttattggtggtcgtcataaagacgatcgcggcctctacgttagtactggcggttttactaaggatgctcgctatgaagccgatcgttcgaatatcccgctgactctatggacacttgaagatcttgtcagaacattgattgaaaactatgagcaagtcgacatcgagaccaagattttagtgcctctaaagaaaactttcctgcctgcctga

SEQ ID NO: 427912 - DNA, 564 bp, Serratia marcescens
ttgattggcacgcagtttcaggtggaacgagcgcggctgttcggtacattaaaaccgttactgaatcgccttactcgtgctcaactcaatatgaaagaatatgcgcaaatcaaacacgcgctggggctctccagtaaatcgctggtgcatgaatggagcaccgccggcgtcggtgccatcaagggctattcgaactacgtcgacagcgccagccgtgcggccaagtttatgaaagccggcggctggatcggcatcggattgagtgggctgaacaccaccaacgacgtctacaacgcctgcaccaccggccgcgaacaggagtgcgccaagatcgcggtgaagggatacagtcattttgcggcaagtactgcggcggggatttgggtgggaaatgcaggtgcaggtcttgcgattgcagcctgttcaattgtgttaggtgcagcaacagcaggaacaggagtgatcgtttgtggtatcgctggagccgctataggaggcgccgcaggatccacactgggtggcatgggttccgattatttgacgacgttagtggtaggtgaatga

SEQ ID NO: 427913 - DNA, 924 bp, Serratia marcescens
atgactccagaaaaagtattgctcagtatcgtcatagcggcgcacaacagcgaaaattatgttcggcaaactctgcacagtttgatcgctgctttagacaccgccttggcacggtgtgagatcatattggtgaacgacgcctctacagatagcaccggtgccatttttgcagacttcgcgcaatctgtgccacaggcgcgctattacgaggtggagtacaaaaatatcggcaaagtgcgtaatttcgccatcgcccattgcctcgggcgttatgtcaccatgcttgatagcgacgacgtactgaaaaaaggctcaatagagagcattattgattttctcgaaaaaaacagtccggacctcctgctgaccaaactgcatgaagtacatcatctcgctgacgtagataaaacctggaaaggattacaaccggagaaactgtctactgacgaagcaatctctcgcttcctccgtcataaagattttcaagcgcacctgattggccagtttattaaacgtaacttattgttagactcgccaatacctgattttaactgttatgaagatttttatatcttcccagatttattaacgcactcgagaaaaatcattttctctcgagagagccattatttatatattaaacatagttccagcttatctaacactccctcagcagaaaagataaataatcttttcgtctgcacagagaaaatggatgaagtattcggcagtaagtttcacgaccaagttttatgccattggttagacatctatctaaaacagaaagagtggatagttaacccggaacaactagacactcttcataaaaaagtgaaagagacacatagaattggctttcttatgaattcagtggtcagatttagctacaaaagaaaggcggtaaagacattatggaaaaactag

SEQ ID NO: 427914 - DNA, 1218 bp, Serratia marcescens
atggaaaaactagagcgaaatttttacatcactacttttgtgatggcagcattatcaattatattttcgctcatcatcgcatctaaacagcgggagttcttttacttcgctttctatattgccgcccttgctctttttttcgaaagaagaaaaataaaatttcccaagtttgatatttcttacttgataatagcgattggtttaatcaagataatatggactttagtgctatatagacaggccgcagattatggttttggtgccacacaactggactctggaaaaaagttgattgtcggtggcattctcatattttatctttcgcagttctcacattaccgaacaacctttaattatcaccgttacctgctaattgcattttctctcgcattcatactcgcgacaggatatggtctgtatcagatttataacggtatagatcgaatagcaatgagcacaaaccgtgcaacaatcgctgcttatatttattctgctttatcgatattattaatttacctcttactaaaaacaaaaattgcaaaaggtcatcattatattaccttagccatggtgtttataatctcatttttgatcattaccatgacaggaacacgtgcagccattttagcgcatcccctattgattatactgatgatgttattccactatcgaaaaattcatctcaagtcattggtgatgatagctgtcttgatcagcttgggtgtcaccgtttcctacgataaatacatcaaacctaaatttgaacagaccagcactgaaatattggaatatcaacagggtaacgacttcagttcactcggttcgcgtttttcactgtggaatgttggcctcaatattttcctgcagcacccattcggcaatactgttgaagcgcgccatactcaggcggaaaacatcgtacttcaggagccaaagaacaagactgcgatggtttacatagactcccatttgcatgatgaattactggaaagcgcctcattacaaggtgttgctggcctgttttccgtgctcgctttatatatcgctatcatcgcccttgcggtgaaacgcaaaaacacgccgctattaatgataggtagctgcatgatcgtctacggtttaacagacgtactattaatcagctctgagtcattgcttttcttcatatcttgcattgcattctttgcaaaagaaacatcatcagaagtcaagatttga

SEQ ID NO: 427915 - DNA, 1086 bp, Serratia marcescens
atgaacattgtcatagtcggttactcgctgggcggccacggtgggatggagaccgtttgcaaaagactggtcaaactcattgccgagaatcaacctgagactcaggtgaaattccttttcttcaatgagaaaaaagacgtgaatgaggaatggtatgcaggtttggatgccggaacgtgctcttcctccatacataatactaagttgagaaggttacattttgcttattcactgtctcgattcttgtgtggaaaaaaaacggatctgattattgctctggataccctgtcttgttacatcgccaatgtggccagaaaatggatattcggaaaatatccgattgcttcatggctgcatttctctctttatgatctgtataagtataattacatcctgtatgccgatgctcacttagttattagtaatggcatcaatcgccaagtgcaagaactcggtgtcgatgagaatgacgtctatacgatatttaatccagtaggaaggacggagacgaatattgcggtcagcagcggggtaccggttaactttatttacattggccgcgttatttttgaagggcaaaaacgattgaaagatctgctgacgtctttagctgaggtgcaaggcgattggcgattgcatgtggtcggcgatggtgatgacatggagctatgccggcaatactcagcgacgttaggtatcggaattcgggtaatatggcatggttggcaaaaaaaaccatgggggtatgtgagtgaccatatcgggaatctaaaagccttagtgttgacatcggcatttgagggattacccatgacgttgctggaagccatggcacatggcattttctgtgtcagttcagattgtcctacggggccggcagatgtgattgatggccataacggtcgtttgtataaggtaggggactcgccgcaattaactgctattctgcaggagttggtagacggtgatattgtcatcgatcagcagcagattaaaggctctatttccaaattttacgatgacaactattaccattcgttcaatcaggccattgctcatattttagtccggtatggcaataaatag

SEQ ID NO: 427916 - DNA, 1104 bp, Serratia marcescens
atgaaattaaaaaaattaaaatacgcgcattggtttttgactgtttataattttttgttcggcaatgtaaagccgaaaggaactttgcggcctgaccaggagttcaagcgtattgtagtatattccacaacggcgttgggtgatttcatgttcaacacaccgacgatgcgcgctatccgcaaccgttatccgagtgcgcatattactttagttgccggcacgataaatcgtggaatggttaaagattacagctgctttgacgaggttattttttgggataataagttcaggcaaatgcgtggagccgtggcagaaataaggaaaagacggccagagcttgctgtgattctacatgcacatttgccatatgatattattagtgcggtgctggctggctgtcagtatattctgcgagataattatctcacccttccgaagggcatcgataggtgggtttacagctgttcattgaatttcagcgggcacttgattcagcgtaagttagatctgatgaattttattggcggcgataccaccaatattgaaatggagatcccgtgtcagtttgaaaagctgtctcagcgtgcggatgttatccgtataggtttcaatatgggggcatcaagcaaagagcgctgttggcccgttgagtatttcgctgagttagctaacaaattgattacacgacataataatgtggaagtggtcatcatcggttcaccggctgaccgtgaaattgaaagcatctttatggctcacctagcaacggatgttcaatcccgtattgtcagttacgtagggaaaacgtcgctaccacaattagttggtgttatcgattcgttgaatgtgctgttgactggtgataccgggcctctgcatttggcggtggctttgaaggtaccaacgctaagcctgttcgttacggcgaagccgcgttttaccggtccttatcagaacaaagagatacattgcgtcatcgatctttctgaacgctatgaaggcacagtcatttcgtctgatgagttgccattggcaatcatcccggttgcacgggtctacgattcgctggaagatatgaagatacttccagtttgcattgagtga

SEQ ID NO: 427917 - DNA, 1686 bp, Serratia marcescens
atggcacaggaaaaaacaggcaatgactggcaatgcggcgccgatttggtggtgaaaaacctggaagcgcagggcgtcaaacacgttttcggcattccgggcgccaagatcgatcgggtgttcgactcgctggaggacgcgccatcgattgaaacggtggtggtgcggcatgaggccaacgcggcctttatggcggcggcggtcggccgcctgaccggtaaagccggggtggcgctggttacctccgggccgggcagctccaacctgataaccgggctggccaccgccacttcggaaggggacgcggtggtggccttcggcggggcggtgaagcgcgccgacagcctgaagcagacgcaccagagcatggataccgtcagcatgttccggccggtgaccaagtattgcgccgaagtgcatgccggttcggcaatttccgaagtgatcgccaacgcctttcgccgcgccgagttcggccggccgggggcgtcgttcgtcagcttgccgatggatatcgtcaatgaaccggtgagcgcgccggtgctggccggctgccgcttgccgcgcatgggggccgccgcggcggacgacattcaggcggcggtgaaactgatccgccaggccaaatgcccggtattgctgctcggcctgcaggccagccggccggagaacagcgaggcggtgcgtcatctgctgtaccgcacccatatgccggtggtcggcacctatcaggcggcgggggtgatcgacgtcaaccacttcgcccgtttcgccggccgcgtcggcctgttcaacaaccagccggccgatcagctgttgcagaaggccgatctggtggtcagcgtcggctatgatccgatcgaatacgatccctgcatgtggaacagccacgggcggctgaaactggtgcacatcgacgtgctgccggcggatatcgacacctgctatcggccggacgtcgagctggtgggcaacatcagcgccacgctgaacatgatgaccgaaacgttcactgaggcggtctgcgtgccgccggaggtggagctgatcctcaccgatctcggccgccaacgcacggaactggcggagcgcgccgcgcgccgcggcggcatgccgatccacccgctgcgcatcgtcaaggagctgcaggacatcgtcagcgacgacgtaaccctgtgcgtggacatgggcagcttccatatctggatcgcccgttacctgtacagcttccgcgcccgtcagctgttgatctccaatggccagcaaaccatgggggtggcgttgccgtgggccatcggcgcggcgctggtgcgccctggcgataaagtggtgtcgatctccggcgacggcgggttcatgcagtcgagcatggagctggagaccgcggtgcggctgaaaaacaacatcgtgcacgtcatctgggtcgataacgcctacaacatggtggagatgcaggaagtgaacaaataccagcgcaaatccggcgtggagtttgggccaatcgacttcaaggcctacgcggaatcctgcggcgcggtcggtttcgccgtgcagtcggtggacgatctgcggccgatgctgcgcaaggcgatggcgatccaggggccggtggtggtggccattccggtcgactacgccgacaactataagctgatggcgcagatgaacttcagccagatgatttaa

SEQ ID NO: 427918 - DNA, 474 bp, Serratia marcescens
atgccggtgcagcggccctataaccccaacgccaaacgcatggcggagatgatccaggccgactgggccaaaatcggcgtgcgcgccaaaatcgtcaccttcgagtggggcgaatatttgcagcggattaaaaacggcgagcaccagacggcgctaatgggctggaccaccgccaacggcgatccggacaacttcttcgggccgctgttcacctgcgcttcgctcggtggttcgaactcggcgaaatggtgctataaaccgttcgaccagctgatcctgcaggcgcgcgaagagaacgatcacgccaagcgggtggcgatgtaccagcaggcgcaggtgatgatgcacgatcagatgccggcgctgatgatcgcgcactcgaccatcttcgaaccggtgcgcaaggaagtgaaaggctacgagatagacccgttcggcaaacacatcttcaagcaggtatcgctggagaaataa

SEQ ID NO: 427919 - DNA, 1056 bp, Serratia marcescens
gtgaacgtacccactccgactgagcggacgctttcgtccgcaccgcacgcagcttacgccagtggcttcaaacgcatcgccgggttcggtatcggcttggcgctgttgctgctgtgtatcattgccagcctgatgctgggttccaaagccatccccttccacaccgtctggctcagcctgcagggcgccgcgagcggttccgacagcaccatcattctcaacgcccgggtgccccgtacgctggcgggcatcttggccggcatggcgctcggcgccgccggcgcgctgattcaggccttgacgcgcaatccgttggccgatcccggcgtgctcggcatcaacgccggcgccagcttcgccgtggtcatcggcatcatgtttttcggcgccgccaccaccgaaagctatatggcctacgcctttgtcggtgccgccctcaccactctgctggtctacctgatcggcacgctggcgggcgggcgcatcaacccggtgcggctgaccctggccggcgtggcgatcggcgcggtgctgatcggcatcaccaccgggctgtcgctgatcgatccgcaaaccttcgatcaactgcgcttctggcaggccggcacgctggatatccgcacgctgtccacgctgccggtcaccgcccccgccattttgctcggctgcctgctgacgctgctcatcgcccggccgctgaataccatcggcatgggggaagatctggctatcgcgctcggcgcgcgcgtggtgctgactcaggtcatcgcggtgatcgccatcacgctgctgtgcggcgcggcaaccgccaccgtcggcccaattagctttatcggcctgatggtgccgcacatcgcccgctggtgggtcggccccgaccagcgctggatcctgccctactccatgctgctggcgccgattttactgctgtgcgccgacgtggtcggccgtctgctggcggccggtgagctgcgggtttccatcgtggcggccttcatcggcgcgccggtgctgatctggctggtgcgccgcaagaaaacgctgggggggctgtga

SEQ ID NO: 427920 - DNA, 774 bp, Serratia marcescens
atggatattaatgagtttccaccgggagttatggaacatcttggttggtatgtataccgattgattgatccaagggatggaagtactttctatgtggggaagggaaaaggtaatcgtgtatttgctcatatgcgcggtgaggtcgcaatagctgatgataatgaactgcttagtaacaaactcaagcaacttagagagataagactagcaggtctcgaagtcatccatgttatccatcggcacggaatggctgatgaaaagactgcttacgaggttgaagccgcacttatagacgcctatcctggtttaactaacatcatgaacggtgctggcagcaatgaatatggtgctgcgcacatcaaagagttaatcgctacataccaacctgaaacagttgtgttccagcataaagttctgatgatatcagttaatagaagttcaaaggatgtagacctctatgatgccgtacgttttagctggcgtgtcagcattgagcgtgcctgtaaagctgaggtcatactagctacagtgagggggatcgtaagaggggtttatatcgctgatgagtggctcaaatctactcgtgagaattttccagagatgccttcatgggatgcagacgatgagtttgaatctactcaaaaatcccgctttgggttccgaggaagagtcgcccccccagagataacgaagatttatcttggtaaaaagattccggatattctaagaaagaaaggtgctatgtctcctgtgaaatattctccaggtttttga

SEQ ID NO: 427921 - DNA, 465 bp, Serratia marcescens
atgaattatcaccagtactacccgattgacgtcgtcaacggccccggcacccgctgcacgctgtttgtcgccggttgcgtgcaccagtgccccggttgctacaacaaaagcacctggcggctcaactccggccagccgtttaccccggcgctggaagaccgcatcatcgccgatctgaacgatacgcgcgtcccgcgccaggggctgtcgctctccggcggcgatccgctgcatccggccaacgtgccgagcatcttgcagttggtgaaacgggtgcgcgccgagtgccccggcaaggatatctggctgtggaccggctaccggctggcggagctggacgcacagcaaatgcaggtggtggacagaatcaacgtgctgatcgacggcaagttcgtgcaggatttgaaagacccggcgctgatctggcgcggcagcagcaaccaggtggtgcataggttgcgatga

SEQ ID NO: 427922 - DNA, 2172 bp, Serratia marcescens
atgaacgctccctcggggaacaaggagtacaacgtgaaaccagtagtgattaagcgggacggttgccaggtaccttttgacgaagcgcgcatcgcgcaggccatcgagcgcgccgcgctggcggtgggcgtggtcgacgccgactactgcgccaccgtcgcccgcgtggtcgctcagcgcatggagcagcagccgcgcgtcgatatccacgagatccagcaggcggtggaaaaccagctgatggccggcgagtacaaacagctggcgcgcgcctatatcgaataccgccacgatcgcgacgtggcgcgcgagctgcgcggccgcctgaaccaggagattcgcggcctggtcgagcagagcaaccgcgcgctgctgaacgagaacgccaacaaggacagcaaggtgatccccacccagcgcgacctgctggcgggcatcgtcgccaaacactacgccaagcagcacatcctgccgcgcgacgtggtgctggcccatgaacgcggcgaaattcactaccacgatctcgactactcgccgttcttcccgatgttcaactgcatgctgatcgatctgaaaggcatgctgaccaacggcttcaagatgggcaacgccgagattgagccgccgaagtcgatctccaccgccaccgccgtgaccgcgcagatcatcgcccaggtcgccagccatatctatggcggcaccaccatcaaccgcatcgatgaaattctggcgccgttcgtcgacgagagcttccgcaaacacctgcaggtggcggaggaatggcagatcccggacgccaaaggctatgccatggcgcgcaccgagaaagagtgttacgacgccttccagtcgctggagtacgaggtcaacaccctgcacaccgccaacggccagacgccgttcgtcaccttcggcttcggcctcggcaccagctgggagtcgcgccttatccagcgctcgatcctgaaaaaccgcatcgccgggctgggcaaaaaccgcaagaccgccgtgttccccaaactggtgttcgccatccgcgacggcctcaaccaccagtacggcgatccgaactacgacatcaagcagttggcgctggagtgcgccagcaagcgcatgtacccggacatcctcaactacgatcaggtggtgaaggtcaccggctcgttcaaaacgccgatgggttgccgcagcttcctcggcacctacgagcaggacggcgaactggtgcacgacggccgcaacaacatcggcgtcatcagcctcaacctgccgcgcatcgcgctggaggcgatgggcgatgagtcgcgcttctggacgctgctggatcagcgcctgcagctggcgaaaaaggccctgatgacgcgcatcgcgcggctggaaggcatcaaggcgcgggtggcgccaatcttgtacatggaaggcgcctgcggcgtgcggctcaaggccgacgataacatcgccgacatcttcaagaacggccgcgcctcgatttcgctgggctacatcggcttgcacgagaccatcaacgcgctgttcggcggcgaaaaccacgtgtatgacgacgaggcgctgcgcgccaaagcggtggcgatcgtcgcacggctgcgcgccgccgtcgacgcctggaaagacgagaccggctacggcttcagcctctacagcacgccgagcgagaacctgtgcgatcgcttctgccggctggacaccgccgatttcggcgtggtgccgggcgtcaccgataagggctattacaccaacagcttccaccttgacgtggagaagaaggtcaatccgtacgacaagctggacttcgaagcgccctacccgccgttggccagcggcggcttcatctgctacggcgaatacccgaacctgcagcacaacctgaaggcgctggaagacgtgtgggactacagctacagccgggtgccttactacggcaccaacacgccgatcgacgagtgctacgaatgcggcttcaccggtgaattttcctgcaccagcaagggcttcacctgcccgaaatgcggcaaccacgactcggccaaggtctcggtcacccgccgggtgtgcggctatctcggcagccccgatgcccggccgttcaacgccggcaagcaggaagaggtgaaacgccgggtgaaacacctcggcaacgggcagctcggctga

SEQ ID NO: 427923 - DNA, 915 bp, Serratia marcescens
atgtcgctgccctttgacgtgcaccgcctgctgccggccttcctcgccgccgcgaaggcgcaaaatttctccgccgccgcccgccagctgggcgtcacgccggcggcggtcagcaaaaatatccgcgcgctggaagagaagctggcgctgcggctgtttcagcgcaacacccacaacgtgctgctgaccgacgagggcaaagcgctgctggcgcaggtggcgccgctgtggcaggcattggcggcgacgctggaaagcgccggcggcgaacggcaggcgccggccggggtggtgcgcgtcacgatgatccccggctttggccgccagatgctgatgccgttgatcccgcaatttctggcgcgctacccgcagatcgatctcgatctgtcgctggacgcccgggtggtgaatctggtgggcgaaggcttcgacgtcggcatcggcagccgggtcgatcccgacagccggctggtggcccgcccgctctacccgatgcacatggtgctggcggcgtcgcccgactatctggcgcggcgcggcgaaccgcaaacgccgcacgatctgctgcggcacgactgcctgctgcaccgcaaccccagcaacggccgccacgtcaaatggcagctgcgccatcagggcgaaacgctggcgctggatctgaacggccgattggtggtgagccgcccggagatgctgctggatgcggcgctggccgggctgggcatcgtcaacctggcgcgctggtacctcgacaagcactttgagcagggcacgctgcggccggtgctggcggagtgctggccgcgcccggtgcagctgtggctctattacgcctcggcggatctgccgccgcgggtgcgcgtctgggtcgactttctgctggaacattttcgcgatcggccagtgagcgattga

SEQ ID NO: 427924 - DNA, 369 bp, Serratia marcescens
atggatgacccggtaaagggcaaaggcaggatgattactgatgctaatggcatcaccagaagagtaggggggatatcaggaatatggggtaatatatttaatgagagcaatgggataaaagccgacagcccaccgctcatacctgacatcagggatattctcgatgttttccctcagtcgctgcgggaaagtctgctgaacaaaatcagtgatgctatcgactatgaacccgtcattggcgttatgggaaaaaccggtgccggaaagagcagcgtgtgtaatgcgctgtttcagggggaggtgtgtgcggtcagcgacgttgaagcctgtacgcgtgaggcccaggaactgcgcatacgcttcggctga

SEQ ID NO: 427925 - DNA, 684 bp, Serratia marcescens
atgaaaacacaacatgatcattatgaccgcctgtccgtcaggttatcggtcattatcagccggttactggctggccaatccttggagctcaaagcactggcaaatgagtttggtgtttcagagcgcactctacagcgggattttcagcagcgtctaatccatttggatcttgaatattccagtggctgctatcgacttatgcggcgaacgggtcgagagcatttacctaatacctttgcgtttattcttaactctggcatttcggggatcattccggcccagaaccgcagactaatccggctgattaccagcagctctggcggctctccatgtcttattgggcatggagggctgccatcgccaatcacccagactacctgctttttggagctggccgaagctatccgtgactaccgggccgtcacgctattagtcaatggtaagagttacgaaggagtggctccccgccgcctgatcttccagtccagaaactggttccttgtggctactcgagcgagaaagttacaggtgtttcggatggaagatgttaacgctgtaaccgttctggatacttcctttcgcagaaagcctgaacttgatgctttgactgccagtgaagagttcatttcggccctccctcactttcgtttcatcagcgacgttattcaaaccttcagagagtaa

SEQ ID NO: 427926 - DNA, 285 bp, Serratia marcescens
atgggcacaccacgatttacacccgaatttaaggaagaagccgtccgtcagataacggaacgcggttattccgtcgccgaagtatctgaccgtctgggcgtctctgcacacagcctctacaagtggctacgggctatcaaacctgataacagcgagcagcatgcccgggatttactggaagcgaaaagcgagatcctgaaactccgggcgcagctaaaacgtaccgaagaagaacgggatatcctgaaaaaagccgcgcggtactttgcaagggagcccgactga

SEQ ID NO: 427927 - DNA, 810 bp, Serratia marcescens
atgacgatgtgtcgggtactgaatgtcgcccgagccgggttctatgcgtggctgcataaccctgtctcggcgcgtgataaagataaccagcgcctgttgatacttatccgcgactcatattccctgagcggaggcgtatacggttaccggcgggttcatggcgatctgaacgaaatcggggaaacctgcggtaaaaaccgggtgggtcggatcatgcaactgaaccggattaaagccgtgcgcggctataaagcgccacgtcgtatcgctggcaggccttcaatcgttgctcctaatcgcgtgcagcggcagttcaccgttgtccgggccaaccaggtctgggtcaccgatattacttatatccgcacctggcagggctggctgtatctggcggtggttatcgatctctttgcccgtaatgtggtcggctggtcgatgaaacccactctctctcgcgaactggcgctcgacgcgctgatgatggcggtctggcgccgaaaaccggacggcgaggtcatcgtacatagcgatcaaggtagtcagtacggcagtgacgactggctgcgcttctgccgggccaatcacctggcaccgagcatgagccggcgtggcaactgctgggataatgcggtggccgaatcgttcttcagttcactgaaaaaagaacgcatcaggaagagaatatacaaaacccgggatctggcccgggcggatatcttcgattacattgaagtgttctacaaccgggcccggcgccacagccacctcggcggcgtcagtccggaggcctttgaacaggcctcgtcgtga

SEQ ID NO: 427928 - DNA, 2850 bp, Serratia marcescens
atgtattcagatcaacagcgtagttatctggcgcactggttaacgttaagcggcaaagccgaggattcacttacacagaccatcgccagcgcgcgagttgatatgaatccccatcaggtagaagccgctatgttcgcactggcatctcctttgtcgaatggcgttatcctcgcagatgaagtgggactagggaaaaccattgaggccagcctgattttggcgcaaaagtgggcagaacgacgccggaaattattgcttattgctccggcaacgcttcgtaagcagtggagtcaggaacttgaagagaaattttcattaccttcgcggattatcgaagcaaaaagcttcaatcaaatgatcaaagagggatgtgttaatccatttgacattgaaaacgcaactggggaggctgcgatatgtatttgttcatacgaattcgcttcccgtaaagaacatgaattggcccgtatcccatgggatctggtcgtcatggatgaagcccataaactgcgaaatatctacaagagcgatggcgctaaaacggccaaaaaactcagtagtgcattatctggcaggaaaaaaattctgctttctgctacgccgcttcaaaacagcatccttgaactttatggtctggtttccgttattgaccctcatttcttcggtgatttggcctcgtttaaggcccgttattctcggcagaatattgacgatgcagaattagcgttattaagggtacgtctgaataagatctgtaaccgtacgcttcgccgacaggttcagcaggaaggtggtatcagttttacccgccgtcattcattaaccgaagattttcgcccgacggatgaagaagaagctctctataaacaggtttcctcttatttgcagcaagacgatctattggcaatcaaaagtggtgcacgtcatctagtaacattagtcattcgcaaaattctggcctcatcgtccactgcgattcagggaacgctggagactatgattcatcgtctagaaaataaaatgccggtcttagatgccctgactgattatgaaaattatgatgattacagtgatgaagaaggtatcgaggatgaagataccatcgatcctcgggctctacaggcagaaatcgatcagttaaaaagttataaaacgttagcggcatctataactaaaaacgccaaggcggaggcattgttaagcgttcttagtcgggctttcgaatttacagtagaactgggtggattgcgtaaagcggtcatttttaccgagtccgtgcgcacccaaacctggctagcgcaactgctttcagacaatgggtatgaaggcgaagtcgtgttgctcaacggcagtaacagcgatgcggcgtctcgcaagatttatagtgactggttggagaagcatcaaaactctggccgggtttccggttcgcgtacggcggatatgaaagcggcactggtcgaaaaatttagggacgaaggtactctgatgatatgtaccgaggccggtgcagaaggtatcaaccttcagttctgctctctgttaatcaattatgacttaccttggaacccgcagcgggttgagcaacgtatcgggcgtgttcaccgttacggacaaaagcacgatgttgtagtggtcaatttcattaataaaggcaaccgggccgatcagcgtgtgtttgaattattgagccagaagttccagctttttgaaggcgtgtttggtgcatccgatgatatcctgggatcgatagaatcgggcgttgatattgaacggcgtatccatgagatttaccagcactgccgctccgacgagcaaatagaacaggagtttaatcagctccaagatgaactcaaagaccagttggaaaaccgggagaatgaaacccggcgttccttgtttgaacatttcgatgtagatgtcgtcagaaatctaaaaactcgacgcacatcgaccctcgcacagttaaacgattaccaggaaaatctgctgctgctagcggaaatgtttctaagtgacaatagcgatttccagcactctgaaactggttttcattcctcgggaaagtattatgacgttagctggcctgttgcggatgaaaaggatgcagaatttttccgacctaatcagggatatggaaagcaactgattgatgtggccctacatgagggaaaagacctttccacattgccagtttgtcagaaactccatttcatctaccaacccaagacgggacaattggctgatgtaaaattgctttgccaacgatcagggcagttgttactagcaaaagtcagtatcggaaatcaagaacaacaacgagagcagctacttgtcgctgccgtaacggaaaatggtgaggtagtggcggaagaaaccgcatcccgcctgcttcgcttgccgttgtcagaggtaacatcaatcgaagaacagccagtgttacccactttaaccgcacaatgtgaggttttacggaattcttttatccagcaggtcgaacgtgataacgaactttattacaatgaagaagtagaaaaacttgaacgctggtcagaagatcgtcgcatcgcgctggacctacgcatcaaacagttagatgcagaaattaaagaagcgcgtaaaaccgcccgccaacttccttcgctgaaagagaagatggaagctaaacgctcgctaaaggcactagaacgcgagcgggacaacatcatgttgcagtatcatgatgaaaagaaaaaaattgagcaggaagaagaccgcctgctggaagaggttgaacaaacgctggcgacagagataacgtccagccaattatttgcggtgagctggacattgaattcaccttccgcatga

SEQ ID NO: 427929 - DNA, 981 bp, Serratia marcescens
atggctaacggtaaagtattaagacagctgataaaagcgggcgcgatgggcgacactgctacgttccgtcgcgtttcagaagccattattgatgaggaacgtcagaaacagcaccatcttctggctaacgatctggagcatattctttatggcgatcacattgttcaggcttcgcgttcacctacgttgcctccggcaccgctagataaagaaagggggttgccacttttggacctacggcaaccgcagcgcagcctcgatgaaatgatccttccagctaccagcgctacagtgattgatgagctccttgaagagcaccggcgtagcgatatattgcatagctatgggatgaaagcagccagtaagatcatgtttttcgggccaccaggctgcggtaaaacactggcggcggaggtcattgccttcgagctggacatgccgctggcaattgtccgccttgatgtactggtatcctcatttctgggtgaaacagccgccaatctgcgtaaaatttttgattttattgcccaacatccgctggtggtcttgttcgatgaatttgatgcgataggtaaagaacgcggcgacagcggagaacacggcgaattacgccgggtcgtcaatgctgtgctgcaaatgatggatgcttatcagggcaaaagtctaattctggcggccaccaaccatgaacatattttggacagcgccatttggcgtcgtttcgatgaagtgattgagtttcctctgccagatcagacgcagttacgcgagttgctggcgttaaagctacgtggcattcgccgccagtttgaactcgacgataatgagttgttatccttgcttcatggtaaaagtggtgcagatatcgaacgcattgttcgccgggccaccaaacacatgatcctgcgtcatcaggaattcctgacgctgaaagatttaaaaaacgcgacactgcgggaaaacgccagaacccaccgataa

SEQ ID NO: 427930 - DNA, 2316 bp, Serratia marcescens
atgcctcgtattcgcagaggtgatttgcgacaacacgggcaaatgttgctgacacaacttcgtactctgcgtccaacgttggcgcaagcgccagacagtgccgatgacaggcgctatatcctcaaactgaactacagcggtacgatgaatttttcggcgttgatacatcacggcgtggaatttatcagccaggaaaacaaacaggtctgtatcgttttcactaatgagcaaggtctggctacatttgaaaaacatctggcgcagttaggcctgcctcacaccgggctgacctacaggaatattcttgaagctcttgacggcattgacggctggtcggcagaagatcgtaaaagctgggccgtccagcgctatggtttcccggcaggggaacgctttaaactggatgtggagctctggccagtcgaagtggcgcatcaccccacgcgtatcgatctgtatacccgttttgagcgctggttgcaggagcaggggatttcccgacgggacaaagtcaatcttgacagcctcttgatgtatcgggtagaggtttctcgcgcgcaagcagaacagctgctagcccatcgggacgtcagattgattgatctgccgccgtccagcggcattagctatcaacaaattaaccgggatatcaatacacttccggctcgtctgatttcacctgcggaaaatgcggccagaatctgcattctggacagcggcatcaataccaaccatccactattgagttccgccattgctgaaagcgccagctttattcccggtcaagatgagtttgatcaagaggggcatggcaccgctgtagcgagtattgcgctatatggcgatgttgaagcctgcaatcagagcaacttctggcagccacagctatggctgtataacggaaaagtactgaacgagcgggctgaattcaatgccgaaacgattgaaagcacactgacaacagccgtagcgtattttaccaatctcggctgccgcattttcaacctttctctgggaaatgttaatgcgccctatgacggaaaacatattcgcggtatggcgtatttgttagatacgttggcgcggcaatacaatgtgctgtttgtcgtctctgcggggaatttcgcaggtagcgacgatcctccggtaccgcaaaacagctggcgggatgagtatcctgattatttgctgcatgaagccagcgttatcatcgatccggctcctgcgctgaacgtactgactgtgggcagcgtcgccagacacaacgcgacttccgatgcccaacgcagggccgatgatattcagcacctcagcccggcagcggaaaaccaaccgtcgccttttacccggcatggcccgtcggtaaaaggcgcgtttaaaccagacatcgtggcgcacggtggaaatttcgcttcggatgtacgtcaagaaaggcaatggcaggcaaatatgcgtggcctgggcgtgttaagctgccatcaccagtttcagggcaataccctgtttaaagaacttagcggcacaagctttgccgcaccgtatattacgcatctggcgggacgcttgttaaatgaatatccggaaatgtccgccaatatgctgcgggcaatactggttaatcatgcttctgtctctcaggagattacgcaagcttttccgcaggggatgagagaaagttataaaaatgcgcccacgacaagaaaccgggagatcgagcgtgacgtaacgggctacggcatcattgatgaagatgcgttataccgttcttctgaaaatgtcgtggtcatgcgatgcgaagagcaaatagaaaacaacgcgcaccaattttttgaactgcccttcccggcttcttttttacgatcgcagcgggcaacccgagaaatccgtatcacgctagcatactcacccgtcgtgcgtactacccggctggattatactgccacgcgaatcggtttccggctggttaagggccgctctctggatgaagttcagaccagttttaatcaccagacgcagagcgaaacggaaacccgctccgatgatgcccaaactaaccgtgttgtatcggcccaacagcgggaacgcggcacggtacaatcgtcggtgtggactttccgccaacgtaacccggatgaaaaatggtttatcgttgtaacccgtcaagacagagattggggcgaagcattcagcagcgagcaggagccttatgcactggtagtgaccgcaaccgatcgcgataacgaacaggcgcagctttatacacaaattcaggcgcaaatccgtgaacaggaacgtgcgcgagcacgtattggataa

SEQ ID NO: 427931 - DNA, 1608 bp, Serratia marcescens
atgtcaacgaagcaaaaattagaacttaactggattggtaagcataagcgtcctcgtctggagccgcgtattttgcttgaggataaggcgttgtcttatggtgaagcggatagcgagaatctgctgattcatggtgataacctgttggcgttgaaggcgctggagcaggagtatgcagggaaggtgaaatgcatttttatcgaccctccttataatactggaagtgctttctctcattatgatgatgggatagaacattctctttggctaacgttgatgcatgaccgattagagttgttatatacattacttgctcatgatggttcattatggatcactattgatgataatgaatctcattatttgaaagtgatgtgtgatgaagtttttggccgtaataattttgtatcaaatgttatttggcaaaaaaaatacgcccctcagaatgatgcgaaatggttatcggactcccatgatcatattttagtatatgcaaaaaacaagcaattatggcgtccttatcctcttccaagaactaaggaaatggatgaaaaatataaaaacccagataatgatcctcgtggaccatggatgtcagataatctttcggcaaaaacttattccgcaaagttagattatacgattacaactccaagtggacgacaagtaaatccccccgaaagtagatcttgggtttattcgaaagataaacttgaagaattaattaaagacaatcgtatttggttcggtgaaaaagggaccaatgtaccacgaataaaacgtttcttgtcagaagtgaaacagggttctgtatgtaagactatttggctgagagatgaagttggggataatcaggattccaaaagagagataaaagcctttttcaagacggattcattttctactccaaaaccagaaaaacttattgagcgtattttacagcttgcaactaagagtggtgacttagttcttgattctttcgcaggttcaggcacaaccggcgcagttgctcacaaaatgggccgtcgctggattatggttgaactgggagatcattgtcagactcatattgtacctcgccttaaaaaagtaattaatggagaagatctaggcggtatttctaaatctgttaactggcaaggtggtggaggattccgctacttccatttagccccttcattattgaaaaaagataactggggtaactgggtaattaataaggaatataacgccgaaatgctggcagaagccatgtgtaagcatatgaatttcacctatgcaccaagtcaaactcaatactggaatcatggttacagtaccgaaactgattacatctatgtcactactggctctttagcttatgaacaactcaaagtcataagtgaagaagtgggaactgaacgcacactgctaatctgctgcaaggcctttatgactgagggtgccgatttccctaatctgacactagtaaaaattccgcgcgccattctgagtaaatgcgaatgggatcaagacgactacagctttacgctaaacgtactttctgattcagaacaatctgacgaaattgactacgatgaagatactgaaggcgaagaacaattatga

SEQ ID NO: 427932 - DNA, 2871 bp, Serratia marcescens
atgagccaaagcaacgccattaaaattgccaataggataagtgcacgactgtcactgcgtgatcctcaggaaaaatctttacgtattttgtgtgatgtattggaacagatggatcttagcaaggatcccgatctgaatcgctgggttgaagtgctacgtccgcagtatccaacagtgaaagggtttgagcgtgcctttccttccctctgctttgctctagctaccggcgttggcaaaacacgtttgatgggtgcaatgattgcctggttatacctaaccggacatagtcgtcacttctttgtactagctccaaacctgaccatttatgaaaaactcaagatggattttttacccggttcacctaagtatgttttccagggcattcctgaactggcgcaaacaccgccagttttaattaccggtgatgattatcaggaaggacgtggagtacgtctggactacgcgattgctgagagcaaaacgggcgatcttttcggcagcgaaactgcgccgcacattaatatatttaatatctctaaaattaacgcactggataacactaaaggagccgctaaatccaaggttgctaaaattcgacgtattcaggaatacgtgggagaatcttattttagctatcttgcaaacctgcctgatttagtagttttgatggatgaagcccaccgttattatgccagcgcgggtgcgcaggctcttaatgatctaaatccagtattaggtattgaattaaccgccacgcctaaaactgtgggcgtaaatcctcgtgattttaaaaatattatttatcactatcccctttcgcgtgcactaaaagacggatacgtcaaaattccagctgttgccacgcgcaaagacttccgtgctgccaactattctgaagagcagttggaaaaaataaagctggaagatggaatccaccatcatgaatacgtgaaaacggaactaaccagcttcgccaacaacaccggtaacaaactggtcaaaccttttatgctagtcgttgcgcaggataccgatcatgcagacaggctaaaagtacgcattgaacacgacgatttcttcaatggcgcttacaaaggcaaagtaataaccgttcactctaaccagtcaggcgaagagtcagaagaaactatgcagcggcttttggccgttgagcatgacaaagacactgaaatcgtcattcatgtcaataagttaaaagagggatgggacgttacaaatctgtacactatcgttccattacgtgcttctgcctctgaaatccttactgagcagaccataggccgaggactgcgccttccctacggaaaaagaaccggcgtcgaagccgtcgatcgcctgacgattattgcccatgaccgttttcaggagattatcgatcgtgccaataacgatgactcgattatcaagaaggttctgtatatcgggctggatgatgatgaaaacggtattccagaattaaaaccccagcaaattatcgtaccatcaatggctgaattcctgttgggaaatcaagtcattgataatgatgggttgcaggcttgtgaacctcaagcaatatatcagacaaactccatatcaaaaccggtaatcaatacggaaacagaacgcaaagttgccgaacttacgttcaaagtggtatcagaagaagctaaacggttaaccagcagtcagcaactcagcacgccagaggtgaaagcaaacgtaactcgacgggtacaacaagccttgcgtgaatgggaagtcactcaacatcaaatctcatcgtcttcggatcaactcgatttgacggaaatgattgaagagcaagttgaacagccaagtttcctttcaatggaggatacggaagttcaggcgttggtcgggacgatcaccgaaaaactgatggaatatactatcgatattcctagaatcgtggttttgccagaacgtgaagtcaattacgggtttaatgatttcaacctttccggattggatcgcattgcgctcaaacccggcagtaaagagctcttactcacgcatctggaaaataacgaacagcggacaatcagttggcaggaaggtggtgaagcggaagagcggctagaaaactatctcattcgttatctgctcgaccatgatgaaattgattacgacgaacatgcagatatgctttacaaactggccggacagatggtgaaccatttgtgcagttatcagccggaggaagatgcagaatccgttctgaaaaatgcaggtaggcagttggcagaatttatatgggtgcaaatcaaacaaaatatgtggacaacaccaactggctataccgggcgcataactcagggctttgacgtgatacacccggcaacattcaattttgccggaaacgaaaaaccaagagacttccgtgtagctattccgggtggagaaaaaaataaagtccgccagatgattttcactggctttactaaatgctgttatccttaccagaaattcgactctgtagatggagagcttcgtcttgcacaaatactggagaatgatccttcagtaattcgttggatgaaacctcgtccaggtcagtttcgcatcgaatatgctaatggcaagaactatgaacctgattttgttgtcgaaatggacaatggttattgcctgattgaaccgaaaaaagcaacagaaatcgacgcgtcagaagttcaggccaaaacgcgagcggctattcgttggtgcgaatttgcaaatcaaaatgctgaaaaacttaatgggaaatcgtggcaatatgctcttatcccccatgatgaaattgagttaagtcggtcaatttctggactaatggctgattttatgatgactaatagtttatctgtataa

SEQ ID NO: 427933 - DNA, 600 bp, Serratia marcescens
atggctctgagtgatgtgaaggttcgttcggctaagcctgaagcaaaagcctataaacttactgacggcgacggtatggttttgcttgttcaccccaacggctccaaatactggcggctacgttatcgcttcgatggtaaagagaagatgctggcgcttgggaaataccctgaggtttcgctggcggatgccagggcgcgccgggatgaagcccgtaagctgttagctaatggcgtcgatcccagtgagaacaagaaagccgttaaggtagagcaggagcaagaggcgataacgtttgaagtggtcgccagagactggcatgccagcaatcaaaagtggtcggcattgcatagcgctcgtgtattgaaaagcctggaagataatctcttcgctgctatcggtaagcggaacattgctgagttgaagacacgggatttgcttatacccatcaaagcggtggagtcatccgggcgtcttgaggtcgccgcccgtttacagcagcgtactactgcgattatgcgctttgctgtgcagagcggattaatcgactacaaccccgctcaagagattgccggtgcggttgctacagcgaaaagatag

SEQ ID NO: 427934 - DNA, 768 bp, Serratia marcescens
atgatcccgtctgaacgccgcgattacatctatcgctatgtgcatgaatatcagctggcgagcatcagcgcgctgtcggagctgatgagcgtctcccacatgacggtgcggcgcgatatccgcgtgctggaggagcaaggcaaggtggtcagcgtcagcggcggcgtgcgcctgagcgaggcgctgcgccaggagctggcctattgtgagaaggcgcagctgcaccatcgccacaagcgcgagatcggcaaatacgccgccggcttggtggaagacggtcaggtggtctatctggacgccggcaccaccaccttcgagatcgcccgcagcctggcggagcgtttcaatctaacggtcgtcaccaacgatttctccatcatccagcacctgatgaatcgcccgcagctcagcctgttccacaccggcggccaggtggatcagcgcaactactcctgcgtcggcaacagcgccgccatgctgttgcgcagcctgaatatcgacgtggccttcatcagcaccagctcgtgggatctggagcacggcctctccaccccgcacgaggagaaggtgctggtcaagcaggcgctgctggaggtcgcccgccgccgggtgctggtctccgacagcagcaagtacggcaaatacggcatgttccgcgtctgtccgctggaggcgctgagcgacatcatctgcgacgccgcgctgccgccggaggcgcagcagctgctgcgcgagcgcggtctgcaactgcacaacgtccaactctga

SEQ ID NO: 427935 - DNA, 2394 bp, Serratia marcescens
atgcacagacctttccgttatacgctactggcttcatcgttatggttttcctgcggcgcgctggcgcagccggcgggcgatctgccgctgatgccctggccgcagcaggtggaagtgacgcaaccggcgggcaagctggtgctggatcaccgcttgtctctgacgctgcagggtgacgacttgggcgacgcgctgccgcgctggcgccagcgcatcgaactgcagaccggctggacgctggcgccggcgagtgaagcgaagggcggcgcgacgatcagggtgatgattaaagaccgggtggcggcgcagccgctgccgggcagcgacgagagttaccgactggcggtcacgccgcagggcgccacgctgaccgccaacacccgcttcggcgcgctgcgcggcatggagaccctactgcagctgctgcagaccgacgggcaaaataccttcctgccgctggtggatatccgcgacgtgccgcgctttccgtggcgcggcgtgctgctggattcggcgcgtcatttcctgccgctgccggacattctgcgccagctcgacggcatggcggcggccaagcttaacgtgttccactggcacctgaccgacgatcagggctggcgctttgcctccgagcattatcccaagctgcaacagcaggccagcgacggccagttctacacccgcgagcagatgcggcaggtggtggcttacgccacggcgcgcggcattcgcgtggtgccggagatcgacatgccggggcatgcctccagcattgcggtggcctatcccgacctgatgagcgcgccggggccgtatcggatggagcgcgagtggggcgtgcataagccgacgctcgatccgacccgcgacgaggtgtatcagtttgtcgacacaatcgtcggcgagctggcggcgatcttccccgatccttatctgcatatcggcggcgacgaggtggacgccagccagtggcgggcgtcgccgtcgattcaggcgtttatgcagaagaacgggctggcggatacccatgcgctgcaggcctacttcaaccagaagctggaaaagatcctcgagaagcaccagcggcagatggttggctgggacgagatctaccatccgtcgctgccgcgctcgatcgtcattcagtcctggcagggccaagattccctgggcgccagcgcgcaggacggctatcagggcatcctctccaccggtttctacctcgatcagccgcaaagcaccgcctatcactaccgcaatgaaattctgccgcagccgctgggggtcgagacggcggtgcagcccggcgagcaggcgcaaagctggcgtttcagcatgccgcgtctgaagggcagcgcggtggagggcagcttcacgctgatcgagggcaagcagggctggcgcggctttatcgatttcaacggcaaatcgcgccgcgcggtgcacgacattgtctggcgcacgccgcagcaggtgacgttccgcgtcgatacctggatgggtgacacgcggccggtgttcacgctgcagcaggacaagctcagcggctatacgttggtcggcaacgtgcgttaccccaccagcggcgacaagctggcggcggtgccggcgggcaagatgccggtggtgccggacgagaaggggcaggccaacattctcggcggtgaagcggcgctgtgggcggaaaacgtgcgcgcgccgcttctcgatctcaagctgtggccgcgcgccttcgcggtggcggagcggctgtggtcggcgcaggacgtcaccgacgaaaacaacatgtaccggcggctggcggcgatcgacgcctggtcggtggtgtcggtcggcctgcagcagcacgcggaaacggcgcgcgaattcacccgattgagcaacagcgtgcagatcgtgccgctgcagatcctggccgaggcggtggagccggcgcagtattacacccgccagcatctgaagttccaggccggcaactatcaccagttcgaaccgctgaaccgctttgccgatgcgctgccgccggagagcggcgcggtgcgcgacatgcaggcacaggtcgcagccttgttgaaggataagcgcgataaggcggcggcgcaggcgctgcgcgaacgactgcagcgctggcaggcgaacggcgcggcgctgcagacggcgatcgcgggcaaccgcacgctgcgagagctggcgccggtggcgcaggacgtcgatgccttggccacgctgggcttaatgctgctggatcgccatcagcaggacaaaccgctgagccgggccgaggccgaacaagcgcagcgccggctggatgcggcggcgcagacgcgcgacgaggtggtgattgcggcggtgtacccgctggaggcgctgctgcgggggcttaaaacggagtga

SEQ ID NO: 427936 - DNA, 579 bp, Serratia marcescens
atggctgagccgctacaactcccgccgccgcttgagggtgatatcagcctcagaacgctgggaaaactggccgggcggctggataacatcgacctgagcgtactgatggtctatctcgtcgatatcgtcgacagttccgcgctgccatggctgggcgagcagttctcgctgtttggcgatggctgggagctggcggaatcggacgatgtacgccgcatgcttatcaaatctgctatcgagctgcaccgctataaagggacgccgtggtcaatccgggaaattatccgccgtttcggcttcggcgaagtggatctgattgaaggcactggccagattggctacgacggcaaacacacgtacaacgggcttttcgtccatggcgatgcagaagcctgggcggtctatcgcgtcatccttcagcagcccattactaacgatcaggcggcgctgttacgccagacgctcgctgcctttgctccggcccgctgccatctggcgagccttgagtatcagtctgtcgccattcgctacaacaacaccgtcaactatgacggtagctataaccacgggagcagttaa

SEQ ID NO: 427937 - DNA, 1104 bp, Serratia marcescens
atggcgctgacagaacccgattttattgaacgtgatgctgacaaaatcacggctgaaatgattgcacagtacgaagccgcaactggcaagacgctataccccgctcaggctgagcgcctgttgattgacctgtgggcataccgcgaaatgctggtcagggtggcggcgcaggaagcggccaaacagaatctggtcgcctttgcccgtgagccgatgattgattacctcggtgaactggtttgtgtataccgactggccgcgcagcctgccaccaccacgctccagttctccgtggatgaggaactggccattgatgtgctgattccggcaggtacccgcgtcagcgcttccgacagcattatttttgcaaccgatacggacgtagtgctgaaagccggattgctgcttgtcaatgccacggccacctgtaccgagccgggagccgcaggcaacggctggcagcctgcgcaggtcagtcagttgctcgatgagattgataacgtcgacctgcaggtgaccaatatggcggccagttctggcggttctgagcaggaagacaatgacaggctccgcgagcgtatcaaactggccccggagtcattcaccaacgccggaagccgtatggcataccgctttcatgccatgcaggcccatcccaacattgtcgatgttgccgtgctttccccggtccccggtaccgtagagctgtatccgctgctcagtaccggcctgccggacgacagcatcctcacgctggtagagagtttctgttctgacgaaaaagtcaggccacttactgataccgtgcgggctaaaacacctctgcaggtggattacaccattgaagccaatatcacgatctaccgcgaccaggatgccaactcggtaaaggacaacgccaacagcgccatacagaactgggtggcatcacgtaccgccacgctggggcgcgatattgttcccagccagattatcagtgtgttgtccgtctccggggtgtaccaggttgaactggtgacaccgccactgcgggtggtggcagaaaacgaatgggcaaactgcacggcgatcactcttaacatgaccggggtgtccgatggctga

SEQ ID NO: 427938 - DNA, 348 bp, Serratia marcescens
atgaaaacaacctcagtattctggcaaccggctctgcaggcccctggcgaaatcgtccgggggctggatgatatctggcaggccattcaaatcatcctgcgtactcctcgcggcagcgacccgcatcgcccggagttcggcagcaatctgcacctttatatcgactggcctattgaccgggctattccgcatgtggtgcgcgaatccgtcgatgccattcgccgctgggagcctcgctgccagcttatgtcggttaaacccgccgtcgacggcgaacatcttacgctccgggtgagctggaaaggctctgacggacaaccccggactcaggagttgctatggcgctga

SEQ ID NO: 427939 - DNA, 513 bp, Serratia marcescens
atgacaggcgtcactcgtcaggtcggtacggtcagcgccgtcgatgccgacaaggttcaggcccgcgttcgtctgccggaatgcgataacctgcgcactaactggcttaacgtgctgcagcgcaatacccaggataacaaggattactggctccctgacgtgggggagcaggttgaggtgctgctcgatgccaacggcgaggatggtgtcattctgggcgcggtgtactcagaagtcgataaaccgccgttcagcgacaaaaatgtccggggcacgaaatacgcggatggcgcagagttcagctataaccgtgcgacccatacgctgacagtcaaaggtggtatcgagcatgtggtgatcgaggttgcagtgggtatcagcctgaaggggaaaaccattgatttgaccgctgacaccaccacggtgaacggcaaccttgaaatcaacggcaatgcccactcgacaggcagcatgctctctgacggcccgaactctaatcaccattcccactga

SEQ ID NO: 427940 - DNA, 1170 bp, Serratia marcescens
atggctgagataaacagccctgcacaagccgcatcagcgttaaccggcgtcagcgatgttctgagtccggtgttcacgctatggtatctgcagaagaacatcaccaccgatatcgccccctatgtcacccgcgtcacctacagcgataacatcaaaagcgagtccgataccattgaggtggaactggacgacaccgatggccgctggctggataagtggtatccgggcaagggtgacacgctgacgctgaaaatgggttatcagggcgagaagctgctgtcctgcggtacgttctctatagacgagatcgaggtgagttcgcccgcgtccgttgtcgctatccggggcgtggccacgtcggtcaacaacgccctgcggacaaaatccagtcgtggtttcgagagcaccacgctggcggccatcgccggacggattgccaaaaagcatcagctgaagctggttggcagtattgagtccatcaaaattgaccgggtgacccagtatgctgaaacggacgtgggcttcctgcgccgactggccagcgagtatggttatgccgtgaaagtggtcagcgaccagctggttttttctcatcttgccacgttacgcggtcaggagccgatcaggcagttaaagccgcaggatgtggccagcttttccctgcgtgacaccatcaaccgcgtctacaaatccgcgaaggtaaaacaccagaagagcagcgataaaaagctgatcgtttatgaagctgatggcggtaccagcgaaagcgacaaacaaaccaaaggcggtaaggtcaccagtgccgactcactgaaggtcaacagccgcgtcagtgatccggacagcgcccggattaaagcagattcggcgctggccaggcataacgaataccagcagaacggctcgctgacgctgatggggacgcctcagttgactgcaggcaacaaaattgaactggtgggttttggtcagttatccgggccatggctgataactactgcccgccatgcgtttgaccgtaacagcggctacatcaccgaactggaagtggcacgagggccggttacgcagggcaaagcgaagaaaggtaaaaagaccggaaaaacccagacgctgaccgtctataaaccggacggcagcacgtccacggtaataaaggagaaaaaataa

SEQ ID NO: 427941 - DNA, 213 bp, Serratia marcescens
atgtttcttgaacatgtcacccgtgacggagagcgctgggactctctcgcatggcagtactacggcgacccgctgggctatccccggataattgccgccaatccacacgtggccatcacgccggtgctgccctccgggctgttgttactgattccggttatcgaggctgaagaagccagtacagaagaggatattgccccatggctgagataa

SEQ ID NO: 427942 - DNA, 885 bp, Serratia marcescens
atgtttgcagtattgggtgatattgagtttgaactgattacctactgggacggcttcgaggtcacgttcggcgtcgattatgcggagcatccccgtatcgagggtaagcccggcctgcagttcgttggcgataagctggacgaaatccagataagcctggtcttccatcagcactattgtgtgcccgacgtggagctggcgagactgcgaacggccatgaaggcccatcaagcgctggcgctggtcttcggcaacggtgactatcgcggctggttcgtgattaccgatgttactgcgaccagcgagcagaccgacagcaccggcaacgtgctggccgtcaatgccaccgcgtctctccgggagtacatcggcgacccgaaaaacccgctacagccacccgcaatacgcacgcaggttcccggcgtcggggcggtctccggtgccgttccttcaccttccggggtagcgcagtacgtccgcgacggcgtcaactacgccaaacaggcgcagtctgttctccagaccaccatcagtgccgttcgggtggcgcagaaaatgaaggataaccccgccgttgcactgacccgcgtaccggggttgatgagcgggctgggcaacgtgtccggggcgttgggtcaaagcgttccggcatttaatgcgctttctgaatccatgcctgatgccatcagtctggccagagccaccagtgatgcggccacgtatgtacaacaggcacagtcttcactgagcggcgtggacggcagcaatatcgcagcggcgctggatgccgtttccgggcagcttaactccgccagcaccaccttcacccgtatgtcgccggggttaagcaccatggcagccaaaattctggcgaggagtgtgtga

SEQ ID NO: 427943 - DNA, 2283 bp, Serratia marcescens
atgcagcgcctcaacagtgacctgctgcgggtaagccgcacaatggagcaaattgagcgccagcagcgccgtttgtcagcagtatcaaccaccagtgacgcgctgaaagctaaccgcatggcgctctatggccagggagcagaaacctatgccatcgtcagaacactgggtgcaccggtcatggcctcagtcaaacaatatgcctcgtttgaatcgcagttgcgggatatcagtgtcactggtgatctggattcaaggcaggaacaggccatcggtactgccattcgtcgggcatcccttcaggtcaatcagctccaggagtcgctgctagggggtgttggtcagttagttgccgatggtatgaacccggagcaggcagctaaatttgccgggatgctcggtaaagcggccacggccaccaaagcggatatgactgacctcgcaaaaatgacctacgcctttagcgatgcgctgaaaattaccgatgcgaaagagctggagcaggcgtttgggattgcggcaaccggggctaagctaggctcgtttgaactgaaggatatggcgaaagcgttacctggtatggccaaagccttcgctgcacgtggtatttacggcaaagatgccataacccagatcgtcgccagtctggaagttggtaaaggcagcggctcagcggaagaggccgtcaccaatatgtcaaactggctggcggcgatggggcgcggagataccatccagaaatatgctaaagccggggtggattaccaggggtcaatgcagaattacgtcgctcagggcttctcacagtatgaagcctcactgatgattgccaaccgttttatcgacggtaaaggtaaggcgtttttacagcaatggaaagcagcaggctcaagaggcgatcaggaaggccagcagaagctaatggagtcatttggtctggcagaagtcttcactgatattcagaccgttaaccatttactgtcaatgcgtcagggctgggataaatacctttccagcaagcaggaaatgaataccccgtcagcaatgtctacgctggataaggatgctgcaaaacaaaataatacgctcgaaggtcgttggcgcagaactcagattggttttaacgaggcagccatcagcattggtgagtcactacgcccggccttgatccaactgggtgagacttttattcctttaatggacagtgtcggcaaatggatagcggcaaacccgcaaatcgtcagcggctccataaaggttgtaggagcattactcgctttcaagatggccactatcggtctcaagctggggctgaatctccttatttccccctttgttaacgtctggaaaaatgccgttttactgcgggccaactggcttcgactgtcgcttgcactcggtgaaggcggtaagctccgctggctggtgaccggcttcagcgccgtcgccagaggagccagaacactgggtggtgtgctgtcaggtgggctggttcgcggcattatgatcgccgggcgggccgttctctggattggccgggcgctgctgatgaatcccattggtctcgccatcaccgccgtcgcggcagcagcttaccttatttatcgcaactggggcgcagtcagtagctggtttaaacagcgctgggctgacattaaagaggcgtttaatggcggtgtcgtggggattggtaagctgctgattaactggtcgccggttggtctgctctataaagcctttgcggctgcgctgaaatacctcggtgttgatctgccagcgaagttcaccgacttcggtggccatcttatcgacgggttaataaacggcatcaaaaacaaatgggagtcgctcaaaactaccgtcacagacatgggcgacagtgttggcggctggtttaaggaaaagctgggcattcattcgccgagccgtgtgtttataggctttggtgacaacattgcgcagggggccgctatcggcctgcagcgcaccacaccacttgctgcactggccgggcagcgtctggccactgaaatgacaccggatgttccccgtatcccgtcgccggaaatcatggcggcgggatattcaggtcgtggcgcagctgcaactggcagcggaacatctggcggtatccaggtcagctttaatcctcagtttttcctcaatggcaaagaaaccgcagcgcctgacgggttgaccggcgcactgaatatgagcctgcatgagctggagaaaatgctggagcgtctgctggctcagcaacaacgcaggaggtacagctga

SEQ ID NO: 427944 - DNA, 138 bp, Serratia marcescens; identical to SEQ ID NO: 156259

SEQ ID NO: 427945 - DNA, 315 bp, Serratia marcescens
atgtcacagacccaatccgatacttttaagctgtcttaccccttcaccaccgcagcaggcaccagagttgagcaggttgaactgaaacgcctgacggtcaaagacctgaagcaggtgcgcaaaatcagtaaagacccggctgactgggacgagccgctcattgcccgtagcaccggtattctccccgaagacctcgataacatggatcttgccgattacatggagctgcagaaacgatttcagcaagtcactgggctgggcaagagcgacgaaaacgctgatgcaggcgcaggggctgctggcgaggtggtttag

SEQ ID NO: 427946 - DNA, 522 bp, Serratia marcescens; identical to SEQ ID NO: 247549

SEQ ID NO: 427947 - DNA, 1428 bp, Serratia marcescens
atggcagctaactatctgcatggcgtcgaaaccattgaggtggaaaacggtgcccgcccggtaaaaacggtgaagtctgccgtcattggcctgattggtaccgccccgatgggggacgtcaatacgctggtgcagtgcctgtctgagaaagatgcagcggcgtttggcagccagctcaccggttttaccattccgcaggcgctggatgcgatctacgaccatggggcaggcaccgttctggtcattaacgtgcttgatccggctgtgcataaaaccgctgtggccgatgaagatgtaacgttcgacaaggcgacgggcaaggcacagctggctaatccggtggtcgcgcagctggtactgaaaccggacagcgatggccagccttatgtggaaggtcaggactactcgcttgatgcacagaccggagtgattaccaaccttggtaagagcattgccgcagatgcaacggtgaaggccagctataactatgctgatccaactaaagtcaccccggctgatatcatcggtgccgttaacgctgcgggcaaccgtaccggcatgaagctgcttaacgacagcttcaacctgtttggctacttcgcaaaaatactgattgccccggtcttctgcacccagaacagcgtctcggttgagcttatcgccatggctgagaagctgggcgcggtgacctacatcgacgcgccgattggtaccacttttgcgcaggctctggcggggcgtggcccggaaggcaccattaacttcaacaccagctccgaccgcgtccgtctgtgctacccgcacgtcaaggtgtacgacgcggccaccaacagcgaacggctggagccgctgagccagcgtgctgcaggtctgcgtgccaaagtcgacctggacaagggctactggtggtcgtcctccaaccaggaaattctgggtatcaccggcgtggagcgccagctgtcggcaatgattgacgacccgcagagcgaggtgaacctgctcaacgaacagggcatcaccacggtcttcagcagctacggcagcggcctgcgtctgtggggcaaccgtatggcggcatggccaacggtcacccatatgcgcaactttgagaacgttcgccgtaccggtgatgtgatcaacgagtccctgcgttacttcagccagcagtacatcgacatgccgattacccaggcgctgattgatgcgctgacggagtcggtcaacgcctacggtcgcaagctgattggcgacggtgcgctgctgggcttcagctgctggtttgatccggcccgcaacgaagagacggagcttgccgccggtcacctgttgctgagctacaaatacacgccaccaccaccgctggagcgactgacgtttgagaccgagatcacctcggaatatctgttaaccctgaaggggaatagctga

SEQ ID NO: 427948 - DNA, 252 bp, Serratia marcescens; identical to SEQ ID NO: 33172

SEQ ID NO: 427949 - DNA, 465 bp, Serratia marcescens; identical to SEQ ID NO: 247552

SEQ ID NO: 427950 - DNA, 480 bp, Serratia marcescens
gtgacgttatccgtatcctgcgcggggtgtgatatgtactgcaccctcgcggatttgcttgaacaggttcctgagcggacgctaatccagctcaccaatgaggagctggacttcgactcgcccgcgacggtgaaaactgaggtggtggacagctgtattcgctatgccgatgaactgattgatgcccatctgcgcggacgctataccctgccgctggcggagataccgaccgttctgcgggacattgccatcacgctggtgcgttaccggctctacacccgccgcccggaaggggctgtcccggataccgtgaaggatgaccacaaagaggcccggcgacagctggaggggttgcgtgacaacaagctgacgctggggctgcagtccactcaaaaagacgtgcctgagtccggtgaaatccgggcgcgggcacgtcgccccacctttggcgggcgcgatggcttactggagaaatactga

SEQ ID NO: 427951 - DNA, 357 bp, Serratia marcescens; identical to SEQ ID NO: 247554

SEQ ID NO: 427952 - DNA, 954 bp, Serratia marcescens
atgtctgactatttaaagggtaagcgcgtcgttgacccggtgctgaccagcatcgcacgcggttataaaaatgccgcgttcatcggcgaacgcatcttccccattgtccttaccgataaggaaggtgtgaccgtgccgaccttcggtaaatccgcttttgtggagtacgacaccgagcgtgccgtgggggctgacagtaacgttctggtgcgcgagaaaaccggcaagctggacctggttctcaacgagcacgatctggctgcgccggtggactatcgcgagcaggcggagtcgatgttcaacgaagaggccaaagccattcgccgtgtgacgagcggcgtcaacctgaagcgcgaactgtatgcggcccgtctggcccaggacaaaaacgtctatcgcgcggctaacgtcaaagcgctggctgcggctgaccgctggggcggtggcaagggtgacccgattggcatcattgaaggcgggatcgaagcggtgcgtaacgccaccggcctgcgtccgaacctgatgaccatgggggccagcgtgatgtcgctgctgaagttccacccggcgattcaggccgcgattggtgccaacgagcgcaagcgtatcaccatcgaaattctgaaagaccttttccaactggaagatgtggcgatcggcgagccggtctccatggcctccatgaaagacgcgcagaacaaggacaaagtcccgaccgatatctggggtgacaacctgatgctgcattacgttggcaaaccgcaaccaggcaccgacagcgccgacgaaaacgagccgtcattcggttacaccctgcgccgtaaagggatgccggtggcggataaatacgacggtgtcggcggcaaagtgaagtactgccgttataccgatatctacaaagtcgccgtggtcggtggcgatgccgggtatctcgtcaccaacatcgtgaaataa

SEQ ID NO: 427953 - DNA, 1098 bp, Serratia marcescens
atgccagccattcacatttttaaagccggtactcataccgatatgcacggcacgaaactgccgttcacgcaaagcgatcttgccgcctgcgtgaaagcctatgacccgtccgtccatgaagcaccactcgttattggccacccaaaaacggaagacccggcgtggggctgggtgaagtccctgtcgcttaacggcggcgatctgctggcagagcctgaccagctcgacccgcagtttgccgaactggtgggcaacggacgcttcaagaaggtctccgcctcgttctatctccctgactcaccgaacaacccgaagcccggcacgctttacctgcgtcatgtcggctttctgggggcgcagccaccttccattaaggggctgaagcaggtttcgtttggtgagaaagaagaaggcgtcgtggagtttgccgactggagtgatatcaccaatgcctctttatggggccgtctgcgcgattttctgattgctcagttcgggctggacgagaccgataaggtgcttccttcatggcaggtggactccctgcgtgaagaggcttaccgcgacaccgggaagtctgaaccggacttcagtgagcacaatcccaaccctcaacaagagaacagcaccatgactgaagaagaaatcaaagcgcttcaggcggaaaacacacgtctgaaagcggaagccacccagcgggcagaacaggaagcgaagagcaagcaggacaaactgcacgcggagaacgtctcctttgccgagaagctggttggcgatggccgcctggcccccaaagcgaagtcggtagtcgtggccatcctggacgcggtttctgcaggtgacaagccggttgagtttgctgaaggcgatacccgcaccccgctggccacggcgtttaagacgctgctggacagcactgatccggtactgaatttcagtgagcacgcgaccaaagaccgcgtgaacacggatatcaaaacgacgtcagcggagtttgctgaagccgacccggaacgtctggcgctgcatcagaaagcgctggaactgtcgaaaaaagaaggcatcagctacgacgctgctgtctcccgctgcctgtaa

SEQ ID NO: 427954 - DNA, 459 bp, Serratia marcescens
atggcttccgataacctggtcaatgtcaccattaacgatgaatccctgcgccggagcctccgtgcgctggatctggctgccacagacctggaacccgcgatgcgcaaaatcgccggaaccctgctggcggaaacgcagtttaactttctcgatgaggggcgtccggggtggactccctcgctggcagcgcaggagcgcgacgggcaaacactgcaggataccgggcgtctgatggggtcagtatcaaccgatcatgatgaccggcaggctgctgtcggcactaacgttgtttacggcgctattcaccagtgtgggggtaaaacggggcgtaatgagtccgtcgaacttccggcccgtcctttcctgccgctgacgggggacggtgaactgcagcctgaagtggttgtccccatcctcgatacgattgtccgccatcttgaagcagcggcccgtcgctga

SEQ ID NO: 427955 - DNA, 822 bp, Serratia marcescens
atgagcgtgacaacggctgaactggcgtactgcatgacgctgccccccaaacgggctatcagttacctgaagtccaaagggtatagcttcacgtgggactgggaggagatgtggcaggatgcccatgcccgcgcctttaccgtcgccaaagtgacccgccttgatatcctggaagatattcgcggggcactgcagcaggctgtcgatgaaggaaaaacaggccgctggttccggcaggagctggagccggagctgcagcgcaagggatggtgggggccacgtgataccaccgacccggtaacgggcgagccggtcaccatccagcagggcagcccgtggcggctcgacaccatctttcgcaccaatatgtccgtactctacagcgccggtcgctgggccgagcagatggagaacgtcgacgacaggccgtactggatgtataccggcatcaacgacagccatacccgcaagagccatctggcgctgcatggtctggtgctgcgctatgatgacccgttctggcaggcgttctacccgccgaacggctggcgctgccgttgtggcgtgattgccctgagcgcggcggatgtgcgtgcccgtggcctgaaggtgtcaggttctggctcagccatgggatgggagctgaagctggtctcagagaaaacaggcgagatgcagaatgtcgctaccttcaataccggcaccacgaaggtggccaccgacgtcggctggtcttatgcgccgggggctgcataccgtcccgaccttgcccgctatcagggtacgcttcaaccgctggcacagcaggaactgagaggataa

SEQ ID NO: 427956 - DNA, 1497 bp, Serratia marcescens
atggcccgtggactctgggtttcacccagtgagttcgtcaaatttgccgaacctaataaaacactgacggagcagatcgcctcgcgcagccgttccatcgacttcttcgggctggggatgtacctgcctaaccctgaccccattctgaaatctcagggccgggatatccgcatctatcgcgagctgcgtaccgacccgctggtcggtggctgcatccgcaggcgtaaggcggcggtcaaatcgctggagcgcggtcttgaacgtggtcatgccccggcgcgggtattcagcttcatccgggatatgctcgacgatctggatctgtcccgcatcatcggcgagatgaccgacgccgttctctacgggtatcagccctgtgagatcatgtggggacgctctgttaaatcctgggccattgccgatatcgtaggtaaaccccctgagtggttccagttcgacaacgacaacctgctgcgctttcgcgccaaggacgccgggctggaaggcgagccggtaccgctgaacaagtttgtggtaccgcgtcaggacgcgacctacgataacccgtatggcttccctgacctgtcgatgtgcttctggcccgtgaccttcaaaaaaggcggcatgaagttctgggtgcgctttgccgagaaatatggctcaccgtgggttatcggcaagcatccgcgcggtaccgctcagggtgagattgacctgctgctggattccatggaggcaatggtggaagacgcggtggccgctatccccgacgattcctccattgaaattaaggaggccgcaggcaaggccgacagcagcgatatttatcagaacctgatcacgcttgcccgcagtgaaatctccatcgccctgctggggcagaaccagaccaccgaggccaacagtaaccgcgcctccgcgcaggccggactggaagtcaccgatgatatccgtgacgctgacgctgatatcgtggaaagcgcggtgaatcaggccatcaggatggcggtatcaatgaactttggcgatgtggccagccccgtctggaagatgtgggaacagggaacggtcgacgatacccaggcaacccgcgacgagaaactcagccgtgccggtgtggtcttcaccccgcaatacttcaagcgtgagtaccagctgcaggacggtgatattgacgagacaccaccgtcagaacgccagaagaacatgctgccgctgtcatttgccgaggcgattgatgccgatattcaggcacagcaggccctggacgacgcgctggatattctgatgaacggaggcgcgttaaatggcacgctggaacccgtactggctcctctgtttaagcgggttgaagatggcgtcaatccgtctgagctgctgggcgaactggccgagctgtacccgcagatgaacgctgaagacctgcaggaacggctggcacggattatgtttgttgcaactgtctgggggcgtctgcatgagcgtgacaacggctga

SEQ ID NO: 427957 - DNA, 1524 bp, Serratia marcescens
atgagccagcttgctcctgttttgcctgacacctcggcgctggatatccccgccgttctgatgccctaccagcagcgctgggtggctgacacgtctccgctcaaggtgattgagaagagccgccgaaccggtatcacctgggctgaggcgtccgatgacgtgctgaccgcagcctcttcagcccctgcgggtgggatgaacgtgtattacatcgcctataaccaggacatgaccgtcgaatatatccaggcgtgtgcgatgtgggcgcgggcattcaactatgccgccagtgaaatcgaagagggtttctgggaagaggacgaagacgacaagcatatcaagacctacaccatcaaattccctgactccggcttccgcgttgtcgcgctctccagccgtccgtctaacctgcgtggccgtcagggcatcatcgttatcgacgaagcggcgttccatgagcaactggacgaactgctgaaggcggcgctggcgatgcttatctggggcggtaaagtgcgcgttatctccacccatgacggtgacgataacccgttcaatacgcttatcggtgatatccgggccgggcgtcaggggggcagcgtacatcgcattacttttcaggaggctgtgtcccaagggctgttccaccgcgtctgcctgcgtaccgggaaagaatggtcggaagcatccgagcaggcgtggatggcatcggtgtacaaattctacggtgccggtgcatcggaggagcttgactgtgttccggccaacggtggcggagcctggctgtcccgcgccctgattgagtcccgtatgtcggctggcacgccggtgttgcgtctgacctgcccggagggttacgagctgaagcccgatgatgtccgctggagcgagacgcaggagtggcttgatacacatctgaaaccgttgctggaggcgctccccgctgacgcacgttctttcctgggtcgcgactttggccgcagcggtgacctgtcggtggactatcccctgctgcaggagaagaacctggctcgccgcgtgccgttcgtgctggagctgcgcaacgtgccgttcaaacagcaggagcaaatcgcctggtacctgatggacggcctgccaaacctgataggcgcggcgcttgatgcccgtggtaacggctcttacctcgccgaatacgccatgcagcgctacggctccagccgggttaagcaggtgatgccaactgaaaactggtatcgcgagcatatgccgccggtcaaggctgcgctggaagatggcaacctggtggatttaccgaaggatgaagatacgctggatgacctgcgggccgttcaggtggtaaacggcgttccccgcgtgccggaacagcgctcaaaagcgaagtctgacagtggcaagcgtcacggggattcagccatcgcactggcgctggcgtacttcgccagtcgtgaaattaacaaagggccggtgaaggcaagctcacgccgtcgtcgtcaggcggcccgtatgctggaggattactga

SEQ ID NO: 427958 - DNA, 546 bp, Serratia marcescens; identical to SEQ ID NO: 247561

SEQ ID NO: 427959 - DNA, 312 bp, Serratia marcescens
atggttgatatcgcccgcgtgcgccgggagtccctgcgctggagtctgctggttgctctgaacaaaacccgcccgtacaccgccagcgagacgctgctgctggacgtgtcccgcgccatctacccggacaccacaccgctggaactgcgccgtgagctggattatctggctgatcgcaaaatggttgatctggagaaaaaaccctccggcgactggtttgccgacctgacccgcctcggtgtcgatctggttgagtacaccgtggaatgcggccccggcatcgcccgcccggaaaagtactggagtgaatga

SEQ ID NO: 427960 - DNA, 333 bp, Serratia marcescens
atgacgttgcaggttgaattctggacggtggtgggtttcctcatcaccttcatgagctttgtcggtggcatagccaaatggctgttcagtaaagcggaagagcgtcaggcggcgcggttcgcctcccttgagcagtcgctgcagcagtccgcctcaaactggggcgagctggaaaaagaatttatgcggtttaaggcggatttaccgctgaactacgtccgccgagaggattatatccggggccagacggtcatcgaagccaagctggacgcgctctacaacaaactggaactggtacagcagtaccgccatacaggaggtcgtaatggttga

SEQ ID NO: 427961 - DNA, 654 bp, Serratia marcescens
gtgtggactaacctgctaaaaaatctgccgtggcgcagtctgctgctggcagtgctcataaatgcttttctgattggactttattacctgggctacaaaagcgggcatgaaaacgccacgcgcgacggcgataaggcgatcagtgagttgcagtcagcattcgacacatacaaaacggagcaggcaacgcttgagaacgctgcgttgcgagcatgggcaaaacggtatcaggagcaggtagccgccgggcagcaggctgaagccagttaccttgagcagattgctcaactggagagccagaacaaacaactacaggggcaaattaacgatgtcacacagcgctggattgatgaaaaaggtaagagccatcccattgagtgcgtgtttactcgcggtttcgtgcgccagtacaacgccgcgctcggatatgacaacgcatccgtcgacaccggtcattcagacgcaactgccgccgctggcaccggcactggcgcagcgtccgggcgacctgaaaccgctgacgcctggctacgcgactcaggcgtctctcagcgtgacgtcctcgccaacatcatcgacaacgcgaagcagtgccgcagctggcgcagccagataaacagtctgctggacgaacgggaaggattacagaaatga

SEQ ID NO: 427962 - DNA, 723 bp, Serratia marcescens
atgaactggcctcaaatcaccctcatcatcctgcttgcctttggtctgggcgtaaccgccatcagacacggagaaccacgtaacgataaatacagcttctggtggcagcttgctggcaacctggtgattgtctggctgctctggtgtggcggcttcttcagtcaggcccgcgcagcgcagcctccgcaggctgcgctgcagtatcgcgatgatgtgatccgtaatgcccggcttgaatggggactgtctgcgccggtggccgatttcgccgcgcaactgcatcaggaaagcggctggcgacctgatgcggtctcgccggctggcgctcaggggctggcccagtttatgcccgccaccgccgactggataagccagctgatgccggggcttaacagccgtgagccgtttaatccggcatgggccatccgggcgctggtcagttatgaccgctggctgtggcagcgcgtcagcgccgccaacggctgcgagcgtatggccatgacgctgtcgggctataacggcggtctgggctgggtacagcgggacaagaggctggcctcgcagcaggggctggacagcacccgctggtttggtcatgtcgccacggtgaatgccggacgcagcactgccaactggcgggagaaccgtcattatccgcagcgcatcctgcacgaactggccccccgttatctgacatgggggggcggcagctgtgtggactaa

SEQ ID NO: 427963 - DNA, 351 bp, Serratia marcescens
atgaaaaacctgaaaaaattcattccccctgttaaaaagccacgtctcagcggctggctgctgacctcagtgctgctgctcggcaccatcggtctggtatcgccccagcagctgccggtggttgtctacaagctgtcactcatcacgctggcggcagtattgggctactggcttgaccgttcgcttttccccaaagcccgtcccggtcagtacctgaagcatgatgacaggctgatggctgatggtcgcttccctgtgcagaccggccttcaccttgtattttctgctgcgttaatccgccgtgcactgattgttgcagcggtctgtctggctgtggctacaggactgtga

SEQ ID NO: 427964 - DNA, 567 bp, Serratia marcescens
atgggaacgtattacacacttgattccgctaatcgtctgccttcgccttgccatgtaattaccggaaaatacgaacctgaagcgccggagctggccgctttccttcatcagatgtatcccgatggtctttccaagcacggtcataactatctctataaccccggccctaaaatggaagatgacagtggagtcagcagaagtctgctggtcggtctggtgtttgagttagttcgccgtagccattttcctgacaaaccttcccgctatcagtcactgtttgcctgtcagcatctgagtgaagtcaggaagttccgggcattactggccgatgagagaggcgaagacgaaatcagaacggcaccgatatatgaagtaatcacagatgagccggtgcatcgcggagatatgaggttattgaacagtgattgcccggtgctggaattatatcaccgggcctggctttactgggcgggagaagcggccccggttaagactggtgaggaagaaccgttctgggaactgctgattccgcttccagtcttcgttggtcgccggataactgagtag

SEQ ID NO: 427965 - DNA, 771 bp, Serratia marcescens
atgaaagaacaatctttacccatcgttccatggattggcggcaaacgtcgtctggctaagcatattctgccgctgttcccggcccatacctgctatgtggagccgttctgtggggccgctgcgctctattttcttaagacacccagcaagaccgaagtcattaacgatatcaacggggaactggtgaacctctatcgggtggtcaagcatcatctggaagaatttgttcgccagttcaaatgggcgctggtcagccgtcagatttacaaatggttgcaggatacgccggaagaaactctcaccgacattcagcgggcggcccggttctactacctgcagaaacaggcgtttggcggcaaggtggccgatcactcgttcggaacctccaccacaagtgcgccgcgctttaacctcctgcgcatcgaagaagaactgtcgatggcacacctgcgcctgtcgagaacgctgatagagcatctggactggcaccagtgcatagagcgatatgatcgcccgcatacgctgttctactgtgacccaccatactggggaacagagggctatggtgtggagttcgggctggaaaactatgatcacatggcagatttagcgcgaaggatcaaagggaagatgattatatcagtgaacgatatcccggaaatgcggcaggtattcaacggtctgaacatgcagtcggttgatatcagctacaaccttaaggtaacaggtaaacccagcccgaagaaagagctggtaatttgtaatttttga

SEQ ID NO: 427966 - DNA, 534 bp, Serratia marcescens
atgactatgcgcaaattatttttaccgttgatatttgttttatctgggtgtggagataataccgatcctgctgatacgtccaccacagctaaggagcacgcggtttttagcgttgaaacagataatccggttgtaaatcgcgaattaccgtttattcgccaacaactccccggcctggataagtacgcggacagttttgaaaaagtcgaagtatccgaggatagcgaacgcccggtgacaacggtgcagtttcatattaaagacgaaaataatattccaagtgactacatagcctctggtcataattgttatttgttcatatcaaataatgcccacgaagtgaaaatatctaaatcagcatgtcaggctgtttttttcgataaaacggatgttcctggtggagacctgaccgtgaaacttgataaggaaaaagttcctatgacagatgatggtaagaccccgcgagcaggttgtttgaaagcttattcaccagagccagataatgattattggacttgtccaaggcaggattaa

SEQ ID NO: 427967 - DNA, 306 bp, Serratia marcescens
atgagtaaaccaaatacatcaagctcaggtacccgtattttgcgtgtccttaaggctttacgcggtcacgctctgaacggtgtttctaacggcgagctggcgtcagctctgggcgagtccccggcgaatatcaatcgggcgctcaatacccttatcgaagaaggactggccctgaaactggataacgggcgttttgccccaggagtccagctcttacaaatcgccatggcgcacagtaccgaaatggcgcgggcgcaggatcgtatcaatgaaattaaccagcgtgttatggctggtagtcgctaa

SEQ ID NO: 427968 - DNA, 909 bp, Serratia marcescens
atgggacgcacaaaatcacaaccagttgaactagtggaagatgcaccgctgaccgatggtctcagtgtcagtcttaatgctatgtccgaacatcgcctcgaaatcatgcagcagtttggtgatggcctgccgtatgaacgtgatcgtattgtccatgaaacacgtttttatatggctcagagtgctgaagccatgctggaggcgggtaaacgactggtaattctcaaagaaaatgaaccacatggtgacttcatcgacatcgttgagtctcagttgtccctatccaaacgtaccgcgcaggtgatgatgcaagcatccctcaaatatttgtctcccaagcttgaaccaaaagcgcaagcgcttgcgcttttgggtaaaacaaagctgtttgagttgatgacggaagatgacgaagacctcgtcgaattagccgatggcggcacgattgctggtatgagcctcgatgatattgatcgcatgacaagccgcgaactgaaagcggccctacgcgaagcgcgtgaaaccaacgcagcacaacagcgcgtgcttgccgacaaaaacgaaaaaatcgactcgctttccacaaaactggagaagaaatcccgtatccagccgcccaagcctgacgaagaggtgaagaagctgcgtgcggaagttacagcgttagcggttgaggcggaatctgccatcgccgttcgactgtccagcgcctttgagaccctgtgcgcatactgtgctgaaaatatgattgatacccccagagactttatggccggtctggtctgccagttggaaagcaccgcgcgtagcctgcgctccacatttgacctgccggacgagccgacaggcaacgccgccccttcatggctgactgacccgacgccagagattaacgggcaggaggcataa

SEQ ID NO: 427969 - DNA, 1770 bp, Serratia marcescens
atgagtgccgccctgactgaacgactggtttatgttgcccgcgcggcacgtgacgcggggcatggtaagcgtggtgcgatatatgatgccgcctgcgccgaactgggcatttcccgcgccaccctgctgcgcaagctgaaggaggtatcagtgactgacaaacgtaaaaaacgcgccgatgccgggcgcagtgccctgagccgcgacgaagccgcgctgatatctgccacgctgcgcgaggccacccgtaagaacggtaagcgcctgtattccatcgcggatgcggtggagaccctgcggtcaaacggctttatcactgctggcagaacggacgaggccacaggcgagtttttcccgctgtccgaggacaccatcagccgcgccctgcggaactatggtctgcacccggaacagcttgacgcaccggccccgtcgtccgagatggccagcctgcatcccaatcacgtctgggagattgatgcctcactttgtacgctttactacctgagcaacggccataaagggttgcaggtgatggacagctcgaagttctacaagaacaagcctgccaacatcgcccgcatcgccagtgaccgcgtgtggagttacgagattaccgaccataccagcggctggatttacgttgagtacgtgatgggtgcggaatctggtgagaacctctgttctgtgcttatcaacgccatgcaggagcgcggcggcgcggacgtgctgcacggcgtgccgaaaatactctaccttgatcccggttcggcgaacaccgctggcatgacgaaaaacatgtgccgctcgctgggcatcaatctgatagcgcacaagccgcataacgcccgcgccaccgggcaggtggaaaaggcccgtgacattatcgaacgtaaactggagccgggtctcaaattccagccggttcatagcctggacgaactgaacgcgctggcggtgaaatggcgcagccactttaacgccacggcggtccacagccgccacggtaaaacccgcacggatatctggctgaagattactgctggccagctgaaaaaagcgccatccgttgaggtttgccgcgaactggcggtggccgcaccggaactccgtaaggtcacaccaaaactgcgcgtctcgttccggggcaatgagtttgacgtttcgacggtaccgggcgtactggtcggcgaaaaactgatgattacccgtaacccgtggcgcagcgatgtggcgcaggtggtgctgaccggtgaggacggtcacgagacgttcttcctagtcgaggaggtcagaaagaacgagttcggctttgccgaaagcgcggcggtatttggcgaaaactacaaagccctgccggagaccccggcgcagacggcggcaaaagaaatcgaagagctggttacgggcaccgataacgccaccgatgcagctgctgcacgcaaggcgaaggcgctgccgttcggcgggcgacttgacccgtacaaacatatcgacgacaccacgcttccggcctatatgccgaagcgcggtcaggcttcagacgtgcgcgggccgcgtattgagcagcgtccgctgacccatgtggaggcggcgaaagccctgcgcgagaagtttggcgctaacggccatatctggacgccggaacattaccgccagttaacggcacagtacccggacggcgtaccggaagccgctctggatgaggtcatggtcaccctgaccactccggcccgcaacagcgttatcagcatcgttaacggtaactga

SEQ ID NO: 427970 - DNA, 1167 bp, Serratia marcescens; identical to SEQ ID NO: 15589

SEQ ID NO: 427971 - DNA, 270 bp, Serratia marcescens
atgaaatccatcgccgatatcaaccagcagatgaacaaggtgcagtccgccattatggcgctcaacgccatgaacactaccgtgcagagcgtcatgattgctggcagtaagccggttatccgtatcgcccgcaacgggcactgtgcccgcctgctggagcagggcaaagcgagttatacccatgttggccatgacggctcagggcgcttccgtcagggcgtctttgagttgcatggctgccgtattacctggtcagagtcgttacattaa

SEQ ID NO: 427972 - DNA, 612 bp, Serratia marcescens; identical to SEQ ID NO: 15591

SEQ ID NO: 427973 - DNA, 189 bp, Serratia marcescens
atgtccatcaaatgtaccaactgccagaaaggtatcaccaccctgaagttcagcgacgccagcgtcattacctccggtaagtaccgtgtgccagccgtcctcatcacgctggtatgccctcactgcagccagcattactacaccgaagttccggccatggagttcatcccctgcgaggcaaaaaaatga

SEQ ID NO: 427974 - DNA, 297 bp, Serratia marcescens
atgaaaggcatgaaattatataaccgctccactatatacaatctggccctgaaaacctttggccctgaagcacaggcgctgaagctgatggaagaagccgccgagctggccgctgctgccgcccgcaacatgaacggactgggcagtgaagtcgatctggctggcgaactggctgacgttgaaatcatgattgaacagttccgcctcaacgggatgggcctgatgattgattttcataagcagaaaaagctggaacgccttgccgaacgcctgggggtgacttatgccgcagaataa

SEQ ID NO: 427975 - DNA, 690 bp, Serratia marcescens
atgccgcagaataatgaaaagctgctggagaagttaaaaaagctgctggcgctggctaaatctgacaacccccatgaagctgcactggccctacaacgcgcccagaagctgatgcaggcctataacatcacccaggctgacctcgcactcagcgatattgatgaaagcgtcagtcactactgggcagcaggtagcgttaacccaccgcgatacatgctgggtctgctggatattatccaggtggcatttggcgttaagtctattattcactccggctttaaacccagcgttggtttttacggtaataaagaccgggttgaactggcctcatatacatgggaggtactggccagacaattaatcgtggcccgtaaaaactatattcgacagcagaataaaagaatcaaaaacacgaccaagaccagtcgtggtgacaagtttgccgaaggctgggttctggccgtgcgcagcgaggttcatttatttgctatgtcccgcgaagaacgggagctggcaagcctctggcttgaacaaaaataccctgactcaggcacaactacgggccgtggggccgggaagtcacgtgacgcagacatgtcccgccacatcggttacagagaaggggaaaacgtccgcctgcatcagcccgttggcgggcaggagcagcataaactgagggctgaaagatga

SEQ ID NO: 427976 - DNA, 426 bp, Serratia marcescens; identical to SEQ ID NO: 15597

SEQ ID NO: 427977 - DNA, 390 bp, Serratia marcescens; identical to SEQ ID NO: 15598

SEQ ID NO: 427978 - DNA, 1323 bp, Serratia marcescens
atgcaagccaccatcgcacccccactcgacgccgacgaggcgtccacaccggtgaactcccgcgggaaagtcatcgtcgcctcgctggtcggcaccgccatcgagttcttcgacttctacatctacgccaccgccgcggtgatcgtgttcccgcacatcttcttcccgcagggcgacccgaccaccgcgacgctgcagtcgctggccaccttcgccgtcgcctttgtcgcgcgccctatcggctctgcgctgttcggccacttcggcgatcgggtagggcgcaaggtcacgctggtcgcctcgctgctgaccatggggatttccaccgtgctgatcggcctgctgccaagctatgaaaccatcggcatcttcgcccctatcctgctggcgctggcgcgctttgggcagggcctggggctgggcggcgaatggggcggcgccgccctgctggcgacggagaacgcgccggccaaaaagcgcgcgctgtacggctccttcccgcagttgggcgcgccgatcggcttcttcttcgccaacggcaccttcctgctgctctcctggctgctgagcgaccagcagtttatggattggggctggcgcgtgccgttcatcctctccgcggcgctggtgctgatcggcctgtacgttcgggtatcgctgcatgaaacgccggtgttcgccaaagtggccaaggccggcaaacaggtgaaagtgccgctcggcacgctgctgagcaagcatctgaaagccactatcctcggcaccttcatcatgctggcgacctacacgctgttttatctgatgacggtgtattcgatgacctacggcaccgcgccgcagccgctgggcctcggctactcccgcaacagcttcctgtggatgctgatggtggcggtgatcggcttcggcgtgatggtgccgatcgccggcctgctggcggatgcgttcggccgccgcaagaccatgatcgccattaccctgctgatgatcggcttcgcgttcctgttcccgcccctgctgggttccggcaatcaggcgctggtgatgggcttcctgctgtgcggcctgagcatcatggggctgacctttggcccgatgggcgcgctgctgccggagctgttcccgaccgaagtgcgctataccggcgcgtcgttctcctacaacgtcgcgtcgatcctcggcgcgtccgtggcgccttatatcgccacctggctggcggcccactacgggctgttctacgtcggcatgtacctggcggcgatggccgggttgacgctgctggccctgctgttgatgaaagaaacccgccaccggtcgctgtga

SEQ ID NO: 427979 - DNA, 615 bp, Serratia marcescens
atgagtaacactgcagttctggatgaaaacggtatcgccactgtagcgggcgatatcactgtatatcactatgacgaggaaacccgggaatacacctcatcctctgtggagtatctcgcccttggggtgggtactccggcacattcgtgcgccgatgcaccgccggaagcaatttcgggttacgtggtttgccggactgccacgctgaacgggtgggagcatgtgcctgatcaccgcggcgagacggtatacagcacggagaacggtaaccccgttctgattacccaaccgggtgattacccggcggacaccaccacaaaacagccagccacgccatgggatacctggaacggtgaggcgtgggtaaccgatactgaacggcagcgagccgcagaactggaggttgccagacagcaacgccagcaacgggtgaaacaggcgatggcgtccgtcgatcttatcaacctcaaactgcgtgctggtcgcagtctgaaaccagaagaaacggcaaaactgaacgccgtgctggattatatcgacgagctgaacgcactggatatcagcaaggcacctgaaatcagctggccggaagcgccactggcgcttgccggctga

SEQ ID NO: 427980 - DNA, 744 bp, Serratia marcescens
gtgccggacaaataccgggaagccaaacagcgtgtggcggccatcttccacgcccataaaggccgttacggctatcgccgcgtgacctgtgttctgcgaaatgaagggcacggactgaaccataaaactgtccaaaagctgatgatggcgcagcaactgaagtcattggttcgcagaaaaaagtatcgttcttataagggggatgtcggtaaggtggcgcccaacctcctgcaacgcgactttgtcgctcagcgtcccaatcaaaagtgggtaactgatgtgacggagttccgggtaggtgaagacaagctgtacctctcaccggttcttgacttgtacaacggtgaaatcatcgcgtatgaactggcgcgcagggcagagtttacgctggtaaaaaccatgctggacaaggcgctgggcaaactgaagccagacgaacaaccggtgttgcacagcgaccagggctggcattaccggatggcggcttaccaacatcagttacgggaaaaaggaataaaacagagcatgtctcgcaaagggaactgcctggataatgcagtgatggagaacttcttcggccatctgaaagcggaactgtattacttacaacgctttgataacgtagaacacttggcaaaagaaatagagaactacattgattactataaccacagccgcctcagagagaaactaaaaggcctgagtccggtagagtatcgaacccaggccatgaaggccgcctga

SEQ ID NO: 427981 - DNA, 531 bp, Serratia marcescens
atgaagttttcgctgcaagacaaactcagtgccgtccggcattaccttgccgggcttggcagccagcggcaaaccgccagaaagttctccgtcgctcatgtccagttgcggcgctggattgccgcctatcaacaccatggcgagtcgggcctgcaacccggacgtcggcgacgctacacgccagagttcaagcttgccgccgtcgagtttgcccgttctaatccgctgtcgttagcggacgttgccgccagattcgacattccctcctacacgacgctggagcactgggttaagctttatcaggagaaaggggccgaagccctcaacctggataagcgtggtcaccacatgtcccaacatcccaaaaccccctatgccgataaatcgcccgatgaactgacgccggaagaaatgcgggaggaaatcgcgttcctgcgtgcacagaatgactacataaaaaagttgagagccttgatgcaagagaacgacgccagggcgcgtcggaaagggcaaaaatcatcacggcattaa

SEQ ID NO: 427982 - DNA, 753 bp, Serratia marcescens
atgcagagcagaacggtttaccactggcagagccggcgtgacgatcgggcgataaccctgcgtatccgggaaatcgcggaaacccggatacggtatggttgcccgcgtattcatattcagttgcggcgggaaggctggcttgttaaccacaagaaaacccaccggatttattgcctggaaggactgaacctgcgcagaaagcgtccccgcagacatgtcagtgcagcacgccgtcaacagcgcccgattctgacgcatgtcgatcagtgctggagtatggattttgtgtcggataatctgtttaacgggcggcgttttcgggcactgactgtagtggataattttagtcgggaatgtctggcgatccatgccggaaaatcgctgaaaggcgaagatgtggtcagagtaatggaagctcttcgggtgctggataggcgtgtaccggtgcgtattcagacggataacggcagtgagtttatttcgaaaagtctggataaatgggcgtatgagcacggtgttacgatggacttctcccgcccaggaaaaccaacagataatccgtttattgagtcatttaacggtagtctgcgggacgaatgcctgaatattcactggttcctgtcactggaagatgctcagaacaaactcgacagctggcgcagggaatacaatcacgaaaggacgcattcatcattaaatgacatgactccggctgaattcatccgaagtctccggaaagacgaagatctctga

SEQ ID NO: 427983 - DNA, 267 bp, Serratia marcescens
atgaaaaagacccgttataccgaagaacagattgcgtttgcgctgaaacaggccgaaaccggcacccgcgtcggggaagtctgcagaaagatggggatttctgaggccactttttataactggaagaagaaatttgccggtctgggtgtgacggaactgcgacggctgcggcaactggaggatgaaaatcaacggctgaagaaactggtggccgacctgagtcttgacaaggagatgcttcaggaggtgctgaaacaaaagttctga

SEQ ID NO: 427984 - DNA, 849 bp, Serratia marcescens
atgcctcagacccgtgagcacatcctgctgggtcgtcaggttggcgttcctttcatcatcgtattcatgaacaaatgcgacatggttgatgatgaagagctgctggaactggtagaaatggaagttcgcgaactgctgtccgcttacgacttcccaggcgacgacctgccagtaatccgcggttccgcgctgaaagcgctggaaggcgaagctgagtgggaagcgaaaatcatcgaactggccgaagcgctggacagctacatcccagagccagagcgtgctatcgacaagccgttcctgctgccaatcgaagacgtattctccatctccggtcgtggtaccgttgttaccggtcgtgttgagcgcggtatcatcaaagttggcgaagaagttgaaatcgttggtatcaaagacaccgttaagtctacctgtactggcgttgaaatgttccgcaaactgctggacgaaggccgtgctggtgagaacgtaggtgttctgctgcgtggtatcaagcgtgaagaaatcgaacgtggtcaggtactggcgaagccaggctctatcaagccacacacccagttcgaatctgaagtgtacatcctgagcaaagatgaaggtggtcgtcacacgccattcttcaaaggctaccgtccacagttctacttccgtacaactgacgtgaccggtaccatcgaactgccagaaggcgtagagatggtaatgccaggcgacaacgtgaacatggttgtaaccctgattcacccaatcgcgatggacgacggtctgcgtttcgcaatccgtgaaggcggccgtaccgttggcgcaggtgttgttgctaaagttatcgcttaa

SEQ ID NO: 427985 - DNA, 573 bp, Serratia marcescens; identical to SEQ ID NO: 7379

SEQ ID NO: 427986 - DNA, 474 bp, Serratia marcescens; identical to SEQ ID NO: 427918

SEQ ID NO: 427987 - DNA, 1038 bp, Serratia marcescens
atgagtctgccccacacgttgcatatcggccgcccggacggcgtcatcaactggcgcatgccgctgcgcctgctgctggtcaacctttcgctgctggcgttgtgcctggcgatggccgttgccgcgctgtgctacggcacgctgcagctctcgctggagcaggtctttgccgcgctcagcggcgaggcgccgaaaaatctggtcaccgtggttacccaatggcgcttgccgcgtatcgccatggcgctgctgttaggcgccgcgctcggcatgagcggcgccattttccagtcgattatccgcaacccgctcggcagcccggacgtgattggctttaacatgggggcttacaccggcgcgctgatcgccatcaccctgttcaacggcggctattactacatcgccggcggcgcgctggccggcggcattctcgccgcgctggccatctacctgctggcctggcggcaaggcatcgccggcttccggctgatcatcgtcggcatcgccatcagcgcggtattggtctccaccaatacctggctgatcatcaccgcctcgctggagcgcgccatggacgccgccatgtggcaggccggttcgctcaacggcatgacctggcagaaagcccaacccgccacggcgttcatcgtgctggcggccgcggccgcgctgctgatgagcaaacggctgcagctgctggaaatgggcgacgatacggcgcgcgcgctgggcgtgaacgccgaaggcagccggctgtggctgatgctgttcggcgtcaccctcaccgccgccgtcaccgccaccgccgggccgatttcctttatcgcgctggcggcgccgcagatcgcccgccgcctggccggccaatcctcggtcaccctgacgtcctcggcgctgatgggtgcggcgctgctgctcggcgccgacgtagtgtcccaacatcttttcgcaccgatccaactgccggtcggggtcgtgaccgtctgcatcggcggcctgtacctgatttggctgctcatccgtgaggcccgcagataa

SEQ ID NO: 427988 - DNA, 921 bp, Serratia marcescens
atggcaaacctacctgaaaccccgcagtgggaagagggcatctaccagattgaggtctctgaccccgttctgggcgggcctgacggaatttctaaccgtcagggtaaacaactggccagccgcacgctgtacctgaagcaacaggttgaaaaaggcggttctgaccttgcgaaacatatcgcggcagcagacccgcatacccagtacgcaccgaaagccagcccgacattcaccggcacaccaacagcgcctacgcctgcaaatagcgataacagcaagaagctggcgacgacggagtttgtggccaaagcacttgcggcgcttgcaggcagcgcccctgagacgctggatacgctcaaagagctggctgatgccctcggcaacgatccgaattttgcgaccactgtgttgaacaagctggcggagaagctggccaaagaccagaacggcgctgatattcctgacccggcgctctttgtcaaaaaccttggtttgggggaaggctcggcgctgcccgttggtgtacctgttccgtggcccactgccacaccgccagcaggctggttaaagtgcgacgggcgcgcctttacaaaagaacaatatcctgttctggccagagtctacccgaccctccgtcttcccgatttacgcggtgagtttatccgtggatgggacgacgggcgaaaagtggatacagggcgcgatctgctttcacggcaggatggtacaagtttttctcattacgcaggtaattttgacattgggtctggtcattcaatcaataactatgaccaaatcgttgacaaccaacctggattctcccgtttttcatttgcaggtccttcgcgaggcgatggggttaattatgtgaccattcgtccccgtaacattgcgtttaattacatcgtaagggcggcatag

SEQ ID NO: 427989 - DNA, 1560 bp, Serratia marcescens
atgaaaggtattatcgataatatcttaagcaagctgcagcttttctccaaagccatgatggggccgatatttttcctgccggtgatcggtctgattctggcgctcagttctattctcaccaatgccacacttatcaatgaacattccgccgtgttctctatcggtaaaatgatcggcgataccttctggccgttattcggcaatctcgggctgattttctgcatcggcattacctacggcctggccaaagacaaaaaaagcgaagcggcgctggttgcggtgatgtgctttatcatgttcctcggcgccaattcgtcttatctgcaactcagcggccacgtcgcggccaagatcaacggcgaatattacggcaccgggcagactgaactgctgggctttaccgtggtggatatgggcatttttctcggtcttatcctcggcgtcaccatcgcctgggtgcacaaccgcctgtgcaacgtcgagctcaacggcgtgttctcggtctacggcggcgccaaactggtgctgatcgccatgacgccgatcatcatgctgtacgccgtcgccttcagctacctgtggccggccatctcacagggcctgatcgcgctgaccggctttatgaaaagctccggctcgctcggggttttcgtctacggcttcttcgaaaaattcctcatccccaccgggctgcaccactttatctggtcgccgttccagctcaccagcatcggcggttcaatcgtgcaggacggccagaccgtctccggctcgcaggcaattttcctggcctatatgcgcgacccgagcatctcgccgctgatgaacgaagcgctgcgcttctcgcagcaagggatggtgaccatcttcggcctgtcgggcgcggcattggctttctatcacaccgccaaaccggaaaagaaaatgctggccaaggcgattctgatcccggccatcaccacctcgatcctggtcggcatcaccgagccgatagagttcaccttcctgtttatctctccgctgctgtgggtgatccacgccgtgttgaccgcgctgtcgcaggtggcctgcaacctgttccaggtgcgcccctggggcgccagcgggctggtcgagttcctggcctacaacctgccgctgccggtctccctcacccgctggccgctgtatgtggtcatcggcctggtgcagtttgcggtgtattacctggtgttcaaaacgctggtgctgaagctcaatctgaagacgccgggccgcgaagatgatcaggacgtcaaactctattccaaacaggattaccggaaccgcaaaaataccctggacgagccgagcggcatcattattcgcgcgctgggcggcaaggaaaacattatttccgtcgacaactgcttcacccggctgcgggtggaattaaaggatatggcgcgggtagatgaggccgcgttgaaaagcaccggtgccaaaggcgtggtgaagaatcgccgtgaagtgcaggtgatttacggcgtcacggtcggcaaggtcaaaaatcaggtagagaaatatttagcggcactctaa

SEQ ID NO: 427990 - DNA, 534 bp, Serratia marcescens
atgagtccatcagacaaaattgctttattttcagccataggtggctgggtttcaggtatcgccaccgtttctgctgtcggtgtgtcactctatttggcaaacaggaaacctaaaataagtattaaatgtcgtatagggtttcgagtaattattggaaagagctacatcggaaaggatgtcagggaggatggtttgggtattacaattgcaaatcagtcaattgttcctataacagtgaacagtgttcattgggagtttggtcgtgaaactgttttacatcaaatgtttggtgacaacaattcagcctcagtgcccaaaaaactagagtacggagatgaagccttattctggattaagaatgaagatgatgattggtttaatgggtttgtagctaaactaaaagaacagaacccgaaaattagaaaatttaaatgctgtgttaacctttccacagggcaaacgttctcatttaaaccagacaaagcttttatggataaattgtcaagacatatacggcacgaaaaaaaatcataa

SEQ ID NO: 427991 - DNA, 1443 bp, Serratia marcescens
atgaacactgccttagctcaagccgaccatgcggtcgaggccctgcgcgcagagcgccgagacgaatactacccgcagttccatctcgcgccgcctgccggctggatcaacgatcccaacggcctgatctgtattgacggcgtctatcatgccttcttccagcatcacccctacagcgaacactgggggcccatgcactgggggcacgcgaccagccgcgatctgatccgctggcagcaccagcccatcgccctggcgcccgatgcgccctatgacaaagacggttgtttttccggttgcgccgtggatgacaacggcgtgctgacgttgctttacaccggccacgtgtggctgggcgagcccggcgacgacagccaggtgcgggaagtgcaatgtctggccaccaacgaagacggcatacgcttcgtcaagcacgggccggtgctggccgcgccggacggcattcagcatttccgcgatccgaaagtctggcgcgagaacggcgaatggtggctggtggtcggtgccaaagaaaacggcctgggccaggtgcgcctgtaccgttctgcagatctgcgcgcctggcgcttcgatcgggtgctggccggcgcgcaggcggcgcatcaagggtatatgtgggaatgcccggatttcttcccgctgggggaacaacacctgttgttgttctcgccgcaggggctggcggcacagggctaccgctaccgcaatcgcttccagagcggctatctgctcggccactggcggccggacagcgactttagggtgacccaacccttctgcgagctggatgccggccacgatttctatgcgccgcagaccttcaccgccgccgacggccgtcggctgctgtttgcctggatggatatgtgggaatccccaatgcccagcaaagcgcaccgttgggccggcgccctcaccctgccgcgtgagctaacgctggccgccgacggcagcgtccgcatgaacccggcgcgtgaactgacggcgctgcgccgagaatcgcacacctttttggcacagacgctgaccaatcagcatctgccgctggcggacgacgtgcaggaactcaccctgacgttgagaccggccgacaacgacgccgagcgctacgggctggccatcgggaatgcggcgcggctgttcgtcgacaatcaggcgcaccggctggtgctggaacgttttcatgaaaaccccgccctgtgcacctgccgcagcgtgccgctgccagaaggtgacagcctgtcgctacggatcttcattgaccgctcatcgctggagatcttcgtcaatcagggccaggcctgcctgaccagccgaatttatccgacggagggcgatcgccgcctcagcctgttcgccgaaggcggccgggcaaagttcgaacccatcacgggatggcggttggcaagcatctggggataa

SEQ ID NO: 427992 - DNA, 1344 bp, Serratia marcescens
atgaaacagataaatgcagaactggcctgtgataaaaatgcggcatcgtccgaatcctcaggattaattaatcaacttcgtcaaatagatatcggtgcggtgccgatcgcgttgtttatcacgatttgcgcgatcgtggcgatttccgcctatgccaacttcttgccgaagaatatgatcggcggcctggcggtgataatgacgctgggctttgcgctggcgcagttgggaaaaagcattcccgtgctgcgcgatatcggtgggccggccattctgtgtttgatggtgccgtcggtgctggtctatttcaacgtcttccagcctaacgtcatgggcaccgtccatttgctgatgaaagacgccaacctgctctatttcgtcatcgccagtctggtggtcggcagcattctcggcatgaaccgggtgatcctgatccaggggatgattcgcatgttcgtgcccttggtggtcggtacggtgacggcggtgatcactgggctgctggtgggcaagctgttcggttttaccttctatcacaccttcttcttcatcatcgtgccgatcatcggcggcggcatcggcgaggggattttaccgctgtcgctggcctattcggcgatcctgggagcaacgccggacgtctacgttgcgcagctggcgccggcggcggtgctgggcaatatcttcgccatcgtgaccgccggggtgctggctcgcgtcggcatgcagcgcaaggcactgagcggcgacggcatgctgatccgctcggcgcaggagaacgcgatgtttgccatcaaggagcaaagcggcaacgtcgatttccaactgatgggcggcgggctgttggtgatctgcgccttctttatcgtcggcggcctgttcgaacacatcgtgcatattcccggcccggtgctgatgatcctgtttgcggtgctgtgcaagtactgccgggtgatcccggcttcgatggaaaccggcgcgcacagtttctacaagttcgtctccaccgcgctggtgtggccgctgatgatcggtctgggcatgctgtacgtgccgctggaaagcgtggtggcggtgttttcggtcggttatgtggtggtctgcggttcggtggtgctgtcgatggggctggtcagtttcctgattgcgccttacctgaagatgttcccggtggaagcggcgatcgtcacctgttgtcacagcggtctgggcggcaccggtgacgtggcgatcctgtcggcgtcgaaccgcatggggctgatgccgttcgcccaaatcgccacgcgcatcggcggcgcttccacggtcatcggcgcgacgctgctgctcggttggtttgtctga

SEQ ID NO: 427993 - DNA, 276 bp, Serratia marcescens
atggatagccggggttggattgccccggttttttatttcgaggacaaccgcacccacagcgtgatgagctatttcagcgaaagcaacatcgggcaggactttaaaggcgcgtactcatccgggccattgctcaacgacatcacggcgatcccgcatttctacggcgccaacatgcacacccgcatcggcgatacgatctacggtttcaattccaataccgatcgcgacttcctcaccgccaccggcggattggatccgcgacttcgtgcgcggtga

SEQ ID NO: 427994 - DNA, 1218 bp, Serratia marcescens
atgggcctgttgccaccgattttcttcatcgcgctggggctgttcggcgtttactgcatcgagtttggcgtagtgggtatcttgccgcagatcatcgcgcgctatggcatctccacggcgcaggccggctggctggtcgggatcttcgccctgaccattgcgctgttcgggccgctgttggtgctgctggcatcgcggtttaatcgcaaacgcatgctgttgatcgcgttggccgtgtttgcggcagccagcgcgctggccgctcaggcggacagctttgccatgctcatgctgctgcgcattttgccggcgttgtttcatccgatctacttttcactggcgatggtggcggccgcggcgctttatccgccgcatctggccaccaaagcaaccgcttatgcgtttatcggcaccagcatgggcatggtgttggggataccgttgacgcaatggatcgccgggcagttcagttacgaggcgtcgttccgattttgcgcgctggtcaatctgctggcggcgctgggattgctgtggcgcttgcctgatgcggccgtgcagcgcctcagctatggcaagcagttggccatcctgcgcagcggcacgctgtggctgaatatcaccacctgcgtgctgatctttgccgccatgtttgccgtctacgcctacgcggccgagtatctcagccgtgaaatcggcctcagcggcggcgccatcggcttgcttctggtggcgtccggtgtgggcggtgtcgcgggcaacctgttggccggcaagtggttgagccgtcatcgtgcggtgacggtgttgctgcacccgatagccttgatggcggcctatgcgctgctgtattgctacggcagcgtgaatatcggttccatgacggcgctttgtctgtattggggggcggcgcacaccagcggtttgatcgtgacgcaggtctggctgacctccgaagcgccgcaggcgccggcgttcgccaccgggctgtatatcgcctttatcaacctgggcgtggcggtggggtcgctggtgggcggttggtttatcgctgcctgggggctacagggcagcctgctgtgtggggccatgtttgccgcactggcggcgatcgcgatcgccgccaggctgtggctgcaacggcaggctacggttccgttgcgtcaatcatcgccatcacctgccgaaacatcgcgctttccgcatcggccagctcgttga

SEQ ID NO: 427995 - DNA, 822 bp, Serratia marcescens
gtgaaatcattagcaagcatgctgcaaggccagtcgatcggcgcggccatcaccgccgtcgaaaacgatatcaaggcgaaaccggcggatgccgacctgcgcgccgcgctggtgcaactgctgtgcctgagcggcaactggacgcgcgccaacgcgcagctgaaatcctggcaggcgctgaaaccgatcgctcaaccgaccacgctgctgctgatgcagtcggtcaacgccgagctgcaacgccaggcggtgttcgccggcacggccgcgccggcgctgctgcggcaggatcagccctggctgaaactgatggtgcaggcgctgcatcaggatgcgcaaggggcggccgaacaggcccaggcgctgcgcgatgaagcgctggaggccgccccggccggcgccgggcggttaacgctggccgaaggcgaccaagaacggcagctgcgtttcgactggctgaccgacggtgacggccgcctcggcccggtgtgcgagctggcgctgaacggcgtttactactggctgccgttcgccgacatcgccgcgatccagttccaggcgccgcagagcgccatcgatctggtgtggagccatgcgctggtgcgcctgaccgacggccgcgaacaggtgtgccaactgcccgcccgctacccgctggccgaagacagcgacgacgcgctgctgctgggcaaacgcaccgaatggcaaccgctgggcgacggcacccactatgcggggctgggcctgaagacctggctcagcgaaagcgacgaattcccgctgcacagcctgcggcagctgagcttcgacgcgagcgcctga

SEQ ID NO: 427996 - DNA, 1446 bp, Serratia marcescens
atgtcgggaaccgggataaccaaaccgaattcgaacagcctgccgagcggctatcgattcaacgaattcgagatccaggaagcgatcggcgaaggcggcttcggtatcgtctaccgcgcctacgatcaccaactggaacgcaccatcgccatcaaggagtacatgccgacctcgctggcgaaacgcaacgacgatctcagcatcgggctgcgcggcgagcgcttcggcaaaaccttccaggccgggctgaacagctttattcaggaggcgcgcctgctggcccgcttctcgcaccccggcctgctgcacgtgctgcgtttctgggaagagaacggcaccgcctacatgggcacccagttttacagcggcaccacgctgaagaacctgcaggcgcagcagccggagaaaatcgacgaggcgtggatccggcggctgctgccgccgctgttcagcgccatcaacaccatccatcaggaaggctacctgcaccgcgacatctcgctggataacatccaaatccaggagaaccagctgccggtgctgctggacttcgggtcggcgcgcaaagagatcggcaacctgtcggacgaaacggagatcatgctgaaaccgggtttcgcgccgatcgagcagtacaccgagaacaacgacggcgaacaggggccctggaccgatatttatgcgctgggcgccgtgctgcacacgctgatcgtcggttcgccgccgccggtcagcgtggtacgcagcatcgaagacagctatcagcccctggccgagcgccgccccgccggttactcgccggagctgctgcgcaccgtcgaccgcgcgctggcgctgaaaccggaagaccgcccgcagaccatcgatgaaatggccgagctgttgcatctgccgatcgccgatgaaaatgaaatcatcagcaccccggccgccgcgccggagaacctgctggtggccgccaacccggctgccgccgccgcggccgccggcgccgttaccgcgcgcagcacccaattctcgcggccgatgatggccggcgccggcgtcgcggcgctgctggcgatcggcgccgtcgcctggctgagcggcggcgaggatgataccccggccgtagcgcaaaacaccgagacgtcaccggcgcagaaaaccctgacggagcagccgagcgcgccgcaaatcgcgccatctgcgccggtggaaccgcaaaaggcggcgccgccaccgcagccggtggcactggtgtacttcaaactgcagccgggcgagcaggtcagcctcgacggcaagccgcagcaggtgacgccgggcgaaaacggcttcgccagcctgaatctggcgccgggtcgttatcagctggagatccgccacaacgatcggctccgccagcagcaactcagcatcgacaacgccggcacctggctggtcaatccggccaccgccggttaa

SEQ ID NO: 427997 - DNA, 1929 bp, Serratia marcescens
atgttggatcgcattattgcgcacacgccgctgggccaggagcagctgctgttccgctcgctggacggtatcgaggcgctttccacccctttcgacttctctattgaattgctgagcaccgacgcgcggctcgatcgcaaagcgctgctcggccaaccgctgacgctggagatcccgactcagggctttctcagcgccccgcgctacctgaatggcaagatcaccgccatcgccgtcagcagcgaagagatcggcggcacgcgctacgcggtgtataacctgcacgtacagccggatctgtggccgatgaccaaggatcgcaacttccgcatcttccaggaacaaacggtgccgcagatcgtcaagactctgctggcggagcacaacgtgcagttggaagatcagctgaccggcgactatcgcctgtggggctactgcgtgcagtacaacgaaagcagcttcaacttcatcagccgcctgatggagttggagggcatctattactatttcaaacacgagatgggcaaacacacgctggtgctcggggatgcgccccaccaccaccagccctatcccggctacgagatgatcccctaccacctgacgccgtccggcggcagcaccagcgaggaaggcatcagccagtggacattgtccgatcgcgtcacgccgggcatctacagcctggacgactacgatttccgcaagccgaacgcctggctgttccaggcgcggcaaaacccggtctcgccgacgccggggcagatcgacgtctacgactggccgggccgctacaccgagcatcagcagggggagttctacgcccgcgtgcgccaggaggcctggcaggccgagcatcagcagatccggggcaccgccaccgcgatgggcatcgctcccggcagcacctttacgctgtataacgccccgcacgccgacgacaaccgcgagtacctgacgctgcaggccaactaccatctgaaagagaaccgctacgccagcggcgacgatcagagcagcgaacaccgtatcgacttcaccgtgctgccggcggacgtgccctggcacccgccgcagcaagccacctggccgaaaacccacgggccgcagaccgcccgggtggtcggcccggccggcgaatcaatctggaccgacaaatacggccgcatcaaggtgaaattccactgggaccgcttcgggccgaaggacgacggcagctcctgctgggtgcgcgtctccagcgcctgggccggccagggctacggcggcgtgcagatcccgcgcgtcaacgacgaagtggtggtggactttatcaacggcgatccggatcggccgatcgtcaccgggcgcgtttataacgaagccagcatgccgccgtgggcgctgccggccgccgccacccaaatgggctttatgagccgttccaaggacggcaccgccgacaacgccaacgccctgcgtttcgaagacaaggccggcgccgaacaggtgtggatccaggcggaacgcaacatggacacccaggtcaaaaacgatgagagccacagcatcgctaacgaccacacccacctggtgggcggcaaccagatcaaacgggtggtgctcaatcaggccagcggcgtcaaaggcgaggcctcggcgctgaccggcaaaacgcgcagcgacgccgtggtcaacgcctttaccctcggctccggcgaatcgctgcggctggagtgcggcgaaagcgtgatcgagctgctggcgaacggccaaatcaacatcaccggcaccagcttcaatatcacggtgaaagaggacggggagatcaataccggcggccagctggatctcaaccagcccggcggcgccgcgcgcaccgccgcgccgggcggcggccatcaggcggcgatccagagcgccgtcgatcagctgttccctaaagagtag

SEQ ID NO: 427998 - DNA, 1707 bp, Serratia marcescens
atggcttacgtcattaccgaccgagaaaaactgcaagcgatttgggaggccgccaaagccggcgactggccggccgtgtatgccgcctccgtcgatgcgctcaccgatcccaaccatgccaaccaacctattcagggcgtggatatcgcggtgtatacctggatcaaaggcgcctatggcgtgaactcgaatcagggggcgtttgcccattacattcgcgaccaaaccaagctgcagtatgagctgcgcaccgggcatgttcccgatgactgggaaacgcgcatccagaatgcctccgacaacatcgccaaaaacttcgccaaaacgctgtttggcgtcgatctgagcagtgatcccaacgcgccgctgccggatactccgcccaccagcgccaaagtgccggacattcacgaggtcggcctgatcgacgccggcgcagcggcatccgaggtgttcaccgatgcctcctcgaccggcgcccccaactattcgccctgggccggcaccacgctgttctcctatttaggcgacacctcgttctttaccgaatgggtggccaccaacgatacctcgccttttaaggtcgaaagcggcacctacgatttgattgcggcggcgcaggtctccatgcagatgaaaaacctcagctacgtggttgaaacactgctggcgggcgaagtgcccacctatttgaccaccctcggtattggccacgagaccatccgcctcgccgccgaagcggcgcgtgatttctacaccgaatcctacggcagcagcgtgaccggcggcggcagtatcattcccggcaagctggatatcggctcggcgattttcaacgacattgccgacgtgctgtccacgccgaatctgtaccgcgtcggtacgctgtatgacgacgatttcacgctggcgttcggcaacatcgccgttaacaccggcagcggcgacgacaccatcagcgtgccgcgcggctggcaaaacaacgccggcaactacggctggacggtcatcgacggcggcagcggccatgatacggtcgattattccagcctgtcgcacggggtaaacctgaagtttgacgcccagggcagctatggcgggcgcggggtggtcgagaaaaacggcatcgggctgtatggctttaaggacgggctgtacaacatcgaggcggtgaagctgacggactttaaggataacgtcacctttaacgatcgggtgctgacgccggccaacggtctggaggtcaacctgggcaaaggctccagcgagattcgcttcgagcacggctataccactgcgccgagtgggagcgcgccgcaggattatctcggcgtgaacctgagcatgttgtccaacgatgtgcccttccccaacagcctgctgaatattcccgtgaagcagacccacaatatctacatcgacgatagcttcgagctgggctttttacaggcctcttccctgtctatcgataaccacctgctggctttcggcacagaaggctcaaacagcagcttctcgctgaactataacgcgcaaacccatacgcaggatctgtcgatattcatgcagggcgaaagcgcgctcaatcagcacgtcgtcaatatctacaattgggatcaaggcgacttcggcatcacgttggagcagccggccattcagctcgtcggcttgcaaaccgttacgccgcaagagctcgcggccgcctaa

SEQ ID NO: 427999 - DNA, 1290 bp, Serratia marcescens
atgatgaaacgcacgcttcccgcactgttgctgttctcctcgctccccgccctggcggcggaacccgccgcttccccctggaaaaacatcccgttgggcgatgcggccaccctgtcttacgacggttcactgcgcgagcgctatgaatggacggatcaacgcgatctgagcggcggacgcgacgacaccttcatgcagcgcctgctgattggcgcgcgcctcgactatggcgacgactttggcgcctatgtccagttgggatcgtcactggccacgccgcgcgatcgcgggcgcaagccgaccgatgaagatcatgcctatctcggccagggctatgtggacttaaaactgctcaccgcctacggcctcggcaccctgcgggtcggccgccaggagattgcgctgggttcgctgcacctgatgggcacccgcgacggccccaacgtgcgtcgttctttcgacgccatccgcgccagctgggccaaggataaaaaccgcctcgacgcctttatcggccaccccgtcaccctcaaaaccggcagtttcgacgacgataccgacaacagccaaaaggtgtgggggctgtacggcaccacgccgctggcagcgctggcgtcctcgctcgatctctacacctttggctttgaggataacgacgcccactacgcgcagctcagcgggcaagaacggcgctataccgtcggcgcgcgcattttcggcgcggcgcaggggttcgactgggataatgaagccgcctggcagttcggcagcgcagaacagcgcgacatccgcgcctggtcggcgtcggcgcacgccgggtataggatgagcgactggcgctggcagccgcgctttggcggcaagattggcatcgccagcggcgataaaaacggtcacgatgggcagctcaatacctttaacgccatgtaccccaagctgccctacctgaccgaaaacgggctggtggcgccggctaacctgatcgccattcatccttcggtcacgattacgccgtggcaaaccctggccatcgacttcagttgggacgcgttgtggcggcaacgccgcgaggatgccttctacctcgggccgatgcgcccggtgaagggcagcgcgcagggctcgcgctttatcggcaatcagtatcaggtcgaaaccatctggacgccgcgcagcgatctccagttcaaggtggcctatgtctacttcgacgtcggccacagcctgcagcaacatgccgggctgaaaaacatgaacttcgtcctggcgcagggcacctacagtttttaa

SEQ ID NO: 428000 - DNA, 1140 bp, Serratia marcescens
atggctgaacaaaagaaaaatgcccaggtacagagtggcgtcaacgacgacatcaccgaactaaagtcgctgactacactgcgcaaacgggtcgtcagcgacggtgaaatcgtctccaaatctgccaacggctttcgactggccaacggcaacaccggcgtaatgttgcgtaacgacggcaaggatttttatgccctgaccacaccaaccggacaggcacaggacgggcagtggaacacgctgcgccccttttcgttcaatctggcttccggtcgggtggcactgcgcaacggcgtagatatctccggcggggcgatggtttcgcataatgccgacatctccaccgcgaccaccggcccggctccgcttatcaacgggcaggtctataatgcggcaactatacataccaaatttaccagcggtaatatcaccacgaccatgctgatggggtcacgcgtggtcgccggcaaagaggattatggcctgctctcttaccgcgactggcagggaaactggaatgaactccgggtcaaacccaatgccgagctgtctgttggacaactgaccaagcgcaacgctcacggctggttcactgcaagcccgcctgagaatgtcgataaatcgcaggaatcccttaccaacgggctttatttacctaatcaaggtaataaacacgtaaaaatttatcatcacgaccatgtgaagtacaacgagctggtcattaacgtgagtgacggcaataaaaatagctggttcgttttcaaagaagacggctatgccgtcaccggcggcgggtggaacatcagctctgacgtccgtatgaaaacggaaataaccccaatcgacggcgccctggacaagctggccaacatcggcggctacacctacctcaaacagggcgtgccggaagccggcgtgattgcacaagaagtggaagaaattctcccccaatccgtgacccagaccgagctgaaactcaatgacggcagcgtgctgaaagacgcccgcagcatcaatatcaacggcgtagtcgcgttgctggttgaagcgcttagggaagaacgctcactgcgcgaagcagagcgagaggcttttgaaagacgactggttgccttggaaaaaggcattgagcgcgcctga

SEQ ID NO: 428001 - DNA, 765 bp, Serratia marcescens
atgacttcaatgggatacaagtggaatggacatgggtggcaacgagggtttgacttatcagatagcaatatggttgtagaagcatgggttggcgagggtttacctgatagacagaaggaattgagtaatattacccatatctgggatcaaaaaatttccgatattaataaaccgataagtgcttttgctcctgaagatgatgatatcacgccattcagtaatgaagcaaaagagagttaccgtgaggattcagatacagccattcagtttgcagctaataaagcaaatgaaattgacaaccaaattaaagaaattcaaaaggatattgacgcattaagcaagaaagctgaaagtagtcaactgactgagttcgagaaagcaaacctaaaagtaattattagcaagttaaaggtaagtaaagaacgccttaccattcttcgaaatgaagctaataaacgaaaagtacatcaggaatatttaaagctgaataatgaagactggttcttctctagagaaaagcccacctcctgggttagggagcagcaatcattaaacagaaaggaaatgggtaaaaaactggaagaagagaagagaatacagtcagaaattgacacagccaaacaaaatattgaacatttagaaaatgaacagcgtgagaaggaagaggaagtccgcaaagctgaggaagctcgcaaggcagaggaagcccgtcgagctgaagaagcccgcaatgatcctacccacgtaatgtggacacagcgctaa

SEQ ID NO: 428002 - DNA, 1044 bp, Serratia marcescens
atgattcacccatataatatagccgacgttcaattccaattaggtgatccaataggtcaagaggggcgaaattctgatgtattcaaagctattgacttgcatcttgacgctgaaatagtcatgaaacgcatggaaaaaaccaagttaaacctcgacaattacttttccgaagctcagatattatataagtcatcacatccttacatagcaccaattcattatgcgtgccaagatgaaaattacatctatttggcaatgccattttttaaaaatgggtctataaaaagcaagatgaatgaaaggaggcttacatgtaaggaaataatcaggtattcaatacaatttgtcacaggtttgcataacatacactcaaaaaatcttgttcatttagatatcaaacccgataacatattaatttcagatagggatgaggctgtccttgcagattttggattatctaaaaatttagatgaaaacggacaggccgaactttcacggcactacataacacatcttgcaccagaggtatttacacaagccccggggctaaagcccataatcgatcggcagtatgatatttatcaagcaggtgtgacaatttaccgaatggtagttgggaacgaaaaattttatgcgcaaagagatgagctttttgcacaaggggctttacagagatcaattgcatcaggagactttcctgatagaaatgcaatcccatttcatgtccctagaacactgaaaaacattatattaaaatgtcttaatccgttaccgtctgaaagatatcaaagtgctcatgaactttataatgccttgtcgaatatatcttcacctggttgtaattggcaatatgaagaagttgcagacggagcttcgtacactaacgtaaatgaagacggctccagcataattttgacattattagataatcgtagttgtatagcatatactgttaacgctgatggcatgcaaaggcgaatagtcccaatgtgcaaagatcgagtaaccgatcaggagctatacagatttatgatgagcaaatga

SEQ ID NO: 428003 - DNA, 183 bp, Serratia marcescens
atgaaagaaatcaccttggataaaagcaagtttatcaaaagggatttttttaaacttgataaaaaacaatcaattaatgagttcagcgtcactgatattcatgttgaaacgtggacaattcctgatgatttcaaatgtgatgatggttactctgaactaacaaaagagaaaacccggttttaa

SEQ ID NO: 428004 - DNA, 177 bp, Serratia marcescens
atggatgtaaaacaagatgttgctcatattttgcccgagaatggtcgggcgttggtttacgtgacccacggggcgataactgcggttttaccgctgaaggagagccagatcgtcgccgatactgagctcatgattgtgctgctccgacgtatgggctacgacgtccggagaaagtga

SEQ ID NO: 428005 - DNA, 1257 bp, Serratia marcescens
atgacaacacagcgtgcatcacaagtatttgttcctggcgggatgcctaaactcacttatgttgaaagaacagaaggtgaaattcgggaacgactcgagagtgtaaaagataacctatgtaaattagtaactctaacgggacaaactaaatcaggtaaaactgttttaacgcaaatggttttcccttttacagatcctagtgtgatctggattgatggaggtagtgttacaacagaaaatgacatatgggaccaagtattaactgcacttggtgggtttcataactatgaatctaattctagtgattctagctccttgtcagtcaatgccaaagcatctggcacagccaatgccctagtcgtaaaaggtactggggaggttggaattgttaatgctgatggtacatcatctggtgtaaaacagactcgtaacactacgacaaaaagtgcagcaattaaggctctcgcagagagtggttcaagtcttatcatcgatgacttccattatcttgaaagagaaatgcaaggtagtttcgttagagcagtaaaacctctagtttttcatggtgtccctgttgttttaatagccataccacatcgtagatatgatgcaatcaaagttgaaagagaaataacaggtaggctagaaaatatctctatgccctattggactacagaagaacttaagcaaattccattaacgggatttccgcttttaaatgtaacaattgactcgaagatagttgatgagctggcaaaagaagcgcttggcagccctcatttgatgcaagaattctgtaaaagcatttgtgttctccatgatataaaggaaactttaaacaaacctatccatatcgataaaattgacaatatgcttttcagtcgagtagcagaatcaactggcaaggttgtatttgataagttagcaaccggaccacgtcaacgctctgacagaatggcacgcagtttaaaaagtggcgagaaggtagatatatacaaagtagttttatacgcattgtcatatatgaagccaggcatggaaacaattcaatatgaagagctaagaagtgctattcgcgagctggttgctgacactcccccacaggcacatgaagttacacgagtgctcgaaaaaatgagtgaaatagcatccagtgaagaagctgcaacaccagtgatagattgggaaagagaagagcaaaagctacatattacggatccattctttgctttctatctaaaatggcgtaccgcttaa

SEQ ID NO: 428006 - DNA, 396 bp, Serratia marcescens
atgaccagaatcacaacacggcagtttgtcgaacttatccagggcaaaaatctctccactgcagagatcagcgccctaacgcatgaaaaacatccagggaatagcatgacacgatcgcagatctgcattcgactgaaatcgatgctccggtcgccaaacgtgaacatgatccgaaccggacagggtaacaaggcgcgctatcacctgataggcgtgaatgagcgtttctacgaactgggtgaagttaatttccggccagcagggaagaaaaccaggccggacaaaacgctgtggcatttcaacccagtagagctgaggttttgccatatgcacaaaatgtttgatcaggcgctggctggggtacgtgggagggctttttcaaatgcagggtggtaa

SEQ ID NO: 428007 - DNA, 1002 bp, Serratia marcescens
atggcggcaagttggatcaaggttgaagtgataaccccggataaaccggaggtgttccagctgtcggaaatcctgaatctggacccggacgccgtgttaggcaagttggtcagattatgggcgtgggccgatcaacagaccattgacggtaacgcaaagtgtaacgctgcgagcgttacaaaaaatgcagttgatcggatcactttcgtttccggttttgcagatgcgctgatcagcgttggctggctggcgctcgatggggagacgttggtttttccgaactttgaaaggcataacgggaattcatcgaaaaaacgagcacttacaaacaatcgcgttgcaaatgccaggaaagtgaaacgcgggagtaacgcaaaaggtaacgcaattagtaacgctgcgagcgttacagatgcgtatcaaaaagcgttaccagaaatagaggaagaagaagatctaaaagataaacccctctctctatcgggagcgggcgaaatttcaccagatggacagggatcaccgccgacaccctgggaagaccaagacgacgagaacccatgcggaaaatttccgatgagcaccagctgggcgccgacggttgatttccagcgattggcggcgttgtggggccgaattatcgacggcccggcgccaggatacaccccgcaggagctggcgagcttccaggcgtactggaaggccgagggcagggtgtttaaccagacgcagtgggagcagaaattcgccgacagcgtgctctacgagcgccaggcggcggccaaacgaaagcagcatgcaggaggttcaaatgcgaccagatacaccgcagcagccgctaccgctcagcagcaggtcagggccgcacgaaacgcagaacgggagcgacagggcttggctcctctgggagacgatggcggggatttacgcaaatcgctgggtgaccaaaaacggggtggcaccatccacgatctggggccagacgatttcgaaattctccgatga

SEQ ID NO: 428008 - DNA, 183 bp, Serratia marcescens
atgaccactacagcagagggcaacacgatgcaactcgaaaaaaacgcgaattggcagaccaaagcgcgcggcgacaacgacagcgaatatcagatttaccttgcatgcgctgacgacggtaaaggcaatgaatttatgaccggaaagccgctgaaaacctatgacgagtggctagccagctaa

SEQ ID NO: 428009 - DNA, 309 bp, Serratia marcescens
atgaaagtaactaacgcaactttagtctgtgagcaaattcacgcaggtgttcactctgtatctgaaaacgataatgtcattggatatatcgccaagaccaaaaacgatgaattacctgttggtgcagtattagcagacggaaccgatctcggtgaatttgattgtcctgactgcgcagtaaaagaaatttaccgcaaagcaaacaatattactgacgggcatttaattaccagcgacgaaaagaaagaaatgcttttggccttcatgatggcaatgcttggcggctcagcagaacgcacaacccactaa

SEQ ID NO: 428010 - DNA, 1017 bp, Serratia marcescens
atgaccgtccgtaaacttccttccggcaaatggctttgtgagtgttacccctatggtgctgctggcaagcgaattcgagtaacacgagccacgaaaggtgaggcgctctcgtatgagcgccgcattatgagtgctgctcatggctcaaacattgaggccaacactcaaaagttatctgatctcgtaacgcgctggtacgaaatgcatggtaagtccctcacatctggagaagagagaaaggtaaagcttgaggccatctgtgagcgtcttggtgatccactggtcgacacattcgataaaaacatgtttgccatataccgcgagcgtcgtttacgcggtgagtggaatccgaaagggaaaaaacaactgaaagaggcaactgttaatcgggaatattcatacctgcatgctgtattctctgaattgaaacgcctcggagaatggcagggggataacccccttgatggcattcgtcaatttcgcgaaggcgatcaggagctggcatttttatatgacgatgagattcaacgcctgcttgatgcttgtgacgagtctgcaaataaaggtctgggggccgtggttcgcatctgcctagcgactggcgcgcgctggagtgaggctcaagatttaaagcaatctcaggtaatgcccgggcgccttacctttacccagacaaaaagcaagaagaatagaaccattccaatatctgcaaaagtgcaggcattgctacccagaaagagaggcaatcttttcgctccgtgctatgaggctttcggttccgctctcaagcgtgcaggcattgaacttccagcagggcagcgcactcacgttttaagacacacgttcgcaagtcattttatgatgcgcgggggtaatattctggtgctgcagcagatactgggacatagctcgatcacaatgacgatgagatacgcgcattttgcgcctgagcacctggaggccgcgattactctcaatccattcgacagcctaggagctgagcgtatggaggcttaa

SEQ ID NO: 428011 - DNA, 1215 bp, Serratia marcescens
atgtttgatttgagaaaagtgaataatagagaagcttttatcctttactcgaatgttgatggtaaaaagtctacacacgcagttgttaatctagtcgacaaagacgactatatccaaggttattccgttacgagtagagggtataggacattcagaaaagaccgagtaatgaaaatgtttagcgatcaagttgaacttgatcactttactcttaatgaaatgtccgtggagacgacagatagtttacctttaaaagtccctcgcagtagattgtcagttaatgatgggttggagatttgtttcaccggatttaacaaagatgaaaaagatgagttgaccaatattgcgctatctagaaatctagccgttcgagctggagttacagcaaagctatcttttttatgctgtggccctaatgcaggatggcgaaaaattgagagtgcaaacgctaaaggagccttgattctgagcgccagtcaattccgtgatttcattgaaacgggtgagataccttacgagtctcctgaaattgatgagaaagcagcagaggcggacaaacagcaggtatcggatatagagaagcttcagggtgtgatgagtaatgccgcctcaacgtttagcactattcgctcctttcagcgtagcaatattctaatcgcacagtttgaagatggttatgcagttggctggaagttcgcggttaagtctgttttcagagaagctcttgacataaaactgaccacctctgtttttgatgggcataaatatgaaacttggactcaaggtaacaaatatgcctttcatcgtggcgatgctttttacagcgataaattaggctatagtgactggtctgaattcttgaacttaaaacatgcagtaatactaaaggttaagtttgagtgttatgccggttatgaaaccattgccactttggatgggaagttctctgggatgtttgttccagataatgtaattttgaagactgaatcattaactgatttgccaatcttgattgaaagtcaatcatatgacgcagggactttaactatagatgttcttcgcccaaatgctgacagaacgaaagttgaagtaaaagaaacgatcaaccttaatcaggatgaattcatctcattgctacagactggttgctattggaaaaaagaaaagggaagcgtgccagtcaaggtggacatattaaaaaatgaccgtccgtaa

SEQ ID NO: 428012 - DNA, 204 bp, Serratia marcescens
atgggaaacgtaactatcaacatatctgtaccaactggctacgtctcgctcgaacgctatgccgaaatggttcaaatcccgttggccacctgccgccgtatggttcgtgacggaaggataatcatccgcccgaaaaataaggcaaaggacaaggttgaggtcaatctcgtcgccatgttgaaagacgccatcgacaacagctga

SEQ ID NO: 428013 - DNA, 210 bp, Serratia marcescens
atggacgcgcaaaacaaagcattgatacagctatcgaaacacactttcgtttaccgcgggttcactattcagaagtgcccgcgtcatagcgaaacgaatcgcacggcctaccagctggtgagcaacggggattatttcggtcgtgatttcgcgctggcggaagccatgcgcaccgtggataagatgatcaacggcaagaggccagcatga

SEQ ID NO: 428014 - DNA, 249 bp, Serratia marcescens
atgagcggcaacccattctacgacgcagcaaacgcagtgatcgctcaatacgacaagcacatgcaacacctgaaaccaaagcgtgccgtcagagaatctgctttcgccgtaatcgcactgggccaagtcgcagacgccgcacgctatgccggccaccctgctgcgtgcatcgttatcgagaacgccgcgaagtattggcagtgctacggcaaaaaaccggcgccattttcagaggacacaccagcatga

SEQ ID NO: 428015 - DNA, 264 bp, Serratia marcescens
atgaaacagccttaccgcattctgatcgacacgctgctgctgcagtaccacaccaaagcgaccaatctgcaaagcgcttccgctgtggcgccagaggttcgccaggtttcgctgaacgattacgccttccgcctgtgcatcggactgactggcctgctgagtacggcagaggctgctggcgatggcccggccgctgccgttatcgatcgcttgatcatgcgctgcaacaacggcgatattccgcaacctgaaatttcagcttag

SEQ ID NO: 428016 - DNA, 198 bp, Serratia marcescens
atgcaagacgacgaattacacaaagcgtttatgaatgcccgccgctctgagcggctgcaactgcttgagctgctggagagcaaacttgaccgactggctgcggataatttcacccgcgaccaggtattaagcacgttgaaggactggatcagcatccgccggtctaccgacgcaccaaaagtggagaagccccaatga

SEQ ID NO: 428017 - DNA, 144 bp, Serratia marcescens
atgatggctttctgcttcactctcgccgccgtttgggcggttgtcgcgtttgggctggttggctgggttgcctaccgctattgcaaattctgccgcgcattcaatcggcagtatttgcagcctgaacaacgtaactacgactaa

SEQ ID NO: 428018 - DNA, 726 bp, Serratia marcescens
atgactaacaaacaagacgcaatgaacgctgtaaatcgtgctatcggttttgttcgtgctattgaaccatgcaatgactcaatacgtgaattaaactcggtggcaaatttcattaatgaggctgggcagcatgaagaatataaagatgcctggctgagccttaccaatgccatcaattcaattgacccgcaatggttagagaaatatcacggtgagagcgagtggcaaaaagcatgcgctttcattgctgaacagaataaggcattaaaaaaggtcactaccgaacaagacaaattgaaatgcacctatgttggcgtcgactttgctgcaaccgttagcgaaaacatcagtcagcaaatccaggaagatcttctatttaacgtaagttcccccttcccgaaattctcccgttatgaaaagggcgtgtatttccgcgatgtactgagaagcgttgctattactcagatcagggaagaactgagcgctgccgagagcaagcaccctacctggccgacggatgctgttcacgcaaccgccattctcaacgaagaggccggcgaactgacccaggcggcgatcgattatcactatcacaacggctcactggaaaaggtgcgtcgcgaggccgctcaagttggtgccatggcaatccgtgtactgatcaacctgccctacgcaaagcggccgggagagccagtaacgaaagctaacgggattgcatggtaa

SEQ ID NO: 428019 - DNA, 822 bp, Serratia marcescens
atgaacaaacccgcccttaaatggctgggcagcaaagcccgcatcatcgacacacttcgccagcacctgccggaaggtaagcgcctggttgagccgttcgtcggctccggcgcggtttttctcaacaccgactatgacagttatctgctttgcgatatcaacagcgatctgatcaacttccacaacgtcgccaaaaaccatcctgaggtgctgatccgcgaagcgcgccatctgttcaatgcacacccggatcaggagggctattacggcgtgcgcgctgacttcaatctgcgctgtgacagcaatttcatctaccgtgcggcgcaattcctttacctgaaccgccacaccttcaacggcgtttgccgctacaacctgagcggcgagtttaattcgccattcggtcatcgaaaggcgccctatttcccagaagacgagatcagagccttcgcagaaaaggcgcaatccaagaaagccattttcctgtgctgcaccttcccagaggcgatcaggatggcccaggccggcgacgtgatttattgcgatcctccgtacatcccagccagcgccaccgccagctttaccagctatcacactgacggctttaccagcgagcagcagcgcaagctggcgcgcatgcttcgcatcgccgccaagctaggccgccacgtcgtggcctcgaacagcgagacggacgtagccaaagcgctgtacgccgatttcgctatcacctcgatcactgcccgccgctctgtcagcgccaaagctgccagtcgcgcagacgttggcgagatcattgcaactatgagggcatccgcatga

SEQ ID NO: 428020 - DNA, 327 bp, Serratia marcescens
atgagcatcaaaaccacacaaccgaaaccaaccccagcaataccgaaaaccgtgccgaaatctgtctttgacgtgatttacgcagagtgcgaagggtttgttgaatgcggtgctgaccctcaaacaatatgggatgcctgccgcgctgcaatactcgctcaaactggaggtggcggttacaaattggtgccgatagagccaaccgaagacatgatcgccgccgccatgaactgcgacgatgtcacgttcaacgccgacgaaagtttctgcgtgaacttcggcaacatctacgccgccatgctagcggctgcgccggaggataagtag

SEQ ID NO: 428021 - DNA, 2547 bp, Serratia marcescens
gtgggcgtgagtaaaccagcccgcggaagataccagccatcaccgccgcgcccctatccgggacgcggcgcagttgcttttgactggccctatccctggaacgcaccgaagcaggggatcaacccgtacaccgaagacgctgaaaaagagctgaaactcaccgacgcgcaacggcgccggcagcgttggcttgaggtcactgcggatcaggaacgtgatcgcgattcgcagctttccattctggcggaacagcgccgcggtgaaggcaaggttcagttggtacttggcgcactgatggcgcagcccgattttattcgctcgccgctgctggcgcgcatcagtgccattcgcaagagcaagaaaggcaacggtgagaaactatcccgcaattacatattgcggacggtcaagacgatacttgcccgcgtcgaaaaaatgcaggacaaacagcttacctttggcctgcagctggttgcccgtcgtgaacgactcgacgatttgctgcgtctgcctgagctggacaagcgcgcagtaaaattgctcgcaaccttcaccgccgcccactttgaaaccctgctcgagcagcagagcacgcgccatctttccggcgatactacgcttgaccaaatcctgcgcgtttacgtgtcgttgggttctgaggccgaacgcttcaacgtgacgccgccctgctggcattcgctgaacccttatctgcgccggcgcggcgaaccgccttacgacaaaatccccggcgccatcgccagaatgtgctgcgcgaactggtggtttaccaacttgtgggcgctgcgctgccgctggcgcgaagagctgttgcgcgccgccggcctggtacgtaagcaagattccgcctacatcagtgccgacgcgctgacacacttccgcgagcaacgccgacgcacccgtgaatttctgaaagccttcgaactcaccaacgaagacggcttttccatcgatcttgaagatgcctattacgccgggcccagcaacccacgccaccgccgcatagagatgatgaccacggtcaaaggcatgcaagatattgccgagatgcgcggcgattgcgcggtctggtgcacgataaccaccccgtcacgttttcacgccaccatgatcgacgggcggttaaaccccaaatgggcaacgaaaaccgttcgtgacagcaacgattatttggttaaccgattctttgccagcgttcgcaaaaagctgaaccgccaggggctgcgctggtacggtattcgcgtcgccgagccgcatcacgacggcaccgtccactggcacatgatggttttttgccgtccagatgaccgtgacgacattgtcagcatcctgcaggagttcgccattcgcgacgatcgcgccgagcttggcgacgacataacgccgcgatttaagaccgaactgatcactgcggaaaagggatcgccaatcagctacatcgcgacctatatcggtaaaaatctggacgccgagccattgcgcaaagcgaacaaagataccggtgagccgccggtcgatcacgaaagcggcaaaagtatggccgacacggtcgagcatgcgctcggctgggccagcctgcaccgcgtgcaccaattccagtttttcggcatcccatcgcgccaggtttaccgcgagttacgccggctggcgacccagcttgatcggcagggtatcgacgccaagaaaacccagcgactgagcgataaagccatggatgacgtgatgaatgccgccgatgccggctgcatcgcaacgtacatattgaagcaaggcggcgtgttgacgccgcgcagcgatcacatcgtccacaccgcctacctccaggcggaaaagcccaacgattacggcgaactcggtattcagatcttcggcgtctggtcaccgatgctcggtgaggcatcgcgcatttgcacccaccccgacacctggacactgaagcgcaaacgtaaaccggcgagtggcgaagccgcgcgccagggggttgacgttgagggtggcggcgcagccgccgccccttggactcgtggcaataactgtccgcctgaacaagaaccaaccaaaaacggcggcagtttatccacgagtgaaatgcatcgagtacagccagcgccggctgtgccagctgacgcgccaatagattttgaaagcctcgaccgcaaagaacggcgggcactgctccggcgactgaaaaacgatccggaaggtggcccaccgccggagaaagcgccgttatcagttgaagaacagagcgctgaggatgatttacaccgccaaaaagagcagcggcagaagcggcaagagcagctggcaccacgcgcggaactgatagccgaatccgcatccagtattggcatcgagttaaccaaacgcgaggcgatcagcctggctgacggcgccacgctaaacgtggccggacagcgttatcgcgcaaatcacgatggcagtttgtcggcactccagccggatcatcttcacaaatcgctggaattgctggcacgcgtcgagcggctgcgccgcatttcatag

SEQ ID NO: 428022 - DNA, 705 bp, Serratia marcescens
atgggatatttggggagcaaggcggcgagcggagcataccaggcgatcatcagccaaatgccgccgcatgatacttacatcgaaacgcacctcggcagcggtgccgttatgtttcacaagccgctcgcggcgcgcacgataggaattgatgtggatagtaatgcgtttttgttgacgcgcggccgctggattgaaaaaggaatgacaccgccgaagctgaatctttatcacggcgacgccgttggttttctgcgacgggagttggcggacgggacattcagcaagcatgggcgggtgctgatttatgccgatccgccttacctgccggaaacccgcaccagccgcgcgcggtatcgtcacgagtataccgtcgacgatcaccgccgcctgatcgacgtgctgcgcaccgtgcccgccaatgtcatgatctccggctatccgtccgcgctctatgacgagctgctcggcgactggcgcagcattcagtttcaggtgatgacccgcggcggcccgcgtaccgagcagctatggatgaactttgccgaagggaacgcctacagccacgcatttgctggcgcgaactacatcgaccgccagcgcatcaagcgtaaggcggaacgctgggcgcgaaactacagcgccctgcctgctgccgagcgcgcagcgatcatggccgcattattagaaacgcaccaagaaccgtaa

SEQ ID NO: 428023 - DNA, 276 bp, Serratia marcescens
atgaaagaacaagtttcagcgttaaggaagagacaaaaaaacacgttagaacagatatttaaaacgcctgttctatccgggatcaaatggtcagatgtggaatcactaataaaggcgctgggtggcgaagtcaaagagggccgcggttcacgttgcaagttcctgcttaatggcagcatcgccaactttcaccgcccccacccatcgccggacacggacaaaggcgcggtggtcaacctccgcgaatggctggaaagcataggagttaagccatga

SEQ ID NO: 428024 - DNA, 366 bp, Serratia marcescens
atgacgaagacaacagcagcaaccccaaacaccatggagatcgccgggcaaccggcggtaatcagctttgtcccagagctgggcgcattccgcggtaaattcctcggcctgtccggttactgcgattttgtttccgacagcatccaggggctgaaaaaagagggtgagatctctttgcacgaatatctggacgattgcagcgccgccggcatcgacccatacgcgcgccaggagaaaataaaaacgttcaccttgcgctacccggaatcgttcggcgaacggctgaaccaggccgcggcagaacatgaggtttcggtcaatgctttcatcgttgaaaccctcaacgagcgcatgaaacacgcctga

SEQ ID NO: 428025 - DNA, 1056 bp, Serratia marcescens
gtgagcaaacgaaaatcaccgcggcagcgccagcagcccgccgcagacacgcagcttgatctggcgaccgagctgcaaaaactccctggcctgagtaccttctccttcgacggcccctggccggtcagctcgtcctatgacctgctcgactcgatgtactgcgccgacaacggccgttactacgacacgccgatcagctggtacgggctggctcgccagttcggccacgccagctggcaccagtcggcgctgatattcaagcgtaacgtgctggccggttgtttcatcccgcacaagctgctgtcgcgccaggcgttctcggccttcgccatggattgggtggtgttcgggaatgcctatctggagctgcgccgcaacgtgttaggcgggccgctggcactgcaccacacactggcgaagtacacccgccgcggctctgacctggacacctactggtttatccaggcggggtttgatgattatcagtttcctaccggcgccgtctgccatgtgatcaacccggacattcaccaggagatctacggcatgccggaatacttcgcgggcctgctgtccgcgaacctttcgcactcggccgacacgttccgcaagctgtactacgacaacggcagccatgccggctgcatcgtctacgtcaatagcgccatcgccgatcaggagagcctcgacaagctcaagaagacgctgaccgacacgcgccgcggcggagcattcaaaaacatcctgctgcacgcgccgaacggtggtaaggactcggtacagatcctgccgttcagccagatctcagccaaggatgaattcctgggcgtcaagtccgctacacgtgacgatatccttgccgcgcaccgcgtgccgccgcagctgatgggcgccatgccggaaggtaacggcaccttcggcgacgtggagaaggcggcgcgggtgttcgccatcaacgagctgacgcccatcatggaagccatgaagcacgtcaacgactggatgggggaggaagtgatccgctttaacccgtatgcactgctcgatgtagagtaa

SEQ ID NO: 428026 - DNA, 1638 bp, Serratia marcescens
atgggtatcaaccagaacacggtttacgcctggaagaagcgcgacgaatgggacgaaacgccaccgatccagcgcgttaccacctcgattgatgcgcgcctggtgcagctgaccggcaaggacaagaagagcggcggcgacttcaaggaaatcgacctgctgacgcgccagctgaagaagctggacaacggcacgccggccacccagccgaaaaagaaggtgcgcaagaagcaaaacttcttctctgagtcgcagatcgcgcaactgcggcagaacatcctggggtcgctgcactggcaccagcaaggctggtatgacaatcaccaccaccgcaaccggatgatcttgaagagtcgccaggtgggggcgacctggtactttgcacgtgaggcgctgatccgcgcgttatctgatgacgtgaagtacaagcaccagctcaaccagatctttctgtcggccagccgccggcaggcgtaccagttccgtagcttcattcgttccgccgcggcggaggtcgacgtcgagctgaaaggcggcgacatgatccagcttttcaacggcgccgagctgcacttcctcggcacgtctgcggcgacggcgcagtcctacaccggcaacctgttctttgacgagtttttctgggtgggccagttcgccaacctgaaaaaagtcgccggcgctatggcgacgctgaaagggctgacgcgtacctacttctccacgccatcggcggaaagccatgaagcctacccgttttggacaggggaggcgttcaacaaggggcgcgccagcagtagccgcgtggagttcgacacgtcctggaagacgctgaacagcgggctgatgtgcccggacaagatctggcgccagatcgtcacgttgcaggacgccatcgatcacggctgggatttgaccgatatcgatgaaatccgcgacgagaacagcccggaggaatacgacaacctctatggctgccagtttatccgcaacggtgaatcggcctttgactacaacatgctgctgacctgcggcgccgatggttatgacgactggctcgactggaaaccctatgccatgcggccgctggccgatcggcctgtctggattggctacgatcccaacggcgccagcgggaagggtgacagtggggcgatctccgtcaacgccgtgccgctggtcgccggtggcaagttccgcaccatcgagacgcagcgcatccgcggcatggagttcgaggcgcaggccaatctgatcattggcatgctggatcgctacaacgtgcagcatatcggcattgacgggcaggggattggtgaggcggtctggcagttggtgaagaagaagttcccggcggcggtctgctaccagttcaacccggccagcaagcgcatgttggtattgaagatgcagcaactggttcgcggtggtcgctgggagttcgaccgcggggagcgtgacctgatcacggcattcagcgcggtgcgcaaagtggtaacgcctggcggggtgatcacctatgacaccgaccgcagccgcggggtcagccatggcgaccttgcctgggcgacgatgctggccattatcaacgagccgctgggacaagatggcggcagcacaatgacggttatggagtattaa

SEQ ID NO: 428027 - DNA, 834 bp, Serratia marcescens
atggcaagcacaacgagcacccgtaagaaattccgcattatgacctccggcgtcactatcgacggccgtcaggtcacccgcgatcagatccatgcgatggcggcgtcgtataacccgtctctctatggcgcccgcgtcaatatcgagcactacctttctccgttcccagacagcgagttttgcgcaatgggggatgttgcggccctatccgccgaagacatttccgaagggccgttagcaggggaagcatctttgttcgctgagatcgaacccacggctcgcatgagggccatgaccgacgacggtaagaaaatcttttccagcgtcgagatccatcccaaattcccgacgaccaacggcccgtatctggtcggcctggcgatgaccgacaccccggccagcctgggcactgacaagctgaaattcaccgccgaaaaacgcggggagatcatgcgattcagtgctgcggatgctgaaacgacgatgttcactaccgctttcgaagctgagctgatgcaggcagaccagtcgcgctcaaccaccggcaacgagtggttctcccgcgtcatgggcatcctcggcaagggcaagaaaaccgacgatgaacgtttcagccaggtgcatcaggcggtagaggccgtggcgcagtcgcaggccgatttgaccgaccagttcagcgccaccgcgcaggaaagcgccagcaacaagcaggccattgcgaagttgaccgctgacttggctgcgatgcagcagaaggttgtaaccacggacggtaacttcaaccgtcgcccgccggccggcggtggtggtaacgcgcagttggctgactactaa

SEQ ID NO: 428028 - DNA, 1047 bp, Serratia marcescens
atggaaaacattacccgcgagctgttcgaccagtacatcagccggcaggcccagctaaaccgcgtatcgccggccgccgtcgcagcaaaattcgctgtcgatccgacggtgcagcagaagctggaagccgccgcgcaggaaagcgactctttcctgagcaagattaacgtcttcggcgtgacccaacagatcggccaaaaagtgctgatcggcagcaaaggcccgctggccggggtgaacaacagcaccaccacgcgccgcaatccagccgataacagcaaaatggagccgtacgactacatgtgccgcaaggtcaactacgactacggcatcagctacgagcaattggacgcctgggcgcatcagcctaacttccagccgctgatcagcagcgcaatggcgcgacagatgtcgcttgaccgcatcatgatcggtttcaacggcaccagctacgccgacccgtccaaccgcgccgccaacccgctgctgcaggactgcggcatcggcttccttgagaaaatccgtaaggaagcgccacaccgcgttatttcaaatatcacggtcacctcgcgggatgaggacaacaagatcatcaccaaaggcacctacggcaacgtatcggctgcggtgtatgacgccaaaaacagcctgatggacgaatggcacaagcgtaacccggataacgtggtgatcctggccggcgatctgctgacaaccagcaatttcccggcaatcaacgccatgagccagaccaacccgaacaccgaaatgttggccggtcagctcattgttgcgcaggagcgcgtcgggaacatgccgacctttatcgcgccgttcttcccggttaacggcatcctgatcacgccgtttaagaacctgtcgatctactaccagcgcggcggcctgcgccgaaccatcaaggaagagccggagtacaaccgcgtcgcgacctaccagtcatcgaacgatgacttcgtggtcgaggactacggcaacgtcgcctttatcgacggcatcaccttcgcgcagcctgagaacggcggttaa

SEQ ID NO: 428029 - DNA, 861 bp, Serratia marcescens
atgctgacaccggcacaacgacattttcagcgcgtgatggcggaacgccacggtaagaccgaggagttcacagaagccgcccgcactgcgcatgaacaaatccttcaccgcctgcgcatggatcagagtgcactcaaacgcgtgcagtccgaccaggcgaaagcggagatgaaaaagcagcttttaccgcagtacgacggctggatcgaaggcacgctcgacggcaacagcggccggcaggacgaggtcatcgtcaccctgatgatctgggcgattgacgccggcgattacccgctggcggtgcgtatcggccgctatgtcatcgagcacaacctcgcaatgcctgaccagttccgccgcacggcagcgacggccctcgtggaagagctttgcgatcccattctggtgcaggtcaaggccgacgagagcaccgatttgaccgcacacctgcaggtgctggacgagctcgcgcacatcgtcgatggcaaggacatgcctgacgtcgtgctcgccaagctgttcaaggtgcgcggctttgccttacgcggtggcgatgatgccgcccaggcgaaggcgctggaactgctgcgccaggcgctgaaactggacgccaacgccggcgtgaagaaagcgatcgagagcctggcacgccaggtcaagaaagcctgccagaacaccgacggcgcaggcgataacgatgccggtaccgcggcaacaaccgacgctgcagcagcatcaaaaacgactgtaccggccgcccagcgccggcagcgcagtagcaccccgcgtaagccgtcagtcgctaataaacccgccggcaaggccgccggtaagaaagccaaacaggacgccaccgaataa

SEQ ID NO: 428030 - DNA, 498 bp, Serratia marcescens
atgagccttgttgccgggcgtaccgtcacccccgccgctgacgatgtgccagataccgacgatggcggcgagaccatcaccgccggccccttctggcccgcgattgcgctcaaggacgtgcgccttgagatgcgcatcaccggcgcggtgaccaccacccgcttaaaacaggccgcgattgaggcgacaggccatgtgatcgaccaactgacgggctggcaagcgagccaactgaaggccggcttcacgtcgctggagaccgtgccagcccgccaaatcaacgacgtgagcgtgaagatccaccgctaccgccgcgcggtattcagcatcacacgcgcgctgctgatcgaaaactatcgcgacgtcgacaccaccggcgacgccggcgagaaacgcgccgccgggttgacgctgcaggcggcagatctgtggcgggatgcccgctgggctatcgccgatattcgcgatgaagtgcgcaattttgcggaggcattttag

SEQ ID NO: 428031 - DNA, 186 bp, Serratia marcescens
atgcagggcgacacgctggatctgctgtgccagcgacactacggcaccacgcaaggcgtgaccgaaatcgtgctggccgccaatccggggatcgccgaacagatatttttgaccgccggccaggtggtcgaactgccggagatcgaacgttcaacccaacaggagacggtgcagctatggacgtaa

SEQ ID NO: 428032 - DNA, 282 bp, Serratia marcescens
atggacgtaatcgaccgcctctggagctgggtgatctactcctattccaccgtgctgatgggcatcggcatgatgacgcagcgcgaatggctggcgaccggcgggctggtgatcggccttatcgccgcggcgctgggcgaaatccaccgccgccgggtggcgcgcagccaggcgaccaccaacgccctgctggcgcagctggttgacgcagtgcgcagcgatgccgagaaccggcaggatgtgaaggcgcttatcagcgagctgaaagggggccaccggtga

SEQ ID NO: 428033 - DNA, 555 bp, Serratia marcescens
gtgagaagaaaaagtgttatcgcctgcagcgtggccgccattgtggcgctggccggtgccctgtggcccgagaaggtgcgcacaagccaggcggcacagttaaaaatggcgaagtatgaggactgccgcaagacgccctactactgccccgccggggtgctgaccatcggcataggctcaacgacccacgtcgaagatcggcagtactcggaaacggagatcgccgaacgctgggtaaacgacctggtacgcgcggaaaagtgtatcaacagcaactttaacggcgccgccgccccgcaattcgtgtttgaagcactgaccgacgtcagtttcaacgtgggttgcaccgggatcagttggttcaccgatcgccagggcaaaaagcagcgcaccacgctgtggaaatacgcgcaggcgggcaactggccaggcgtatgccagcgcctgaccgactttgtgaactccggcggcaaacgcctgcaggggctggttaaccgccgcgaagaatttaaagcctggtgcctgtctgacccggcactcaggggcgccgaatga

SEQ ID NO: 428034 - DNA, 384 bp, Serratia marcescens
atgaaagcggtcacggtattgatcctgctgtttctggcggcgctggccgggatggggtggcagaagcatcagcgggaactggccgaacagcgccgcgatattgccgagcgcgccgtcgagcaaaccggggatgtgctggccgaagtgcgcgccctgcgtgccgacgtcggcgagattgagaccggaatgaagaagctgagcgagaagcgcggcaccaatggagagcaacgacgtgaaaccatcaagactgcgctggccggcgaaacgtgcgccgttactcctgtgcctgctgctgtcgctgacagcctgcaaaagcgcgccgcggaagtccgcgccgcaaatcattcaggagcctttaccggccagcctgacggcaaacactga

SEQ ID NO: 428035 - DNA, 462 bp, Serratia marcescens
gtgaaaaaagccgaactgctgcgcgacgcactgatcgcggccaacacctggtgcaaagccaaccctgagctgttcaccgtttttgttgaaaaggggcatatcgaaatccaggcgaccggcgagccttcgtttatgtacgtttatccgctccaggtattcgtgatgaactatccgggtgatctagatgacctgatgctgccactgttgggatggatatgggaataccagccagacctgctattgaacccggataaaaacaaaagcattgagttcgaagccgatattgcaaacgacgacactgccgatctgttgctgaaggtgccaatttgggagcgtgtcatggtaacacgccaaaatggaaagcttcttacacagcacctggcggaagacaagccccgcatcaacggcggcgactggcaaatcgtgttcgatcctgagaataacggggagctggtgccatga

SEQ ID NO: 428036 - DNA, 639 bp, Serratia marcescens
atgaccgatgccgcgctgtttcatgagctggatcaggtgttcgccgatattctcggcggcatgtcccccgccggccgtatccgcaccgcgcgtgaagtcggccgcatgctgcgccagagccagtcgcggcgcattgcacgccaggaaaacccggacggctcaaaattcgagaagcgccgccgcaaggtgctgcgctcgcaggccgggattggctttatctggaacggcgaaacccgccgcctgaaaaactggcgggcaaccaagggcagccgcggccgcatgctgaccggtttcgatgaaggccgcggtgccgtccgctccttctatcgcgaggatatcgagcgttacctcgatatcaacttcagccagacgcgcaaggacaccaccagggccgatccgatgtttcgcaggttgcgcaccgcgcgcttcctgaaggcgcgcgccgatgccggcggagccaccgtcggttttaccggcgttgcgggccgtattgcacgcacacaccagttcggactgcgtgacagggtaaacaagtccggcgcgatggcgtcctacccacgccgcgaggtgctggggatcaccaaagccgaccgcatggcgatcgcccgttcggtcattgactcgttgggggtgaaatag

SEQ ID NO: 428037 - DNA, 585 bp, Serratia marcescens
gtggacgcggccgaactcattcgcctgctggaaaacctgatccgcgttggcgttgtcacggcgatcgacgaagacaacaagcgcgtgcgcgtcgccaccggcggattagataccacctggctgcgctggaatgcgcagcgcgccggcgcattcagcatctggatgccgccgtcgctcggcgagcaggtctggctggtgtgcatcggcggcaacccggagacggccattattggcggcagcctgtacagcaacgatcaccccgcccccggcggctcgcgtaacgagatggtgatcaccgccccggacggcgccaaattccgttatgacgctgacgccggcgcgctggaagtcagcggcatcaaaacagccaaattaacggccgaggtcaaagtgatcctggattcgcccgtcgtggaatgcaccgagctgctcaaaaccaagcgattcgacgtcaccgaaggtggcgagatgcacggtgacttcaatcacaccggaggcgccttcgtgtcgaacggcgtgcaggttgatgaccacgaccacggcggcgtgcagcgcggtggcgactggacggagggcacccgatga

SEQ ID NO: 428038 - DNA, 369 bp, Serratia marcescens
atgagcgagaagtaccgcggcatgaataacagcggcaccggtacgctgaccgatgcggatcacgtctggcagtcagccaatgacattctgctgacgcccatcggttcgcgcgtcatgcgccgtaactacggttcgctggtgccagacctgctcgacagcccgcagaacgacgtcacccgcctgcagctcatgagcgcgaccgtgatcgcgctggcggcatgggagccgcgccttgcgctggacactatcaacatcagctattcgcccaccggcgccgtcacggccgagatggccggcatgctgacggaaagcatggagaaaagcgccgggacgattgagttaaggagtcacaacgatgccaacgattga

SEQ ID NO: 428039 - DNA, 900 bp, Serratia marcescens
atgccaacgattgacctgtcgcagttgccatcaccgcagatcatcgagccactcgacttcgagacgatcctcgttgacgtcaaggcagtgatgatcgccgcctttcctgctgaccagcaggcatcggtcgccgccgccctgtcgctggagtccgagccgctcaacgtgatcgcccaggcgatggcctaccgcgaattgctgttgcgccggcgaatcaacgagggggctgccgcctgcatgctgagccacgccgaaggcaccgacctggacaacctggccgccaacctcgacaccgagcgcctgacgatcaccccggaaacggacacgtcagacgcggtgatggaaagtgacgaagccctgcgcctgcgcgcgcaatccgcattcgagggcatgagcgtggccggcccttcggcggcgtatgaatattttgcccgcagtgccagcggcaaggttgccgatgccagggcaaccagcccggcgccggcggaggtggtgatcgccatcctgtcgaccgacggcgacggcaccgcctcgcccgagctgctggccgccgtaacggccgctgtcaacgatgaggaagtccggccgctgggcgaccgcgtgacggttcgcagcgcggatatcgtcgactattcgattgatgcggagcttttcctgtatccggggccggagtcggaacccatcatcaacgccgccatggcgtcgctgcgtggctttttggccgacaacgacaagaagatcgggcgtgacgttgccaggtcggcgatctccgcctcgctgcatgtgcagggggtacagcgtgtggtactgcgttcgccgtcgactgacctgcagatctccgacacgcaggctgcgcgcaacattggctatgcagtagagaacggcgggacggatgaataa

SEQ ID NO: 428040 - DNA, 615 bp, Serratia marcescens
atgaataacaccctgctccccccgtccgccggcgcttggatgcgccacaccgaaaccgtcactgcgcggctgtcggcaatcactgtcgcgctgcgcacgctgtggacgccaaccgcctgcccggttgagttgttgccgtatctcgcctgggcgctgtcggttgaccgctgggataagaactggacggcagagaagaagatagcggcgatacaacaatcctactggcagcaccgccgcaaaggcacccgcgccgcggtgcggcgggtgattgagagcatgggattttctgccgcctttgccgaatggttcgataccggcgataggccgggcacctttcggcttgaggtcgacgtcaacgaggtcggcatcaccgaaaagacgcttgccgaattaaatcgcctggttggggatgccaaaccggtcagtcgccatttgagccaactcaatattgcggcgacgtctcgaggaacgatccacatcggtgcagcaagttatcagggggaaatattgacggtatatccggcagggaaaacgcccgatatccccctttactacgacggcaaaattaaacacagcggccattatttctacaccgggaacgcaagcgatgagtaa

SEQ ID NO: 428041 - DNA, 2337 bp, Serratia marcescens
atgagtaaattaaacgaacagtcaaaatgggaagaatccattaaccaggtcgaagacagcgatcgggtaaaaggtggcgaaagcggcgcggtaaatattcaggccgggcagttggccgcccgtacacagtatttgcgtaacctgttcgattcactgatggtaacgatcagcctcggcgagggttggtataagaccctgtctgatgcccagcgagatattgataatggcaagctgcccgccgatgccctgtttaacgtccgatcgacagacgacaagcattgggtggacgagtatcaaaacgtcaacggcctggccacgccaaccgggcgttttctggcctccggcaactacctcgcggagatcctgacgcaactggtatcaacaatgctgaccgttggcacactggaaaatcggatcaaatccattaaaagttatcactcagataaataccccatcatttttaatgccgagggcgggcctgatgaaacctacggcgcatttgataatcaatccgggctatggctgggcgggttagaagcggccgttcaggattatttattgggcattttgccaaagaataaaaccaaccgttatccagggctggcttacttctttgcggctgaaaacggtgatgattcctacggcctaattgaaaaaaatggtgcgtggcgcattccgtggatggacgatgtattacaggaacgcctggacggcctgctgtcgacaaaaatcacccgccgcattcagggctggcactcattgctggtttcaaaagacgccgaccccaggatcatctatggcctgcgcgcggctgatgccgggttaatcctgaccggcctcggcaccactgccgtgcaggattatatttccgccaatatccggccggcagagggaaaattagccctgcatatcggcgaacagcttttatggaacgatcaccctgtcgtatccgcccacaatctcggccccgatgcggtgctgttcagctatctgccggcgggagagtccgcgccacgctatgcggtgatgttcatcaagtcgaagcgcgaaatggtaccgggcggcgagatgcatatcacgactgaagacggccagtcgctggcagcgtccttcgacagccacaacggatcgaacatcaacatcatgaattacgacccgcgctatcgcggctacgcgctggcgctggcgaacggccgccccgagggcggcaatctcaacgccgtcaccgacgacgatcgcgacacggccaacgatttgcaataccccgccgccggctggcggcagggccattcattgccgcgaacctataccctgctcgataagctggcggagaacggccagacatggccggtatttttccacgcgccggccgccgccggcggtcagtcattcgcgaacatctcacccggaaccgtgccgtatcagaacggcatcgacatggtgacgcgcgcgaaacaaatcgctgacgcggtcgggaaaaaatgccgggttgtcgtcttgctgtttgagcatggcgaaaccgacaacgacaacggcgacaacctgctgccgggtgattatctggcgaaagaagaaatctatttcccgcgccggatagcggattacaaagcgatcaccgggcaaaccgacgagattgtgatcgtgatcggccaggtcgggagccggcttaacagtaaagcgcaggcagtagacgaggaaggcaacccgctcggcgaagaggtcatcacgcagccttattccatttctgccgtcgatcagcgcgaatacgtgcgccggcatgcaaacgccatctgctacgggccgaaatatccgctcaactggctgtatagcgacggttcactcagccatatcaacgcggcaggcaaggtactacagggcgaatatcaggcgcaggccgttcactggcatctgtacgatgacgagaaaaaaggcacatggacggacacgacgatcgagtcggtcacagtgacaggcagtgtcatcgaagcgcgctgcaaaatgccgtatccaccgcttgttatcgataacgcattcattggcgacgtaaaaaatcaggggctttcgctggagctgaaatccgccgccatcctcagcgttgacgtggtggacgggacaaccttgcgcatcacctgcgataaagcaccggccgccaatgattatctgctcgtcggtttcaacaacaagtcgcagcacgccaacggccaaacgtacccgctgacgtgcctgcgcgattcatcgcccatggtcagtaagaaaatcacgcgcaacggcgcgcccttcccgctttacaactggatgacgctggatcgcatcccattatcaggagaaaaagcatga

SEQ ID NO: 428042 - DNA, 912 bp, Serratia marcescens
atgactctcggctttaacagcggcgtcccttacccgtccggcggccgcccggcgttgaaattgtcggcctatgtgttggatgaccaggccatttttgctgcgcaccgtgcccgcgtgctggccgatggcggagtgatccccgatgaggccggctgtatggcgcgtattacctggctactcgataacggtatctacggcaaggtcgaaagcgccattaacccggcgttcggcgtcaagatgaacgcgaacaaggaggtcagcaagctgtattccctgttcgcgaacgatgactacatcagcgtgatgcagggtgacggcgcgcaagtgttgtatgacgacagcggcgacgcgccgggcgtgatcatcaagatttccagcaacggcggcgcgtatttgcgatctgagaaaaaccatcgcgtgcagcgaagcgggcaatatgccatcagcggccgcatggcggataacgatcgcgcggactcgctgggcattctggtgggcatcagcattgccgggctaccgatggcctatttacgcacgcagatcaccaatcagcaaaaggacattgaggcctggcgctacggcacgcgcgacagcacctggaatggctcgggcgtgaacggcatcgcgatgggcgcggtcagaaccccgtatgcggattacgtgccctccgccgcactgtttgacgtcgacggtggcgaaattcgcggctacgaagcgggcgagctgaaggcaagggacacgtcgacgacggggcgactggctgatttgacgtcattcccgcagccgatttatgtcggcagcacgtttaccggcggtaaggtaaatccgtgctacggcacattgcgcgaagccattttcttgcatacggcagacgacagcgacgccgtcgccctgtctaagctgggcatgtaa

SEQ ID NO: 428043 - DNA, 1086 bp, Serratia marcescens
atgccggaattcttcagcatcctgacccatgccggcgccgccaagctggcgctggccgcgcagaccggtcagcctatggcgatcagcacaatggccgtgggcgatggcgccggcgccacaccaacgccatcaccagaacagaccgggcttatcggcgagcaataccgcgccgcgctcaacgcgctgactatcgtgagcgaatcagccaacgtgatcagcgcggaaatgataattccgccagagttcggcggcttctggatcagggaggtcgggctttatgcggatgatggtgtgctggttgccgtcggcagcctgccggacacctacaaatcgcatcttgccgaaggttccgggcgcaattcagtgatccgtgttgagctggcagtcagcagcacaaaggatgtgcagctactgatcgaccccacggtcatcatcgcaaccgtggattacgtcgacacgaaatttcgcgaagcgaagaaccgggcggacgacgcctacgcgctggctgaggcaaaggcggcgtttgatgatatttacccgccggggatcagtatcttttttgcgacgaacctgaaccctaacgaaaagtggcccggcaccacctggcactataccggcgagaataaaacgatccgcatcggcaaagccgatggctcggatgtgatgaccgccggcggttcggacacggtaacactgagcgttgaaaatatgccgaagcacagccacggcgtcagcggccaggtgggcgagtttgaccacggaatcaaaagtacgtcggagtttgattacggtacaaaaaggacgagtaagagtggcaaacacgcgcatcatggcgtccctaaacgtaatagcgattatgaattaggcggtaacaaccgggtattcttcgacccttaccaggaaggtgatactgatgaagccggtgagcacgaccacgagatggaattgggtccgcacgctcactctgtcgaaataggcccgcacgctcacggcatcgatctgacgtctgacgaggtcggcggcggccaggcattcagcattgtagaaagccacatcaagctgatgtgctggtatcgcgccgcataa

SEQ ID NO: 428044 - DNA, 492 bp, Serratia marcescens
atgatgatggtattcgggatgttcgtttttacgctgcgcacagcgccttaccagcagctgcgccattcgcaggactggcgccacgtcaagaacgatcgcatcaaccagtctgccggctggcagtatatcggggcaggggatgacagtatcacgcttgacggcgtgctctaccctgagatcaccggcggcaatctgtcgctgtcgagcctggaaacgatcggctttaccggccggccctggccgctgattgagggggacgggcgaatttacggcatgtacgtgatgacgcggctggagcgggggaagtcggagtttgaccgctacggcaacccgaaaaaaatcgagttctccatcagccttagccgtgtcgacagcgattttcgcgagaagctacaaacgacgtcggcgagtgatgtgctcggtgagctgcgcaccagcgccagccgggcgatcaactcggtgacacaatcggtaaacggtctgttcgggtga

SEQ ID NO: 428045 - DNA, 2955 bp, Serratia marcescens
atggatcttagtattcgcgtcgcgtttaacgcgatcgacaagctcacccgcccggttaaagccgctagcaaagctgttagcggcctttctgactccctcaagaaaacacaaaacgccgttaaagacctggacaagcaagccgccagctttgaccgcctgcgatcgcaggccaacgacacggcacagaagatcaaccgtgcgaagcgcgagtttaacgggctgaatcagaccgttcgagagggcgggcaactgaccgacgcccaggccgcgcatctggaaaacctgcgcggcaagctcacccgactgacgcaaacctacaaccagcagacggccaagctacgtgaagctgcccaggcggtacggcagcatggcgtcaacctatcagccggcagcggtgcggtacaaagcgccatccggcgaacagagcaatacaaccagcagcttgagcgcgagcggcgacagctggccgccgttacccaggcgcaagccggctacacccgcgccaaagatgccgccggcaaactgcgcggcgccggcatggggatggttgccggggcatcggttgccgggtataccggcggccgcttcctggcgccggccgtgggattcgatgccgaaatgtcgcgcgtgcaggcgctgacgcgactggataaaagctcgtcacaactggccgacctgcgcgcccaggcgaaaaagctcggcgccgaaacggcctttaccacccgcgacgccgccagcgggcaggcgttcctggcgatggccggctttacgccgcaggcgattcaggccgcgttacctggcgtactcaacatggcgctggccggcgggatggatctcggtgagtccgcggatatcagttcgaacatcctttctcagttccgcctcgatccgaaggagatggatcgcgtcagtgacgtgctgacgggggcattcacccgcaccaacaccgatctgcagaacatcggcgaggcgatgaagtacgccggtacggggttatctaaccttggcgtcagcgttgagcaaacgacggcaatgatcggcgtgatggcgaacgtgggcctgcgcggcagtattgccggtactgggttgcaaaccacgttctcacgcctggccgcaccaacgaaaaaggccaacgacgcgcttaaggagttgggcgtcaccgtggccgactccactggcaagatgcgtccggccgaggacgttctcactgacctttacaaatcgatcaagaaatacggcgccaccgatcaactctcgttcttcaaggatatcgcgggcgaggaagccgcgaagtcattccaggcgctggttttatctgccggcagcggtgagttgcagaagttgctggccgacctgaagaaatcgcagggtgaggcgctgaaggccgccaaggtgatggcggataacctcggcggcgacctgaaggagctggactccgcctgggaaggttttcgtattcaggtagaagagactgccgacggcccgctgcgcaaactgacgcaggggctgagtgaagcgatcaacgccgcgagccagtgggtgaaagaaaacccgcggctggcgcagtccattctgttgaccgccggcgccgtcaccgccctggtggctgtgctggggatcgccagcctggcgaccggcttgctgattgggccgctggctaagctgcgtttgggcttcacaatgctgacgggcgggcgcggtctgatgggaaccgttagcgcgctacggggcttcgttggcaccggcggcagcgccatggcgagggttagcggctggtcgcgcgtgctggcttcgctctctggtggcttccgtggtctgcttggctcgctggcgccgctgcgcagcatgctgatgggcgtatttatggcgccgtcagcagcgctgggttcattggtgcgtggtgtgatgggactggcgctgcggctgacgggcctgtctacgctatggggcattctcaccggcgcgctttcggcgctgggtgctgcgctgtcgttcctgctgagcccgatcgggttgattggcgccgcctttgtcgcggccggcgtgctgatttggaaatattgggagccgatcaaggcgttctttgtcggctttggcgccggcgtcatggcggcgctggcgccgctgcgtgaagcgtttgcccgtattgcgccgatctttggcgtgattggcgatgccctcggccgcgtgtgggactggtttaccaagctgctgacgccgatgcagaccagcaaagacacgctggacaaatgcgccagcgccggcgagacgttcgggcgggtgtttggtgcagctctgcagctgttgtttgcgccaattacatttctgatggattcggtcggctggctgcttgaaaagctggggttaatccctgatggcatcgagcaagcccgcattaaagctgaaaaaatgaagttggaacttacccctgaaggtcagcagcggttgagtggcaaagtggggttactggctggtgatctcgcgagtattaccaagcctgcttcagtcagcactgatgcacctaaacctcctgccctgacaggtgacacaggcacgctacgccgcctgaacgagatcgccggcaataccaaggcgaccgccgacaataccaacgccactaaacgcatcgggccgggggatatcgtcttcaaaaatctgccgcgcgcgctggcactgcgtggggcgtaccaggaagcgcgggtgatgccgcaaccggtgccgcgtatggcggccgctgccggcggcggggtgctctcggtgccgtcggcgtcacagccggccgcgatggcccccgtgtccgcgcctggtggcggtggccccatcttccagttggtctttaacgacgtcggccagcgttcggatcaggagctggaacggatggtgcgcagcgcggtgcgcgatgcgatggccagcacagtcaggggcaaccgcgggtcattccgcgatcgagattaa

SEQ ID NO: 428046 - DNA, 300 bp, Serratia marcescens
atgtccgtaacgctcaccacgccgattaaacgcaacgacaaagagatcaccatcgtctctatcaccgacaccatcaaacaggccggctcattgcgtggcctgcgcctggtcgacgtgctcaacttcgactatgacgccgtttcaacgctgctaacgcgcgttaccgcgccaccgctgaccgccgccgagatcgccacgctggataccggtgactttgtggcgttcattgaagagatgacgccttttttgaccaaagcggcgccgtccgtaccgaacgtggcggagacggggaacaagtaa

SEQ ID NO: 428047 - DNA, 516 bp, Serratia marcescens
gtggctatccctaaaaagcttcggctgttcacgctgtatgtggacggcaccaaccacatcggcaagatccccagcatcaccttgccaaaagtcacccgcaagacggaggactatcagggcggcggcatgcaaggcgccgtagcggtagacctcggccttgacggcggcgcgcttgatgcgtcgatggtggtcggcggcgtcgttgaagagcttatcctcaagtacggcggcgatatcgacgaaatgcgcctgcgtttcgtcggtgaaatctacagcggcggcaccagttcgctgatggaagtggaaatgcgcggccgcatcaccgaaatcgatccgggtgaggccaagcagggcgatgacaccaaccacacctacgccatcaaaaacacctactacaagctgtcggtggatgataaggcgctgctggaaatcgacctgctgaacttcatctacaagcgcgacgggaaaaacctgtaccccgatcgcattgtgtcagccctcggcctcggcggctga

SEQ ID NO: 428048 - DNA, 1182 bp, Serratia marcescens
atgaccgacaatttcttccatggtgcgcgcgtcaaggaaaacaccgacctgcagaccgcgatcaatgacgttgactcaacggtcattggtctggtcgcggtggcggatgatgctgacgcaaccaccttcccgttagatacgccggtgctgatcacgcgggtaatcagcgtactcggcaaggccggtaaaaccggttcgctctataaatccctgaaggccatttccgaccaggtcagcacccgcgtgatcgtggtacgtgtagcggcagccggcacggaagacggcgcgaaaacgcagtcgcagctgattatcggcggctcccaggcggacggcagctataccggcatgttcgcgcttttgaccgccgagcaaaaagtcggctaccggccgcgcattcttggtgtgccgatgtatgacacgcaggaagtgaccgcacagttgcgggtgattgccaagcagctgcgggcgttttcctacagctattgcgacggctgcgagaccatcgccgaagcaaaaacctatcgccagcagtttgccgagcgtgagggcatgctgatttggccgaatttcatcgcctataacccggtgagtggtgagaacgaagaattcccggcggtggcgtatgcgctggggatgcgtgcgaagatcgacaacgagcagggctggcataagtcgctgtcaaacgtggcggttagcaacgtgctcggtatcaccaaagatgtgttttgggcgctgcaggcggaagactccgacgccaacgagctgaacgccaacgaagtcaccacgctgattaagcgtgacggcttccgattctggggcaaccgcacaacggataaggacgagtacatcttcgaggtgtacacccgcactgcgcagatcctggcggataccatcgcggaggcgcaatttaccacggtagacagtccgcttacgccggcaaacgtcaaggatgtggtcagcggcatcaatgccaagctgcaggggctggtcactgcgggtcgactgattggcgccgcgtgctggttcgatatcgtcgataacccgacaaccagcattcgccagggtaaggcggtagtgcgttacaactacagcccggtgccgccactcgaagatctgaccatgatccagaccttcaccgatcaatactacgaagcgtccttcgcgtcgctgggaggggcataa

SEQ ID NO: 428049 - DNA, 1155 bp, Serratia marcescens
atggcactgactactgacgcgatcgacaaggccaaatcactgctgggtggcggcgccagcacgttcaacgattaccaggcggagctgtcgcgcgtgccggcgttcagcgtcctgcttggcggcaaagaattgaccgcgctggatgagcgcgtcttgtcgcttgagatgaccgacaaccgcggctttgaggccgacgagctgacgatcaccgtggacgatactgacggccagctgcagctgccgccgcgcggcgcagaggtgtccgcgtcgatgggctggcacggtgaagcgctggtttataaaggcatttttatcgtcgatgaagtggcacacaccgggccacctgatacgctgacgatcaccgcgcgcagcgccgattttcgcgatgagttcaacgtcaagcgcgaagtgtcctggcatgacgtcaccgtagagcgggtggtgtcagcgatcgcccgtcgctacaacctgaaggccatcatctcgcagcagcttatggaggtggagatcgatcacgctgaccagacacaagaaagcgacatgtcattcctgacgcgcatggccgaaatgctgggcgccattgccacggtgaaaaatggcagtctgctgtttatcctgcccggtggcggcgtcagcgccaacggcaaggcgctcccatccttcgccatcacccgcagcagcggcgatcgtcacgccttccgcattgccgatcgtgatgcctataccggcgtgcgcgcgtactggctcgatctggaattcgggaaaaagaaaaaggtcacggtgaaggcccgcaagccggcgaaaaagaaagtgcagcgcagcagcagccgcgagggtgattacatcgagggggccgacggtaacgtctatgtcctgcgcaaaacctacaataacgaaacggccgccaaacgggccgcggccgcaaaatggcagcagctcaaacgcggcgccgctgaatttacccttaccctggcctacggccgcgccgatttgtacccggagcagcacggcacggtatcgggatttaaaacggatattgataatcaggattggatcatcgccagggcgagccattcgatcggcgggaacgggtttaccacgcggctggaactggaggctaaaatacctgaatggattgcggaaagtgagaagtga

SEQ ID NO: 428050 - DNA, 249 bp, Serratia marcescens
atgtttgtttgcccgatctgcggtgctatggcccgcacccgcaccagtcgacgcctcagtgaaatgacgatacgccaatatcatcagtgtcagaatttcgaatgcagtatcacgttcacgacgctaaacagcgttgaaaagctggtaacgaagcgcggcccgcgcgaagaattaccgcccgactttatcccgcaagacgccttccccacgtcccactatgggcgtgatcagctcaatctgtcgctatag

SEQ ID NO: 428051 - DNA, 1164 bp, Serratia marcescens
atgcaacgtaagctgactctgacattggcgacgtcgatgatgatgtttccccaggtggtggagaccatctacagcccggcattgacgcacattgcgcatggtttccgggtaagtgcggaaatggcggcgcaaacgctctcttgctactttttcgcctttgcgctgggcgtggtggtttgggggcggatgtgcgacgttatcggacgccgtcccaccattttggccgggctgacgctctatctgctggcttctatcgtcgcactgttcagcggcagcttcagcgtgctgctggcggcgcgggtgctggctgcctttggcgcggcggtcggttcggtcgggacgcaaacggcgattcgcgatcgcttcgacggttatgagttggcgcgggtgttctcggtgatggggatcgccatggcgatcagcccggcggttggcgtattgagcggcgcagtgttgactcattactggggctatcagggggtgtttggcggtttggcgctgttggcggcgctgttgctgggctatgccggttggcaactgccggagacgcgtccgcaacaggtggtgaagcattcatttttcggcacgctggggcggatgatcaaggacggggatatttggctcagtgcgctgctggtggcgttgttcaatatttgcatgttcagctattaccagctggcgccattccacttcgcggcgttggaactgccggcgcagtggttcggttataccggtttggtgttggcggccggggtcggtatcggcgcggcgatcaacaagtttttgatcggcaaacactggctgttccccgcgttgctgatgctggcctgcgttttgtcactggccggcggcctgctggtactgctgctggaagggagcttgtggttcgttctgccgatgatgctggtggtgatggcgtacggcatcgccattcccaatattctggcgcgcgcgctgcggcattataaagactgcatgggcaccgccggcgcgatccttggcctgatgtattacctgatgctcggcggtggcttggtactggccgggctgtcgcagcacctgggcgccgtgctgtcgctctgcagcctgtgcgtgctgctgttggcgtggcgggtggtgcacaacgagcgccgtttggcgttgcctgagcgtgaaaacgcctga

SEQ ID NO: 428052 - DNA, 273 bp, Serratia marcescens
gtgcagctgattaacgccagcggcgacatgcgcatgcctgcgggcgggcaggtgaaagccgcctgccataccctgaacggcccagacaacgcggttatctggctcaccgaaggctacgccaccggcctcaccgtgcactgccttaccggtgagacggtctgcgtggcactgagcgccgactacctggaggccgtggcgcagcaactgcgcagccactatccggacgcacggctgctgctggcggctgataatgatcggaacggtaccgggtag

SEQ ID NO: 428053 - DNA, 870 bp, Serratia marcescens
atgttttcaattgcagcagatgtcagaaatacactgggagagtgccccctgtggtgcgaaagaacacgcaggctgttctggactgacattgaaggcagtgaactgctcgccttagaaaaagataaaaacgtcgtgatgcgatggtctctgcctgagcggctcggatcgtttgcccttactgaaaaggctgacgtactgctgatggggttagcatcacgtctcggcctctataatctgaatacccaggtttttagcacggtgagtgcatcaccgggggttagcggaacacgaataggcgatgggcgttgcgatcgctcgggcaattttttgtttggaaccatggatgataaccatcctcccaaagtcatcggtcaatttcaccgacttaacgcagctactctgacagttgagacgctttccctaaccgaagttgccatcccgaacagcatctgtttcagcccggacggcggcacgatgtattattgcgactcaatgcagggacgcatattctgctgtgattaccccactttggataaccaacgcgtgtttactgagacagaaggaaaaggggcacctgatggctcctgcgtggacgcaatgggctatttatggaatgcagagtggggaggaaatcgtgttgtacggtattgcccagacggtacgctcgaccgcattctgccatccccgggtattcagaccacctgtccgacgctggggggcgaggcatttacaacgctatattgcaccagtgccagcatagctctatctacaccatcgaagtatgacggtgcgttattgaaagccgaaccagccgtatttgccggtttgcctgaaagccgctttgcggcagtaacatatcaacaacactaa

SEQ ID NO: 428054 - DNA, 474 bp, Serratia marcescens
atgagcatgatgtattacgtaatcgcttttgccgccggtctcgggatcaccctgcagaccaccctgaacagccagctggcgcgaggactcggaggcgattcggtgacagccgcgctgttttccttcgcggccggggcattcagcctcgggatttactcgctgctgcgcgggggattattcacctcacttgcagccattccgtctcaaccgctatggagtctggcgggagggctgatcggtgcctgcgccttgttcagctatgtcgtgctcacacctaaaatcggcttttcagccctgcttgggttggcgattgtcgggcagttgctctcgtcgcaggtaattgatcattttggtctattgggtgctctacgccggccggtgtcgttgcttaagctgggggggatgctggtcatgctggtcgggcttgccgtcatgttgttcggcgatcgactgtctgcgcgtttactgcactga

SEQ ID NO: 428055 - DNA, 1401 bp, Serratia marcescens
atgaccgattacatcagaaatatcgttaataatcatacaaaaaccccaccaacaacgctgatccgtggcgcaacgatactgagcatggatgagaatgtaggtaatattgagcgcggtgatgttcttatcactggctcaaccatcaccgcagtgggtcaaaacctggacgcacagggtgctcacatcatagatgccactaacatgattgccatgccggggatggtggattctcatcgccactcttgggaaggacagttgcgccgcataaaccctaatgccacctgtctggacgactacagcaacgccacgcacttctctttcgccaaatactatcgccccggcgatatttatatcggcaacctgctgactgccctgggcgctattgacgcaggcataactaccatcattgataactcccataacagtcgcaccgccgcgcattcagacgctgccgtagaggccctgtttgactcgggtatccgcgccatccatgcctctggtgcgccggtatcgggagagtgggacagagcgcactggccgggcaactggcagcgcctgcaagaaaagtatttcagaaacaaccctgaaagccttgtttctctcggtgtcatggctcagttggaaccggagttgtgggccgaggctcgcaggctggggctgccaatcgtcactgaattctttggggctggaatggcttcggagcttgaatcgctgcatcggcgggggcttcttggcccggacaatattttcaatcactgcacggcgctgcctgacgagggatggcaaatcctgcgggaggccggcgtgcgagtcaacgtctgcccgcgctccgatgcgcattacggcatcgagaacggcatgtttgccattcaggcagcgcagcgtcatggcatcaatcccggcctgagcgtcgacaatgaaacctcatacagcaccgacatgtttatggaaatgcgcgtggcgttttacctgcagcgggttatgggcatgcatcagcatcagcactgctgcggttctgcacattcgctgacaacgcttccggcagcacagctcctcaaagcggcgaccgtcgatggcgcggcctgcgctgggctgcaggacaaagtcggtagcctggcgccaggcaaacaggctgacctgatcctgatcaacgccggcgacatcaatctgtatccaaacgggaatgcctttggcacggtggtacatgcaacggaacgcagcaatattgatactgtcatgatcggcggtcgcatcgtcaagcagaaaggcaaagtcctgggcgtggacagcgcgcgtctgcgtacagcgattgatgaatcacgtgagcatctgtttgccgccgccgggtatgagcctgatatttttgcggaaaccttcctgccgctgaaacaggcgcactga

SEQ ID NO: 428056 - DNA, 906 bp, Serratia marcescens
atggatcgtattcaggctatgcagatctttacgcgggtcgctgaagccggaagcttcgtgcgcgcggcagaagcgctgtcactaccttcgtcaacggtaactggcaccataaaaaaccttgagaaatacttgcaggtgcggctgttgaacaggacaacgcggcgggtgagcctcaccccggaaggattgcagtatctggtgcagtgccgcgaaatacttacgttaatcgatcatgcggaagctggcctgacggaggcggtaaaacgaccgcaggggcgtttgcgggttgatatgcccggggggatcgcccatttcatcgtcatgcctcgtctgaaagactttttccggctttacccagagatttatctgatggtcggggtgagcgacaggcaggttgatctggttcaggagggggtagattgcgtgatcagggtgggggagctgcataactccacgctggttgcccgcccgctggggcggtttcgctgggtcacctgcgcgtcgccgagttatctccgggaatatggcgttccgcaatcgcctgacgaactgtcccggcatcgggcgattcactatttttccggtcaaacccggcgtgtgaacgaaatgcgctttgtccgcggtgctgaaacactggccgtaccggtgaacggggtggccgccgtgaatgaaacgggcctctacatcaacatgtgtcttgacggtttcgggttggcacagcttgcagagagcgtggtttcagcacatctgcaggaaggaaggttaatcgaggtgctggttgactggcagccgccgtcggcgccggtcaatttgctttatccgcatcagcgctttctttctcccgccgttcgcgcctttgctgactgggtagctgggcttatccgcagcgccggtgcgggcgactga

SEQ ID NO: 428057 - DNA, 582 bp, Serratia marcescens
atgagtaatattcttattgtcaatggcgccaaacgttttgactttgccaaaggtgagttaaacgaacactatgccactaccgcacatgaattgttaagccagcttgggcacgaggtttccatgacaaaggctgacagcgattttgatcctcaacgcgagataacgaaaatacttaacagtgacgtcttgatttatcagatgccaggctggtggatgggcgaaccctggacggtaaaaagatggatcgatgaagtgtttacagccggccacggcattctgtatgaaagtgatggccgtacacgctctgatgcgtcgagaaaatatggttcaggcggtctcctgcagaataaaaaatacatgctttctcttacctggaacgccccattagaagcatttaacgatccgcaccagttctttgaaggtcagggcgtggatggggtatacctgcattttcataaggcgaaccagttcttaggcatgcaatcgctgcccacctttatcaccaatgatgtggtcaaagcgccggatgtagagaatgagatcaggcgtttcagcaatcatcttacggcactcttttcttaa

SEQ ID NO: 428058 - DNA, 441 bp, Serratia marcescens
atgctgcagctgaccacggctatccctggattactcctggcggccacgctgcgccgcctgaaagaccaaaagctggcggccgtctctgtcagtctgttaacggcgctgtccctcatcggaatcgtgtatgcccccggtctggcgatgctttgggcagctattttagggttcggttctggagccagcatgatgctgggtttgacctttatcggtttgcgtaccaaaaacgccggcgacgcggcggctctgtcaggcatggcgcagtgtgtcggctatctgatggcggccatcggccccctactactgggcaaagtacatgattggtcaggcggctgggccatgccgttgctggtgactgctgcgatcgcggtggcgggcgcctgtaccggcatggcggccggacgaaacgcccatctggaacccgcatcctcactgagctga

SEQ ID NO: 428059 - DNA, 795 bp, Serratia marcescens
atgccagaccgcaaaaaaacggtatcttcacctgaagagtttgactcagatattttcactcaggcagccgtcgccctgaacgtggcctctatggacgagtattcaggtctcggcccccatgctcaccgcaaaggtcagctaatactgtctttacacggcgcagtcagttgtgaagtacagaatgcgctgtggctggtgcctcccggacacgcggtctggatccccggcgatatgccgcacagttgccgcgtaacgcaaaatgcccgtacctgctttctttttatcgaacccggtgcggcggttatgcccaaaatctgttgtacgatcgccattacgccgcttgtccgtgaactcgttcttcaccttgctgaacaggaacctcgttattcttccgaaggtaaaacggccagactcgctgcagtgctgctggagcagattcctgacacgcccgttactgcgctctatctgcccgtatccgaccaccctaaaatcagacacattgctgatgtgctttttgccgatcctggcgatcgcacgacgttgcagcaatgggctaatcggcttgcaaccagcgagcgatcgctgtccaggctggtgcaaagcgcgacgggcatgagttttggacgctggcgccagcaactgcatctgatgattgccttgcgccaactggctgatgggcaatcagtgcaaaatgtggcgggcgcactgggctatgattcggtgagcgccttcatcacgatgttcaaaaaagcattgggtaaatcgccgacacagtactttgccactttgcgttga

SEQ ID NO: 428060 - DNA, 435 bp, Serratia marcescens
atgatactggaagccaataacatcgatagagatgaaattctccaatactctcaggccgtgtgtaacgggctaagagatgatgatgatgggttgcggcgggaagtgctcgcacatgccggaagccgctggtcactcggtattatcaacacgctaggcgtgtatggcagactgcgccacgcagaaatcggcaggcgcatgcatggggtaacccagcgtatgttgacacgaacgttacgacagctcgagcgtgacggcttagtactccgtcatgattatgaagaaacgtctcccagagtcgagtatgaattgtccgatacgggcatggagctgctcgtccgtatgatcccactctggacctggatcgtcgggaatgccgatcgcttccgagaggcaagattgaatttcgacaaacaacacggcgatgcggactcgtag

SEQ ID NO: 428061 - DNA, 939 bp, Serratia marcescens
atgaacaataaaacgcttgacgttacgtctaaaaatattcttgtgctcggggctggcgaacttggcctaccggtgctgcgcaatcttgcgcgcagagcgaaagacgtagatgacgccaaaataagtgtgttgctgcgagcaagtacggttgaatccagtgatccacagaagcgacatgttatcacggagatccgtgaacttgggattgagattgtcccaggcaatcttgtcaccagctcaattgatgagctcgccgaagtatttgcacaatatgacacagtaatcggttgtgcgggttatgcggctggaatcgagacgccaatgaaattggcgaaagcggccttgcaggctcgcatccagagatacttcccttggcagttcggagccgattttgacgcaattggccgcggtagcccccagaatattttcgacgctcagctggatgtgcgcgaattgctgcgcagtcagcatcagacggagtgggtgatcatctcgaccggtatattcatgagctatctgtttgagccgaccttcggtgttgttgacctgcaaaatagcacagttaatgctttgggcagccttgataacacgatgacgttgacaacgccggatgatatagggatgctgactgccgcaatcgtgtttgcagcaccccgtatccgtgacgaaatcgtatatatagccggtgacacagtgacttacgaagaggtggctgacaagttacaagctgctctcggtcgccccttcacccgttcggtgtggagcgaacagtatttgctggatgagctggcacgcgaaccgcaagatatgatgcataagtatcgtgctgtttttgctcaaggacgaggtgttgcatgggataagagtgtgactttcaatcaacagcatgccattccggtcaccgacgtggcatcttggatcaatgccaaccttatttag

SEQ ID NO: 428062 - DNA, 999 bp, Serratia marcescens
atgaaaaaggtcatctgcacgttgggtatgatgtttgcctcagtcagttctgctcaggccactgtctatcctctgaccattgaaaactgtgggtataaagagacatttacccaggcacctgaacgcgtggtggcgctggggcaaaataccgttgaaattttgctcctgctgggcctgcaagataaggtgaccgccagtgcgttttggccgaccaaagtattgccgcagttggctgaacagaatgcaaaaatcaagacgctgacagtagaaatccccacccttgaatccgtgcttgcgcaaaatccggatttcgttcccgctcagtcaccgttgttgcttggacctgaaagcaaggtcgccaaacgtgaagatctggtgaccctgggcgtgaacagctacgtgtcaccgggcatgtgcgccaccaaaaaagccaccggcgatatgtatggcagccgccaaaagctgtgggatatgacctatctctataaagaaattgccgatctcgccaacatttttaacgttgaagatcgcggccgggccgttattaccgatttcaaaaagcgtgaagcgaatctgcgccaggaattcggtaaaaacaagaaggatctctcctttgtcttttggttctcgagctcatccccctcagctgatgcctatgtaggagggaaaaacagcgcatccggatttatcgcgaacgtgctgggcgggcataacgccatcacttccgagacagagtggccgacggtgagttgggaaagcattatcgcagcgaatccggatgtaatcgtggtctccagtctggatcgtaatcgttgggcgcttgacaacgcggcggaaaaaatcaaattcctaaaaagcgatccggccatcagccaactggacgcagtgaaaaaaggtcatatcgtggtgatggacggccaggcgatgaacccgacaatcaggacgctctacggtgctgaacaggtgggcgaacaactcagaaaactgggactgaactga

SEQ ID NO: 428063 - DNA, 1038 bp, Serratia marcescens
atgacgaccgccgttcttcagccacgcaagaggctgtttcggagcttcacgatcttgctcgccgtggcgctgttattcctggtgatcgcgcttggcgtgagcctgggggagctttcgatcccgctgcaaagcgtcttttatgccatcagcaataaaatagggctgactgaaatgccgctcagtcgcatccatgaaagcgtgatttgggatttccgtctaagccgtgcactggtggcggcatgcagcggcgccgggttagccatttgcggcgccgttttgcaaagcttgctgaaaaatgcgctggccgagccttatgtgctcggcgtttctgccggagcatcgacgggagcggtttccgtcgtggttatgggcataggtaccggagccgtctctctttctgtgggcgcttttgccggtgcgtttgccgcctttgcctttgtcgcttttctgaccaacggcgcgcgcggcggaaatgaacgtactattctggctggtgttgcggcttcccagctcttcaatgcgattaccgcttacaccatcagcacgtcagccagcgcgcagcaggcgcgtgatgtgatgttctggcttttgggaagcttcagcggcgtacgatggcctgaattccagcttgtgctggcggtggtggtgatagggcttgccgtatgcctttactattcccaggcgctggatgcatttactttcggtgacgatgctgccgcatcgctcggcatcgcggttccccgggtgcgtctaattctttttaccgtcaccgcgctcatcaccgcgaccatcgtcagtatggcggggtctatcggtttcgtgggactggtggttccgcatgtgatgcgtttcttttttggcccgctgcaccggacattgctgattgccagcgcgttggcgggcgctatcctgatggtgctggccgacattgcctcgcgtctgctgattgcgccacaaagtctgccggtcggcgtggtgactgcgctggtcggcgtgcctttctttgccgtgattatttaccgttcaaggaataagtga

SEQ ID NO: 428064 - DNA, 762 bp, Serratia marcescens
atgagtatctccgctgacaacattacctggaaggtaggcaaaaaggtcatcgtcaatggtgtctcgctgagcgtttctcgcggtgaaaccgtggggctgcttggccccaatggctgcggtaaatcttcgcttttgcgtatcctcgcgggcctgcgtcgcccagatgccggccgcgtgacgctggacgggcaagacattgcccgtattgccaaaaagcggcttgcccgccgggtagccttcgttgagcagcatggcatgaccgaggccaacatgcgcgttcgcgacgtggtcaagctcgggcgtattcctcatcactccgctttttcgaactggagcgcgcacgatgatgagaccgtcactgccgccctgcaaagagtggacatgctggaaaaaagcgctcaaggctggctgagtctctccggtggggaacgccagcgggtacacattgctcgtgcgctggcgcagacgcccagcgagatcctgctggacgaaccgaccaaccatctggacattcaccatcaaatgcagctaatgcagttgatcagcgagttacccgtcaccagcattgtggccattcacgatctcaatcacgcagcgatgttctgtgattcgctgattgtaatgcagggcgggcaaatcatcgccaccgggacccccgaggatattttgtcggaagcgttgctctgggatgtctttcgggtgaaaacgaaaatcgagatctcccgcttccatggtaaaaagcacattcattttatcgtttag

SEQ ID NO: 428065 - DNA, 1242 bp, Serratia marcescens
atgtctcttttctccctgcgtccggccacaacgcttcagccgtccgttttactgggcagccagtttgtttttaacatcggcttttacgcggttgtcccctttctggcgatatttttgcgcgacgacatgcggctctccggtgccatcatcggattggttctcggattgcgtaccttctcgcagcaagggatgttcatcctcggcggcgcactttctgaccggtacggcgcaaaggttatcatcctgtgcggctgcattgttcgcgttgtaggctatctgctgctggcgtttgggcagtccctatggcccatcattctgggggcgtgccttaccggcatcggcggcgcactgttctctccatcgattgaagcgctactggctaaagcgggtacgtacagcgagttaaacggaaagcgcagccgcgctgagtggtttgcacttttcgccgtgtgcggcgaactcggtgccgtgttgggcccagttgccggcgcgctgctgaccgggctcggcttccgccaggtggcgtttgctggggcgggggtgttcgtcgtcgctttgttggtgctgtacttctgccttcctgccgctcatcacagcgcgcgggcgctaaaaatattgccctggtggacgacattccgtcagccgcgtttcgtcgcctttatcatcgcttacagttcgtggcttttaagctacaaccagctttatctggcgctaccggttgagattcagcgttcgggtggcagcgaaaaagatctcggcccactttttatgctggcttccgtcctgatcattgctctccagcttccgctggcacgtttcgcacggcgagtgggagcgatcaaaatcttaccggtgggttttttgctgctgtctgccgcttttgggagtgtggccatgttcgccgcgacaccgccgctggcaggctggctgcggttaatgccttcggcatgtctggtcacacttttaacgttggggcagatgctgctggtgccatcggctaaagatcttatcccgcgattcgccgatgagtcgacgcttggcgcgcactatggtgcgttagccaccgccgggggcttcgcggtgctggcaggtaatttattgtttggcccgttgttggatctagcgctggtgccttcaacgcaggccatctatccctggctgctgttggcgctgcttcccctgtgcagtgctgcggctatggccgtgatttgtcgtccgctgcaaagagcgccactctcgtaa

SEQ ID NO: 428066 - DNA, 2334 bp, Serratia marcescens
atgagcgcccacttcgtttcccagaccgtacgcaccgccaccggccactggccggtgatactcccggccctcggcatcgccttgcggccgaatggcaagccgcagccgtgcccgacctgcggcggcaaagaccgcttccgtttcgacaaccaggacgggcgcggcacctggttctgcaatcagtgtggggccggtgatggcctcaacctggtggaaaaagccctgtcactatctgcccgggctgccgccgaacaggtggctgccgtgatgggggataatgccagcactttaccaccgaccgctgaggccggtcattcacgacaagacaaggctgacgctcagcgcaaaaccgcgcgacaggcacaggctctggtggctgccgcgcagtcccagacctgcaacgcctatctgagcgccaaaggctggccggaggtggacaccctgaccctgcacggccagtcgctgcgcgtcgggggtatcacctaccaccccggcgacctgctgttgccgctgctcaatgccgggggcgaagtggtcaacgtgcagctgattaacgcccacggagacaaacgcatgttagcaggcgggcaggtgaaagccgcctgccacaccctctgcggcccggacaacgcggttatctggctcaccgaaggctacgccaccggcctcaccgtgcatcgcctgaccggtgaaacggtgtgcgtggcgctgagcgccaacaacctggcggcggtggcggagcagctgcgcagccattacccggatgcacggttgctgctggcggccgataatgaccgcagcggcaccgggcaggcacgcgccgccgaggcggccacactcaccggcggtatccctgcgttgccgacagacatcggcgactggaacgatgtctactgtcagcagggcattgaggccacgcgggcacagctccaggcgttcagccagccgtcgcagcccagcccgttcgacaggctgagcgatgccgacctgaaagccatgagcgccagcgagaaggccgaactgctggctgagcactacggcaacaccttggcggtgccgccggtgggggaagagctgtgccgctatacccgcggcgcctggcaggtgctgccacaccgacaactgagccgagagattgccgcgttgttccagaaggtacgagcaccgttctccgccgccggtatcaacagcatcctggacaccctcaagctgatggtgccgcagatgggcgacccggctcgccggttgataggctttcgtaacggggtattcgataccgtgagcgggcagttcagcgcccaccggcaagagcactggctgcgcaccgtcaacagcgtagactatacgccgcctcgtgctggggagaacctggccgaccatgccccgtacttctggaagtggctgacacgggccgctggaggcaatcacgacaagcaagaacgtatcctcgcggcgctctttatggtgctggccaaccgctacgactggcaactgttcctcgaagtgaccggccccggcggcagcggcaagagcgtgatggcggccatcgcccggctgctggccggggcggataacaccacctccgccaccatcgataatctcgagtcggcgcgcgagcgggccagcgtggtcggctactcgctgattatcctgcctgaccaggaaaagtggagcggcgacggggcgggtatcaaggccatcaccggcggtgatgcggtcgctattgacccgaaataccgcgacgcctatgccgcctacatcccggcggtgatactggcggtcaacaacaatccgatgcagttcagcgaccgcagcggcggtgtctctcggcgacgggtgattatcaccttcccggacgcgataccgctcgctgaacgcgacccgcagctgcttgacaaaatcacccaggagctggccgtcattgtgcgccatctgatgcagcgcttcgccaacccgaacgaggcccgcaccttgcttcaggcgcagcagagttcggacgaggcgctgaccatcaaacgccaggccgacccgctggttgacttctgcggttacctgacggtgctcagcaccgcagaagggatgatgataggcaatgccaacatcaccccgccgaacccgcgccgctatctgtaccacgcctacctgtcgtttatggcggcacggggctatcagcacgtgatgaacctgacggcgttcggcctggcggtaccgcagacgctgagagagtatgagaaaaccctgctcaagcgtaaaacccggctggggatgcaaaccaatgtggtgttgagtgaagagtgcgaagcggactggttgccgaagtgcggtgctgtgtga

SEQ ID NO: 428067 - DNA, 336 bp, Serratia marcescens
atgaacacctcatcctgtttaccgattgaagtccgcaccgccgttttccgccgcgccgtggcgcaagcctatctggacacctgcgccttttaccgggtgagcctcgggttcacgctggacgagttgcagatgacgattgctctgcgcctggaggggcactttgtgcgtcagtacggcgcagaagacggcatggatatggcatgtacgatgctgagcgacatggtgcagccggacgttctggtggccgcgccgcgcctgaccgcgctggggcaaaagatgatggacgagctgtgctgcgagcgcctgtcggcggcacagcatgccaccgtacactga

SEQ ID NO: 428068 - DNA, 264 bp, Serratia marcescens
atgaacaccctggccgaccgctactaccgcgacacccattaccctatcccgcacgccgattttctgcgtctccagcatgcgcacgccaccggcgtgctgttccttgacctgctggacacccttgacctcggtgggcagcgtcccgatgccacgcaacaggcgtcgtttgcttcggtcattgctttgctgaccgaccagctcggccacgtcgtcaacacctgtgaaacccaaatccttacccgcatggaggccactgccgcatga

SEQ ID NO: 428069 - DNA, 570 bp, Serratia marcescens
atgtcggcgaagtggttgatcactatgcgatcgattgaacgtccgggggcgtcttacggcttgcccccacgtccggccctgcgctatagtcctcccgctgccgcaaaatcggcagccgggcgtaggaacccgtgttacttattggcgacacaacacgcgccaggcgtgtttttttatgtcgtggccttagtgtgctcattttttgcgcggtggatgttatgctatcgcagcagtcaatcaatggtggctcaggcggggcagccttcgggctggccggtttccaataaggccggtattcctacccccgtctgggctaccacccataagtgtaggaacttcggtggtagcaataaccaaaacttattggaggctgccaccatggctacgaccctcaccccgactcacccgacattctgctttctgttcgcggccgtacgccgttctgctctgacggcttcgccccgtatggtgcgcaccgtggcggatagcgaacgcaatgcccgccgcgtgctggcccgtgattacgtgttgtcctttgccggtcgtctgccggttaaggcggcagcatga

SEQ ID NO: 428070 - DNA, 213 bp, Serratia marcescens
atgcagttaaccctcggtcgacacagtttcaccttgagcgataacgacgccttatttgtggcggaagcgatcttgttgcagcgcaaacacccggacatcgttttaccggtccactacagcgaaaagcacggcgtgatccgtcttatgaagcgccagaccgaagtgagtctgttccatgtcggcgaagtggttgatcactatgcgatcgattga

SEQ ID NO: 428071 - DNA, 264 bp, Serratia marcescens
atgttgaccgtttccacccccatcccatctaccccgtcgccggtgcctcaaaacggctataccccgcgcgagcgctttatccgcctgccggaggtgctctacaccaccggtctgtcccgctccaccgtgtacgagatgatgagccgccggcagttcccggttcaggtttcccttggcggtaagaacgtcgcctggctggcctccgaggtcgaacagtggatggacgaacgtatcgccaaccgtcatcaggggagcgctgagtga

SEQ ID NO: 428072 - DNA, 1182 bp, Serratia marcescens
atgcgacttaataacttacaaatccggaatgctaaacccacccctaaaccttacacgttgagtgatgggttgggcttatcccttttggttgaacccaatggcagcaagagctggcgctttcgttatcgctttgccggtaagcccaagatgatttcattcggcgtctatcctgccgtttcgttggccgatgctcggttaaagcgcgatgaatccagaaagttagttgctgaggggcagaaccccagcacagttcgtaaagagaaaaagctggcgcagctatacgggaatgcgaacacctttgaagcgatcgcgaaggagtggcatcagtccaaattggcgacgtggtcagcagggtatgcggccgatatcatggacgcgttcaacattgatattttcccctatctgggacagcatcccatttcggcgataaagccgcttgagctactcacagtgcttcgcaaaattgaggcgcgtggggcgcttgagaaaatgcgtaaggtcagacagcgctgcggtgaggtcttccgatatgccacggcaaccgggcgagcggagttcaacccagccgccgatctctccagcgttttgattagcccaaaatctactcattatccttttttatccgttgatgaaatccccgattttcttgcggcgctggagatgtactccggcagtcggttggtacagctggcgacgaagttactgatgttgaccggagtcaggggtattgagctgcgcatggcgcaatggcatgaggttgatctggataacgcgctttgggaaattccgcaggagcgcatgaaaatgcgtcgagcccatctcgtaccattatcgacacaggctgtggctatattgaatgagctgaagacgcttacgggtaactatcgctatgttttctcgggacggaatgatgtgaacaaaccgatgagcgaagcgagtatcaaccagctcctcaagcgtatcggttatcacggtcggctcactggccacggcttcaggcacatgatgtccacgattttgcatgagcaggactttaataccgcttggatagagatgcagcttgcccacgtggacaagaacgccattcgcggcacttacaaccacgctcagtaccttgagaaacgccgtgacatgttgcagtggtacgccgattttattgcgggcctggcccagcactcttag

SEQ ID NO: 428073 - DNA, 1035 bp, Serratia marcescens
atgacggttcgcaagaaccctagcggaggatggatctgcgaactctaccccaacggcgccagcggtaaacgcatccgtaagaagtttgctacaaaaggtgaggcgctcgcgtttgagcagtacacaattcaaacgccatggacggaagataaagaggatcgccggacgcttaaagatctggttgatgcttggtatagcgcgcacggtattacccttaaagatggcctgaaacggcaaggctctatgcatcacgcttttgattgcatgggggaaccgctggcccgtgactttgacgcccagatgttttcccgttatcgagagaaacgcctcaaaggggattatgcacgctcaaacagagtaaaggaggtatcgccccgcactctaaatttagagctggcatatttccgggcggtctttaacgaactgatgcgcttgggtgaatggaagggtgaaaacccacttaaaaatatacgccccttccgaactgaagaaactgaaatggcttttctgactggcgagcaaattcaacagttactcaatgagtgccaacacaataatgagttgctttgcatagtaaagatttgtcttgcaaccggtgcaaggtggtcagaagctcaggaactaaagcgaagccaaatcacaaaatacaaggttactttcactaagactaaaggccgtaaaaatcgtactgtgccgatcagcgtgaatctgttcgagagcttgccctcaataaatggacgggtgtttgagaccgattgttatggagcctttcgctcagcgctcgaacgtaccgggattgagttacctgccgggcagttgactcacgttctgcgccatactttcgcgtcacatttcatgatgaatggtggcaacattctcgttttgcaacgcgtcttaggacatactgacatcaaaatgacaatgcgttacgcccacttcgcccctgaccatctagaagaaaccttgcgactcaacccactcgatggaagtggcggtaaagtggcgatagagatgagcatccctgacaattcatga

SEQ ID NO: 428074 - DNA, 582 bp, Serratia marcescens
atgagtattgatgtagctgatttagaacctatcaaaatccttgagcgtatctgcgaggtctacggtttttctcagaaaattcaactagctaatcactttgacatttctgctagttcccttcagaaccgctataccagaggcacaatctcttatgactatgcagccttctgttctctcgagacaggtgcaagtctgaagtggctgcttactggtgagggttcaaaatttgaaaacacctccacagaagaacgcccaatcgagatggagctattcactattgaaaatggcggactaacaaaagataagcccctgaacattgaccctaatctcttccgtaggaaacccactaacggcattgctgtccgcactgatggaaaattgcacttcattgataaagcagcttcgttagctgatgggacttggcttgttgatattgaaggtgttgtgagtattcgtgaaatcaccgtgttgccagccaaaaagctgcacgttgcaggtggaaaaataccgtttgaatgctctgttgaggatattcaagctctcggcctagttgtcggcatctacaatgaggtggttggatga

SEQ ID NO: 428075 - DNA, 510 bp, Serratia marcescens
atgtttgattacgccatttctaaacatccgcacttcgatgaagcctgccgacagtttcctgctcggcacaatgtgacggcgcttgctaaacagctcggcatgaacgcccagacgctgcgcaacaaattgagtccgggccagccgcatcagctcacttgtgctgaactgctggcgatcactgacgctacagaggattccagcctgattgatgccttgctggcacaaatcaactgcatgccgtccgtgcctgtcaatgaggcttgcgccgggaatattccaacgtatgcactgcaggctacggccgcagttggcaacgttgccgccgccgccgttcagggcgaccacaaaacgccggtacgcaaaagcgcactgcttgaaagcgtcaacacggcgatccgccatttgtcgctgatcggcttgaccgttcagaaccgcatccaatccaccccggctctggcctccaccgttgacgtgatcagcgggctgagtgctgttgctggtttaagctga

SEQ ID NO: 428076 - DNA, 294 bp, Serratia marcescens
atgaaagaatctttgcttcttactccaaatttaaccagctcggcaaataacgcctttcagcgtggtgttgtcgctggtacttgccgcgcggtttctgccttaacaaatgagtttcaagatttgttagataacgcgcgtattgatgaacgtaaaaaccaatctcaggtagcggctgcgcgtttggctcggctggcggcccacatcacccaagaggggttaacagcggtcgaggctgtggagctgttgcgccaagaggctgaagccatcgagcatcaagcgcaggagctgcactaa

SEQ ID NO: 428077 - DNA, 2217 bp, Serratia marcescens
atgagccaagcggctaccgcctacgcttacccatggaatgaaccgcgcccggctgttgccgggccggtaagaccgcttacccgtgaggaactcgctcaggggcaagctgttttaaccaatattcgccgtctgccgcgcttcctcagcgccatgttcctgacgcgttacaccaacttgctcaagaccaaagggctgcacgacgccaacaaatggctgctattccagttcgatcgccgcatctggccgcgcctgcaaacggtgagcgccaagaacgcgatgaacctcgccgcttcaatgcggttttctgctgaagttgataattacgcagctttgcccggcatggatgacaaagagttacgccgccttgccgatcgcgtggccgctcaacttctgcagaattacgaagattactgcgatgagtttgtggcggagaacggcggcgacaatgccgggctgttcgaagatgccacccagtcagaattttatggccgcattgccggtatggcacgcgccttcaacatcaccccgatgcactggcgcaaataccgcaaaggcaaactggatgcccggtcagcgattgccagtctgtcacggttggttaattccgagtggtgggagcgccagttgaaagcccagcgcacgcaatggcgcgaggcgttgttgatcgctgttggcaatgtgaaccgtggggcgtcgtcctacgccagtcggcaggcaatccgcgatgtgaaagcgcgccgacagtccaattttgattatctgaacagccgcgagcttgagaacgtcgagaccggcgaacgcttcagcctcatcgacaaggtaatggcaagcatctctaacccggaaatccgtcgcaaggagttaatgacgatgattgccggtgttgagcaggccgccgctatccgtggcgataaagggatgtttatcaccctcaccaccccatccaaatatcacccgacgcgcgccgtcggtaagaacagcccaaaggtgcattttaaccacaagtgggacgatgaagcctacacgccaaaagacggccagcgctatcttgtgaagttgtttagcaagatccgcacggcgtttaaagatgcgggcctgcaggtctacggcgtgcgcgttgtcgaaccgcaccatgatgcgacgccgcactggcatatgatgctgtttacctccaaaaaacagcgccagcaggtgatcgacatcatgcgccgttatgccatggctgaagatggcgatgagcgcggcgctgctaaaaatcgttttgactgtaagcacctgaacagaggtggtgcggcgggctatatcgctaaatacattgcaaaaaacatcgacggctacgcgctggaaggcgaacgcgatcatgaaaccggcgagctgttgactgatacggccgccgccgtcaccgcgtgggcgtcaacgtggcgtatccctcaatttcactttatcggcctgccgtcgcgcggggcatggcgtgagtgtcgcaagatccgctttgtcagtctggccgaggagtttgacgaaagggtggaggcggtgcgtgctgccgccgatgccggtctttttgccgattatattttggcgcagggtggccccaacgttgcccgcgacgatcagactgtgcgtgtggcccgccgggttgccgacgagcgcaacgcctatgatgaagaggtgcagaaaatcgcggggatttttgccccgcatatcggcgccgatcgtgtttatgaaacccgtaccacgcaatggcgcatcgtcgctaaagccgttgccgttgagcctttgactttgaaaagcgcctccggcgcgcctcggagtcctgtcaataactgtgggttggtcggcagcggtggcgccgaaaatgcgcaggatggggggcctgtagaggccgtggcggtgatggaacatgcaccggaaacccagattgactgggatgacatgaccgttgcacggtctgttatgacgcgtttacgggcaaatgccccgcagataaacaggcagcaaagaggaattgacccatataagcgtatagagcctgctgcatcggccagattgaccactgtcgagcgcgatcgcgtatccaaaatttactcagagctggcactacacggcatagagccgacgcgctgggaacttgaggcactggcgcgcggcgctaaagtcaaatttggtgatatttcaatgcactatccagcggttagcgattgggcggccttccaataa

SEQ ID NO: 428078 - DNA, 225 bp, Serratia marcescens
atgcatacagtaattaagcatcggagggaaagggtgcaagcagtggacgaagttgttgttttagaaagaattgaactcatcgcccgtctgggggtttgttatgagagccaagcgaaagacaaagacattgcactgatatggatttcagaactggcgggggagatgaaaaccagcattgcccctgaaaaagcagaagtgatcaggcagcttgccgcgatctcttaa

SEQ ID NO: 428079 - DNA, 231 bp, Serratia marcescens
atgagacgagatttaaacttagccggggcgtttatggaggcgctgaacttcaacgagaacggcaaaggccgccgcataaagaccgttgatttcattcacgccgcaaaccggctcggcacacacctaacgcctgaagaggcgaattactacatcaagcaccagtccggccatgtgttcaggctgattgacgaggggcgttatcagcacaatacatacctttttctctgctga

SEQ ID NO: 428080 - DNA, 1035 bp, Serratia marcescens
gtgagcaagcgcaaaggccgtaaggcactcaccaccccggcgccagcccagccagcagagcagaagcaggattttgaggcgtttacctttggcgagccgtccgcggtgctggataagcgggaaattctggattacatcgaatgcacgaccaatggcaagtggtacgagccgccgatctcattcgacgggctggcgcgcagcgtgcgcgccgccgtgcatcacagctcgccgatgtacgttaaacgcaacattttagcgtcaacgtttatcccgcaccggctgttaagtcagcaggagtttagccgttacgcgttggattatctggtgttcggcaacgcctatttagaagagcgccaaaaccggctcggcgcgccgctgcagctgaaatcctccccggccaagtacacacggcgcggcgtggatcgcggcgcttactggttcgtgcaggactggaaagaggcgcaccgcttcaagaccgacagcgtttttcacctgattgagccggacatcaatcaggaactttacggcctgccggagtacctcagcgcgcttaactccgcctggctgaatgaggcggcgacgctgtttcgccgtaagtattaccagaacggggcgcacgccggttacatcctgtatatgaccgacgccgcgcaaagtacaagcgacgttgacagaatgcgccaagccatgcgcgacacgaaaggcttagggaacttccgcaatttgttcatgtacgccccgaacggcaagccggacggcattaaaattttgccgctgtccgaggtcgccaccaaggacgacttttttaacatcaagaacgccagccgcgacgatctgctaagtgcgcaccgtgtaccaccgcagatgatggggattatcccgaacaataccggcggcttcggggacgtgaaaaaggccgctcaggtgtttgtgcgcaacgagctaacgccgctgcaagagcgcatgaaggaggtgaacgactggatcggtgaagaggtgattagattcgcgccgtatgagttgccgaccgaataa

SEQ ID NO: 428081 - DNA, 687 bp, Serratia marcescens
atgaaatacgcatttactgctcagcaacttgctgacctgaaatcactactgaacaccatggcgacgccttaccagcgccgctggtacgcggaagggctggcacatcgcagccgcagctataccaaacaccgccaagccggggccgatatgttctttgcactggaagggctgatcgacgctctggaaaccgggcgtaatcagcactatttcgccccattgctaaaatactcgctggcgtggtcgcgtaaatacatttgccactttgcggcgaaagtcggcattcacatcgcacaagatgacagcaagattacgctgaccaatggcgccgaaatcgcttttcatggcggcctcggcctctcactggccgcattgcacggcaacgtctacttgagcgaatacgcatgggcgaatcacccttacgccattttccagagcgcgctcgccgtttcctgccattcacgctatcgcctgacgctgttcacatccgtatcacccaatcccgaggcgttcgccgtgtggaaacgctcgcaggccaagggattttcacaggtacacacgatcgagaacaccgccgcacagggcggactttgggacatgcaggatgttgaaaacctcaagcgggaatgcactgcggaggaattccgccagttgtatctttgtgagtggccacaggaggtagcactgtga

SEQ ID NO: 428082 - DNA, 1809 bp, Serratia marcescens
atgcgagccgcccggcgctttcgtagccttggcggcatgaatacgacacaagcaacaaccatcatcagcgatccgcgacgccaagctgccttgctctactggcagggcttttctgtgcgccaaattgcggaaacgctgaacctcaaggggccgaccgtgcagagctggaagctgcgcgataaatgggacgacatcgcgcccatttcccgcgtggagcaaagcatggaagcacggttgattcagctcatcatgaaagacgtcaaggaggggaaagacttcaaagaaatcgacctgttaggccgccagattgaacggctggcgcgggtcaatcgctattcggcgactggcaacgaggcggacttaaacccgaacgtcgccaaccgcaacaaaggcgagcgcaagcccgccgagcgcaacgtgttcagcgaggccgccgtggagaaactgcaaagtatcttcacggaaaccaccttcgagtatcaaatggggtggtatcgcgccgggctgcaacaccgtatccgcaacatcctgaaatcgcgccagatcggcgccacgttcttctttgcccgcgaggcgttgctcgatgcgctgaccaccggccgcaatcagattttcttgtcggccagtaaggcgcaggcgcatgtattccgcaattacatcattgattttgcgcggctggtcgaggttgacctgaaaggcgatccgatggtgctgccgaacggcgcccgcctgatgttcctcggcaccaacgtgcgcaccgcgcagagctacaccggcaatctgtatcttgatgagtatttctggatcccgaaattccaggagctgcgcaaagtcgccagcgggatgtcgctgcacaagcggtggcgcaccacctacttttccacgccgtcgagtctggcacactccgcttatccgttctggtcgggagaactgttcaacaaaggccgccgcagtaaagccgatcacgttcaactcgacctcagccacagccacctgtcaaaaggcgtgctgtgcggtgatgggcaatggcgccagattgtcacggttgaggatgcgctgaccggcggctgtaacctgttcgacctcgatcagctgtcgctcgaatacagcccggcagagtatcagaacctgctgatgtgtgaatttgtggacgataccgcgtcggtattcccgttcgccgagctgcaaggctgcatggtcgatacgctggaagaatgggaggacttcaacccttacgccgtgcggccgttcggttatcgcccggtgtggatcggctacgacccatcggaagccaacggcggcgacagcgccgggtgtgcggtgatcgcgccgccaatggtggccgggggcaagttccgcgtgctcgagcgccaccagtggcagggcatgaactttgccgatcaggcccagaagattaaagaccttaccgaaaaatactgcgtggagtacatcggcatcgatgcgaccaccgtcggccaaggtgttttccagttggtgcgcgagttcttcccggccgcgcgggagatcaaatacaccccggaaatcaaaaccgccatggtgctgaaggcaaaagacaccatcgggcgcggctgtctggaatacgacaccagccacaccgacatcaccgccgcctttatggcgatccgcaaaaccatgaccgccagcggcgcgcgttccacctacaccgccagccgcagcgaagaagccagccacgccgatgtcgcgtgggcaatcatgcacgccctcttgaacgaaccgctgaccgcaggcagcggccacagcagcccgaacattttggagttttactga

SEQ ID NO: 428083 - DNA, 474 bp, Serratia marcescens
atgataaaaccgcaacagctccgcgctgagctgacaaactgcctgccgtggctacagcgcaaccctgaaaatctgcaagtgcgggttgagcgcggcaatgtggccgccacgcttgccgcctcgctgtcccatgagtaccgctatacgcttaacctgctgtttttggactacaccggcgatctggatttaatcatggtgccgattcaggcatggctacgagagaaccagccggacatcatggcaaccgaggaaaagcgccgcaccgggatcaccttcgcgagtgacttcaacaacaacggctcttacgatttcagcgtatcgctgcagctgaccgagcgtgtagtggtcagcgaacagaacggcgcactacacgttaagcacctgccggagccgccgttaccggaggacatcacgcggccgatgcagctctttgttcacggtgaattagtgagtgaatggcatgagcgagcttaa

SEQ ID NO: 428084 - DNA, 630 bp, Serratia marcescens
atgaacaatcaacacgacattttgcgcctgctgcgcaacctgatccgcatcggcaccgtgagcaccgttgaccttgataacggcctgtgccgcgtcgaaaccggcggcaatcttaccgactggctcaactggctaacctgtcgcgccgggcgtactcgcagctggtcggcgccttctgtcggtgagcaggtgctgatctttgcgctgggtggcgaactcgataccgcgtttgtgctgtgcggcattttctctgacgacttcccggccccgtctgcgtcggcggatgcgctgcatatcgcattccctgatggcgcggttatcgagtacgaaccggaaaccggcgcgctgagcgtgtcagggattaaaaccgccgacgtgcaggcgtcggagtccatcaccgccagcaccaaagtggtgatcgttacggctgacaaaatcacgctcgatgcgccggaggtggtttgcaccaacaaactcaccaccggcacgctggaagtgcaaaaaggcggggagatgcgcgggaacatcgagcacagcggcggctcgttctcgtcgaatggcattgttgttgataagcacacccacggcggcgtccagaccggcggcggcaagactgatgaaccctcttaa

SEQ ID NO: 428085 - DNA, 351 bp, Serratia marcescens
gtgaacagcgccaaatatatcggcatgaaccgaggcaccggccgcacgctgacggacatcgagcatattcgccagtccgtggcggacatcctgatcacgccgcagggttcgcgcccgatgcgccgggcttatggctcgttgctctctgagctgctcgaccagccgcagaacgacgcgctgcgcctgcagatcatggccgcctgttacagcgcgattttggcgtgggagccgcgcgttaagctgaccggcatcgcctttaataccacttttgacggcaagatggtgatcgacatcaccggcacccgcaccgatgcccccggcgcgctgtcgctgtctgttcctgtgagctga

SEQ ID NO: 428086 - DNA, 534 bp, Serratia marcescens
atgactaaccgtctattgcctgtcggctcctcacagctggaagttgccgccgccgccgcgtgtgccgagctggagcgcgtgccggttcccctgcgtgatctgtggaacccgaaaacctgcccggtgcatctgctgccctatctggcgtgggcgttctctgtagatcgctgggatgaggcgtggccggaggacgtgaagcggggcgtggtttctgccgcgttctacatccaccgccacaagggcaccatcggcgccgtgcgccgcgtggtggagccgctcggctacctgattaatgtcattgagtggttccacaccgacggcgccgatccgcccggcacctttcggctggatattggcgtactggaaaccggcatcaccgaggaaatgtatcaggaaatggaacgcctgatcgccgacgccaagcccctgagccgccacctgatcggcctcaacattttgcaagacatccccggccggatttacaccggcgcggccgccattgatggcgatgttattaccgtttaccccggataa

SEQ ID NO: 428087 - DNA, 2619 bp, Serratia marcescens
atgagcaaatacaaagcgattattaccaccgccggggcggccaagattgccgccgccagcgcgggcggcacgcagttgaaaattgtccgtatggccgtcggcgacgggaacggcacgctgccgacacctaaccctgcccagaccaagctggtcaacgagaaataccgcgcggcgctcaacgggctgactatcgataaggcgctgaaaaatcacattctggccgagatgattattccggcgaacgtcggcgggtggtggttgcgtgaaatgggcctctatgacgaggccgggacgctgattgccgtcagcaacatggcggagagttataagccgaagctggaagaaggcagcggccgcacgcagacgctgcgcatgatcctgattgtcagcagcaccgaggcagttcaggtgatcgccggtggcgacaccgtgctggcgaccaaggattttgtggccgacgcgatcgccgcgcacgagaaaacccgaaaccacccggacgccagcaccatggctaaagggctggtgcagctgagtagcgcgacgaacagcacagacgaaacgaaagccagcacgccgaaggcgcttaaaacggtcagtgatgccagcatgaaaaaggccgccaatctgtccgacgtggccgacaaggccgccgcgcgtggcaatctggcgttaggtacggccgcgacgaaaaacgtcggggtggatggcgggcagttgatggaggtcggcgcctttggattgggaagcggctcacgtcatcgagaggatgcttattgcaatcagggggaaatctatcgggttaatggttcatcaaagaatgcaccgggcggcgatgtttatggcgtgctgagtttaccttgtgacggcggcccgtcgggtgcgtatatggcggtacaaaacaacggaaacgcattctttggccgttcaaatatcgcggaaaacggtgtgacttggtttcaggcttacaccaccaaatttaagccaactgcggcagacgtcggggcatggagcaaaacagaagccgatggccgttttctgatgctttccggcggcacagtaaaaaaactggcgattaagcccggcaacgcggaaacagagggtagcacactcaatattgagggaaatcagcatacgcccttagtgatgagccgtctttctgctcagggcaatctttctatcggatttcaagtcgctggaaaggcgttaatgcgccttggttttggggttgatgacgaattgcattgggggacagaagctaatcaggcgtcgaatccgcgcatttatacgacggctaagccgcctacagcacaagaaaccggggcgttgacggatgcgcaggccgtacagaaatacgcgctgcgctctatcaaagtcaacggtaagccgttgagcggcgatgtcaatctgttggcgggggatgtcaacgcatggaacaaaaccgaagcggatggccgctatgtaaaacagagcggcgacacgatgaaaggggcattaactctgccgcgtatcgtattcccgaacgaaaataccgccaatgctgacgatgacttaaatcgtgaaaatggcttcactgttgaatcactggttgcctctgccaataagggctatcccgtaccgggcggcatgggggtgttgtttaccgggaaagtgaacgagttccgcaatgtgcaatttgccgtaggctccggtgatttggcgttttacttgcgctcgatgcgaaaggacagcgcggcttcgctccgctgggcgcgagtttatacgactgactacaaaccaacggcggccgatgttggcgccctgactgacgcgcaggccgtccaaaaatacgcactccgatccatcaaggtgaacggtaagccactgtccgctgatgtgaatttgttggccggtgacgttaacgcgtggagtaaaaccgaagcggatggccgatatttggctaaaaccggcggcaatattacgggcggggtatcgtcaagctcctgggtatctgctgcggcgctgacatcggattatcacggcaccggcgataacacgaataaagcgccggaaggcgccggagcgtacagcaatcagcttggcacgcgcgcgcctttttaccagactgattttcagtgggaagccaacagcggcgcgatttatgtgccactggtgaaaggtaaatcgacgcgtaagggcaaaggctggccgaccgcagttagctacggctatttgatgccgggcgagaatatgcatgctcatcccgttattcatgcgcttggtgatggagtggaaagtatttggcagtttaatacccaaactggcggcattattagtgggaaaatgggcgagttcgcgagtcaggcatgggttaacaatgggttgaatggtcgggttgactggccctcctttaatcagcatgtgggcgccagagcgacaattgactgggttaatcagaactttattcaaaatgtcagatacagcgcggaaatgcatgtcggtgcgaccgggatctatacctatcacgataataccgtactaaccggtttcaataacaaagacggcgattactctgctgaggagctgttttggagctacatccaaatttataaaaatggtcagtggatcacagtaggacgataa

SEQ ID NO: 428088 - DNA, 546 bp, Serratia marcescens
atgacgaatgttaaaaactttcagctcggcgagccaaaaacaccggagcaattaaaattacgcaatcagcataatgccatgttccttttctctgacgatggtaaggagtggtatcactgccagaaagattttgcggccgatacgataaaagttgcctacgatgaaaaagggattatccgcagcattgccgccaacaacgatatttctacgttgtggcctgtcgggttaagcgtcgcggaagtggcaaacacaaccgccaatcgccgggcagatatttcaggcggttgggtatttgatgggaaagccattgttaaacgcagttattcgcctgacgaatatcaggatcaagcgaaaaaggaacaggttgcccgcattgcggcggtggcgcggcatatcgcgccattacaggatgcggttgatttggacatggcgaccgaggaagaaaaagcgctgttggcggactggaaaaaataccgtgtgatgctgaatcgtctggatatggcgtcggccccggatattgactggccgatagcgcccataaattaa

SEQ ID NO: 428089 - DNA, 837 bp, Serratia marcescens
atgtcattcgtaacaactaaagatggcgttaatatttactttaaggactggggctcgaaagcggcgcagcctattgttttccatcacggctggccattaagcgctgatgattgggataatcagatgctgttcttcctggcggaaggttttcgcgtaattgctatcgatcgccgtggacatggccgttcagatcaagttagcgaagggcatgacatggatcactatgcggcagatgtctctgcggtagttgaaagtcttgatttgcataacgcagtccatgttggccactcaactgggggcggccaagttgctcgttatgtggctaaatatggtcaaccacagggtagagtagccaaagcggtgcttataagttcagttccaccgttgatggtgaaaacagaaaataacccaggtggcacgcctattgaagtctttgacggtttccgtaaagctcttgccgcgaatcgctctcaattctattttgatgtcgctagcggtccattctatggttttaaccgggacggggcggaaatatcccaaggtaccattcaaaactggtggcgacaagggatgacgggtagtgcaaaagcccactatgaaggaataaaagcgttttcagaaaccgatcagactgctgatcttaaagctattaccgtaccggtgctggtgatgcagggggatgacgatcaggttgtcccttaccaaaacgcttcaattttgcagaataagttgttagccaatagtgaactaaaaatttatccgggactcccgcatggtatgcatacttcacacgctgaggtgattaacgcagatctgcttgcctttatccgctcatag

SEQ ID NO: 428090 - DNA, 825 bp, Serratia marcescens
atgtatgttgatgggagaatatccggttggcgttggcttgagtcaccgcccattaacagtgatgacaaaaaactgggggagatggatttcaattttttaagcattgttttctatgaaagcgatgaaccctttatgtatggtcatccgttggtgtgtaacaatacttgcatcctttatttacgcaccaccgacgcgtctaatattgttaagtattctaaaggctttacctttgcatctaacgtcagcttgagtgttaatgaggcaaatgcagcgttaagaaatgctctgcctaaagtggaatcaattcaatttaaacgctcggagcgttctcagcattgtttagtgttagaaatgatgggtaatgggagggtatcttacaatttaggttccagctgcactggtttattgccgcctctgccgccaaccacaccacggccaccggagccgctttcttgcgcggtgacatggcaaagcagcggcgagattgattttggcgtgatgacgccgggtgaaaacaaagtgaagggcattgccgccaaactggcctgccagggcgggacttcgggaaaagcccgcctcagatttaccgatgtcaatcaggtgggggcaaatacggtaacgctgcgtaagagcggcacgagtgatcaaataaaagcgaagctgtcgattggcgatccaaattcgtctaatgaacaggtgattgatgtctcgccaggttttaatgcgacctatgcctttgtagccaaattggacggcgcgcagctgagcggtattgacggcggcactttttctggcaatgcgctgattgtgtttgaagttatttag

SEQ ID NO: 428091 - DNA, 540 bp, Serratia marcescens; identical to SEQ ID NO: 424993

SEQ ID NO: 428092 - DNA, 1119 bp, Serratia marcescens
gtgcctaaagttaactcgcgttcattacgctttaccgaacgccacgtcaccaaatatgcggcgtcattgctgtttatcggtttatccctgccggccgccgcgctggcggatgagcgctatgacgcgctgatccgtcaggccagatcgggcgataccgcgccggtgctggcgtatttatcgcagcgccgcgctcgggaggggttgagcctgcagcagcgagccgattatatccaggtggccggttgggccggccatgacgaagaggtggtcgcgctctggcgtgccgacggcgccgcgctgcagcgggatagcgccagcctggcgacggtggcccgcgcctatcgcaatcttaagcagtggcagccatcgctgcgcctgtggcgggcggcgttgcagctcgctcccgccgacggcggcctgcagcgtggctacgtgatgacgctggcggatgccgggcgggatgcgcaggcgcaaacgggagcggccaaagcggagaagttactggaaccggcgacgtggtatctgacgcgcgcctatgtggatcaggccgccggccgcagctgggcggcgttggaaaacgtgacccgcgcccgtacgctggcgccgtccgacgccggcattcaggcttattacgtgacgctgctggcggcgaaccgggtcgcggatccggcgctgcgtgcaagccaggggctggcattgccgcccgcgcagcagcagcgcctgcaggcggatgaagccgccgaactggtgcggctgtcgtttatcgatgctcgtggcgaacaggaacgcttcgtcatcgccgaccgtgcgctggcgcgctatgaccaactgctgacgcagtggcgaccgctgccggaggcgcaggacagctaccaacaggcgcgtatcgatcgcctgggcgcgctgctggcgcgttatcgcatggccgatgtggtgagcgagtatcaaaccttgcaggcggaagggcgcacggtgccggattatgcccagcgctgggcggcgtccgcctacctctacctgcagcagccggacaaggcgcaggccattttcagccgcctgaacgccgccgcgccgcaggcggtgaccgccgaagacgaaaccgatctgttttacgcgtag

SEQ ID NO: 428093 - DNA, 1497 bp, Serratia marcescens
atgagccaatccgtcctggccagcgaaacccaccgcggccacctgcagcaaatcatctccggcttgtccgacggcgtgatcctgacggataccgatcgaacgctgctctgggccaacgaggccgcgttggccatgcatggcgtgagtcatcagaaagctctgggggccaatgccggcgagtacgcggcgcgttttgccctgcgctatcgcaacaatcatccgctggctttggaacagtatccgctgaaccgggttgccgatggcgagaccttcaccgatgtggtggtggaggttcggcaggccgacgatccggacagcttctgggtgcaccgcctgcggagcctgattatcaccgatgcgcaggggcaaccggagctgctggcgctgatcctgagcgacgcgacggagtgggccagcgccgaacagcgctttgaaaaaaccttcaacgccaatccggcgccggcggtcatttgtcggctaagcgacctgcgctacgtcaaggtcaaccaggggttcctcgatatgaccggttaccagcgtgaacaggtcatgggccgttcggtctatgaactcgacgttttggaacaggcggagcacaaagatctggcgatacagcgcctgggggaaggcgccaccattccgcaaatggaggccgagctgaaactgcccggtggcggaagcaagctggtggtggttgccggccaaccgctggacatcaatgaagacgactgcatgctgttcacttttaccgatctcgaaccccggcgccaggcggaatcggcgctgcgggaaagtgaagagcggttcgccaaggcatttcgcctgagcccggtgccgacgttgctgtgtaccgcgcacgagcggcgcgtgctggacgtcaacgaagccttcacccgcaccaccgagtacgacaccgaagccttgatcggcaagacgatcgatgagatcccgtttattgacgatcccgaggcgaaccgccgtttgtttgccgcgctggaaaaaagcggcaacgtcgaagggctggacatccgggtgcgcaagaaagggagcgagtcgatcgactgcgtggcctcggcggatgccgtcagcatccacaatgcgccctgctacctgctggtgctcatggatattaccgaacgcaaacgctcggagctggagctggtcagcgccatcgaagaagtgatgcaggacgcctcctggttcagccaaaccctgattgaaaaactggccaacgtgaaaagcatcaaccggcccgaccaggccggattgaccgccagcgatctcacgccgcgcgagcgcgatgtgctggagttgatttgcgaggggctgccggacaagaaaatcgcggcgcgtctcaatctggcgctcaacaccattcgcaaccatgtcgcgacggtctattccaagcttggcgtgcacagccgtagcgaagccatcgtctgggccagagaacgcgggctgtttaccggcgggctggccgccaggaacggcaagtag

SEQ ID NO: 428094 - DNA, 1110 bp, Serratia marcescens
atggcaaataatcgggagcatcagcaaatagcgttagtcggcacctggacccatattccggatgcgcctgcggtgcagaaaccggcgcaccccagtgaaggcctctatcgtctggcggttaatggcgacggcacattaacgctgctcgacgtgattaaaatgaaaagcccgtcatggatcgtaaaatctcgcgatggccgtttcgcctatgtcaccaatgaggagaacgcgggaacggtcactgccttggcgatagacaaagacggcgccgtgcgggtgctgaatacggtgagcagcgcgggccggcagccgacgcatgccaccctcagcccggatggcaagtttctgtttgtcgccaactactccgtcgccaaaggcggcgcgggggtgacggtattaccgattggcggcgacggtaaactgggggaacgggggcagcattttccgttcacgcccggctccggcgtcgtgcaggggcgccaggaagggggccatgcgcactccaccaccttcagccgcgatggccaatacctgtacgcggcggatctcggcggggacaagctgcgcgcctaccgctatcgctcggacaacgcgcagcctttgcaggcggatgcttcgcgcgatgtcgccttcgcacccggcgccggcccacggcacatggcgttctcgccagaaggggaatacgcctacgtcatcactgaaatggcgagtgaaatcgaggtgtttgccgtcagcgaccatcgattgacgcggcaagggaaggtgaaactgcacggcgggcaggattcagcggaggcgaaaagcggtggggcaataatcctcagcccgagcggcagatatcttattgccaccaatcgcggtgccgataaccacctgctggtattaaaaattggcgaggatgggctgccgggcgcaccgacgcgctatgaggccggcggtattgaaccgcgtgcgctcgctttcgatgccggcggtaaccatctctatgtgacgaatgtattcaccaatagcgtgacgctgttcgatttcgatgatgaaaagggcgagttgcaggccagaggtgaagcggcggcgatttcaacgccgacggatattaagtttttttactga

SEQ ID NO: 428095 - DNA, 276 bp, Serratia marcescens
atgtggcaaaaaaaaattctaaaagagcgatgttcagagtgggtgattagacgttccctctattggataactgcatatacacgctggaaacttgatgaagatgagctgaattgggttatcacatttgatgtttttaccgaagagagccagttcgagtttgagcggttgctgaatgactataagctcagggagtcccttcaaagacaaactggccaagttagggcgtcgatcatcgatagcgtattgagcagtatcgataagaggttagcggaatga

SEQ ID NO: 428096 - DNA, 1395 bp, Serratia marcescens
atgaagctcatgccgttcaacttcgaccggataaacgatgatacggtgttcttaagcaaccttgcaggctttcatcagctcatttctgaggacagtttctcgcaacttgtcagacactcacttccagatgacaagagtcttgctgatgcccttgaaagtaagctcttcatttctgaggatgatgaacaggcgtttacaacttctgttctgagttcgggctttgcaaaacggattatgagtgatttggccgtaaatccaatctttatgatcgttccaacgctgagatgcgatcacacctgtaagtattgtcaggtaagccgtgctgctgttggcgcaaataattatgacctcgaccccgctctaatccccgcaatcgtaaaccagatcaaaaagctatcagttccaccgtataaaattgaagtgcagggtggtgagcctctactacgctttgatctcgtgaaattactttatgagcaatgcgaagagaattttggcgctgatgcatttgaaatagttattgctacaagcctatcgttacttgattcatcgatcctaacttgggtgaaagagcgtaatatcaccttttctgtatcattggatggcagcgaaactattcacaacaagaaccgtgtgctgactagcaatgagtcgcattcaaaagctgtggaggggattcggcgaattaaggaggatttgggcaatagtcgagtttctacggtaacgaccgtaacgaaagaacttattaaaaatccatcttctatcatcgatgcacacttggtattggggttaaccgatctttttgtcaggcctgtaagtccgtatggttttgcacataaagacaatttttcattttctatggatgagtactatggtttttatgaaaaactcatagaagacattgtggaacataacaaaaatgggatacctgttgttgagcattctgcagcgatacatctgaaacggattttcaaccctggttttagcggttatgccgacctcaaatctcccagcggcgttgttcttaactgtatcctgtttaattacgacggccgggtatatggaagcgatgaaagccgtatgctccagaaagtgaatggcgatattgacttcagtgcaggggaaatcggtaacatgtcgttttcaaaaagcgactactatcgaacagttttggcttcgtcattcaacttcgctttacctggatgcgatacttgtgcttatcagcccttctgcggctcagatccttgtcaaaatatcagcatgcaaggagaacctgttggagacaggagtaaatcaactttttgccaataccataaagggatgttccgattcctgatagacaaactggcaaatggtggggaagtagctgatgtattgagagggtgggcttatgtctga

SEQ ID NO: 428097 - DNA, 1113 bp, Serratia marcescens
atgtctgacgttatcaggaacgatatttttagatataagagtgaagatgatgtcccgccaggcttctatcgtttatgtaaacaaaaaccagtgaatccacagttttatttacctaatctcttggtgagggaagaacttcaagcggagtgcatacttccttgctatagcggttgcattgagagtcgaggccttttcaacgcaattgatgatggagacattgctgttgttaacaatggtaatatgctcagagtaattctgtctcgtcgggctaatcataacactgttttggtgactgaaagatgcaataacctttgcttattctgttcacaacccccaaaaaaagcgaatgatgattggttgttgactcaatccgcgttagcgattgctgccttcaatcttgatggtgtcgtaggtgttagtggtggagagcctctattatacggtgatgattttcttgcttttatcgattatgttgctgaaaactcacctgaaacatcactacatgtactcactaatggtagagcatttgcagatggcaacttcgccaaacaagtaaagcaacgatgtgatcaggttaaaattacgttcggtattcctttgtattcttctcgacaaactatccatgaccagcttgtagggagcgatggagctttcaaagaaactgtttgcgggttaattaatgcagggaacttgggtatcaatattgaattgcgaataataccaacgaaaaccaactatcttgaattacctgacatcattgagtatgtaggccgcgttttttccaatataaatcaaatatcaatcatgggattggagtcaatagggtgggcaaggaaaaactggcaaaacatatttatagataataatgagattgctagttatttattggcgccgattgaagtagcatccagatctaggttagacgtagtgatctttaattatccactatgccatttaccctatgctctatggaaatattcggtacaatcgatttctgattggaagaactactatcctaaagagtgtgatgcttgtactgaaaaaaataattgcgcgggatattttagctcgtcaaaaggacgatttcatcaagatccgagaccaatactatga

SEQ ID NO: 428098 - DNA, 630 bp, Serratia marcescens
atgaaaaaatttaatttcgcagcattacttcctgggtttttagctctaaataattcagtgtgggcaagcgattctgctatggacataggggatatctccaatatgtccgtgaaagataataatcttatccttgcgcctctaaatactgatgttccgttctacattgctgggcatcgtagtcatagctcccacagaagtcacagttcacatcgttcgtcttcaggtggtggttattatagctcgccatattacccaaagacgacaagttcatcatcaacgactcgcagtggaaattcatcttcatcaaactcgaattcaggaacatcttcgtctgtacgttcattcagttctagcaatgaagcatcaaacgctggggcgtctagatctacagctacaacatcagtaatgggtacggtaacagcggataaagaaaagcggcgtagattgataatgcgggttcaattcgccctcttcgataaaggctattatgatggtgtaattgacggggttatggggccagctactagaacatcaataagaagctttagagttgataaaggactggcacttcctccatctgaaacattagatgcgcaattacttaatgctttgggtgtcatggctcgttga

SEQ ID NO: 428099 - DNA, 885 bp, Serratia marcescens
atgtcattaataaagagcttctccgtcagcagtggcgacatgttttatataaaacacaacagtgataacttcacgataattgactgctatatcaacgaagataatgcagatgcgatcatcaaagaaatgcaagcacaggctaaagaaaaagggatcagtagatttatcagcacgcaccctgacgaggatcacttcggcggaattcatcttctcgacgacgcaatgaagatatacaacttctatgtggtcaagaacaaagccatcaaagaggatagcaccccttcatttgaacgatactgcaaattaagagatagcgataaagctttctatatatcacaaagctgttcacgaaagtggatgaaccttagcgatgatcagcgagatagctcaggcctgtctattctttggccaaaaacagacaactcgcattttgctgaagcattgaaagccagcgagtgcggtgaaagttacaataacatttcggcggtcgtgcgctataaactgaacgatggtgccagcgtgatgtggctcggcgatctggaaacagagttcatggaaaacatcattaatgatgtagaattacaggaaaccaccgtcgttttcgcgtctcatcatggtagagattcggggaaaatacccaactcctggctagataaaatcaaacctaaagtgatcattatcggcgaggccccctcccgtcatttaaactactacacgggctacaagaaaatcacgcagaatcgtgccggtgatatcactatggagtgtgtcggcaataaagttcacttctatgtttccagtgaaaattatccaaataataagtttgataacgaaaacgctcaagatacagagcttggattttatatcggatccattaccgtataa

SEQ ID NO: 428100 - DNA, 606 bp, Serratia marcescens
atgtcgatcaagaaaggactcattggctggcttggcgcattcctggcctttgatatcagcatattggcttcagttatgctacaacaagtttcgctatcggcaagtatagagatagccaaaatagccagtacattcttagcgccgcccttattgcttttgctatccacgatgatcccaccgaacgccaaggcatcactcgccttctggcggcttaaacatgccttaccgggccatcgggcattcagcaaacatatgcataatgacaatcgtattgatgaccgatggctgcgagaaaacatcatccccttgccttccacagccagagagcaaaatgttgagtggtatagaatttacagaaagcatcataatgaaggtgccattcaggatatcaataaacgctttctgctttttcgcgacctggcgacaatatcgtttttatttctcattattctgccattgatcttgcgcgctacccatacggaagtgacggtctggccgattattctcgtctttctgattcaatatctcatgagcgcaatcgccgctcagcagatgggcatccgcctggtctgcacggcgctggcgattgaggcctcgaaaaaataa

SEQ ID NO: 428101 - DNA, 540 bp, Serratia marcescens
atgataacagcaagaggctcgttcagaaggctgacgctaggcgagatcacgctatcccgttttctctataaaaatgccatcgactacagtcttgttaaagtgcataacgcgagctatttcccgtttggtttgcagaatgaggaaacggccgttacgcctaatggtgaactttattggcctgaaaaacacttcagggaagatttttcgacagaaacaacgcgctacctatggtggttcatgcatgaaatggcccacgtatggcagtatcagatggggatgaacgtccggctgcggggaataatgagctgggcggtaacttataaatactcgctgcctgattactactccttagctgattatggtatggaggcacaagccagccttcttgcagattacttcatcctttctcgttatggcaaagaacggtggtttgaggtgaaactgatgcaaggtattataggtccagatttgaaaagccgttatgagcatgttttgaaaggatttcttaatgctcctgccgacaggaaaaacctgaaatga

SEQ ID NO: 428102 - DNA, 426 bp, Serratia marcescens
atgagaagaatctataccctcatcatcatgatgatgttgctcagtggctgtatgcttgaaaagcaacgtttttacgctgcggatattacgctgcggggaaatgatctctgtttctctttaccgcaagcctacccaacacagagtggcagggtcagtctggtcagcatcgctattgaacaacggttggatagccaaacgcatgagctctggcgtaggaccactctaccaccgaagcccgttgagacgattacgcccggccaatgtatcccatactcgttcaaggcatttgagagcaatgtgccatacaccgtggcaatcagtaccgtagatcctcaggatgcagattccaaacgtttctggcagcgcagtttctcgctgaaaatcagcgacggacagattttgcaggttattgccagtgcggagtaa

SEQ ID NO: 428103 - DNA, 1188 bp, Serratia marcescens
atggctctcagcgatacaaaactgcgctcactacatggtaaaccatattcgggaagtcctgaagtatccgatgccgatgggcttagcgcccgcatttcgcccaaaggggtaatcaactttcagtttcgataccggtggcatggcaaagcccaacgattagggattggtaggtatcctgccgtcgctttgaaagaggctcgtgcaatcacatcagagttgcgcaccctctatgaccgagggatagacccgcgccaatattttgataaaagcggagatatcggcaacagggcaacggtgagggactgtttgaattattggaaggaaaactacgttgatgtcttgctacgtgagaacactagagagctgtataaatcgactgtcattaaacgtttaagtgatgcttttgaagggcgtccagtagcagagattaccgttaagcaatgggttgatttttttactcaagaggaaagggaaaacagcaggcgagcgcgtcaactacttgtccagttgcgatcagctatggggtggtgtatccgtcggcattttatacccgattgctcagtaatgaaggttgagcctcgtgacgtagggagccgttctgaaaccggggatagaattcttacttactttgagctggcagaaatttggatcgcaatagagcgcagcagagcgtccacttcaaataagcttttgcaccaaatgctcatgctctggggagcgcgattgtccgagttgaggttatctgagcgtcatgagtttgatctaagggaaatgctctggactgtaccaaaagagcacagcaaaacaggaaaggaaatccggcgtccgatcttcaagcaaattgagccgttgctggaaaaggcaatgctgacgtatgacaaggttcttttcccaggaaatctgatcacggaacctctaacgatctctgcggccaatcgttacataaaacgcattcgggaaggtttggatatagggtattggcgtgcgcacgatttccggcggacgttggtgacacgcctatctgaggagggagtagccccacacattacggaaagaatgctggggcatgagctgggtggggtgatggccgtctacaacaaacacgactggatagaagggcaaaaggaagggtatgagatacatgccgataagcttttctggcatgttaagaagcagctttctggttga

SEQ ID NO: 428104 - DNA, 195 bp, Serratia marcescens
atggaagatatacatttaattcccgagaaggatgtaatgaaaaagcttggcatctcttcgcgacaaaccttgtataactatcaaaacaaacactgctttcctaagcctattcggactcaccctaaagcatacttagaaaatgcagttaatcaatggatattgaatggcggcatcaaccagaaagctgcttcttaa

SEQ ID NO: 428105 - DNA, 765 bp, Serratia marcescens
atgaaattaggaataaaaaaagaattacctgttcttgcgattgttaccggccttgggtatttgtcagcgtacatgtttcaattcggaatgctaacttactatggaataccatttgaatttatatcagttgacattaattcaattcttttttccattatgattatttcttttgtttatatttttttattggttcccttttatttattaactgccactgccgtgtttgaagaaaataaaaaaataaagggcggtcttgtttttataggaatggagttgcttctcgcttgtattctttcattcgtatctgcaaagtatataattgaggttaaagaacctactattggtttttggtctgttttttcaaagacattattgttattttcaattatagtcttctttctaaatgtcttggttttatttgtgagaaaggtaggtaaggctataccagaaatatataaacacgtggctctaatggcatattcacctgcaactatagcggttccatttttgtgcgggctaatttattccgatttgcatgttggcgcttcattctataagggtactgattattttttggtgttggaaaatccaaaaggaattatcatagctaaatgtaatgaaaaaaaaggaatctcttataaaagattgaattcaaatgatgtagagtttgacactaactataatagacttataaacaaaagtgtagagaactgtgtaaaaacctggggtttagggggtaaaaagataaattcgctccataattag

SEQ ID NO: 428106 - DNA, 555 bp, Serratia marcescens
atgaaccacctaatgcttgaccttgaaacgttgggtaagaagcccagcgcccctatcttgactatcggcgctgtgctttttgatccgcgcaccggcgagcttggcgagcagttctacaccgtcgtagacctgcaaagcgtcatggccggtaaggcgacacctgacgcagatacgattatttggtggatgaagcaaagcagcgaagcccgcgcagctatctgcgttgacggtgcgccgtctttgctatcagcgttgtatgacctgaataagtttatccgggccaatgtcgccaatcctcgtagcctgcgcgtatgggggaacggcgctgtattcgataacgtgatcctgcgtgagtcttaccagcgtgaatgcgttccgttgccgtgggagtggtacaacgacagggatgttcgcactatcgttgagcttggccgcgaagttggctttgatcctaagcgtgatatgccgtttgacggcgagcgccacaacgccttagccgatgctatccaccaagcgaagtatgtttctgcaatttatcaatacttgctgttttag

SEQ ID NO: 428107 - DNA, 897 bp, Serratia marcescens
atgaacattaccgttaattcatacttctgtggtgcagggctgatggatatcggcctgatggatgccggtatcaaggttaaccaggcgtttgagctggacgctgacgcatgcaaaacctaccggcacaacctcggcgaccatgtgaagcaatgcgacataagccaagagcttgttttcgagcaggatacctgcgacgggatggtgtttacgtacccctgcacgaaatactcgacgatcggcgatatccacggcgtgcgcaccggcgatgatttgttcctgcatgctcttcgtcatttcgcgctggcaaagcctgagttttacgtgatcgagaacgtgccggggatgcgcgcctttcctgtcgtgatggaggcgatgacccgcatgcctgattattacattcaagtgttctgcccgatcaagtctgagacgtggttaccacagaagcgaagccgcctgatcatcatcggcacccgtcgcaccttcgccgtgcgcccgccggaaaattcagcgcgcatcccgctgtcagcgattctggaagatgacccgcaagttacgctgccgtccgccatcgccaagcgcatgagcggcgcttaccgagatttgcccatcatcagcgacccggcagctggcgatcttgcgccgacatgcgtcgcccactacgcgaaagacaagagcacccgcctcgtagtcgataagcgtttcccgttgggtgtgcgtccgtattcgaaacgcgaatattcgcgcctgcagggcgttcctgattggttcaatttccctgtgtctgataccgccgcttacaagcagataggaaacggcgtgagcgttcaggtgggtatatgggtgggtgtggagatgatccgctatatggggcaagtaaggggtattcagcatggctaa

SEQ ID NO: 428108 - DNA, 219 bp, Serratia marcescens
atgagcatcaacctgaataatgcgcctttgtggattactgcgaaggcgctggaaaaattaaaacagttccgcgccggtcgattatttcccaaaagaacctatggcaagaaatacctgaccttccgtgtaaataaacgctggcgcttactttcagaagacgacggccataattggcagttgcttactcacaatgattacaacagcgtgatcgataaataa

SEQ ID NO: 428109 - DNA, 816 bp, Serratia marcescens
atggcaactttaagtcagcgttattctgcaaaagaaagcatcggttccgatatcactactcgcaaaacgtttctggttccactcagtgaaatttatgctgaagacggctataacgttcgcgaattaaatcaggcgcacgttgaagagtttagggatgcgtttattgcgggggaatatataccaccgctggcagttgaagtgactgagcaaggcgtgaaggttatcgatggccaccaccgattccacggtgcgctgttggcaagtgaagccgggcatgaggtggcgcgtcttgagtgtaaggattttgtgggtactgaagccgataaaatcgccttcatggtcaccagttcgcaaggtctggcacttacccctatcgagcgcggcgcagcctaccaacggctggtaaatcagggctggactaacgcggaaatcgcaaagaaagttaagcgttctgagtccgatatcctccagcatctgcaattgcaggaatgcagcccctatatcaaaagcctggtgcgctctggttccattaactatgccctggctattcaaattaaccgtgagcatggtgtatatgccgaccgtgaagccgcgcgcttgatgaaaaaggccgaagaatccggtaagaaaaaaatcactaagagcgtcgcccagccacaattcagcgccaagaaagcccgtagaatgctggaactgctgtttgatgctgtgccaatcgtgcagggtgataccgattcactgatgttagccaaaggcgttaaagatgaggtcatgcagataattaatgattatcgcaatgaaggccaccagcaatga

SEQ ID NO: 428110 - DNA, 810 bp, Serratia marcescens
atggaaatcaccaacaataacgagtctgtaaagcatattgccgagttggcagtagcaaacagcttaattaaaaccgatgttccctatgctgttgtgcctcgcggctactctttggagtcgctgaaagactacatggttgatgagcagcaggttaaacagcatgtggttgttatttctccaccctcgttcatcgggtatgtctctcgcttcaaagatgagcgcagtgttatttttgccgatactgaaaacacccgtttccgtgcgtttattgactaccacctggacagtaaaacgcctttcaaaaacacgcactatgtaacgtatgactgcccgctttctgatgaatggaaggcattcagtaaatacgatgctgaaaaaatggatcaggtaacgttcgcagagttcatcgagcagtatattaaatgtattgcccctgcatctgactctaaccctacctctggcactgcccttctggaaatggtgctggcattccaggaaactcgcacgtctgagtttaaagcggttacccgcttgaacgacggcacctatcagatggctttcagcaatgaaaaaaccggcagtggcaacacgaaactgcctgagaagatttcgctggcaatctcaccgttccataacggcaccccatatcaaattgatgcccgtattcgctaccgtctccgcgaaggcaagctgattctttggtatgaactgattgacccgaaaaaaatcattgagcatgcctacaacgaaatcatggtcgatctgcaaaaccaactgccggacgtgcctgtattcgaaggccgtatttaa

SEQ ID NO: 428111 - DNA, 363 bp, Serratia marcescens
atgtctgaaagcaagtgcactccctttagccagcagctggcttatatcaacaaaggcaccttagaccaggagcttaccgaagcgctggccgaggttattaaaatggttcgcgaaaccggcaagaaaggcgctgttactttgacgctgaattgccagatgttgaacagccgcgacgaaaacacgatgaaaatcaccccgaacgtcaagaaatccattcctgaactggatcgggctgacaccattatgttctcaaccgctgatggcgatttaatgcgtgatgatccttctcaagtgcaaatggatttgcgtgttattgacacctcgccatctgttgcgccgattaagttgacgcaaaacggctaa

SEQ ID NO: 428112 - DNA, 129 bp, Serratia marcescens
atgatcaaccacaatgctaacacaatcgttgtagacggtatgcgcgttgtcccttccgtgcaggccgttcgcctcaccttcttttcccgcctggtgaaaatcctctgccagaaaggccacccgctctaa

SEQ ID NO: 428113 - DNA, 711 bp, Serratia marcescens
atggaaaagaaaaaggttttgacgacggaacagctcgaagatgctaagcgtctgaaagctttgtacgagtccaagaagaaagaactgggtttaacccaacagcatatagctgatgctcttgatattactcaaggtgctgtaggtcattacctcaatgggcgtaatgcgctaaacctgcctgtggcggcatcctttgcaaaaatcttgcaagtgtcgatcgccgatttcagtcccacattagagggtgaggcgcagcggatgttagcgcatgagacctcaaacgttaaatttgctgggccttataaaaaaggcagggagtatccgctgatcagttgggttcaagcgggagcttgggcagaagcaatggagccatacactatcgatgagatagatgaatggttcgagtctgatgcaaaagttttcggtaaagcgttctggctgcgtgtctatggtgattctatgaccgcgcctacaggaatcagtattcctgaggggacattagtcctaatagatacaggtcgtgatgccgtcaacggtagccttgttatagccaagttggttgacgccaatgaagccacattcaaaaaactcatcatcgacggcgggcaaaaataccttaaaggtctgaaccctgcatggccgatgaaagagatcaacggcaattgcaagattatcggcgtcgcgattcagaccatgatgcggttagtctaa

SEQ ID NO: 428114 - DNA, 534 bp, Serratia marcescens
gtgtcacagcaaaaagcgccggactggcaggcagaaaaacagccggaatgggtggtcagtgtcgcccgcaaaatcatcactggtctgcctggtggctatgctgaggctgcacagtggctgggggttacggaagacgcgttgtttaaccgtcttcgcccaaacagcaaccaaattttcccgatcggctggctcatggttttacagcaggctggtggcaatacccactttgccgacgctgtatcccgccagtctcgcagcgtgaacgtgcgtctgccagaagttgaagacgtcgatcgagacgacatcaacgccaagctgatggaagcgattgagtacatcggcaagcactccgaacttgtccgcaaatttaccgaagacggcgagatagacgccgacgagcgtaacgcgctggacgccaattcctaccgcctgattgcgacattccaggagcacatcctattgctctatagcgtgttctgcccggcggaagtaaccccaatccacaaagcgaagtggcgcgctcctatgtcgtag

SEQ ID NO: 428115 - DNA, 300 bp, Serratia marcescens
atgcagcctgcatcgtttgttcaaaccgccatgcctgcggtgtattgccgcgaggatgccgcatggattcaagaccagctcggtaagttaccggacggacagcgcgggaagattgcgcacgcctacgaggaggcttaccgcacagcgtttgacgccgaggagatttcttaccggcaggagaacgcaggccgcaaagcggctaacacgcgcctgcggctgtacgtcgagcggtattcgcgggcaggccagggcatgacaaccgcgccaccgctggtggggcaaaacagggtggcggcatga

SEQ ID NO: 428116 - DNA, 972 bp, Serratia marcescens; identical to SEQ ID NO: 425566

SEQ ID NO: 428117 - DNA, 936 bp, Serratia marcescens
gtgaaagagaaagacttccgcattgaagaactcaggattgtccgcgtcattgccgaaacggcgagcgtcagcaaagcggcgcagcggttggatatgccgcagtctaacgtgtcgcgcgccctcaccgcgctggaacggcggctcgggttggaactgttcctgcgcggcccgcgtaccctggcgctgactgaattcggcgagcaattcttgcggcgcgcctcgcagttgctggacgaacacagcgatctgctcgatatgtccggcacctataaacgcagcctgaacggcatggtcacgctcggcgcgccgataggcatccacgctttcctggcccgttatttactgccgccgctgctgcacgctgcaccggcgctgactgtcgatctggtgacccgcaaccccgacgaacgcgagaaaaagtacggcgcagtgttcgacagcgactgcgatttgctgatcagctttttccagccgcaaaacgaaagcctgatcgccaggcccttcacccgttttcgcgtcgggctgttcgccgcaccggattacatcgcccgctcgccgctgacagcgctggatgaactgccgcagcatcgctgcattaccttgcgcatgctgggcggcattcgcaatacctggagcggctacagtgcgcagggggagttggtgcaggtcgagatcggcggcgccagcgtttgcgataacattctgccggcgatcgagctggccaaacagggcctgggcatcgtctacgccccgtactattccgtcgccgccgagctggatgccggcacactgctgccctgcctggcgcgcgagcgcggcatcgatatgcaggcctacctgatttaccgccggcgcggcgtgttgccgcaccgcgtgcaggtgacgatggacagcatcatggagagcgttaagctgcacgcccaccgcctgatgtaa

SEQ ID NO: 428118 - DNA, 447 bp, Serratia marcescens
atgatctatttcccgcggccgaaaccgagcgagatggtgagccagcgcgcactcgacaatattctgaactataccaaccagcagtttaagcaggcgatgggcacccactttacgctggtggacatgccgcgcgagcataccctgattttccgcggcgccatcacggcgatcgacacgcagaagaaggggctgcaaatctatgaagtcttgccgatcaccctgctgattgccgcgacgcaaagcgtgaccgggcaccgcaccatggagagcgcggtctatatggaaggcgagtttatcgatgcggcgactaatcagccggtcattaaagtggtgcgcaaggcttcgggggaaaatctcaataacgagaaagcgcagcttaaagtcaccgacgtgaagaatgccatcgatatcatcgccaacgatatcagacaatataacacgctataa

SEQ ID NO: 428119 - DNA, 345 bp, Serratia marcescens
atgtttcttaactatttcgctttaggcgtactgattgcggtattcctgattttattctacggcgtcattattattcatgacattccctatttgctggccaaaaaacgccggcacccccatcaagatgcgattcacgttgccggttgggtcagcctgtttacgctgcacgccatttggccgctgctgtggatctgggcaacgctctaccggccggaacgcggctggggcatgagtgagaaggcagaaccttcaacggacctgcaggcgcgcatcacgctgctcgaagccgaattgcaacgcctgcaggaaaagccgacggcggttcccggccccacggcaagttga

SEQ ID NO: 428120 - DNA, 1137 bp, Serratia marcescens
atggatttgctcattattctcagctacgtggcgctgagctacggcgtatttaaactgtttcgcattccggtcaacaaatggaccgtgccgaccgccgtgcttggcgggatcgttatcgtcggcgcgttgattctgacgatgaactacaaccatccgtacagcgatcgggcgcagaagatcgccgtgtcggtgccgatggtgccgcaggtctcgggcatgatcgttgaggtgacggagaaaaccaacgtgctgctgcgcaaaggcgaggtgctgttccgtcttgacgacagccgctaccgtgcgcggctcaccaggctggaggcggatctggccggggcagaggcggagatcagaacgcgccgggcggcgctcagcgagtccgccgccaacgtgcaacgggcgaacgcagagtatgagcgtgcccgtaaggactaccagcgctatgcgaaaggggcggcgatgccggtcaacccgttctcggagcaggacgtcagccatgcgcagcagcagtaccaggcgcaatccgcggcgctgcaggcggcgaaagctcagttccaacaggaacaggcgcggttgtccgggcgctatgacggcgaagacgccacgatagccagcctgaaatcgcaaattgccgaggcgcgttacaacctggaacaaacggtggtgcgtgcgccgagcgacgggtatgtcacgcaggtgctggcgcggccgggcacggcggcggttcgcctgccgttcaaaccggtgatgatctttatcccgcagcaaaagcgccaggtggtggcggtgttccgccagaacgccatcctgcgtttggcgcagggggatcaggccgaggtggtgttcaacggcttgccgggacaggtttacggcggcaccgtaagccgagtgttgccggcgataccggacggcagctaccaggccagcggcgcactgcagggcctgagcgccacgccgggccgggaaggggtgtacgtgatgatcgatctggcggccaacccggatctggctcacttgcccgacggcgtgagcgctcaggcggcggtttataccgggcacttcgagcacgtctccgtgatgcgcaaagtgctgctgcgcatgaccagctggctgcattacctttatctggatcactag

SEQ ID NO: 428121 - DNA, 702 bp, Serratia marcescens
atgcagattaatataattatgatttttatggctttgtttttaagtgtgctggtaattgttctatatttttttgtatcacagattaaaagaagtaaagaaattgaatatgatacacttaaacaaaaagcaatgatggatttggtgcgtgaatcctatgaaaagcaagtttatatgctgaacaagcaaatgatgagtgatgaaagtcggtgggagaaaattaatcatcttcttatcgaagctcaggctaaaagcaataataaacttcgtaaagatagtgtggggactcaatttttcaatgatttgggtattgaaattgatcgagttattgagaaaagacaggcttttgttttaacgccctttaatgagatctttgatgaaacgtatagcaatattaaagatgccgtcgcctcgatgggaattccatgcacaaggggtgatgaagagctaaaaacaggaagcgtattatcacacattgtaaatcttatgcttgaatctaagataatcattgcgaatatcgatggacgaaattcaaatgtatattatgagttagggatagctcatgctcttggaaagaaaactatacttatatcaactgaggttgacgatatcccttttgatcttaaaactcagcggatattgttttactcaacgaaagaagaattaaaagagaaactgttgccctatataacatctagtatttga

SEQ ID NO: 428122 - DNA, 1443 bp, Serratia marcescens
atgtcaaaaatcaattcgttaattagcctttctagtcttgaaggtatagacatcgaaacactggactctttaggtgtaaccgatgtagttttaaacgctgatacagctcttttcattgatccactattacttagtgaaagcgttcatcctgaaataagaataaatgccactgaaaaatataatgaaaagttcagaaagataatgaaatatctgagagcctcgaagctcaaaaatgatgccccctggaaggcggctaagaaagagttcaatttctcggaagttagtttcacttgcttaggttatagcagcacaattcacggctctggatggggagaccaaatcaccaactccactatggatgtcgcaaagcaaattatagatttaggtgtcgacgatactgatttcttcatgggactatcattatttgaagaaggaattggccctgaccgaattagtgatatgactactaacattatttttaatgagttactattatttacatcaagaataaatgaaattttaaaactaccaactaaaaaattcaaaataaagaaaacgaattttgagtttgaaacattaatcaatcccacaaatgattctcctcttatgcttgttccaaacgacattgttcgagcccttcccattgttactgattggagtgatataggcaccgcagcccgccataacgatgagctaagggaaaagcttaactataaaataggtggcatatggacgagcatgtccaggcaggaaaaaaattatgcgaaagatcttgcgctacgaagtaaagatgcatttgaagatgtgctaaatttaattagatcagttgataaagttccctatgatgcaaaagcagacaaaaatggagaatttttttggcgggagattgtaagattaattaatcaagattgcccacttgacttaagtcgttataataaagaaaatttatctgaagaagagttcattgaattagttaatactatagtccttgaatttaaagacttaatagagaacaaagggatctggaaagaattatggagtgaggaaggtaagccaagaaaggaaaaggccgtacaacgtttgttgtttacagttgcctactcctattgcaaagctaacaacttagatatttcacctgagagcgactctggaaatggacctgtggattttaaaatatccaaagggtttaataaaaaaatagttgttgagataaaattatccactaatagttcattggttcatggatacgaaaaacaacttgaaatatacaaaaatgctgatgatacaaaccttggtattttcattatcatggatataggtaagttaggtaaaaagtttgaaaaaaccattcaagcaagaaataaattcctagagacaaataaaattgcatcagaaattataattatagatggaaaccaaaaagcatcagccagtattagataa

SEQ ID NO: 428123 - DNA, 1194 bp, Serratia marcescens
atgacgcgtaatacactccccctcaccaacactgaagtacaaaaaaccagagcactcgagaaagacctcaccctacatgacggagacgggctctttcttctggtaaaagctaatggcaaaaaacaatggcgcttccgttatcagcgaccagccacgaaacaacgtaccatgatggggcttggcccctacccggccctgtcacttgccgacgctcgagcaattcgtgcagattacctttccatgcttgctaagggtgttgatccgcaaaccaaggccgagcaagcagcagagcagcaccaaatcgctctagacagcattttttcaaccgtcgcggccaattggtttgcccttaagcgaacaagcgtaaccgaggattatgcgaaagatatctggcgttctttggataaagatatttttccaagcatcgggtgcatcccagttcaggaaatcaaggctcgaacactgattgaagcattagaacccattaaagcgcgcggtgcgttggagaccgttcgccgtttgatacaacgcatcaacgaaatcatgatttatgctgttaacactggcctgattgacgcaaacccagcatcaggggttgggatggcatttgagaaacctaaaaaacaaaatatgccgacactgcggccagaagaattgccaaagttgatgcgctctctgatcatgtcaaatctgtctgttccgactcgttgtcttattgagtggcagcttctgaccctagtgcgcccttctgaggcttctggtgttcggtggggcgagatcgatctcgataccaaactctggacgattcccgccgagcgaatgaaggctaagcgtgaacaccttgtccctttgtcacctcaggctttagatattttggaagtgatgaagcctatcagtgctcaccgtgaacatgttttcccaagcaggaataacccaaagcaaccgatgaatagccaaacagcaaacgcggctttaaaacgaataggattcggggggaagcttgttgcccatggtctgcgatctatcgcaagtacagcattgaatgaagcggcttttaatgcagatgttattgaagcggctttagcccatagtgacaaaaatgaagttcggagagcttataatcggtctacttatcttaatcaacggaaagaaatgatgaattggtgggggcttaaagtaaaaccttatccttag

SEQ ID NO: 428124 - DNA, 1173 bp, Serratia marcescens
gtgagaattcgttacattgtcccgttcaaacgcaaaatcatcattgacgatcattgggaaatcccaatgcaaggtgggaaactacgcatcattgaagagagtggttacgccaaagctgttgaacttactttcgaaaagcagcctctggaatacgcacctagctttcagaaacgagccccttatgaggctatgacaacgataaccgggcacgatgaacgtatagcattcgtgaaacgtcaactcgataacgcagccacatttctagaatgcttccatgatattgaactcataacagaggaaattgaagccaaatatgaaggagaatccccggaggaagaaacgcgactatccataaagagtatatcaatgagcagacatgattctgcattgcctcttagtttcgatatgtttacgcgggcgcttatggctgctgagacatatgatgggccgagatttgaagttgcctttgtaaaaagtgctcgcaaaatgcttaaaaatcaggaattcataaattccttccgctactcattcctgttgatcgaatccctgtatgggaatggtcaatttaaaacaccaagcttgaaggctacgctaaaatcaaaccaagaatttcgcaatattgttgagcttgccatcaaagatatgattccagcaaagaacgatcggaactcagatacggcgaagctcattttgacgaaaccaaaagcagatgacattattaatcatctagtcgaaaaacggggtttctattttcacgggaacgtcaaacggaaagacgcctggaaacccgatggacaagatgcggcagaatctctggcgcttcttgcaatagatattatcacaaaaatcactatgaaagcggcagagccgatgttcgtcgcagaactagagaaacgccactttgaagatgcaatgcatgtaggagccaaaatcgtgtttgaaataaaattcagattccgtgaacctgaagaaaatttcgataggcaacatcaaatcaacatcactatgccaggaaccaaagtcacccctcgaacagctttcgctgtcgctcagcattttctacatgtattccagcataatcagcctgtatcggctctatgtgaagctgaatgcaaaatacaggaaaccggggaaaaggtatttaatctcacaattcatgccaaagaagaatga

SEQ ID NO: 428125 - DNA, 1155 bp, Serratia marcescens
atgaagaaaaagctgcaattggcactcaacaagtacaagccgatcccctctaagcttcaaggggagagcgaagagagtccgaaaacgattattgatctggaccttgccgctctctatcaccacttttacttggacacctacggcactcagcccccgaatccggatcctgcccagtttgagcacatgagattcctagtgcctgacgatgagcttcgatttcaaggtgaaggggtgggcgcttcaaccaatgccaagcgagccaaatccagcgagatggggcaggcattctgtcgctggttcctgcatgagcatttgggaattaaatacttcgcacatttggatcgtttgatcgatgacacaagcgagaatgtgcgtggatttactttacagcgtaccgcgccaggcgatatgcctgactacctgtgcagtgacggggcaggctccgtcgtacttgcagaggccaagggacgctatacttcggtggggttccacacgaaagagtttggggattggcggaaacagttcacgcgggttcgggtgttggacggcaaaggcgaggctgtttgggtaaaaggtcatatcgtggccacccgctttgcaaccgaatcgaaacccaaggttcagaccaagttgttcgcagaagaccctatgacagagggccgggagccgttaacgggagaaactgcgcgcagtctctccggacaaataatcggaagccattacggtaatgcgctgatgaaaatcgaccaaccccatttggctctagccattagaagatcaatgcgtttggagtcgcaaatcggaattccagtaaccgtctggaagttcgcctttgaagaccaacagcgatacttcgtaggaggctactacgccaaagaaaccaacgagccgttaattgacttagaaaacgggcagaccaaataccgcagccgggatcccttcagactaggcgtgcactcagggacgtttgtgggcgttgaactttcggtcttcgagcacctggtcaaggtcgctcgaggtggcgcgcgtttgttggatggcctaccggaggtcgagcccattcgggagatttacagcggaataagcatgttgcgagacggctcagttatcggaccgttgtcaatgttcatgcctgtcagctcacgtcgttactaa

SEQ ID NO: 428126 - DNA, 1077 bp, Serratia marcescens
atgtctgagataaccgagccaaccagtcaggttttactgtgctcaaattgcttcactgatgaagggttgcggatagactctgcaaagcatggttttgaacaacaaggcgaatgtccaaattgtaaaagtccggatgggcaaaagctgacccaagaccagattttaagtctggcctggcgcttcttcgtaagtggaaccaccgtccgttgtgactacggcgcagcaccagtaattcagttcaacgagaaccattatggccaatgcgacatcgccccgtcaacgtggcttaagaatgacgtaaagattatcgaggaggccgctaaaattggttttttccattacaatcctcgattgtggatggtcggagaagtcgagccgctaaagaggcttcaagatccatcgacacgcccacagaccattgaacgaatcctgagagaatatcctgaatcaacgctctgccaaggcaacaaattttaccgtcttcgcgttaaccctgaacgaccagctgattcgtccgaatatgacagccctcctgcggatttggctggcagaggtcgtttggattctccgggcttatctgtaatgtatggatcgcaagaccttgatgtttgtattcatgaatgcagggcatcaacggaggatgagctttttgtcgcaactttaaagaatcagcaggatctgcggatactggacttgactcatgctttggaagaaacagaaaccgagtttgaaagcctggatatggcaatccatatgctttttcttgctcggtctcactcatatgaaatcgcccgcgacatagctcttgccgctaaagaggctggttttgacggactaagctatccgtcctttttcagccttattcgcactggtagccatccgttcgagacggcttatggcttgtcgcttcgacgtttccatccggaaagggagaaatatgttgaggcaaccaccattcgtaatcttgcgctatttggtaggcctgtggagaaaggcttggtcagtgtcgaatgtatcaatcgtctaatccttacccaagttggctatcgtgggcattttggaccagttgagtattga

SEQ ID NO: 428127 - DNA, 333 bp, Serratia marcescens
atggaacagcaggtgacctttgagtacacgcttacggtaaagcactgcatcgacacaatagcgaaccatctccgtcgcgttgatatcgaaccgcgcccagtgattgcggatatactcactcagtttgagtgcatcgttggccagttcccacaaggatgtcagatttgccccgagctgctcaaaattggctgtgcaaagtaccgggagtttaatcacgctgaaggttaccgggttttgtattccgtagacggaaggttggtaacagcacatgcgattttgtcacaccggcaggacatccagcagctgctgtttaagcgtctcatcatgccctga

SEQ ID NO: 428128 - DNA, 1782 bp, Serratia marcescens
atgaagtttttccagaatttacaaaatgatggcatctcctcacgcgcgcagatccgcctgctggacaacaccttcatgcggctggtgttcagcttcactgccgtgcctttcgtcggcatcccgttcgccatctggatttatttgctgggggatgaactcggcccaaccattgcctggatcatggtttacctgctatgcgccgtggcgatcagaatatggcatcggcgctaccaacgcgaggccaaagaaaatgatgaagacgccgtgctgcgccgctggctgccgcgcattaataaggtggcgtttattcacgggttggggatctcatcactctatttaattaccccgcagacccataactttgacttttttctgctgctcaatatcagcatcgccgcgatcgtcgccgccaacgcaacgcatctgacgcccgtcatcagcacctttacccgttttttcttcgcctcctgggggctgctgaacctcggcatcatctggcggctggaagacgtgatgttcatcgtgctgatgctgaacttgctgtacggcttcgccatttaccgccacgccttaacctcgcatgcgttctttatccagcaggcgttgctcgaagaacaaagctcgcgcctggcggaacagttccggcaagctaaagaggaggcggaacaggcgctgctggacaagaaccagttcctgaccaccgccagccacgatctgcgccagccggtgcacgccatgggctttctgatcgaggccatcatccacaaaaaccgcgacgacagcctgacgccacagctgctggatctgcagcagagcgtgcgttcggtgcatttgatgttcaattcattgctcgatctcagcaagatcgagtccggcaacgtgcgcaccgccgccacccatgtggatatcggcgccctgctcgactcggtgatcaccctgttccgcgaagaggccaacagccgcgccctggcgctgcgcacctggcggcctaaacggcgcatcagcgtgatgggcgacccgctgctggtgcggcaatcgttgatcaacctgatccaaaacgctctgcgctacacgcaacggggcggcgtgctgatcgccatccgcccgcgcggcgccgagtgcctggtggaagtgtgggacaccggcgtgggcatcgccgacgaagagaaaagcaaaatcttctccccttactaccgccccgagctggcttggaaaatcgacagcgccggccacgggctggggctggcggtggtggcgcgctgcgccaagctgatgaaggtgaagtacggcatgcactccgtcgaaggtaaaggttcgcgcttctggatgcgcttcacgcaatacatcggcgaagacaaagcgccggaaaccgcggccgcctacgacaacaccgccacgcccatccgctatgcgccgctgcgcggcgcctgcctggtggtggacgacgatcccttggtgacctccgcctgggagagcctgatgagcacctggggcatcaccgtgcgctgcgcggcctccgccgaggaagccttcgccatcgtcgacgacggttttacgccgttcgccgtgctgtgcgaccagcgcctgcgttccggcgagagcggtttcgacatcctgaaagcgctgttcgaacgcctgccggacgtgagcggcgccatggtcagcggcgagttcaactcgcagatattgcaagaggccgagcaggaaggctatctggtgctgcgcaaaccgctggagccggccaggctgcatgcgctgctgacgcagtggggggccggctag

SEQ ID NO: 428129 - DNA, 534 bp, Serratia marcescens
atgaacgcattagccgaggaagggacgttacgacgtatgaccatgggggaaattaaattggctcgccatatatatggaagctcaattatatatggtcgtgtatggatacactgtgatagctatttcccgtttggcttacaaaacagaagttatgccatggcacctaatggcgagttatggttacggagggaactctataaagacgatttttctgataacacggttctgatagaagaaaaacatcttttcatccatgagttggggcatgtatggcagcatcagcatggacaatgggtaagaatgcgtgggttgtttagttgggcggctgagtacaactatcgtcttgataagaataaaattactgattactcgctggagcaacaagcttcgatttttgctgattactggctgctgttggtttatggtattgaaacgtggcgttattatcaacgtcctggacgagtgggcaagtacaggggaaccgatagtttgcgtgacattcatgcactttatcgaaaaattattaagggatga

SEQ ID NO: 428130 - DNA, 1230 bp, Serratia marcescens
atgagcgacaaactgctggatcccccctgtgcggcgctggggcgcctgccggcccctctggtgctgctgctggccgccgccagcgcctttagcgtggccaacgtttactatgcgcagccgctgctggacgccatcgcccatgatttttccatcagcctggcggcggtcggcatggtgatcaccgtgacccaactgggctgcgcgctggcgctgctgttggtggtgccgctcggggatcggctgaaccggcattggttgctggcggggcaacagctggggctgatcggcgcgctgctgctggtgggctgggcgcacagcgcgccctggctgctggcggggatgttgctggtaggcttattgggcaccgccatgacgcaggggctgatcgctttcgccgcagcactggcggcgccgcaggagcgcgggcgggtggtcggtgcggcgcagggcggggtggtgctgggattattgttggcgcgcaccctgtccggcgcgctggcggacgttggcggctggcgcacggtgtacttcttctccgccggggtgacgctggtattgctgccgatcctgtcgcgcctgctgcctgcgccgcgcaccgctcccagtacgctgagctatcccgcgctgctgcgttcgatgctaagcctgttgctgcatgaccgcacgctgcaaattcgtggcatgttggcgctgctgatgttcggcgctttcagcctcttttggagttcgctggtgttgccgctgagccaggcgccgttcaacttcacccacgccgcggtgggggcgttcggcctggtcggcgcggtgggcgcgctggcggcggtgcgcgccgggcatctggcggatcgcgggctggggcaggcggccagcggcgtgtgtctgctgctgttgacgctggcctggctgccgctcggtttgctcggcagcggcctggtttggctggtggcgggcatcgtgctgctggatctggcgggccaggcgatccacgtgctgaaccagagcatgatcttccgcgcgcacccgcagtcgcacagccggctggtgggctgctacatgctgttttatgccgtcggcagcgggctgggcgcctttgccggcacccatatgtatgcctgggcgggctggagcggcgtctgctggctgggggcgggcgtcagcctaagcgcgttgctgttttggcggctgacgctgcgcggcatgccgccctcagcggcggcggtggagcagtga

SEQ ID NO: 428131 - DNA, 681 bp, Serratia marcescens
atgcaacatcaaacggatactcgcttccccgatgccgcggcggcggactacgatcgccgtattctgaccctggtgcccggctatcagtttgctcaggcgctgctgacggcgacgctcgcgcagacgctgccgaatgacgccacgctgttgctggccggctgcggcaccggcagcgaactgtcggcgctagccgcagccaacgccagctggcgtttcagcgcagtggaaccctccgccggcatgctgggggccgctcgcgccaaagccgaagccgcgggttatgcacagcgggtgagtttccaacccaccttgctgcaacaagcgccgcaaacccgccacgacgcggcggtgtgttcattggtgctgcactttatcaccgacgatggcgccaaactggatttcctgcagcagttggcgcagcgcctttcccccgccgcgccgctgctgctgttcgactatcaaccggagggcctgcccgccagccactaccaacactggctgcaaagcgccgggcattccgcggcgcaggcgcaggaggtgatcgaacgcacccgccgcaactggcacccgatgacggcggcgcgcagccgtctccttctggcggaaagcggcttcaccgcgcctcagcagttgtgcggtgcgctgggcttccagctttcactgctccaccgccgccgctga

SEQ ID NO: 428132 - DNA, 312 bp, Serratia marcescens
atggtgactatttgggaaaatattcatccggatagtctatcagggaagatctgcctttctttttgtgaggaaaaggagttatttctctggtttattgagcatttgatgaatgaagggatagtaaaacttggcaacgggggcgagtttttgaaaggaacagtgaaagagcagctcgataaacttagagccagtttccctaatactcctgaagagatggagtatggcgcttttaatgggtattggtttttatctgatgcatgtcccgctggccttgtctggattcacgaaaacggttatcaagattggacttag

SEQ ID NO: 428133 - DNA, 888 bp, Serratia marcescens; identical to SEQ ID NO: 427900

SEQ ID NO: 428134 - DNA, 1536 bp, Serratia marcescens
atggtgaccagtgcagaactagaaacactaagggaagtaatttcagaaaaccttcgagtccaacgaggaactgatccagttgactacattagtgtaggaactgcattacaagacgcaaaatcgaaacaaaaccatgctatatttgcgcgccgaggttgtggaaaaacactattacttcatcattcttcacgtatgttacgtactgatttaagaagcatatatttaaattgtgaggatttcaaaagacattcattcccaaatgttcttattgaaattctatcatcaatattcagagaactcgacaaaaacatttcaggatggttcggaaagaagaaacgactcaaagggctaatacaggatattttagttaaactagaaagacttcatattgaagcagattcgcatgaggaagatattataagtaagaattctagcgaagaattggttggcttcgatgctggatttaaactaaaaaatatatctgcggaagccaaatcctcagcaaaagagaatcaagaaattgaacgttctttcaagattcatcgtgaaaaactacaagaactggatagatggttgccgcgtctaaaagaagatctccgagaattatttgatgcatcaaaaatagtcaaaggactgatacttcagatagatgacctatatcacttaaaacgtacggaccaagctttcgttgttgattacgtacatagactttgcaaagaccttccaatctacttcaagatcgcaacacttcgacattcatcaacattgtatgctgatcgtgatggtcagcctattggtgcacaagaacgccatgactatcaaccaatcgatatagattatacttttagtaacttcccgaaaaccctacaacagaacagagccattttagtacaattcggaaagcagtcaggattagaagaaaaggacattatggggctatttaaaggggagggttttgagcgtttagtaatggctggagggggtgttccacgagatgtattatcattatttttacagctacttaatgagacagttcaagatagtggaggtaaaataggtaaggatgaagttcggttactctctagaaagaattttgaaagaaaaatagaggaactaaagcaagactctaaagacgatgaacaagacgatctaataaagggaatatatattataaaaagcttttgcttagacaaaaaaataaatatattcgttattgaagaaaaactacttcagcaaaatgatatttttagagctttgatttatagattattggattatagaataattcataattgtgcaacagcattaactcataagtcagctgaaggcactttccaagcgtttgcagtcgatatcgggtgctatgcacactttagaaaattggaaggaaggtttaatgagattaacatttcagattcatcagcaaaagagaaaatgagatccactcctattctagatgaaacgaaactaaacaacatattaggaaagttacctgaaaatgtagagaaatctctattagaagatagtgtggagtga

SEQ ID NO: 428135 - DNA, 909 bp, Serratia marcescens
atgacagcagccattaataccggcaaaagctattctggtttccgcccagccctggacttatccgcttccattcttgatccgtcgacgctatttagcgcatacaaagcgcggatagtagcagacggaggcaccattccagatgaatcaggttgccttgcgcggtttgagtttctggtaaataacgggatgtacagtcgagcgacgttctgtgcagcgccggcgtttggtttaaaagtcgatggtgctggaaatgtccaaaccgtttataacctgcttggctctgctggggatttgatcgcgggttcccaaggaactccaccgctacccatgacctacgatgccactgcgcgcgcggttatcattcaggtcacatcgggtgggggctggtatctcaaaagccgcacgaatcttgttatccagaaaagttcgacttatttgattgcaggccgcttgagcgacctcaatcgtgccgacaataacggaattactgccggatacaatctgacaggtttaccgatggcgtatcttcggacgatgataacgaacaacagcgcagttactgaggcgtggcgatatgggtcacgcgatagcgcatggcctgcgggtagtggtggtgcgctcaatgccgcaaccaatatctatgctgattacgtgccatcatctggcctgttcaaagtggatcaaggggttattgaggggtacgagaaagggaagttgcttgcgacctccgcgccggcggcgacgggaaaactggctgatttgagcagctacactacgccgatattgatcggtggtacgcagttagcgaataacatcgtcagtgcgtgctatggggcattcatggacattctatgccttcacaccgctgacgaatccgacgcgattctagcgtcacgcctagggatgtga

SEQ ID NO: 428136 - DNA, 738 bp, Serratia marcescens
gtgaagagaaagcaagaagtacatgtgagagtgaaaaactatgagcatgagaatggtgtgcagattcgagagattatacacgatggtgttacgctagagaatatatatacccaaaacggaaaggttcttccgcggataggtattgaggggtatcttgcagatcaaataaaagcatttacactgttggataaagatttaagaaatgttatagagtggttaaagatagctcaagaaattgacggtgagtctgatggaaataatgcttttcttgatgggtcaataaaatattcgttaatcataaaaagtttgtttgtatctatcctgacaacctatggtaaatgttttacacaggctacgggaaggcgatttacgttaaataaaaagcatataccgactgggtatgttgacttccatgagaaaatcatcaatgcaaggcataactatgctgctcataaagggatgcatgatcacgaggattgccgagtatctcttgttatatttaataaatgggatgctagaccattcgagatttttacggagctaagacagcatagtttcttgatagatcaaaagactccagttgttatagcggatttcattgaactatgtgagtctcttagaagaattttgaacgaaaagaaaagcacggtgattgaaaaaataactcgtgaaaaaattctgacaatcaaagagaagcaatggttaaagatgaaagggaaaagtatttcgttggattaa

SEQ ID NO: 428137 - DNA, 924 bp, Serratia marcescens
atgtcgcaggccgtctattttctgctgttgcccaacgtgctgtcgctggacgtcagcggcccggcggaaaccctgcgcctcgccgggcagttcagcctgcgttatctcagcccggcgccgcagatcgtctgctccatcggcatgacgctgagcggcctgcagccgttgcccgaacgcttggaagacggcgccattctggtgctgccgggcgtcggcgattcgcagcgctatttcgccggggaagaggccgagcaggcgcgccgctggctggcgacgctgcggcccgatctgcagcggcagcgcatcaccctggtgtgtatctgttccggcgcgctgctggcggcgcaggccgggctgctcgacggctatcagtgcaccacccaccacgacgtcatcgaacgtatccgccggcaggcgccggcggcgcaggtgaaagagaaccgtatcttcgtcgaagatcgcggcgtctacaccagcgcgggcatcaccaccggcatcgatttggcgctgcacctggtccaccgccactgcggctccggccgggcgcgcgacgtcgcccgcgatatggtggtctatttccgccgtgccggggacgatccgcagctgtcgccctggctgcgctatcgcaaccacctgcacccggcggtacaccgcgcgcaggacgtgatggccgccgagccggaggccgactggtcggtgccgcaggtggcggagaaggcgcacgtcagcagccgccacctggcgcggctgtttcgcaaccacgtcggcatcagcgtgcgggagtatcatgagcagctgcggttggcggtggcgcaacagcgcctgcagcaaggatatgggttggagaaggccgcgctggcggccggcttttcttccgggcggcagctgcgccgcgcccagcagcgccagcgctcgccgctatga

SEQ ID NO: 428138 - DNA, 627 bp, Serratia marcescens
atgaacctgtcgttgctggcggcgtatttcgccgccattttcttgctgatcgccacgccggggccggtggtggcgatggtggccaacaccgcggcgcgctttggcgcccggcgcgcgctgttgactgcgctgggcagcaacggggcctccttgttgctgatcggcatcgccgcgctgattatcaccgggctgttcgcggtggatatgcgcttgctgcagtggataggcctgctgggttgcctgtttatcggccgtatggcgatcgtctcgctgtatgaggatttatccgcgcgaaccccggatgcgcagcccgttgcgccgccgcaaaaacgctcggcgatcctgaccggttttctggtgggcatcgccaaccccaaagacattatcttcttcgtcgcttttttcccgcagtttatcgccgtcaccccctcgatcggcgccagcctgacgctgttgactgcactgtgggtgctggcggacttcgccatcttgctggcctatatcaccctgctgtcgggaacggcgctgcagcgcgcgcggcgggcgatctctgtcctgtcggcgttgctgctgttgggggtggcggtggtgggagcggggtatgcgctgtgggggctgctcggctga

SEQ ID NO: 428139 - DNA, 3840 bp, Serratia marcescens
atgcaatttataacaaacggccctgacattcctgagtctcttttgcaggctcatgaggaaggtcgagtggtatttttctgcggcgcgggaatctcatatcctgcgcgtctgccgggctttgaagggttggttaaggaaatttaccgactgaatggaacaaaaccttcagaacttgaacaagctgttttggatcgggggcagtatgatgccacattagatcttcttgaacgtcgtttgcccggtcagagacttgccgttcgtcgcgcacttgtgagtgcactgaaaccaaacacccgcatcaaaggtgccgtagatactcaggcagcgctgttacgtctggcacgtaatcgtgaagggtcactaaagctggtcacgacgaactttgaccgtattttccacgtagccgccaaacgtactcgccagaccttccacgaatattcatcccctatgctacctattcccaaaaatagccgatgggatggactggtctttttgcatggactaatacctgataagccggatgatacagtcctgaatcggctggttgttaccagtggtgatttcggactggcatacctgactgaacgctgggctgctcgtttcgtaagtgagttgttccgtaactatgtggtttgttttgtggggtacagtatcaatgaccctgtattgcgctacatgatggatgcattagcggctgaccgtatgctgggtgaaattaccccacaggcctgggctctgggtgattgcgaacctggacaggaagagcaaaaagccaatgagtgggaggctaaaggtgttacccctgttctctataatgtacaggccggtagcagggaccattctgccttacataaaaccctacatgcttgggcagatacataccgtgatggggtccagggaaaagaagcgatagttgtcaaacatgctcttgcacggccacaggatacgacgaggcaggacaattttgtcgggcggatgctgtgggcattatcggataaatcaggattacccgcgaaacgctttgctgatttcgatcccgttccttcactggactggttactggagacattcagtcttgagacacttgggcatgaagatttagcccggtttggtgtccctcctcaggaagaggtggatacgaagcttcgttttagtctggtccgacgccccgcttcttacacacgcgcaccatatatgtgtctggcgtcacggggcttgaccggtagtcaatgggatgacgtgatgactcacatttcccgttggctgatacgccatctggacgaccctcgactgataatttggatagccgagcgaggaggacaactccatgaacgctgtatgtggctgattcagcaaaaattagactatcttgctactctgaagctaaacgggaaggtcgctgaactggatgaaattcgtttaaatgcccctaaggctgttcctggccctcatatgtgtaccttatggaaccttctactcagtgagcggctaaaatcagcgggatataattctgatctctatagctggtttagtcggcttaaaagagacggcttaactacaacaatgcgtttgaaattgcgcgaattactttctccaaagattttattgagaaagcccattcgctgggattacggcgtaagtgacactgatgaaccacttagcatcagacacttagtcgattgggaactggtactcgccgcagaccatgtgtactccactctggacgaagaggctaatggcaactggaatacagctttacctatcctactgaacgattttcaacagcttttacgggatgcgctggatctgttgcatgagctgggtgaggctgatgagtttagagatcgttcatattgggatcttccatccattatcccacactggcaaaaccggggctttcatgattgggttagtttgattacgctgctgcgggattcatggctcgcagttcgggctaatgacatcccacgagcagcaatcattgcgcaaggatggattgagctcccttatcctaccttcaagcgactggctctctttgctgccagccatgataactgcatctcttccgaagaatgggttaaatggttgttgagcgatgattcatggtggctgtggtgtgttgagaccaaacgggaagtcaacaggttgtttgtgttacaggggcggcatctgaacggacttgcgcaggaaaacctggaaaccgcaatccttgctggcccaccacgcagaatgtaccgggataatcttgaggatgggaggtggcaatctattactgatcattctgtctggttgcatctggctaaattaaaaatttctgatctggatttgggagaagcggcaacggcacgactggcagaattatccaacaggtatccagcgtggaagttggctgacaacgagcgtgacgagttttctcactggatgagcgggacaggcgatccggattatgatgacagccaggacattgaacctgcccctcgaaatcgacaggagttggttatatggctccaaaaacccgaacctgaacaccgacctatatacgaagatacctggagagatgtttgccgtactcgattctttcatagtgcgtatgcactttgcgaattggctaaaagtgatatctggccccctgatcgatggcgtgtagctcttcaggtttgggctgatgatggtctggtgttacgctcgtggcattatgttgcacctgtggtccagaccatgcctgattattttcttaaggagattatccatagtgtggcatggtggatggaaacggcttctaaagttataaaccaccacaaagatataattatcggactctgccgcagaatactggcattaccacttgaagctggtactgatgcaaatattgtcagcaacggcattaaatcatacagtccggtcgatgctgcaataaatcaccccatcggacatgttactcagattttggtcaacctgtggttcaagcaagatccaaatgataacgagcaacttcccgattatctcaagtccattttcagtgcgctgtgtgatcctgatatcgagcgatttatacatgggcgggtgttgctgagttcacagctaattgcacttttccgtgtagaccgctcctggacagaacaatatcttttaccattcttcaactgggacaatccctttgaggcgaagtccgtttgggaaggctttctctggtcgcctcgcctttaccagccattaatgacggcctttaaatctcaatgccttgatagtgcaaaccactatgcagaactcggcgatcatcgtcagcaatacgcaactttcttaacatacgcagcattaggcccgacagcagattacacaaccgaagaatttcgtaccgcttttaacgcacttccgtcagaaggtcttgaaaagtgtgctctggcactcagtcaggcgcaagaaggggcggctgccaagagagaggattattggaaaaatcgagtccggccattgtggcaaaacatctggccgaaatcccgggatctggtcacttctcaaatgaccgtttcacttgcccgtctaatcattgctactggcgacgaatttccctctgctttggatgacgtacataactggctgatacctgttgaacatccatactatgtcatacaccgactgcttgaatcgggcctgtgcacgcgctttcctgtcgaagcagcattgctactgggttacataattgctggtgagaaacgccagtggttatctgaggagttgggtacttgcctggatgacattattcaggctgcaccaaaccttgagcaagacgtgcaatactcacggctaagagaatattacaggaggaacagcgcccaatag

SEQ ID NO: 428140 - DNA, 957 bp, Serratia marcescens
atgactagctactcaatgttttccaacaaaataaaagaatgcattaatgataaattcgagagtgaaatacatgattgggatacaataaagaattccattaccctattaataaataataatattcatgggactggcatgaatattgtggactttatagatttaggtaattgggaccgtatatcgagcttttcatttgatgatgctcaaagaagattggagctcgaatggcatcctaatgacaagttccatatttacatcgagtccatcattttttttgagttcaacacagcaatatatgtttttttgaaaggatactataacaatcaactccacttgaatagaatatataatacaaagtgtacttcatgtagttttgaaaattccggttcctacatggtggacatttatagagtagtaaagagggtaaatgaagtaatacagacacctaatataaattgctacacaacatgcatcctaacaagacctgccaatggtaatgttacatctgcagggttctcaaggaatttaatggatgcaataaatctgtctttagctcatgagagaatagattctttgtacaatgacgttaatggtatccaagagcatgatcgtgatagcttacaagaaaaaggaaacaccgcacgacggtacttagaatatgtgctaattttagttaatattcgattaatgcatttaaataacgttcagtatcaggagcaaatgctaggaagtttggtttctgtaattaacattctcgaatatacaccattaatgaaaaatgatgtgcaaattgcaagtgatatactcaatgcatgtagtcatcacggtggagttagaattgaaaaaagtgatgtaatatttgcattggactttatcaagaacttaatttcaaccatagagaaaacagacattaataaattgcaaattgaagggacttttaaatccattcaagcatga

SEQ ID NO: 428141 - DNA, 954 bp, Serratia marcescens
atgaagaaaaatattcgagtcatacccaaaagcatccaaaaaaagctgaatagtcttgataagacaattgtcgctggaacttccgttgaatatactgagaaccagctaaaagacggagccctagaacatcttgggatatatcttagtgatggtgaaattcaatatgaaaaattaacaatcccagaccctttacaagggaaatattctcaaaaaaatgtctttggcgaagaaataattagaaaagaccttcccaaagaaattcattattctgagattgaatctccaaactggggagatagttctaacggtacacacacagtaagattaccatatgaaaaatatcctagagatattataccacctaaattaatagccattgaaataaatcacaaaaaaactttaggccttaatttttcttttagctttagagcaactagaatactggataagtcctcaaaagaattcgagaatgatttgttatatgacttaaatcttctacaggaaaacattggaaaatgtggtgtggaaaatgctaacaaaccattatcaacctatgctgacactcttatcgtttcctgggagatattccccccaggaagcaaagaagaaacattaacaagaatattaagaggaaaaaaaatatccagtgaaaatataaaaacagctgaaaacagatatgacttctttatgagccttactcccaagaaaattatcactgggaatagttcctttagtaattatattggtgccatgattgaagataatctagtcgtatttgaaaatattgaatacggtaacgcgatctacattctctatgatgactgggatgaaataagtcaattatcaagaatcgatttgttatcaggccgctcagggaaaagattcgacagggtagttcatataggaaattggaaagacgaggtaagaaaaaaaattgaagcaggcaggttgtga

SEQ ID NO: 428142 - DNA, 537 bp, Serratia marcescens
atgttaaaagctatagcaggcataattaaatatacatggttgtatttggcgatatttctcatatcgctacttttgatttatatatcaagagtcaactatgtatataacgattttgctaactattgcacccttctcgtatcagtttccggaatggtatttactattatgggcatttggttagcattcctttatccaaatgctttacaacgaattgttaatccggaaactataaaaacagctgacttcacagaacatctcgaagatacaagaaggttagaagctatagttggaagtgttctaaagtcatcttttgtcatgatcactttactgatcatttacttagtaaaattaatattattcaagagtcacttttatttagagattcaagacataataaaatctacatcactggcaataattattgcagtttcatacatgcaagttgaagccgtaataagtgtaatactcgcaaatgttatgtttatcaatgatttacataacaagagagaacaacgagacattgatgaacaagtataa

SEQ ID NO: 428143 - DNA, 1080 bp, Serratia marcescens
atgaatgtagggcatctcaattttttcaaagtcaataaatgtggtctgtataaaacaagtgacgataatacatatggcttagaactcagtgaaacttttgacctcattcaaaattgggtagggactaagtccctggctcttacgataccttgggatccgaaagaaaaaacaaatagatcaaaatgttattgtaaagatatatacaaagatgaaaaaactggtgatttcctcatcatgttatggaaatctgatacagatagctctggttctttgttaggagctagtgaagacggagcccttggaagttcatctgtagttaaatacaccaatagctatagagggaaaaaagttatctggggccgcccatgtttttactgggttatccctgaactcgaaactattgtttccattaagtttgatcactcagtatgtgattctgagctatttcaagagtatgtgcattcctgcataaccaatagagtaaaacacagtaaaagggtaaaaaacaaaactgaaaagggttatataaggttatctaatactgatgacaaagacctatataagtatatgtatagattcgacatgacgctacgcagtttagaaacgactcacaccgagttaagtaaactagtgcctagaatcacgcatataattcgcagggaaacgataattataaatcctcaagacgcccgagcagactggctgaaaacttttagcaatcttgtgccttttgtatcaggcaaaagaaacactaaaacaagacaaattgaaataaaagcagaggctaaaccatctttgaaagaagtcaaagacattattgaaaaattttctgctgaagatagacaaaaacggctgtgggacaatgttggatttgctacagacaagggaataacctgggtagacaaatatagaatgcgagatattcttaacgttccaatggaagactattctaaatacacagcagtatatatttatgaacaaatatcacacaaaagaaaagagtttatcacccctatattgaaagaaataaaagcgttacaatctcaatcaagaaaaaacaaagtttctggagatgattga

SEQ ID NO: 428144 - DNA, 132 bp, Serratia marcescens
atgttattcccgccgagtgggaaatatcgtgactatttattaacgttaatcttcgtggattattgcggaatcatttcgctccggcaatgcgtggcgtcgattaactcttttatgtttatcctctcggaataa

SEQ ID NO: 428145 - DNA, 1089 bp, Serratia marcescens
atgaccagcgccagtgagctggccggctgggtatccggtggagtgtggcgcggcgccgtcgaagtttcccgggttaccacgctcactgcggtagctccggcagtcggcgccttcgttgtcggattctggccggggaaagccggtgaaagtcagagcgatattgataaattgctgggtcgtgatttaacacagatgtttaccgttccggccagcctggttgccgcagggaaaacaccgattcagccggaaatgaccacggtcgatttaccggtgcgcgggtttattcgcagagggaatagcggtcagcaagaggtaatactggtcaaaacaggaacgggcggcgtctccgctaccgtgccggtgtatcggccggttcgcgatgaaaaaaccggcctggaccggataaccttgccggcggttgccggtgcgccggggcgaaccattttgataaacccgggcaccgccccgtcgggtccgtggcataccggcaatcctgcgtctgcagcgccggtaacgccggtgcataccggtacggagataaagcaggccgacagtatcgtcacgacgacgttccctgcagatgacatgccactgcaggattttatctactggcagcctgatgcaacgggaaccggtgtcgagcctgtctatgtcatgctcagtggtatctatggtgaaactaacgctaaagggcaatacagtggtcgcgactacaacacggacaaggccggtggcccaattcagaatctggactggaaaaccgccaccattgaccgcgtcggcgtggacaaagtgaagctgcataccgggcggtttggcgaatctcccgataacaaggtgatgattgaccgcctggaaaatatcctgaagggagaaatacagcccaccgataccgacaagcgtttttacacccacgaaatcagggaattggagcgttatagagcagttggtgttcctgatggaatatcacctgatgacgatggtgctacatggaataacactcatacggcgacgttggaagattacaaattaagtagcgatcgctctctgttatatacaccagaagcattaaaagctggtgatgaataa

SEQ ID NO: 428146 - DNA, 276 bp, Serratia marcescens
atgattgattttaaacctatgtttgaaaatgaacaaatccgagacatagttttattcttgtcgggacgaaaagaaaacgggatatctcatcctcaattagatgggtattgcactatgtatggtaataaacgtatatcaaacattgaactgatttcattagtgaaaagcatgcgagaaaaaggggatgtatcatctaatggaaaaggtggctataaaagaggtccaaactggaaagaacccgcattcgtaaccgagaaaaaatacggtattgagtaa

SEQ ID NO: 428147 - DNA, 1503 bp, Serratia marcescens
atgttttcccgtttgaaactgctgtatatcgccgatgatattatttcacctgatgaattcccccgtatagtcagcccttccagcgcctgtcacagcctttcatacatgccggacaatgacattctgtcgcttttttctggttttcgcggtggcgaacggatccgccgtgaagtcggcgttacgcaaaacggaataagctctaacctgcgcgcaagagtgcagagcgacctgatgagcggcgttgtcgtagcggttgaaacccggcccggcgtgttggcgacgatggggccattttacgccgacatcgacggctacctgataccgcagggaagacaagagcccaactacccggtggacaagatagtgaagcggtacgaagaggccgtgaagtcttatggcggccgccgggcgcgcccgtccgtcttccccgcacaagtcacgcgggccaaaccggcccttggcccagatatcccggcgcaaggtggaagagcctcacagtcggtcgtgtctggccccttgaccaaagcgcaacgctggcaggagcgaaaatacctcattggccgcgggcaacggagtatctacccggacgcccgaatcgcctcggaacgcctggcggcaaacaatgtcgccgtcgagaaggcaaagctggcggagaatatctacaagaccacgaatccgctaaaggatacacccggcgttcccgagggctggaaagatatcagtaacgataatgcggccctgagtaaaattgggctaaacagaaatatgctcttcgacagagatgaatcgccggattttttggcaagggtatatcaacctgacaacagtatttttggtaaagagatgaatccgacggtcgtgttcagaggatcaagagcgccagagttcccggagggaatcggcagcgccgccaaaaaggcccttaagggcgatttgtcaggaattaaaaatgtgaatgactggataaataatggcgcgcaggggatgggggcaaactccgagtattataaaaaggccatcaatattggcgaaagcatatcaaaaaaccccggcattgatattactggtcattcattaggtggcggaatggcctccgcagcatcaatgaccagtggaaaacccgcatggacgtttaatgcagctgggctcaacagcggaacaattagaaaatacggaggggaggctcttggttcagccaagaacatacaggcctatcgagtggaaggagaactgttaaccacgttacaggaggttaataacgaaagtgattatgagcttataaaaaatgccctgcccgatgctttgcaaaaaccctggggcacagcattgcctttcaccttgaaagagtggtcatcactggcgatacctgatgccgccggcataccacacactcttgccggtgggacaggaaccttgctcgataaacacggtatagaccagacaataaagttgattgaagatcagaaagacgaggatgtcgccaccatcagggggagaatatga

SEQ ID NO: 428148 - DNA, 1338 bp, Serratia marcescens
atgcaaaatttatctgggtacaacaaatattattatgaccgaattgccaaggataacaaactatgtgacatcttgctaaagcagcaccaaatagacattatcatggccgaaacgtatatcggggtttctgagtcttgcaggaaggatctaggtgaaaacaaatttactatgattatagacctggagtccttcatggttgctgactacagttgttttcctgaactatctgatattcagaaggaattgataacaagtgcatgtgattatcatgaccaaagaatttgggaaactatattttcaggaattaggaatacactcgtaataagttgggatgaacctaattctaacaccatgctcaaggcgatgtatgaacatgaaatatcctttgcaaaagcgttagtggcagcatcaggtaagatggcagagaattttgataaaacaaaaaagctcctaccctattggatgaggtttagtcaattacggttactatcacatataccaaataagatcataaaggaatcatcattacagaatatagcttttttccctatcaaaaaacgaggtatgaacgcaaccagtggaaacaaagatggaattagatttatcacggctaattatgcgttacgtgatatcttatttgagtttaatagacaactagagcatttttactcaactacacatatgagtcatcgtccgcgggcttatcgagcaataataaattttatcccattagttatttatctctgcacgaatgttgaatgcattggctacgtaccccccactattttattcaatgattcggttaaacgtgttaaattcataacagaatgccaaatcgactttatactcacgcacgaaattgcccatcacatactcgaacatccgcaaaaatcagtcataattagtgatattgagtcaaagaagaaaaagaagattggattcgaagtcgaagcggatgcacttgcaaactatcttttggctgtgaataacattgaaggcgtggaatcagttttatatgatgaagactcgtatgttaattataatgagatggttgaaagtgttgaggtattgtttgaacatatgcatttctgtgagcaaatgtcagatataattcgagatgactttggctcttatgtcagaattgcaacattgaaggatggcgttcacccgccagcaatggagcggttaaaaatattcttgtctcctataaataaaagcacatggaagcaaagtgaactatccatttatgcgcgagatttttatgcagagatcatatcttactacaaaggaatgagcatctctgataaaacggaaatgttaaaagtgttttttagttga

SEQ ID NO: 428149 - DNA, 633 bp, Serratia marcescens
atgtccccccatgtttcaccctgcagttttggttgctcgcagggggtgaacaccgactcagggggcaacagcaccagtggcaccggcggtttttgtgtctgttccgcgcaggaggtcaagaacagcgagaggagcagcgcggcggctacactcatcattctggattgcttcacgatatttcctctggtagttttcgccctgctggcgcagctgctgctctctccgttgctgttcggccattattgcgcgattacgggcgtcatccgtgcgcagtgtggtgatcagtcctgcctgctgcgccagcgtctttttctgctctgcagcctgttggcgtgccaactgcaaccggtgcgacaacagcgagctgtaaccgccaagaaagatagtcaccagcaacagaagcaccaggctgccgccggcgatcttgctcatccagccgttcatgattggccccaggtgcagacggtgttttcgacttcacgccgggtgatcagccctttccactctttgccgccggcatacttccagcgcttcagttcaccgcacgcgccggccgggtcgccggcattcaattttttcagcatcgtggagccgataaacgcatacgggccgacgttgtacgagaacgagtaa

SEQ ID NO: 428150 - DNA, 183 bp, Serratia marcescens
atgaaacatgctgacgaatcaattattcattctctgttaattggcaagagcgccaaggagatagtagagcacttcaatggttataactttgttgacgatcacggtcatcgactggatatgtgcggcgacttcactgatctggttgcattggcgaccgcgaacagcaaccaacaaggcgaataa

SEQ ID NO: 428151 - DNA, 225 bp, Serratia marcescens
atgagcaatgaaatcatatctattgaaagattatttgaagttggcagggagtattaccctgaagggcatttccgtgttgagatttgggatatcggcgtaaggttctgttgggaaataaaaaggggggcgatgaacacgttaaatacagcattccttaatatacctctcaacaacattaccgagagcgccgttcgtgggttccttgatgccgaaactcgcccatag

SEQ ID NO: 428152 - DNA, 519 bp, Serratia marcescens
atgaagcaatcactggtaaaaatccgcgtacatacgccattcactttcacgcacctgaattatgaggtggagaagttcgctgttggtgtgcgctcggtggcgccggaggtagccgaaaactggttcatccaggaatatgcggaaattctcgacgacggccaaccagacaacgccggcgcgccagcggaggtgctggcgcagatcgccgaccttcagaagcagctggtggaggaaaaaagcaaagtagccgatctgacgacggaacgtgacgaacgcgatcagatcatcgccgagcacgtctccacaatcggcaaatgcgatgacacgatcgccgaccttcagaagcagctggtggaggaaaaaagcaaagtagccgatctgacgacggaacgtgacgaacgcgatcagatcatcgccgagcacgtctccacaatcggcaaatgcgatgacacgatcgccgacctgcagaagcaactggcggcggcgctgactgagggcgcgaaaggtggcaaaaaataa

SEQ ID NO: 428153 - DNA, 345 bp, Serratia marcescens
atgaaattaaaaaccatatttctgattcttggcttggcgtatgcgtcctctggctatgcggatgtgcgctgcggtgattatttgctcaccgcagggaatgatgggtttatgcatataaatggcgtcaggcctgaaacccaaaagttaacatttctgggggcgtctggagactacgacaatgttaaaatggagtggcgtgtcgcaacgaaccagccagggaaatggttaggtatggagtacgtgaagcgtggaggcaaaaagcgttttcttaacgttcaactgcttcaggccagcatggacgcgccgcgccagtatgcgacttatgactgcgtcaaggtgaagtga

SEQ ID NO: 428154 - DNA, 792 bp, Serratia marcescens
atgcaacccaaaacgcaaagatcaaaagacattcagaccgtcaatcgtgttgttaagacccttaggccttatctatgctttgaggacgagatcactgtatttgttacagagagaataaaaaagcaaatcagtgaagttaaagataaagggctatggttgacagccaactctttttatcatttcacattgggtgacgtcgagaaaggaattgactatgctgagaagtcacttagctttatgccaagtgatatagttacttggcgacattatactcttggtatgttttggcgttgtggcgcagtcggcgctttaaaggttgctaagcgagcagttgaagcaactaatagtccgttaatagcacatgatgcatatttttatgcatccgccgtagctgactataagtattttcttgatatgcacaaatttctcattaagacgaaaacttacgatgatttaattgaagaagagcagaaggtgagtatgcaaagaagttttgagtttgcatcaatttctgatcaatataagaagagcgagattataaaaaatatctctgttcttatgtatgaaaaattatcattggagcagaaactagaaacaaccaataggctcgtggatttaaccgatgatgatggtgagcctgagcttctttttgaattgtatgttaataacgcgagtgctgagtcatgtgcagctatgaatattgagctggtgacggaaagagttaatagcggtttaaatgactggagtgtcggagctgtttttttaggctatattagaaaggatggcgaataa

SEQ ID NO: 428155 - DNA, 279 bp, Serratia marcescens
atggccagtgagattatcttgattgtgaatgcggtggcctgcacggctatcgcgttgcgtctgatgacatttcgcagggctggtggcactcatcggccattagccgcatgggcggcatatttcctcattatcgcggcggcgtccgtaccaatccgaatcctgaccggtgattacgtttgtgccgattggtcggagacattcatcaatatcgcgttttgcgtcacggtgctggcggcacgcgggaatgtcatgcacctggctaaacctttcttgagatag

SEQ ID NO: 428156 - DNA, 627 bp, Serratia marcescens
atgacacaaaacgactttcaacgggcggctggtatcagcgccggattagctgcgcgctggtatccgcacctgctcgtaacgtttgcagagttcggcatcaacaagccgttagagcaggcgatgtttatcgctcaaatcggccatgagtcgaacggcttcacggccaaggtcgaatcattcaactacagcgttgatggcttgatcgctacattcggccctaaatcgaaagccaagcgactgactgactatcagtgccggatgttggggcgtacagcccagcagccagccaagcaggaagccattgccaatctggtctacggcggacgaatgggtaacagcgccagcggtgatggctggaagtatcgcggacgcgggccgatgcaaacgaccggcctgaaaaattacatggcttgtggcccggcgctgaagcttgaccttgttggtcatcctgagctgctggaagaagacctgaacggcatgcgttcggctggctggtactggaaagctaacgactgtggtcgcaacgctggtgatgtcgagttgaccacgcggcgtattaacggcgggactaacggcctgcaggacaggcgcgaacgcttcgagcgtgcttgcaaggtgctgttatga

SEQ ID NO: 428157 - DNA, 420 bp, Serratia marcescens
atgagctggcgctggtggtgggatgtaatgatcaaagcgtggcctctgctggtggcactgctggccgctgtgttggtgctctacacgctttctctgcgcgatgacctggataaatccaaaagggataacggcgcgctgatggaaaagctgggaaccaaagacgcggcgctggtggcgatgaaacaggcttccgaagctgataggcaagctagcgctgcgcagttggaaaaagagcgggaactgagagggaaggctgatgcagaaaacaaagcgttgcgcgaggctctggacgcgagcggctgtagcaacaagcctctgcctggtgctgctctcaacatcctgcgcggacaggccaaagccgcagagcacgcagatgatttacgtcctgccgccagcggtgctgctgcaacagtgcgatga

SEQ ID NO: 428158 - DNA, 330 bp, Serratia marcescens
atgggtgttaagaaaccctacggcagcaaatggcaagccgaacggcttgtgttcctgcgggagaatcctctgtgtgccatgtgtcagcagatggggcgtattgagccagcaacggtggtggatcacatcgtgccgcaccgcatgaaagaagcgaagacgcccgaggaaatgaagaaggctcagcaccttttctggagccgcaagaactggcagggcttatgtaagccacaccacgactccacaaagcaacgtatggagaagaccggcaaggtaatagggtgctcgcccgacggcctgccgcttgaccctgcgtcgcactggaaccactga

SEQ ID NO: 428159 - DNA, 468 bp, Serratia marcescens
atggcaggacgacgcccgaaaccgtcccacctcaaggtggtcaccggcaatccgggcaaacgtaaacttaatgataaagagccgcaaccggcgagagaaattcccagcccaccttcgcacctgacggactgggggaaaacggcctgggggaaaatgactgtgctgctggacggcatgggcgttctgaccgttgccgatacttttgcgctcgagcggctctgcgatatttacgccgacatattgcaactgcgcaacacgatcgccgacgagggccgaacttatacagttcaaacggaggggggctttttgattaaggctaaccctgcggttgccatgctggcagacgccgatcgccgtttcaaaagttatttggtggagtttggtctgacgcctgccgccaggtcaaaggtgaaagtaaatggtggagagaaagaagaagacccgctcgccgaattcttcggcacctga

SEQ ID NO: 428160 - DNA, 1278 bp, Serratia marcescens
atgatcttgtttcgtgatgcggtggcgatggtgaatcagtctccggcgctggcccaacgtatcgacccctccggcggggccggtaaagaatggaacctggcatttttgcaaacgggttccttcttccgcccgatcagttctgatgatgggcaatcagggccgcgcccgcactgttgcctcattgatgaggtgcatgagcacaaagacaataaagtggttgagatgatgcgcgcagggacaaaaggccgcaggcaagcgctcatcttcatgatcacaaacagcggtcacgataaaaccagcgtttgctacgagtaccaccagtacggcaaacaactcgccgccggtcagaaagttaacgatgccttctttgcgttcatctgctcattggatgagggtgacgatcctttcaaggatgagtcctgctgggcaaaagccaacccctcaatggggcatacgttccaacctgaatatttacgcgagcaggtggaagatgcgcgaggcatgccgtcaaaagaaagcctggtcagacgccttaatttctgtgaatgggtggatgctgaaaatccgtggatcggtggcgacatctggatggcatgtgaaaaaacattcgatatcgaaagcctgaaaggggaagagtgttttggcggtctggacttgtccggcaagcgcgacctgacagcgctggggctgtatttcccgcgcattaagacggcgctggtggagttctggacgccgcgcgacacgctgcatgacagggccagaaatgaccgcgttccgtatgattcctgggtgcgtgaaaagtacctgcacgcgccaaagggcagcgctatcgattacggcttcgtttctaaacgaatcgccgagctggcggcactctttgatattcggtcgatcgctttcgaccgttatcacatggattatctcgagcctgaattgctggatgaaggggtgaccgttccgttggttcctcatgggcaaggcttcggcaaatcggcggagtcgggcttgtggatgccgcattcaatcgagctgctcgaacaactcatcaccgagaaagaaatcaccatcctgtttaatccttgtctgcgctggaacgcggccaatgcggttattgaagaagataaaagcggtaaccgggtattcagcaaacggcgtagtaatggccgcatagatggcgtagtagggctggcgatggccgtcggtgctgctgacggcgttattgaggatgacggcgatattgatggctttttcgatgatccgatcatggtaggtatctga

SEQ ID NO: 428161 - DNA, 1305 bp, Serratia marcescens
atgggcaaaaacaagcaacctgggcgcgttaaaagcgcccttttaaattggctgggtgttcctatcagtctcactaccgggacattctggcaagaatggttcggcaccagcagcagcggcaaggtggtcactgccgacaaggctatgcagctctccgctgtatgggcgtgcattcggttactcagcgaatcggtttccactttaccgatgaaagtctatcgtcgtgaggcggatggttctcgtaagctggcgcaggatcacccggcataccaggtgttgtgccgccgtccgaacctcgaaatgacgccgtcccgattcatgttgatggtggtggccagcatctgtttgcgaggaaatgccttcattgagaaaaaaatgattggcagaaagctggtggcgcttaatccgctgttgcctcaaaacatggtggttaaacgtctggataccgggcagttgcagtacacctacaccgaggacggcaaaaagcgcgtgatacccgtagaccggatgatgcacattcgcggctttggtctggatggtgtctgcggcatgatgccgctgagttcgggccgtgacgtgtttggggcggcgatggctgttgatgagtcggcggcaaaaatctttgaaaacggcctgcaaacttcgggatacatcagttcgaaagttgcgctgaataaagagcagcgagaacgtctgcgccaatacttagccgcgttcgccggttcaaaaaacgccggtaaaatgatggtgctggagggggatttatcgtaccagaatgtcacgatgaatcctgaagacgcacagatgctggagagccgtgcttttagcattgaggaaatctgtcgctggttccgggtaccgccgttcatggtggggcacgtgacgaagcagagtagctgggcatcgagtgttgaagggatgaacctgattttcctgaccaacacgctacgcccactgctggtgaacatcgagcaagaaatctcacgttgcctgctcgatagcgatgaagattactttgctgagttctcggtggaaggtttgttgcgcgccgacagtgttggccgtgcggcgtactacaccaccgctctgcagaatggctggatgagccgcaacgatgttcgccgacttgaaaacctgccgccgattcctggcggtgaaatctataccgtgcagcttaatctgaccccgcttgaggacttgaaacaaaataacctcggcgctcaggctgccactatcacccggctgcataattatcttttccccgatattcctgaagaccagtcaccgctgaaaaaagcggcgtag

SEQ ID NO: 428162 - DNA, 852 bp, Serratia marcescens
atgacaaaaaaacgacttccggtcgcaccggcggggcgtccctgcgcgggcgttacctgtgagccgctgccttcggcgctcgaaagatggaatggcggtctaaaggccgctgcctctgacgacaattctatctcggtgttcgacgttatcggccaggattactggggcgaaggcgttacagcgaaacggatcgccggtgctctgcgctcaatgaatggcgctgacgttaccgtaaacattaactcgccgggcggggatatgtttgagggactggcgatttacaacctgctgcgagagtaccagggcaaagtcaccgtaaaagtgttggggttggctgcaagcgcagcctcaataattgcgatggccggtgacgagattcaaattggccgcggtgctttcctgatgatccataactgctgggtggtggcgatcggtaatcgtcatgactttgccgcgatggtggaatacctcgaacctttcgataacgcaatggcggatatttactccgcccgctccggtcttgatagcgataccgtcaagcagttgatggacggtgaaagctacatcggcggcagtgatgccatcgagaaagggctggccgatagcctgttgtcatccgatgcggtaagcagtgatgaggactccccagcggcagcattgcgcaagctggattccatactggccaaggctaatacccctcggtcagaacgccgaaaacttttgaaagccttaacaggtagcacgccgagcgctgttaccgatcctacgggtacgccgagcgctaccgaaccatcccctgaaatccttgccaagctgaacgccgcattaagcgggctgtgcgcggcgtgctaa

SEQ ID NO: 428163 - DNA, 1221 bp, Serratia marcescens
atgtctgaagttaatgagattctgaaaaaagttactgcatctatcgaagatgcaaccagcaaatttaacgccaaggccgaggacgccctgaaagaggcgaaaaaatcaggcgagctgtccgcagcgaccaaggacagcgttgataaaatggcgaccgaactgaacgccctgaaggcggcagagaaaaccctgaaggcagcggtgggggatctggagcagcacgtggcgcaaatgccattgaaccgcgcggctgaagtggttcaatcggtcgggcagcaggtgatttcggctgaagcgttgaaagactttgcatccggtattcaggcctcacaacggctgagcattccggttaaagcgacgttgatctctaccgatgttccagggcagattgtagccccacaacgcctgccgggtatcgataccgcgccgaaacaacgcctgtttattcgcgacctgatctcaccaggcaccaccggctccagcacgattttttgggtgcaacaaactggcttcaccaacaaggccgccgccgtgcctgaaaacactcagaagccgtacagcgatatccagtttgctgaaaaaatcacaccggttcgcacgttggcgcatatgttcaaagcctccaagcagattttggatgatttttcgcagctccaatcgaccattgatgtagaaatgcgttacggcctgaagtatgtcgaagagcaggaaattttgttcggtgacggcaccggcgtacacctggaaggcatcatgccgcaggcgtcgaagtataaggcggagtttgaagtcgcgatgcaaaacggcattgacgatctgcgcctggcaatgttgcaggcacaactggcccgattccctgccaccggtcatgtgttgcacttcatcgactgggccaagattgagctgatcaaggatacgctggggcgttatatcctcgccaatccagcagcgctaaccggcccgactctctggggcttgcctgttgtcgcgacggagtcttcggcgttcctgggtaaattcctgaccggtgctttcagcgcgggcgcacagctctttgaccgtgaagaggcaaacgtggtgatcagtaccgagaacgccgacgacttcgagaagaacatgatctcgattcgttgcgaagagcgtgtggcgctggcggtcaaacgacctgaagcgtttgttaccggtgcgttcaccgtgccaaccccaccaaccggcggctaa

SEQ ID NO: 428164 - DNA, 267 bp, Serratia marcescens
atgaaagtaaaagcactagtaccgatcttgttcggtagccgggtggtgaatgacggcgagttgttcgaaacgcaggagcttcacgggcgcgagctgatcaaaaaaggctatgccgagcaggtgagtgatgacaatcctgcagagcagcaggagcagcaggagcagcaggagcagcaggagcagcaggagcagcaggagcagcaggagcagcaggagcagcaggagcagcaggagcagccagaagcggccaagaaatccaaaaagtaa

SEQ ID NO: 428165 - DNA, 327 bp, Serratia marcescens
atgttagaactgagattggtgaaagagcattgccgcctggagcctgatttcaatgcggatgacaccctaatcggcgtctacatcggtgcggcgaaaaagcatgttgagatgtatacccgccgcactctttacgccagagaatccgaccccggatacgatgccgacgaagatcacctgctgctggatgatgatgtacgcacggcaatgttattacttgttgggcactggtatgaaaacagagaggcgagtgttgtcggacagtcagtttccaaattgccaatggcggtagagtcaattcttcagccttatcggatctatgggctatag

SEQ ID NO: 428166 - DNA, 252 bp, Serratia marcescens
gtgagtccaccgtggatcgtatattcgctacccaacgaggactcggtggatgtgttctgcggaatggcagaaaccgccgtgacggttcaggtcgatgtctatgctgacaccgtggatgaggccactgctatccgtgcattagcgcaggaggcggttaaatctctggaaccggcagaaatgcgggccttcaaagattacgaacccacgacagccctttatcgtgcctcattcgaattcagggtgtggcaataa

SEQ ID NO: 428167 - DNA, 720 bp, Serratia marcescens
atgaccagtaagtatgaaaaaacgcagggaacgaaagtttccgtctcggctgctgaaccaagctcggttgatgatccaagcatcgtttggcttgaggcccaatgtgccaccaaagaaatcagctataccgccgggcagaaagccgatattgacgttacgacgttgtgctcggaagagcaggaaaacaccaacggtctgccgtctccgggcgaaatgacgattaaccggaactgggtaggcgatgaagaggcgcaggagtcactgttgaccgcctacgaaaccgatgagcggcgtgcgatcaaagttgtttttccgtccggcaatggctttgtctatctggcagaagtccgtcaaaacagttggtctgcagcaacatccggtgtggtttcggcctcttacacgctgcgactcaagggtaaaccgaagcgcatcaaagcctctgacaacgtgcctgtgaccggagtaacgatcacgccgacaagtggcactctcgctgcgggaggcactacaacttttgccgtgaacattgtgcctgctgatgcaacgaataagggctttaccctgagttcatcagttccggcacgcgcaaccgcctctgctaccggcatgaatgtcactgtttctgcaccaagcagcgctaccgctggcgcagcaaacattatcgtcaaaaccagcgatggcgactttaccgcaacgtttgcggcgaccgtaaccgtgtaa

SEQ ID NO: 428168 - DNA, 423 bp, Serratia marcescens
atggccgttaaaaagaaatttgaccttaaggcgctggtttcagcgccgcaatctgggttccgtaccaaaaccgtaccggttaaagagtggggcggggcaaaagttgtactgcgtgagccttcacccgaggggtggggccgctggcgcgagattatgacccctcctgagccaaaagaaggtgagcagcccgtcaagctgtccatttcagaggaaacgcagagaaatatccgcgctgattcggtgatgttcattgacgtgttactcgatgaagacctgcagcctgtttttgacttgagcgagcttgataccgtggttgccttttatggcccggtgcatgcccgcttgcttaagcaggctatggatctgaccacctcgccagaggaagccgaaaaaaagtccgagagcctgacacccaattcatga

SEQ ID NO: 428169 - DNA, 291 bp, Serratia marcescens
atgatgaaacttgcgcttcgcctgggtagaaccctgggggaactcaagcaatcgatcagcatgagtgagctgcgcctgtgggccgcgtatgaccggataagcccgattggggatgagcgcggcgattacctttcagctcaggtagttgccgccgtccataacgctcagcgcgaccctaaaagtcagcctcttgacctcaacaacctggtgattcagtggggcaccagcggcgacgggccggaggaaaatttgaacggtctggagtcctggcttgatgaaatggctggataa

SEQ ID NO: 428170 - DNA, 3282 bp, Serratia marcescens
atgggagccgattactacaaaacgatggagcagggtaaccgtaaagccgaatacgctacccgacaaagccagcgtgcgctggcagaactcaatggacaactggcaaccgtccgtcaaacggcgcttggaatggcgggagtatttgcgggggcttttgccacaggcaacctcattaatttagccgatcagtggacgcagattaatgctcggttaaagctggcctctcaatcgacagaggattttaaaaacaaccaggcggcgctgatggatatcagccagcgcactggtacggcttttaatgataacgccaacctttttgcgcgctccgctgcatcaatgcgtgaatatggctatgcgtcttcagatgttttgaaagtcactgaagctgtttcaaccggcctgaaactttcaggtgctggcgtggcagaaaccaactcagtaatcacccagctttcccaggcgttttcatcgggcgttctgcgtggcgaggagtttaactccgtcaacgaaaacggcgaccgtgtgatccgtgctctggcggcgggaatgggtatcgcccgaaaagatatgaaggcgatggccgatcaggggttactgacctccgacaaagtgatacccgcgttaattagccagctcggcactctgcagcaagagtatgcttcgatgcctggcgttgtcagtcgatcagtggtgaaagttgaaaatgctttcatgcaatgggtgggcggtgcgaacgaaaccagcggtgtcacggcagcgttatccagcactttggatgctctgtcagaaaacatcgacaacgtcgctatggcccttggtgcgctggtggctgttggtgttgcgcgttatttcggtgggctggtcagcagcatggggactgccaccgccaatatgttggccacctatcgtgccgaagtcgcggtggccgcagctcaggtggaaggagcaaaaacagcaactgctgctgcgcgagccacattataccgtgcacagcaggccaaagccgccgcagttggtatcgaacaacagatcgtggcagagcggcaattagcgattgctcaaaaccaattatcggccagtgtgggcgctcgcagtgccgctcaaacccgactaaattcggtgacgtcactcggcgctcgtcttgggggaagcctgctgagtgtcgttggtgggatacccggcattgtactcggcgttggcgcggcgtggatgtacgtcaacgagaagaacgagcaggcccgcaaggtggcggtcgcttatggcgataccatcgagcaggtgaaaaaacaaatgttcggcatgtcactcgccggcttgcagtctactgctgttgatgccagcaattcgatcactgcgcaacgtgccgagattgccaagactgaggagcaaatccgcaagctgaaagacagcgtgtcggcactgactcaaatggaagcggaggctaaggaaagcccgtggatgagtcggatcaataccctgatgacgttggaagatatccagcaggcgttaattgaggcccagggggaactcagccaaaagaattatgtacttgaacagcagaccgataaattgcgcgctactgaagctttgcgaagccgggcgctgaatgagtccatcagcaaaacggcggaactggctggagcagtaggctctctggccggaatgtatgctcagctcaaccgtgttacagggttggcaacctctacggcgttaccgacattcgctggcatgcagttgccaaaactggataccaaacaacaagacgcgatgactcgcgcaatgcgcgaacagcaacttgcaggattgaaggggctcgataaggtgcgcctatccgccacctttgaagccgatgatctgaaactcccccctggtcgctacgagcagtatattgcggccaaggttggcgcagagcagaaaacggaagcgctcaccgcagctaccaaggcccagcaaaaagccgagcaggatgctgccagcgctgcgaagaaatcagccacagtcacgggtgaatatcagcagaagatcgcgaacctgaacaaagaaattcaggtagagcgagtgcgcctgaaagagggggacgccgctgcagccttattctctgcatcacttgagaccggcagtaagtggactggtgcgcagcgcgccgaacttgaacggctaaataaaacgttaacggaggcaaaacaacgctgggacgaccacaacgcggcgatcgcatctgacccttaccggcaggcggcacaaacccgaaaagaggcagaggcacagcttcagcgccagattgccggtaacgaaatcaaaagtactgaagagttggcgcggcgcaaacaggaaatcaataccacctacctcaatgcgatagcggaggccaaccaacgcaatgcggtgacaggcaatcaggagctggccggtaacgttgacccccttcagaacattgaaaaccaactggccaagcgtcaagccctgatagagacctatgcaaccgccggtgtcatttcagagcaacgaaaaaaccaactgatcctggcttctgaaaatgaaaccaacgaacagcggtaccaggcggctatggctctgtattcctcccaaggcgacatgcaaaagcttgctgtggatttgttccagagttcgcaggagcgcgttaccaatatgcttaccggcatgttgaccggtacccagaccttcaaagaaggcatgctcaatctgttctccacgctgacgcaatccatcatcaataacctggtggatatggcggcgcaggcgctgattaccagctccatcatgcagactattaccggcatttttggtgggtttgcaggtggcgctgcaggtggggcgtcagccgccgccggaagcaccggtgctatggggatgagcactagctatctggcatatgccaaaggcggtgttgtcgcctcaagcgatctgagccagttcagcgggcagattgtcagcagtcctaccatgtttgcatttgcaaagggggcgggactgatgggagaggcggggccagaggcgatcatgccgctgacacgtgcggcagatggttctttgggtgttcgtgccatatcgcaaggtggagttggtggcggaggcggtggcgcacctcaggtatacatcaatatcgacagccgcggacaaacgacccagaccacaacgccggggtgggagcagtttggtagcgagattggacagcttgtcgatcaacgttaccgcgcactacgggacaaggacttaggacaaaacggcgtgctgactcaacgattaggggggagaagatga

SEQ ID NO: 428171 - DNA, 354 bp, Serratia marcescens
atgatattggaggagtttgtttatagcccccggataaacccgaccggggatatcacccagcgggtacgcgaggtgcaattcggggatggttacaaacagcagtccggcgatggaatcaacggtgagcatcaaagctggccgttaacgtttgtcggcaactggcaatacatcgtcggtattcgcaatttcctgaagcgtcacgaaggctttcgggccttcaagtggcgcaacccgcttttcgaattggggctgtacacctgcaatggccaccaggtcacagcaatggggaaaaactcccgcgctgaaccgatgtatcagctggctgcgacgtttgaaactgcaaatcgaccatag

SEQ ID NO: 428172 - DNA, 750 bp, Serratia marcescens
atgagcattaacgcagacctgcagctactggcaccggggaaaagagtgtatctgttccatgttgacggaagtatgtttgacgggccggaactgttttttcataactatccaatcccttacacggaagctgaattggtagcgaccgacactgatccggcgcagctaccggcaaaatcgatctggtggcagggaaaagagtacaagccgtggccagtcgaagctacagggtttgaggtaacgagcgacgggagcgcaccaacaccaacgttgagtgttgcgaatcttgacggaacgatctcggcgatgtgcctggcgtaccaaaacatggcgcaagccagagtcacccggcactttacttttgcgcaatacttggatgcgcgaaattacccagacggcaacccagaagccgatcccacaaaagaaaaactggatgtttactacatcgaaaataagaccagcgaagacgacgaggtaattcagttccagttgtcttcaccggcagacctacagggcatccaaatccccactcgccaaatacatagcctgtgcacctggtgtattcgagggcagtacagaggcccatcatgtggctataccggcacaaactattttgatcaggatggcaacccggtagacgacccgtcaaaggatgtttgcggcggattactcagcgattgtaaaaatcgctggggcgcgacagagcaattgccgttcggcggtttccctggctcggcattgctaaagaggtaa

SEQ ID NO: 428173 - DNA, 702 bp, Serratia marcescens
atgcgtaaacagataatcagcgctgtactggcgcatgcggcggcggagtatccacgggagtgttgcggtttggtggtgcagaacggccgtcggcagcgctatatcccgtgccgaaatttagcctctgaacctaacgaacagtttagcctgtcgccagaggattacgcggccgctgaggatgacggcacaatcattgcggttgttcacagccaccctgatgcgaccactcagcccagccagctcgatatcgcacagtgtgacttgtcacaactgccttggatcatcgccagctggcctgaaggggatatccgggaggtaatgcccacgcaaggcatcaagccgttgctgggccgaccttttgtgcatgggttctgggactgttacgccataatccgggattggtatcagctcgagcgcgcgatcgcattgccgaactttaaacgctcggatggctggtgggatcggggcgaaaacctctacatgaagttttacgccgaggcgggtttcgttccggcggtgggcgagttgcagatcggtgacgtaatcgttatgcaggtgcaggcgcgtgagccgaaccacgcagcggtttatctgggcgaaggggttatgatccatcacatgtatgggcagctcagcacgcgtgttccttacggcgggtattgggcagagcgaactatcactattttgcgttacaacggctga

SEQ ID NO: 428174 - DNA, 573 bp, Serratia marcescens
atggtgcgcttgtatggggttcttggttctctgtttggccgtgaacatcctctagcaattgatagccccttagaggctattaaagctctctctataaatattcccggattccaacaatttcttctcgagagtaaagaacgcgggcttacttatgctatcttcgagggtaagcgagggttaggaaaagacgacctacaattacaagcaaatggaaatgatattcgaatagcgcccgtaatcatgggaagtaaaaaggctggcatgtttcaaactattcttggcgctgttttagtagttgcaggtgctgttttgagcttcaccccgtttgcagctgcttcgccatatctgtacatgacaggggcatcaatgatgctcggtggcgttgtgcaaatgctttcccccatgcaaggaggcctggcctcacggcaagacccagacaataaaccctcttacgcttttggcggcccggttaatactgttgctcagggtaatccagtaccgatcttgtatggaaagcgccgcattggtggtgccattatctcagcaggcatctatgcggaagaccagcagtaa

SEQ ID NO: 428175 - DNA, 3384 bp, Serratia marcescens
atgcacgtcattgaaggccgcaaaggtggcagcagcagccccagcactccgacagaatcccctgactcgttgcaatccacctcatatgcaaaaattcttctggcgctgggtgaaggggagtttggcggcgatctcgatggaacccgaattttcctcgacggcacgccaattatttcagccgatggcaccgaaaactttcccggcgttcgctgggagtttcgacctggtacaccgcatcaggattatattcccggcatgccggacgtagagaatgatatcaccgtcagcaccgaactaaccagcgatcgtgattggattcgagcagtaacgaatacacaactttcagccgtacggcttcgcttttcttgggcacagttacagcaacagcaagataacggcgacgtagttgggtaccggatcgagtatgcgattgacgttgccactgatggcggctcctatcaagaggtgttgcgcacggccgttgatggcaaaacgacgaccaaatatgaacgcagccaccgtatcgatctgcctgcggccacaaccgggtggcaagtgcgcgtccgtcgcttgacgccaaacagcaccagtaaccgggttgccgataaaatggtggttgaagccattaccgagacgatcgacgccaagctgcgttacccggaaaccgcattgctgtttatccagttcgatgcaaaacagttccccaacattccccaggtatcctgcgagccaaaagggcgcatcgtcagggtgccatcaaattacaaccccgagacgcgggaatataccggcacatgggacggcacgtttaagacggcttggacgaataatccagcctggataacctacgacctgatgataaatgaccggttctccataggaacacgggtaaaggccgaaaatcttgcgctgacaaaatgggatttgtaccagatcgggcaatattgcgatcaactggtgccggacggccgcggtggtgacgggaaagagccgcggtttctgtgtgacgtttatatccagtcgcaagaggatgcctggaacgttttgcgtgacattgcgtcgatttatcgtggctctaccttctgggcaaataatggcatgaatgcacttgctgacatgcctgccgatgttaaatacatcttcacccgcgctaacgttaaagatggcaaatttacctatgccagcgctagcgataaaacgcattacagcacttgcatggtgagctggagcgacccggcaaacggctatcaagacgcaatagagcccgttgtggaacaatcactgatccgccgttacggcatcaaacaggccgatctgacggcgatcgggtgcattcgaaagtctgaaggtatccgccgtggtaaatggttgcttcataccaacgataaagatcgcatggtgtcctttactgttggccttgatggcaaagtaccgttacctggctggatcatcgcggttgccgatgaaaagctggcagggcgtccgctcggtggccgtatcagttccgtcgatggccgcaacatcacgcttgaccgtgtttcctcggctgtggttggtgagcgtttaattttgaaccttccaagcggtaaggcggaagggcgaaccattgcggccgttgccggtaaaatcattacggtcaccactgcatacactgagcagccggtcgccgaggctgtgtgggcaatagacgcatcagacctggcgctgcagcagtaccgcgtgacaggtatcaaggaaggcgatgacggggtatcgttcgatattactgccgtcgagcatgacccgaataagtacgccaaaattgatacaggagcgcggattgaagacccgccaattagcgttatcccgccgggtgtacagccgccgccgaccaatgttcaaatcggcgagtcctcagcagttattcaaggcctggccgtggccacgctgcgagttacatgggatcgggcggaaagcgcgatcgcctatgaggcagaatggcgtcgggacaacggtaactggataccagcaccgcgaacatcaactctggggtttgaggtttctggtatttatgccggacgatatcaggctcgcgtacgcgctataaatccttctgagatttccagtgtttgggccaatgcgccagaaatggtgcttactggtaaacaaggagagccgccagcgctggccagcttcacgacgataggccaggtgttcggaattgtgttgaactgggagtttcctctcggggcagaggacacgcagcggactgaaatctggtacagccagaacgccgacggcagcaataaaatgcacctgggcgactatgcctacccacagcgcagccacacgatgacggggctggcggcaggcgtgaatttctggttccaggcacgcctggtggataagctcgggaataccggcccgtggacgagctgggtgcagggaacatcgagcgaagacgccagcgaggttctggactacctgaaagggaagatcaccgagactgagttggggcaggagctgctggggccagtagaagatgccggaaagttaaaggatatgtggtcagtgaaggtcgggaagaccgttgatgggaagctttacacagccgggatcggcgtcggcgtcgagaacactccggaggggatgcaaagccaggtgctgattttggctgaccgtttcgccgtgctgaacactgctgatggtcaaggatcagcggtatctgcgccgttcgctattgaaggtgaccaggtcttcatgaatagcgcatttattaaggatgcggctatcgatagtgcaaagatcgcccagcaaatacagtcatcaaactacatcgatggtcagcgtggatgggcaattgataaaagtggtgccgctcaatttcatcaggtaactgtacgcggtgttgtttatgcagatgccggtaattttaataacggtacaataggaaactgccatattcttgatacttgcgttattgacggaaaattgtcagccgcaaatattgagggcaatcttgttcagggaaatacgttcagtttcacacttgcaaatactaacagtcagcgaatagttcgctatgaaggtaatgcgttaatgccgatgcgaatttatggctatgttatggctgtaatgagtcgccagcagaaaacaaaaatttacttcaatggaaatcaaggctctgccgttgatgggttatatatcgcaaggaaaggagattctgcaagtagctattcatatacaacaatgttcaacttttcccgcgacgtagctaaaggtgaaggacttgatattaacgtacatgctggggcgttagatcagggagcaggagagtccacgcaatatacggtcatgatttgggccacaccgcaaaacagtggcttctcggttgaatacccataa

SEQ ID NO: 428176 - DNA, 174 bp, Serratia marcescens
atggtgttggtaagaaatatatatttaagtttctgtctcatgagcatggcgaaactgattccgataatggtgattgccttaatcctggggattatctcgcaaaagaaaatgtttatttctccggcattcaaatcgacttcaaagacattaccggccaaccagatgatttcctga

SEQ ID NO: 428177 - DNA, 1107 bp, Serratia marcescens
atgagtgatactacgcaaacccaagatccctgggctaccgcaccggccgataccggcgccgcacccgcaaacgatgccgccgccaacgccggcgacgcctggtccagcgcgccgccgccggccacccatgacgccgccggacaaggcgccgattggctcagcagcgccccggcgcagccggaacacttcagcctgctcgatccgttccacaaggcctgggtgccgttcgatacctgggtcacgcagggcatcgactggctggtgctgcacttccgcccgctgttccagggcatccgcgtgccggtcgacatgatcctgagcggcttccagcaactgctgctgggcatgccggcgccgatcgccattctggtgttctcgctgctcgcctggcaggtctcgggcatcggcatgggcgccgcgacgctgctctccctggtcgccatcggcgccatcggcgcctggtcgcaggcgatggtcacgctggcgctggtgctgaccgcactgttcttctgcatccttatcggcctgccgctcggcatctggctggcgcgcagcaagcacgccgccaaagtcatcaggccactgctcgacgcgatgcagaccactccggccttcgtctatctggtgccgatcgtcatgctgttcggcatcggcaacgtgccgggcgtggtagtgaccattatcttcgcgctgccgccgatcgtgcgcctgaccattctcggcatcaagcaggtgccggaagatctgatcgaggccgccgagtccttcggcgccagcccgcgccagctgctgttcaaggtgcagctgccgctggcgatgccgaccatcatggccggcgtgaaccagacgctgatgttggcgctgtcgatggtggtcatcgcctcgatgatcgccgtcggcggtctgggccagatggtgctgcgcggcatcggccggctggacatgggcctggccgccgtcggcggggtcggcatcgtgatcctggcgatcattctcgatcgcctcacccaatcgctggggcgcgatcgccgcagcaaaggcatcggccgctggtaccgccgcggccccatcgggctgctgactcgcccgttcatcaaacaagcctga

SEQ ID NO: 428178 - DNA, 909 bp, Serratia marcescens
atggtagcagtaaaccaaactgggaaagcctactacggctttcgctcagcgttagatctatcagcgtctattctcgacccgcaggctctttttgctgcatataaggcgcgtgtggttgcagatggcggaactatcccagatgaagctggttgcctggcccggttttcatttctgctgaataacggcatgtatgagaaaaccacgttctgcgctgcgcctgcatttggattgaaagttgacggcgctggaaatgtccaaacagtttataacctgctcggcgatgctggcgatttaatcgcaggctcgcaaggtacgccgccgctgcctatgacttacgacgctacatctcgcgcggttataattcagattacatcaggtggtgggtggtatctcaaaagccgcgcgagccttgtcattcataaaagttcgacttatctgctcgctggccgcatgagcgatctaaatcgcgctgacaacaacggcattactgcaggatacaatctgacaggtttgccgatggcatatcttcgtacaatgattacgaatggccaaaaagagacggaagcctggcggtatggtacgcgagatagcggatggcctgcgggtagtggtggcgcgctcaatgccgcaaccaatatctatgctgactacgtgccatctgcgggcctgttcaaagtggctcaaggggttattgagggttacgagaaagggaagttgcttgtgacctccgcacctgcggcaactggaaaactggccgacttgagcagttacacttcaccgatgttgatcggtggcacgcagttggcgaacaacatcgtcagtgcgtgctacggggcattccaggacatgctctgtcttcacactgccgacgaatccgatgcgattcttgcttcacgtctagggatgtga

SEQ ID NO: 428179 - DNA, 240 bp, Serratia marcescens
atgggtagcattaccctcgccgggcggcagattttcgttctcaacgagaacgacagatacccagagccgcagcaaaatagccctccgatgttcgcgatacgtgaagacgaggagcagcagcactggctatatgtgtggcacaaggggcgctggccgctcgtgtcagaggtaccgtttgaaacagagggcaaagccgttgatgcggcgctcgcattcgactttgcctcgctgtataaatag

SEQ ID NO: 428180 - DNA, 249 bp, Serratia marcescens
atgttcgtagagctgacttttgaccaacgtaatgttaaaggcttgcctgacgcggcagagataatcaaagcagaactgacaaggcgggtacatcgggtattccctgatgcagaggtgaaagtaaagccgatgcaaactaacggactcattagcgacgctaacaaaagcgacagagagaagttaaatcggcttcttgaggatatgtttgaagagtcagaacaatggctgatgagtgacatctatgggtag

SEQ ID NO: 428181 - DNA, 1110 bp, Serratia marcescens
atgaaaacgctactgttgaccggcgctaccggctttttgggtggtgcggttctcgagaaattattgattgaaaatcagtctgttaattatcttttgctggtgcgcgccgacgatgcacaacaagggctggcccgtattcgcgcgaatatggaaaagtttaatatcgacgcgaacctgctgtctaaaattacgatagaaaatatattgttgggcgacctttccgagccggccgactttttaactgacgcacgtattaacaaagtcacgcacgttattaactgcgcggccgttgcttcatttggtaataacccgctcatttggaaggtaaacgtagaaggcactctggcctttgccgaaagaatggcgcaggtgccgggattaaaacgtttcctgcacgtcggtaccgccatgtcctgttcgccggagccgggttcgctggtggcggagagcggcgagtttgaggaagacgccgagcatctggtggaatacacccgttccaaatccaccatcgaacagctgatgcgccagcgctgcccgcaactgccgctgaccatcgctcgtccgtcgatcgtggtgggccacacccgcctgggctgccagccttccagcagcattttctgggtgttcggcatggcgctgatgctgcgcaaattcatgtgctcgctgcaggacaatatcgatgtgatcccggcggactactgcgcggatgcgctggtgatgctgatgaacagcgaaacgctggagaacgacgtttatcacatctccgccggtgaggagagcagcgtcagctttgccgaaatcgaccgcgccatggcggcggcgctggaaaaggcgccggtgggcgatgagtatgcgcaggtgacgtatgacgcgctggtgaaaatgcgccgccagctgaaagacattttcggcccgtgcaacgagcggctgatgctcaaggcgatgcgcctgtacggatcgttcgccatgctcaacgtgcgtttcagcaacgaaaagatcctcaagctgggcatgccgaagccgccgcgctttaccgactatatcgccggctgcgtgcagtcgacccgcgggctgtctatccagcagcagatggtggtggacttcaaataa

SEQ ID NO: 428182 - DNA, 768 bp, Serratia marcescens
atgtacaagattgattacaatagctaccgatcggtcgccagcttcggccaccgcgtgcgttttctggtgctgcactacacggcgcaaaacttcgccgactcggtgaagtcgttgaccggaaaatcggtcagcgcacactatctggtgccggatccgaccgaaaccacctatcaggccgccggcttcagcggcgtgcgcattttcaacctggtggatgagaacgagcgcgcctggcatgccggcgccagccagtggggcacccgcagcaatatcaacgacacctcgatcggcatcgagatcgtcaacctggcgagcggcgacggtggaaacatcaccttcccgccgttcaacccgcagcagatcgaggcggtcacccagctggcgcagaacatcctgcagcgttatccggacatctcgccggtgaacgtggtggcgcactccgacattgcgccgggccgcaagagcgatccgggcccgcagttcccgtggcagcagctgtatcaggccggcgtcggcgcctggtatgacgaagcgaccaagcagcagcgccagcaggaatactgccgccagggcctgccggcgcaggccgagctgctgaaactgttcgcccaatacggctacgatacctcggcggccaataccgcagaaggctatcgtcagctggtgcgcgcgttccagctgcacttccgccagcagaagtatgacggcgtgatggatgtcgaaaccgccgccgctctgcgcgcgctggtcgacaagtacgccgcctga

SEQ ID NO: 428183 - DNA, 264 bp, Serratia marcescens
atgttgaccgttttcccccccactccatgtaccccgtcgccggttattcctggcagttacaccccgcgcgagcgctttatccgcctgccggaagtgctctacaccaccggcctgtcccgctccaccgtgtacgagatgatgagccgccggcagttcccggctcaggtctccctcggcggtaaaaacgtcgcctggctggcctccgaggtcgagcagtggatggatgaacgtatcgccaaccgtcaccagggggccgccgtatga

SEQ ID NO: 428184 - DNA, 192 bp, Serratia marcescens
atggctacgaccctcaccccgactcaccctaaattctgctttttgtttgcggccgtacgccgttctgcgctgactgccgccccgcgtatcgtgcgcaccgtggcggattctgagcacaacgcccgccgcgtactggtccgtgattatgtgttgtcctttgccggtcgtctgccggttaaggcggttgcatga

SEQ ID NO: 428185 - DNA, 264 bp, Serratia marcescens
atgaagacgctggccgaccgttactaccgcgatacccattatcctatcccgcacgccgattttctgcgtcttcagcatgcgcacgccaccggcgtgctgttcctcgacctgctggacaccctcgacctcggcggacagcgccccgatgccacgcaacaggcatcgtttgcctcggtcattgccttgctgactgaccagctcggccacgtcgtcaacacctgtgaaacccaaatccttgcccgcatggaggccaccgccgcatga

SEQ ID NO: 428186 - DNA, 1167 bp, Serratia marcescens
ttgctgattcatcctaacggctcaaaatactggcggttccgctttcgctttggtggtaagcagcacctgatggcgtttggggtttatcctgacacatcactggctgatgctcgccaaaaaagggaagaagccagaaagctggttgctgctggtattgatcctcgcgagcataagcgtgctgtaaaagaagagctggcgaaagaggccattacctttgagtcagttgccagagagtggcacgcagctaataagaaatggtcagaggatcactgtcgaagggtgctgaagagcctggaagacaatctgtttcctgctattggcaagcgtggtattgaagagttgaagactcgcgacctgcttgcaccgattaaagttgtagaggcaacaggtcgctttgaagttgcttctcgccttcagcagcgaaccacagcaatcatgcgatatgcggtgcaaagtggtttgattgattacaatccggcccaggaaatggcaggagcagttgcttccagtaatcgtgtccatcgcccagcgcttgagttgaaacgcctacctgaactgctacaccgaattgacggttacacgggacgccctttgacccgcttggctgttgagctaacgttgttaatcttcattcgttccagtgaattgcgatttgcccgctggtctgagatagatttcgatacggcaatgtggacgataccggctgaaagaaaagctattgaaggtgtgaagcattcaaagcgtggctcgaaaatgcggacacctcatctagtgccgctatctcgccaagcattagcaatcctaaaacaggttcacaagatcagtggtgagcgtgattttgttttcattggcgatcatgatcctcgcaaacctatgagtgaaaacacggttaacaaggcgctgcgtgttatgggttatgacacgaaagtagttgtttgtggtcatggtttcaggactatggcatgtagttcgttgatggaatcgagattatggtcacgggatgctgtagagcggcaaatgagtcatatggagcgcaactctgtgcgtgcggcttacattcacaaggcggagcatttggaagaacgtaggttaatgttgcagtggtgggccgattttctagatgctaatcgtgagaggggagttagtccatttgattttggctgctga

SEQ ID NO: 428187 - DNA, 3372 bp, Serratia marcescens
atgtctcgtttttccaaaactactgaacgattaaaaaaagtcaataataagaaacgtagttttcaccaagaattagtgcttaatcgttggatgttaggcttttttaaaggaggtgaccttagtgtactcaaagttcggcttggggatgacagacacgaaggtattgatgaggacgggcaatcaaaattctttagcgaacttactcgcgacttgttcgaagttgagcgtgcatcaatcgcagatttacgacgctatgatctaaacatagttaaccattggcaaaacataactcttcagcgtaataagcaggaaggacacgagctgcaaatgaaatattttcagtatctgtctttactattcacagaaatttacttggattggtactttaataagaggcaagagcttctggatggtttaaatgatgaaatggccatttatcgtaaagaatccggagctgagccgttccaagattttgatgttgatgatttgaataaaattgccttctggaatgctacaggtagcggcaagacactgttattacacgtaaatattcgacagtatttacattactttcaagctgggcgtaatgattattatccaagcaaaattattcttcttacacctaatgaagggctctcacgccaacatttagaggagctgaacctatcaggcttaactgctcagctctttaataaaaatcaaacattatattaccctgggatagtcgaaataatagacattaataagctaggtgatgcaatgggtgataaaaaagttgcagtagaagctttcgaagggaacaacctagtactcgtagatgaaggtcatcgcggtacagggactgctgcaggtgcttggatgagccgccgagaagtgcttgttagaggaggttttgcctttgaatattctgctacttttggtcaggcagtagctaaagggatgattatttcagcggctgaagaggacatacagaaaaagcgcgctaaaatgctcttcggtacagtaaatttgaaaaagttaaacgacgagcaattatcacaactagtgctaactttggaggataaacgtctagctaagatcacagctacgcgggagatctacgcaaagtgcattttatttgattactcttacaaatttttctacgaagacggttatgggaaagaatcattaattctgaatatgaatggagtcgcttacgaacatgaagaaaatgctcggaagtattttactgcttgtctactgtctttctaccagcaactctggctgtggagcaacaatcgcgaccagttgattgattataacgtcgaaaagccattgtgggtttttgtaggtaattcagtttcaggggaagagtcagatattttagaggttgtaaacttcctttcctattttctgaataatgatgtcacgattaaatcatggatcgcggatttcattgctgacagggctcaaatattggatgcctctggaaataatattttcaaaggacgattcactccattgatgagttacatggatcaaatcgatactttatatcgtgatatcctgatgcgtgtttttaatagcacatcaaaacaacgcttaaagcttgttaacattaaaagtagtaaaggtgaactagctctacgtgttggagatgctgtgccgtttggactaattaatattggtgatgataccggtttctttggtatggctgaagattccgatcattttgataatgaaagggatgatttcggtggagcattattttcttcgttgaatgaaaaaaatagcccgcttaatatactgattggctcgcgtaaatttactgagggttggagtagctggcgcgtgtcaaccatgggccttcttaatatgggtaagggtgagggctctcaaattattcaactatttggccgaggagtgcgtcttaaaggtaagaatttttctcttaagcgtactctcccgcatgaacgccccaaagggttacatttagaaaaacttgaaacgctaaatatcttcggtgtacgtgctaattatatggcagcctttaaagactatctgcgtgaagaaggcgtgacgccaagtgacgagattcttgaattggatttcccaacaaggagcaatctacctaaagaaaagttaaagacattaacattaaaggatggttataaggataatcagaagcagggtttcaaacgaacctactttccttggctgtatgagataccctcacagtttaaagggaaaataaaagaaccacatgtggttcttgatctttatccacgagtcgaagcattatctacttcccgtaaaggatcttcacttttatctgaagctcgtcataaagggacacttaacgctgatttatttactgtatttaattgggatcggatctatttagctctacaggattacaagctacaacgcagctggagcaacttgaggttagaacgtcagaaattgatcgagttttgtaataagcattctaattggtatactttattcattccaagtacagagcttgaagtaaattcatttactgatattagtaaacaggaagatatactcgtacgacttctcatcgactatacggatcgcttctataaagcacttaaaacaacctatgaggggcagttttatgatattattcgtatggatgagaatcatggttcaatgctcaaactctatcaatttgatatagaaaatagcgacgatggtatagaatattttaacaaattgaatgttttgaagaaccttgtggctgaagggaatataggtgaagctagcaaatggaatgcttccaatatggttgcaataagcttcgaacgccatctttactatcctctattagctttagagaataaggaatctcttcctctgaagatgcgacctcaatctttagacgcacctagcgaatggaattttgttcatagcttacaagagttttataattctcaagaagggcaagatatcattggccagcgcagtatttatcttttgcgtaatgcaagcagagaggataaaggtttaagttttgctttagcaggaaatttctatcctgatttcttgttgtggctagtagatgataaaactggtaagcaatggctatcatttgttgatcccaaaggtctacgaaaccttgatttgactgaccctaaattggggctgtataaagaggttaaaaaactggaacgtaaactagcagaacagtcagcactacatgaatcagagctgatactaaatgcattcattttgtctccgacaaaattctcagaactattaaacattggaaatcaaatccaaaaaacagatcttgaagacaaaaatatattgtttatggaagacggtccgaaaacttacttgaagaaacttttttcaaaaataaaataa

SEQ ID NO: 428188 - DNA, 3102 bp, Serratia marcescens
atgactatcaaacaaactgccaaactccaagagcttgttaataggttgcgcgaaattttccaaatcgaccgtccagagcttgattttggcatttacaaggttctcaacgcgcgtgctaacgagatcagctactatcttgagcatcgcctagccgctaaggctaaagctgtgctaagtaaaagtgccaatacccaatatgaacttttagctagagaacttaaggataaagaagcacagtaccaggctgatggtatagaaccagatacagtacctaaaatccaagaattgagacgtcaattgacgcaagaaaatacagaaacgctcgaaaatgagaatgccgttttttcacatctgctcacctttttctcacgctactatgatcaaggcgactttatcagtcaacggcgctacaaaggcgacacctatgcgattccctatgctggtgaagaagttatgctgcattgggctaataaggatcaatactacactaagagcggtgaaaattttgccaattatagcttcaagctgaaagatggccgcacagtcaacttccgcctaatagcagcagatgtggctaaagataaccgcaaggataatgacaaagaacgcagatttgtgatagcagcacaaagaacggtcaaacgtattgataataacggtgatgaatacgaagaagaattactaccggtagaggaagttaagggaacaaaaggtaatgtactgctgattcgctttgagtactcagctcaaccaaaaggtacaaaacaagaaacgctgataactaaagcggtggaaaccattcttaatcatccagatgttaagtcgcgttggttagatttaactagccgagcgcccactgaaaaaaatcctcaacgcactttgcttgagaagcatctgttagattatacaactaagaacacagcagattattttatccacaaagatctggaagctttccttcgccgcgaactggatttttatatcaaaaatgaagtaatgaacttggatgatgttcaaaatgcaagctcatttgctgacatcgaaaaaaatctacgcatgatccaatgcttccgaagcattgcgttagaattgattgatttccttgctcaaattgaaaatttccagaaaaaactttggttgaagaagaaatttgtagtatccagccactattgcattacagtcgacagaatatctgaagaaatgtatccggaaatagttgccaatgaggctcaatggtcacaatggaataagctaggtgtttggagtgaaaataatcctggtacaattgatgatctaaaatcatcactatatcgcatggtggacaccagcctatttagcgactcttttaaagccaaagtattacgcacatcacaaaacttagataaaaatattgatggaattcttattcatagcgataacttccaagctttaaacttaatgcaagagcgctataaggagaaagtaaaatatatttatattgatccaccatacaatacaaactcgactccaattctttataagaatgaatacaagcattcctcatgggcgagcttaatgcaggatcgtctacaaaaagggatgaagttattaaaattcgacggcgttaagacagttgctatcgatgattccgaaatggttaatctatcaactatacttgaacaggttgcaccagaacatactctttcgaggataacggtagtccacaatccaaaaggttctattacgcgaaacttcaatagaactcatgaatatgctttgtttttaactcgcgatggtctttcgggtagtatcgcaagaacattggaggaaaatagttctccacgtaaaatgcgccgatggggtgagaactctcgaagaattgatagacgactgtctttctatccgatatatctcctcgatggcaagatagtagatattggtgttgttccagaagatgactttcatccttctggaaaaaatatcgttatgcccgatgggcgtattgaagtttggcctattgatcaagatggggttgagagacgttggaactttggtctcgattcaattcgcgacaacttggatcgtatcgcagccattaataccaaaggtgaatgggatctttttgttacgcacgaacaaacagtaccaaaaactgtctggtcaggaggagagttcgatgccggaaaatatggtaatagtcttctcatcaatatgcttggcgaaaaaagattcgattttccaaaatctattcacctagtaaaaaaatgtatttctctagcaacacaagcggatactgacgctataattttagattactttggaggtagtggtacaactgcacatgctgttattgatctaaaacggcaggcaatttcaactggtcaaaaaaacaactccagtttcattttagttgaacagggtgaatattttgataaggttacaaaacctcgtgtcattaaagccgtatattcaaaagattggagcgaaggaaaacctatttcttctgaaactggtatttcccaatgctttaagattattaaacttgaaagctatgaagatgcattaaataatctgcaattaagccgttccaccactcaagatgatctgtttgaaaagcttcctcaacaagcaaaagatgattatctacttcattacatgcttgaagtcgaaagccgtggttctttattatcagtgaaagatttccataagccatttgactatatgttgaatatcgcaattgactccgctggagcctttacaaagcaaaaaattgatctagtcgagacgtttaattacttaatcggactagaagttaatcaaatcgatgctcatatagagaaaggctatactactataacgggtattctacctaatggtgaatcctgcttggtattatggcgagattgtgaaaaacttgattatgaaggtgttaataaactttgcgatatactggccattaacccaatcaataataaatatgatgttgtttatatcaatggcgaccataacattccaaacgtattcacacagacaatggaagaaggtggaaatactcgcactctcaaactgcgtcaaattgagtcagaattcctctcccgaatgttctttatggaggacaactga

SEQ ID NO: 428189 - DNA, 540 bp, Serratia marcescens
atgcttaagagacgattcgatgcggagaaggctattgaggccattctgtacgttgcctccaaggcgccgatccctgacttgtaccacgtagggaagattttgtattacgcagaccgtattcatttggaaaagtacggacgcttgattagtggcgatcgttacactgcaatgaaaaacggccctgttgcttctgggacatatgacatcctcaaaactgcggatgaaaccagaagtggtcagcgttgccctgatggctgcgatagagagcatgttaaagcttccctcagtgttctcgggaaagctgacaactaccgtgttatcgcgaaacgagactacatctccgatttctttagcaagtccgatattaaatgtatcgaagaggcgatcagaaattacggtacactcagttttgaacagctcaatgacatcagccatgatgaagtgtggcgttctgctgacctgaataacgaaatccccttagaagtcattgctagtcattgcaaagacggcgaactcttggttgaatacctccgaggctga

SEQ ID NO: 428190 - DNA, 672 bp, Serratia marcescens
atgatgaccccaaaacagaaacgagaaatcaaacacaacgcatgggcgactgttgccggtgttcctcgcaagaagtacctgggtaagtaccagcgcctgacccggctgcaaacattgtggatcacctcgctgttgaacgcctggggcgatatgtacggcggcaacaccgacgggaagttgaagtgcagcggcggcagcggtgtatgggggcaaatcgtgcctgagcagtgggacgacgaaagcgcggcgcgaattgtgaaggtgctgggcgacctgcgcaaactcgggtatcgcggggaggagcagttgaagaaggcaactaccattctttggccgcaccgctcgcttgagtcgatgctggtggctgctgacgctggcgaggaatgcgacttcatggaaaaagctgtgctggcgtcgatgaagcacgataacccggtctacatcatcggcaagctgttctacacgggccggaacaatacggtctcggtgctggggcgctacatgcaaaatcattacgccccctggctgacacgcgatcaggtggatgaccgggtacgctggtgcattgaaatattcaattctgcggtgttcgtcgccgttcgtgcggctatctgcatcgaaaatgaagaaaaatgcaaaaacagcttgaaaatagccaaagaaactgcataa

SEQ ID NO: 428191 - DNA, 579 bp, Serratia marcescens
atgaaaaaaccaactaagccgaagcagtacaaggcgaaaaagtgcgcccaatgtggtgaaacgttcacgccggtgaagtacctgcaaaaggtctgtggcccactctgtgctatcgcataccagcgtgacgcacgtaagcgtcttgaggaaagggaacgcaaggacaagctgaaaattcgcaagctggccgttaagccgctgcgctacttcatcaaccaggcgcagaccgaatttaacgcctacatccgcgaacgcgacgcagacgagccatgcatcagctgtggacgctaccacaccggccaataccacgccgggcattaccgcacggtggggagtcatccggagctgcgctttgatgaagataactgccacaagcagtgctcggtctgtaacaacttcaaatccgcgaacctgagcgagtaccgccctaacctgatagccaagataggtcaggcacggtttgaccggttaatggggccaccgccgaaagtcggcaagctgggccgcagtgactatgagcgcatccgcgacacgtataaagccaaacgcaaagcattgaagcaggagaaggcagcatga

SEQ ID NO: 428192 - DNA, 987 bp, Serratia marcescens
atgaataccagacaggcagcgatcggccattggccgagaatattcgagttttacggcctccccccggtaacagggaaaaaacattttaagggtgaatgcccgctttgtggccgcaagggcaaatatcgttgcgacgacaagaacggcaccggctcttacatctgcgcatgcggcgcgggtgacggttgggcgctgctgaccggggcaaccggcaaggactttaaaacgctggcagcagaggtcgataagctgattggccgcgtctactcgccggaggaggggtatcaagctggtggcccttcatctggcatagcctcgcaacgccagcgcgtgagctgcaagtttgcatcgctgaccagcctgaaaggcaccggcgcagaccgttacctgaagctgcgcggcatcaccagtctgccacaggacaacgtccgctactgcgaccggcaacgcgcagcgggtggcgaataccaatcgatctatgcgctggcaacggacgacaaaggcgaactgtgctacctgcaccgcaccctgctcgacggggacaaaaaagccacggtagctggcgcgccgaaaaaaatgatgaagctgcaagaggacagctatctggagcacgccagctcggtcgctatccgcatgttcccaccgtccaccacgctgggcatcgctgagggcatcgaaaccgcgctgtcctgccatcaaatcacgcaatgtaacacctgggcgacgctgaacaccacgttcatgaagaagttccgcgtaccgcgtggagtgcaacgcctgatcatctttgctgacgcagacaagaacgcatccggccacgctgcggcgtttgagtgcgcccgcgccaatctgctggcaaagaacgatctccaacaagtctcagtgcgctggccgaaatccggcgactttaacgatctgctgcttaacggctcagaggtctacgagtgggtattccaccgcgaggaaaacaatgaaaaaaccaactaa

SEQ ID NO: 428193 - DNA, 1530 bp, Serratia marcescens
atgacgcttacaatccagccacgcgaaaaacagatagttgcactgaacatgctgcgcgcggcgtggaagcaatacgcctcgttcatgatgtacgccccggtcgggttcggcaaaaccgcaatcgcggcgctgatcgccagcgggttcatcagccgcaacatgcgcataatgtttgtggccccgtacaccgtcctactcgaccagacagcaacgcgttttattgagtacgggttgccagccgaggaaatcggctacatctggcgcgatcatccggcctatgacccgagccgccttattcaaatcgcgtcagccgatacgctgatccgccgcgacttccccgacaacatcgatctgctgatcatcgacgaagcccacctgaagcgcaaaaaaatgctggagttcatcgacgagctgaccgctaaaggcgtgaaagtgatcgggttgtccggtactccgttctcggcttggctggggacgtattaccagaagctgatcaagccgacgacgatgaaagagctgatcgctatcggcgcgctgagcaaatacgaattttatgccccatcgcacccagacctgagcgaagtggagacgtcagagcaagcaggctatggccgagactacaaagaacagcaggctgcagatgtgatgagcgacccgacgctggtgggcgatatcgttaagaactggctggagaacggggaagaccgcccgaccatttgtttttgcgtcaacgtggcccacgcaaattacgtgaccgttgaatttagcagagtgggtgtgaccgttgaagtgatgacggcggcgacgccacacgaagaccgccagatgacgatccgtcgcttcgagcagggcattacgaagatcatcatcaacgtcggcgtgctggtggccggttttgacagcgatgtccgctgcatcatctacgcccgcccgacgaaatcagaaatccgctggctgcaatgccttggtcgtgggctacgcactgcgcctggtaaagatcactgtctcatcttcgaccacacaggcaccgtgcataagctcggctatcccgacgatatcgaatatgactacctgcctgccagttctgacgggatggagaaaacgccagcgcgcgttgttaagacagaccagcctgagcgcctgccgaaagaatgcacccaatgccactacgtgaagccggtcggcgtctacatctgcccgaaatgtggcttcaagccgatcgctggcgaggacgtagaaaccgataagtcacgcggcctgaaaaaagtgaagcaagccaaggaggttgtcaccaaagaagtgaaacaagcctggtggagtcaaatcatctactaccaacgcatgcgcgccgcccagggcaaacccgtaagtgacggctggtgctcgcatgtctaccgcaaaaaattcggggtatggccgcaagggctgtatcacgcaccgatggccatcacaccagtggtgagcaacttcatcaaatcaacacagattgcctacgcaaaatctaagcaaaacgaagggaaagccgcatga

SEQ ID NO: 428194 - DNA, 855 bp, Serratia marcescens
atgaagtatgtctttattaaaaagcatcaggctgagttcagcatcaaaaccatgtgtcgggtgctgcgggttgcccgcagcggctggtatgcctggcgttcccgtcgccatcatataagccagcggcagcagttccgtctggcttgtgatgccgcggttctcagggcattcactgatgcaaaacaacggtatggtgcgccacgactcgcggacgaactcccgacctacaacatcaaaacgatagcggacagcctgcgccgtcagggacttcgggcaaaggcagcccgcaagttcagcccggtcagttaccgggagcatggactaccggtgtcggagaacctgctgaagcagaacttttacgccagcggcccgaaccagaagtgggcgggagacattacgtatcttcgcaccgatgaaggctggttgtatctggccgtagtgattgacctgtggtcacgagcggtaattggctggtcaatggcaccgcgaatgacggcacagctggcctgcgatgcgttgcagatggcactgtggcggcgcaagcgtcctgaaaatgtcattgttcatactgaccgcggtggtcagtactgctcagcggattatcaggcactgctgaaacggcataatctgcgcgggagcatgagcgccagaggctgctgctatgacaatgcgtgtgtggaaagcttcttccactcgctgaaagtggaatgtatccacggcgaacgctttagcagccgggaaataatgcgggcgacagtgtttaattatatcgagtgcgattacaatcgctggcgtcgtcacagtgcctgtggtggactcagtcctgaacaatttgaaaacaagaacctcgcttag

SEQ ID NO: 428195 - DNA, 300 bp, Serratia marcescens
atgacaaaatcagtaacagccagtaaaaagccacgtaagcagcacacacccgagttccgccacgaagcccttaaacttgctgaacgcattggcgtcgctgctgccgcccgcgaactcagtctgtatgaatctcagctctatacctggcgcaccaggcaacagcaacagctgacgtcatctgaacgtgaaagcgagctggctgctgaaaatgcccggcttaaacgccagcttgcggagcagtcagaggagctggccattctccaaaaggccgcgacatacttcgcgaagcgcctgaaatga

SEQ ID NO: 428196 - DNA, 1944 bp, Serratia marcescens
ttgaaagtttccaaaatagaattgaaaggtgtcaaatcctttgaagatataactttagtcgaacttcctcctgataccccaatgtctgcgttttcagggaagaatggagcgggtaaatcgaccatattgaaagctgtatggcttacacagaaagctcactttgttaaacttttaaatgacatcaatacaagccaagttttctcacaagaaataaagaaatacctcaatacaaaagatgcatacataaaaataagctttattactgaagacaatgaacttgatgtgaaaatttccaaagacagcaacgaaccgctggggtatcgaattatctacagcgatgaagcattgctgacgaaatactggaacctttcgactccaaacaatctggtgctatacatagatgctagcaaaggcttttctgaagccaccctgacatttgacgaaataaatataaaaggtaacgataaaggtagcctaatcctagaggcaattttaaatccggaaggtcttttttcagggatatatcgtcagcttgtaaaggattatgttcatgatagacttatcccgagcaaaccagataggcttctttattatcacatttcttcaaagttattcacccacctaatacctactatagagttaagaaattttagtggaaaccatatgcctggtgaatttgtacttctaggaaaagcaggggagaacaagagcaggccactttatgatgttagggatttcagctctggtgaaaaagcgcttctcagcacactcacatttttatgcatctcaaaaacagtaagcacgctgattattgacgagccagaaaatcatttccatgagtcattgctgcttgaattcatgagcgttctccacagactgagcgaaaaaggaggaatccacaaatggatggaaggttttgaaggattgggtaaaaaagtcaaattagactgggtcgaagcagagtacaaagatcacaatatcaatcaagtcctagtatcaacccactcaaaatcactaatatataaattttttcttatcgggaaaaattatattgtcaacaaaggtatctcttcgatttcttatgaagaagctgaagtggaacttagaaatcttggtttaagctctatttatagtaaggttctattggttgaaggtgacggagatcacgaggctcttgaacatacattacaggagcaaagtctccagatcaaaccacttaatggttcatcagcagttatagatacatttaaacgactggcggagcttaaaaacttcgtccaagactctaagtttgtttttcttgtcgattcagacaacaaaccagatgagttttttgagaagttaaaagaaatagacccactatattacaatggcaattttataaaaattgatcgtcacgaatttgaaaactattttctggatgttccaataataaaatcggtattggaaaagtttttagatttatctggggataacagtaaaaatctagatgatgctgcaattaagtctaagcttatagatattgcgcgcgaatctctacccactgtctacagaaaagaaatttccctcgctttccagcaggttattgaaaggaagtttgcgtcgttgatttgggggaataaacactttgactggactgatgctggaaaaatccatgagcagattacgagtaatacattaacagattctgaatttgaaaatttaaaaaataatctttcaatagagtctggaagaatttttggaaaatatatgacaatcagtgatgatgaccttctgaaacgttgcgatggaaaacaagtgctttccaaagcagcttcctacttcgcaaataaagcaggtgtcaatgctcatacgtttaaaaaagctctttataaaacggccttttccactcagaattccgaagcgtcaaaacttatcagtattattttaaataagctttcgtag

SEQ ID NO: 428197 - DNA, 1308 bp, Serratia marcescens
atgaaaagcaaagtgtttaaccgcagcctgctggcgggcatggtcatcagtctctgcagcagtctgttggcacccgccgcgctggccgcctgtgcgggtaccgaactcagcgcctgtcccgcgccttttgatgcgcaattgccggacacgcacaagatgctcacctggagccagagcgaccgggtgatcggttttcgtaacgactaccgcaactatgcgggggatgtgtttcaccacggcaacgccgtgccgctgccggctgccgctaaaccgttaaccgacgccagctatcgggtgaatggcaaaacctacagcctgcaggattacctgcagcgccagaacgtcagcggtatgctggtattgaaagacggcaaaatcgcctggaaatatctggggcagggcaataccgacgctaccctgtggacgtcgcgctcggtgggcaaatccgtggtcgccacgctggtgggcgtggcgattaaacagggcaagatccgctcgctcgacgatctcatcacgcaatacgaacccgatctgaaaggcaccgcgtgggacggcgtgaccctcaggcagctgatcacccacacctccggcgtggcgtggaatgaggattacactaacccgaaatcggactttgcgcagctgaccgagtgtgaagccaagcccggcacctacgcctgcgtgcgcaagctggtggccggcttacgccgctcacacccggccgggcagaactggtcttactcctccggcggcgcgtggctgctgggcgatgtgctggagcgagccaccggcatgccgctggcggcctatctgcagcaaagcatctggcagccctacggcatggcgagcgacggcgtgtggcatgcctacgccaaaggccagcacgacgtgggcgcgcatggcttcaacgccacgctggaagactgggggcgcttcggcgaattcattctgcataacgggaagctgccgaacggcaaacagatcctaccggaagattgggtagcccagtcatccaactggacgcgggcggcgggctcggtgtcggcggcccatcctgacggcatttacggcttccaatggtggaacaacgcagtgccggtgaatgcggccaacgtggaacccgccccgcaggcttccctcaaacattccctgtgggcgctggggatcttcggccagatgatcatggtcaatcaggcggagaatctggtgatcgtccagtggtctacctggccgcaggcggagccgtccttcagcgcgcaaccgctggaggcctcgctgatgttcagtgcgatagcgaaggcattgcgttaa

SEQ ID NO: 428198 - DNA, 543 bp, Serratia marcescens
atgagtagacgcttaaacagagattaccgcacaaaaataagaaacattccccgccgtatgaaggcacttaagcgttggtccgaaaccttccatgatccagcacgagctgacttttctgaggacagtcattactggaattacaaaatacctgtagaaatcaacctggttgaaggaaagcacagtaacaaaaaaattaaggctgactgtgcgcaggccttgataaatgcctgtgctaatttgatgctcgcaacagcagattgcgacgacaacccgcgaattactgccgtcatctgcctcccggacatgtttaccagcgaaatctgtttgtaccattcagatgagtactttcagggttttatttcagaagacagttctgacaatggttcatcgataattttaaaagaacgcagccttgctaaggaatggggacttattcttccagatggcgtgcaagagttaggtgttgccattgaataccatggcggtgatgaccccgatgagtggttcactggcgaacgttggcattatggtcaactacaataa

SEQ ID NO: 428199 - DNA, 807 bp, Serratia marcescens
atgcaaaaactcactcgttcgatcctcgccgcgctggtgtgcgcctctttcagcaccgcggcgctggccaaagacgtgaccgtgatgatctccggcggtttcaaggccgcgctggagaaactggccccggaatatgaagcccaaagcggcgacaaaatcattctggtgtccggcccttccatggggaaaacgccgcaggcgatccccgcgcggctggcgcgcggagagcaagccgatgtggtgatcatggtgggcgacgcgctgacccaactggacaaaggcggctggatccagcggggttcgcgcgtggagctggccgattcgccgatcggcatggtggtgaaacagggcgcgcccaagccagcgataaaaacggatgccgagctgcgtaatgccttgctgcaagccgactctttcgcctattccgacagcgccagcggccgctacgtcagcggccaactgttcaaaaagctgggcatcgaggaacaggtgaaaggaaaagcgcacatgattgagcgcattccggtggcctctgaagtggcgcaggggaaatacgcgttgggcttccagcaggtcagcgaattgctgcccgtggcgggcgtcacctttatcggcgaactgccggaaaacgtgcagtacatcacccgcttcgccggcgcggtaaccgccaaggcggaacatcgccgcgaaggcaaagcgctgctggagttcctcgcctcctctcaggcacagccgaccattcgcgcgaccggcatgcgaagcgtgccggcgcagcagccggtcaggcagagtgataccgttcagtaa

SEQ ID NO: 428200 - DNA, 1296 bp, Serratia marcescens
atgcattcctctacctcacccatgaccacccgggccagaaccggcgcgatcctgcgcgtcacctccggcaactttctggaacagttcgacttctttctgttcggcttttacgccacctacatcgcacacacctttttcccggccagcagcgagttcgcctcgctgatgatgaccttcgcggtattcggcgcaggttttctgatgcgccccattggcgccatcgtgctgggcgcctacatcgataaagtcggccgccgcaaagggctgatcgtcaccctgtcgatcatggccgcgggcaccttcctgatcgtgctgatcccctcttaccagagcatcgggctttgggcgccgctgctggtgctgtgcgggcgcctgttgcaaggcttctcggcgggcgcggagctgggcggcgtgtccgtctatctggccgaaatcgccacgccgggccgtaagggcttctataccagctggcagtccggcagccagcaggtggcgatcatggtggcggcggccatgggcttcgcgctcaatgcagcgctggaagaaagcgctattcgcgagtggggatggcgcctgcctttcctgttcggctgcctgattgttcccttcatcttcttgctgcgccgcaagctggaagagacgcgggaatttaccgcccgccgtcaccacctggcgatgcgcgacgtgtttaaaaccctgctgaaaaactggccggtggtgatcgccggcatgctgatggtcgctatgaccaccaccgcgttttacctgatcaccgtgtatgcgccgaccttcggcaaaaaggtgctgttgctcagcgcctccgacagtttgctggtcactttactggtcgcgatttccaacttcatctggctgcccatcggcggcgcgctgtcggatcgcttcggccgcaagccggtgctggtcgccatgacgctgctgacgctggccaccgcctacccggcgctgagcctgctcgccgccgcacccagcttcagcatgatgctggccgtgctgctgtggctgtccttcatttacggcctctacaacggcgccatgatcccggccttaaccgagatcatgccaacggaagtgcgggtggccggcttctcgctggcctacagcctggcgacggcggttttcggcggctttacgccggtgatctccaccgcgttgatcgaatacaccggcgacaaggcttcaccgggctactggatgagcttcgccgcactgtgcgccttgctggcgacgctgtatctgtatcgccgcatcgccatgccgctgcaaaccgcgcgctaa

SEQ ID NO: 428201 - DNA, 1209 bp, Serratia marcescens
atgaagaaaacgtgggttatggcggtgttttcggccctgatttcagggcaggtggcggcgcagagttgggtgctgaccagcgctgaagatggcgtggagaaaggaaactggaagatttcgagtgaggcgctgaaggttaaggataaaacgttcagcattgagcagaaagtgttgcacggcggcaagcaagaaggcagcaaagtcgtgattatccgcagcgaggatggcctgaccatcacgctgagtcccacgcgcggcatgaacctcctgcgggcggaaggatttggcgcgaaaatggggtgggattctccggtcaaagaggtggtcaaccccgcctttatcaacctggaaagccgcaatgggctcggctggctggaaggtttcaatgagatgatggtgcgctgcggctatgagtggaccggtcatccggtgaccgaaggagggcagatttacaccttgcacggtaaagcgggcaatacgccggcctcactggttgaggtcgaggtagcggatacggcgccgtatgaaattcgtattcgcggcctgatcaaagagagcacattcaaaaaagccgatctgcaaaccctgaccgaactgcgctacgtacctggcagcaacagtttcagcctgcatgatgtgttaaccaaccgggcggattatccccacgactaccagattatctaccacagcaatttcggcgcgccgattctggaaaatggcgcccgcttcctggcgccgatggccagcatcagcccgtttaacgactatgccaaagccgggttgaagacctggggaacctatgccggccccaccaaagggttcgatgaaatggtctttaacattaagccattatcggatccgaatcatcagacactggcggcgctggtcaatcacgcgggcgacaaaggggtggcgattcagttcgatacccgccaattgcccgtcctgacgctgtggaagaataccgatacgttaaaacagggatatgtgacggggattgagccgggcaccagctatgcctacccggtcaccatcgagcgcgaacaaaaacgcgttaagcaattgcagcctggcgccagtgcgcagtttgatctgacctataccttgctgcacagcaaagcgcaggtggcggatctggagaggaagattgctgatattcagggtaaggtaaaaattgatgaaaatgccgcgccgatagccaaagagtaa

SEQ ID NO: 428202 - DNA, 897 bp, Serratia marcescens
atgaaacgtgatgagatagccgatctggtggcattcgtcgtggtcgcggaggaacgcagcttcacccgggccgccgcccgcctgggcatggcgcagtcggcgttaagccagatagtccggcgcattgaagaacggctggggtttcgtctgctgacgcgcaccacgcgcagcgtggtccccaccgaggccggagagcaactcttatcgacccttggccctatgctgcatgatttagatgcggtcatgacctcgctgggcgacctgcgcgatcggccatccggtacgatacgcattaccacggttgaacatgcggcaaaaacgctgttgctgccggccatgcgcacgctgttgaaatcccaccctgaaattgacgtacagctcgtcatcgattacggcctgagcgatgtggtcgccgagcgtttcgatgccggcgtccgtctggggggagagatggataaagatatgattgccgtgcgtattgggcctgacattccgatggcgatcgttagcgcgcctgattatcttgcccgacgaggcaccccgacatcggtggcgcacctggtcgaccatcaggcaattaacctctatcttcccacatcgggcaccgccaaccgctggagactcatccgcggcgggcgtgaagtccgggttcgcatggaaggccaactcttgttaaacaccatcgacctgatcctggatgccgctatcgacgggcacggcctggcctacctaccctacgatcaggtacaggccgccattgatgaaaaaaagctcgtccgcgtgctggataagttcaccccggatttaccgggatatcacctttactacccgcatcgcaaacacccaggctctgccttttccctgctcattgatgtgctgaagtttaatggaacataa

SEQ ID NO: 428203 - DNA, 918 bp, Serratia marcescens
atgaaccagaaaatcagcttcactaatagcaataacccgatgattgatctctctgccgtgctctacttcccgccggcattcgacgcgagccgccagtatccggccatcgtcgtttctcacccgggcggcggcgtgaaagaacaaaccgccggcacctacgccgcaaaactggcagagcagggttttgtgaccgtagcctacgatgcctcttaccagggggaaagcggcggcgtcccccgtcagttggaaaacccctatatccgtaccgaagacgtcagcgcggtgattgactacctgaccacgttgccttatgtcgataatgcgcgcattggcgcaatggggatttgcgccggcgcgggctataccgccaacgccgcgatccaggatcgccgcattaaggcgatcggcaccgtcagcgccgttaatatcggctcgatgtttcgcaacgggtgggaaaacaatgtgaagtccattgatgcgctgccgtatgttgaggccggctccaacgcccgtactggcgatatcaacagcggtgaacatgccaccatgccgctggcgcctatgaaagaatccgatgcgccgaacgaagagctgcgccaggcctgggagtattaccacactccgcgcgcgcaatatccgacggcgcctggctatgcgacactgcgcagtctcaaccagatcattacctacgacgcctaccacatggctgaagtgtatctggcccagccgatgcagatcgtggcgggtagcgtggcgggcagtaaatggatgagcgatgacttatacgatcgtgcatcaagcaatgataagcgctaccacatcgtcgaaggcgctaaccatatggatctgtatgacggcaaagcctatgtcgccgaagccgtttccgtcctggcaccgttctttgaggagacgctgtaa

SEQ ID NO: 428204 - DNA, 936 bp, Serratia marcescens
atgaaaaacgtccgcatccaaaatgcagatatggcctggcacatcgccgccaacattcagctgccgctggggtttgatgaatctagacgttacccgacggtggtcagcgtccatcctttcggcagctgtaaggaacagacctccggcaatgtttatggcaaagcgctggcggagcaggggtacgtcgttatcgcctatgacgccagttttcagggcggatccggcggagcgccgcgctggatagaagatccggctcagcgcgtagaggacatcagccgcgtcatcgactacgccgtcaccttgccgtatgtcgatgcggatcgtatcggcgtgctgggcatttgcggcggtggcggctatgccgtcaatgccaccctgacggagaaacgcatcaaagccgtggtgagcatcactggcgttaatattgggcgactcttccgcgagggcttcagcagttacgatccgctagcggcgctggatgcgatggctgcgcagcgcacccttgaagcgcgcggcggtgagctccaggtgaacgaattgctgcccgccagcccggaggcggcaactgcccacgggcttacagagcgcgatgtttttgaagcgacggactattacaagaccgcgcgcggtcagcagccgggcggggcaacgcgcatgctgttctcgcacgcgcaaaaaacgctggcctgggatgccttcgcgtttaccgagctgctgctgactcagccggtgatggtggtggtgggtgagaaagtcggcgcctttggcgcctatcgcgatggtatggaagtctatggacgcgcaacggcttcagcacatcgcgagctggtgtcgttagcggacttttcacattacgagctgtatgacaaaccggaagccgttcgcaaagcgctggacaaggtgttgccgtttttcgccgcgcacctgggcgaataa

SEQ ID NO: 428205 - DNA, 636 bp, Serratia marcescens
atgaagaatgtcctgatccttggcgcaggcggtcaaatcgcctgtcatgttatcgaacggttggcggatgaaccggcagtcgtgcaaacgttgttcgctcgccggccggaaaaaatccattcgcatccgaccaacgcgcggatctttatcggcgatgtattgaaccgatccgctttggaacaagcgatacagggccaggatctggtgtatgccaacctgacgggggaggatctggatgcgcaggctgaggcggtgattgccgccatgcaggcctgcggcgtcaaacgcctgatctttgttctttcgctggggatttacgatgaagtcccgggaaaattcggtgaatggaatcgtacgattattggtgaacccctcaagccattccggcgggcggctgacgccattgaagcctcggggctgaattacaccattctgcgcccggcctggttaacggatgaagacaaggttgattatgaactcactactcgcgatgagccgttcaaagggacgatcgtatcgcgtaagagcgtcgccgctttaattgccgacattattgatgagcctgagagacacattggcgaaaatatcggtgttaaccagccgggtactgacggtaataaaccgtactttatgtga

SEQ ID NO: 428206 - DNA, 801 bp, Serratia marcescens
atgctaactgacgcctccatgatttatccctatctacctattggagtctttgttccaaactggatagaaaaaaatttaacatcgaccttggttttggactggcggagtgcactagtgtcatttttcgtcaaaaaagaattcagcactcaggaggctgtactggtcggcagcggttttctctacttgcttgatggtaaagtgccatgcattatgacggcttctcatgttatcaccgagatgcgtaaaagcgatttaccttttatctcaattgatggtgttaaattcctgttcgaaaatctagaaatactttttaataatgaacaagattatgcagttatacctttgccgaaaaagattgcaatgggtattcctgacagcagattattcacttctatcgataataccagagagattaaaacctcctcttttgtcattattggttaccctgcaaagcacaacaaactacatagactgcggccggagagagggctgacgcctttcgccctaacttttcacaattttcactatgatcgggtaacagaggatatcttctttcactttatccctgatgggaaaaataaaaatgtcacttttgaaccgatcagctgtacaacagctacaccatcgctggctggaatgagtggaggcgtgattgctcagatcgttatgagcagcggcgttgaacggtattcacttcgggcagttggttcatttaaagaacatcgagcaaaaagaggaaacttcctggtgggtacgacctttattgatttttctaatgaactaaatgcgttgttcaaataa

SEQ ID NO: 428207 - DNA, 1287 bp, Serratia marcescens
atgttcgccctggtagacgtcaacagcttctatgcctcctgcgagaccatctttcggcccgatctgcgggggcggccggtgatcgtgctgtccaacaacgacggctgcgtgattgcccgcagcgccgaggcgaaggcgctgggcgtgccgatgggcgcgccttatttcaagatcaaagaggagatgcgccgccgcaacgtcgcggtgttctcctctaactacgcgctgtacgccgatatgtcccgccgggtgatggacacgctggaagagatggcgccggcggtggagatctactcgctggacgaagcctttctgcggctggacggcgtggcgcactgcgaagcgctggagcagttcggccagcgggtgcgcgatcgcatccggcgcgagctgcatttaacggtcggggtcggcattgcgccgagcaaaacgctggccaaactggccaatttcgccgccaagaaatggcgcggcaccggcggcgtggtggatttatccgatccggcgcgccagcgcaagctgctggcgctgatcccggtggaagaggtatggggcgtggggcgccgcctgactcgccagctgcaggcgatgggtattcacaccgcgctgcagctggcggactgcgatacccggctggcgcgtaaaaccttcagcgtggtgctggagcgcacgatacgcgagctgcgcggcgagtcgtgcctgcaatgggaagatgaggcggcggcgaaagaacagatcatctgctcccgctcgttcggccagcggctgacgcattacccgcacatgcgcgaggccatctgcagctatgccgaacgcgccgccgaaaagctgcggcaggaaaagcgctattgccgcaacgtgtcggtgtttatcaaaaccagcccgcattcggcgggcgaggggtattacagcaatatgggcaccgcccggctgcaaaccccgagcaacgacagccgcgacatcatcgccatggcggtgcgcgcgctggaaagcatctggcaggaagggcggcgttatctgaagggcggcgtggtgctgggggatttcagcgccgccgccatggcgcagatcgatctgttcgacgactgcccgccgcgtcgcaacagcgagcggctgatggcgaccctcgatcgcctgaatcaggaggggcgcgggcgcgtgtggttcgccgggcaggggatcgtcaagccgtggcaaatgaagcgcgaaatgctgtcgccggcctacaccacccggctggcagacataccggtggtgcggctgtcgccgcgaaactcgcgccggtag

SEQ ID NO: 428208 - DNA, 276 bp, Serratia marcescens
atgaaaagaaacacgttaccttatttaatgataatcgctggcctcctgcttatttcctccctgccagtacatgccactatgtccggcacaatccattttagcggcgcgattttcgaacccgcttgctgggttaatcataaagtggatcgactcaatattgattgctcggcacgcagcgatcgcccggtgaatagcgacgccgtggttagccacgccgagctggaatacctggataacgaaaagacgctggcaattgcccacgtcacctatcgttaa

SEQ ID NO: 428209 - DNA, 123 bp, Serratia marcescens
atgattcttgccaagttgagaaaattagtagagttgaatttatttatgaggttattattatcctatctgttcagttataatacttgctgctcggggatgagtttaactgatatgatgacttaa

SEQ ID NO: 428210 - DNA, 825 bp, Serratia marcescens
atgaaaaatttatatttccttttgctgttattcgcctgggcatttcagtctgcaacccctgcaaacgctgaaatctctttcgtatccaatgataccgtttattaccagacatgctattttgttggtaaccctaatccgcttacctgcgcagaagggaatgtttctttcgtcatcggtgagggtactacttcaggaaccgttaactgcaatggctggtctacctgcaccgtcgggtttggtattacgttgtatgggaggtcggtaaaccgttggtggtctgattcccgatatatcgttggctccatctctgttgctaatggttcttcatggaatgccgctgtacaggcgatcaagcgtgttcatggtaccagcgggtcaggccgcgcctacgtcccggcaactgatagtggaggtgtccccgcacgagtgtgtctgatggccgttaacggaagaggagagattcaggtgtcgccaactccgggttgtataactactcctccggtagtaacctcttgcgagtttaggagttccgcggtcatcaaccatggtgcgatgaccccctctgaagtgaatggctcaaccgcatcggataatgttgtcatctcgtgcaaccgcagtacttcagtgcggatcgactacgcgcctactatatcccttggtttaggagtcacttcaactctgactctcgatggaaggagcgttggcggaactatgacccttcctgccggtacctcatcacacgttgtgggctcacgattaacaggaataccgacaacatcgggttctctcaacggatcttctttcatcgttgtgaattataattaa

SEQ ID NO: 428211 - DNA, 540 bp, Serratia marcescens
atgaatcgattgagtctgttacttggcggccttatcgccttaagcggcggggccttgttttcgtcatccgcaacggcggcggagaatttgatcatgcgcggcacgctggttgatgcgccctgcttattacgccccggcgatgaaaatctggtgctggattttggcgatgtcattgataagttcctctatcgctacggcagaacgcccagcaagccgtttgaattgcatctcgaaggctgtgaggtcagcgtgtttaagaatgtgagagtcacctttcagggcacggaaaatagccagctgcccggcctgctggcgctggacgccggcagtatggcccaggggattgcgataggtatggaaagtaatacaggtaggacccttcccattaatgtcgaggggccgacaacggcattacaaaccgggaatacagtgctgggattccaggcttatatacagggagagcctgctgcactaaataaccgtaaaattgcctacggaccatttagggcgacggcaatttttgtgttggattatatttag

SEQ ID NO: 428212 - DNA, 486 bp, Serratia marcescens
atgaataaaggtgtttttgccctcagcgttttgacctgtatagccgccggatcattcggttcgttgcctccggctcaggccgtggatgtgaatttcagggggcaactggtggagtccatcccctgtgaggtcaacaacggcgggctgattgaggtggatttcgacaatgtcatcatccgtggcatagacggcgtgcaatatcggcaagcggtgccttacctgattacctgtaccggcctggggagcgtacgacttagcgtgcagggcactgccgtaggcttcgacaacacggctgtggtgaccgacaaaaccgggttgggcatccgcattgaacaaaacggtacgccgatgcgcctcaatcagccgataccgatcgatctgacgacaccacccacactgaccgcagtgccggtcgccaacccggcctctccgccggtggcgggcaccttcgttgcacgcgccacgatagtggccgactaccaatag

SEQ ID NO: 428213 - DNA, 513 bp, Serratia marcescens
atgaataatacctcaacaaccaaagtaaaaacgcgtttgggactcgggttcgccaccggagtgatgttgatcctatatggcaccgtagcgtacgcctttaccctgaatgtaacggtcagcggcacggtgatcgatccgccctgcgtgatcaatggtaatgcgccgattaacgtcaattttggcaatgatatcttgattggccgcattgacggcaatgcctatgagcagccgatcccctatacgctcgactgctcagccgctacggccaaaacgttaaagctgcagctgaaaggcgcgggcgcaacttttgactcgacagtattgggtaccagcaaagccgatctgggcattgagctgagaagtaatcgcagcaaactgcctgtcaacagttgggagaactttaccgaccccgcccgacctgcgttaagtgctgtcttggttaaaaacagcggcggcacactgaccggcggcgcctttaccgccacctccacgctgttggtcgattaccaataa

SEQ ID NO: 428214 - DNA, 621 bp, Serratia marcescens
atgcatcacatatcccgattccacacaggggcgacatgggcaacggcggcggcgggattgtgcgcgctggcctcgctcgcgctgttcccgccggtgacgtacgccgggtttaacgacggcctggtagacggcaactacggcgtgctgcgcgtatacggcacgctgaccgaaggcgcctgccggctggaaatggcctctgcggatcagtcggtgaacctgggcaacgtcagcaccggcaacctgaaggtgccgggcgatcgcggtgcgctggtgccggtggagttgcgcctgcatgattgcctgcgcacctcgtcagccaaccgcgacgcgcagggcaaccttacctggagcgccggccagccggcggtctcgttcaccttcaccggcgtgcaggatccggccaacccgcaattgattgcagcccaaggggtgagcggcatggggctgcggctcaaagacagcgagcgccaaaatgtgatcctggggcagaaaggcaaaccgctgttactgaccccgagcagcaatctggtgacctattacatcgcgccggaacgcacccgcgcggcattacgcgccggggcctataacgccaatatcaactttaggctgagctatgaataa

SEQ ID NO: 428215 - DNA, 777 bp, Serratia marcescens
atgaataacaaaacacgacttagcgcgctgacgctggccctcaccgtcaccctgagccactccgcctcggcggcgatttcgctggacagaacgcgcgtgattttccccggctcggaaaagtccgtgagcctgacggtgaaaaaccagaacccggaactgccttatctggcacagggttggctggaaaacgaacggggcgaaaagctggacaacagcagcccgctggcggtagtgccaccggtacagcgcattgagcctaaggcggagagccaggtaaagatccaggcgctggccgcctccgaggcttttaagcggctgccgcaggatcgcgaatcgctgttctatttcaacctgcgcgagatcccgccgaagagcgacaagccgaacgtgctgcaaatcgcgctgcagacgcgcatcaagctgttctatcgacctgccgcgctggccgaggcggcggctgcacagcaggcggtgcccttccaggagcagctgacgctgagcaaaaacggcgacaaataccaggtgaataacccgacgccctactacgtgaccctgattggcgccagcgcgaaaaaaggcggcgaggtggtgaaaggcttcgaggcgatgatggtgccaccacaaggcaacgccaccctgggcggcagcgcggcggcgctgggcagcgcgccggtgctggtttatgtcaacgattacggcggccagccggcgctgaccttccgctgcgccggggcgacctgcagcgtagacgcgagcaaacgcgataaccagcgctaa

SEQ ID NO: 428216 - DNA, 2526 bp, Serratia marcescens
atgttgcgttattttccgcgttctgcgattgcgatattttgccaggcaagtttaggtgcatctgtttttctcggcgcgttgaatatcgcctcagcggctgaggacgtacaattcaacaccgatattcttgatattaaagatcgggaaaatatcgatctcagccaattttcacgcaaaggatatattctgcccggcacctacacgctggcagtgaatttaaacgccaacacgctgccggaaagaccgattaacttttatgccgccgagcatgatgagcatgagacgctcgcctgcctgacgcccgagctggtggaacagctgggcctgaccgaaaaagcgttggctcaactcacctggtggcgcgacgggcaatgtctggatctcgacagcctgaagggtatggaagcacacggcgatctgggcaaatccaccctggccatcagcattccgcaggcctatctggagtacagcgcaccgaactgggatccgccctcacgctgggaagacggcctgcccggcctgcttttcgattacaacctgaacctgcaaagccagcagcagaacggcagcgggggtggcagcggcaccgatctgtccggcaacggcacgaccggggccaacctcggcgcctggcgcctgcgggccgattggcaggcgcgttacgatcgccgcagcggcaacaaccacgacgcgggcaaccgcagctgggactggagccgttactacgcgtatcgcgcgctgggcagcctgggcgccaagctgagcctgggggaagactatttcaactcggcgatcttcgacagcttccgcttcactggcgccagcctggtgaccgacgacaatatgctgccgccgaacctgcgcggctatgcgcctgaagtgagcggcgtcgccaaaggcaacgccaaggtcatcatcagccagcagggccgcattatcaaagaggtgcaggtcgcccccggcccttatcgcattcaggatctggacagcgccgtctccggcaatctggacgtgcgggtggaggagcaggacggcagcgttcagcaataccaggtaaataccgccaccatcccgtatctcacgcggccgggccaggtgcgttacaaggccgcgctgggcaagccttcggactggcagcaccacatgaacggcccgctgttcgcctccggcgagttctcctggggggtcagcaacggctggtcgctgtacggcggcggcatcggcggcggcgactacaacgcgctgtcggcgggggttgggcgcgatctgatggcgctgggcgcgctgtcgttcgacgtcacgcactcgcaggcgaaggtgccgcggcaggagacccagcgcgggggttcgtaccgcctgagctactccaaacgtttcgacgagaccggcagccaggtgactttcgccggctaccgcttctccgacagcggttttagatcgatgagtgagtatctcgactcgctggacggcggcatcaatgccgggcgcagcaaagagatgtacaccgtctccctgaaccagcagttcgagtcgatcggtttgacggcttacgtgaactacaaccatcaaacctactggaaccaggcggacaacgaccgttacgacctgtcgctggcgcgctatttcgacatcgggcgtttcagaaacgtcagcctgtcgctgacggcgtaccgcaacaagttcaacggcaccaatgacgacggcatgtacctgtcgctgtcgatgccgtggggcgagtccggcacggtcagctacaacggctcctacgccgccggcgatacccgcaacagcgtgggttattacgatcgccgcggcgacagcgacacctaccagctgaacgccggcgtggcgcgcagcggtgcagatctgagcggctattacacccacaaagggacgctggcgcaggtcaacacttcggccagctaccgcgaagggcaatacagtgccctcggcctgtcgctgcaaggcggcgccaccctgacgccggaaggcggcgcgctgcaccgcagcggcatgttgggcggcacgcgcatgctgatcgacaccgatggagtgtccggcgtgccggtcggcagttacggcagctcggtggcgagcaaccgtttcggtaaggcggtgatcaccgatcttaccagctactaccgcaacagcgtgcgcatcaacgtcgacaagctggcggataacgtggaggccgcgcagtcggtacagcaaggcacgctgacagaaggtgccatcggctaccgcagcttcaaggtcatttccggcgaaaaagccctggcggtgatccgcctggccgacggctctgcgccgccgttcggcgccacggtattgaatgccaagcagcaggaaaccggcatcgtcaatgacgacggcaacgtttacctgagcggcattaacaccggggacaagatgacggtgcattgggggaatgccccacagtgccagattaccttcccggacaatctcgccgccggcatgaccaccaatctgttattgccgtgcgtgaaatcaccacggcctgaataa

SEQ ID NO: 428217 - DNA, 552 bp, Serratia marcescens
atgcgccgcacgtatccctttaggttgtacatggcccctttgctattggcaggcagcgcgctgggggcgctaaccccggctatcgccgcttcagacgccttcggccgggtcaatatgaaaggcgctatcgtggaaacgccttgcgcgattgacgtgggggaccgcgatcaaacgctgctgatgggcacggtgccaatcagccaaatcctccgcgacgggcgcgggccggagaaaaccttcgccattcgcctgttcgactgcacgctggcggcgattaacccgctgcgccccggctggaaaacgtttcaggtgacctttgacggcgacgccgacaacggccatttcaaaacgttgggcgaagccaacggcatcgcgatgatgatccgcgatggccagggcaatatcgccacgcccggcgccgccttgccgacgggcaacctgacccccggcgatatgcatttgcgctacacgctcaacctggtgggcaataaagcgaacttacgagccggagattaccgaacaacgattcgcttcaggctggattataattaa

SEQ ID NO: 428218 - DNA, 537 bp, Serratia marcescens
atgaaaaaaagtctgattgttttatctatgctgggtctggccgccgtttcttccgcacatgcggcgggcggcaacggtaaagtcacctttaccggctccattatcgatgcgccttgctccatcgcaccaggctccattgaccagaccgtcagcctgggcgccatctccaacgtggcgctggccgccggcggcaacaccggcgcttcttccgcgaaaaacttcagcatcgagctggaagactgcgtgattgccaccgccggcaccaaagataaagtgaccgtgaccttcaccggtgcgccatcgacttatgataccgagagcctgggcctgatcggtagcgccagcggcgcctacattcagttgcgcgatgcggacggcaccaaggtgaagctgaacaccgccacttccggccaaaccgtcatcaacggcaacaacaccctgaccttcgccgccaacctgaaaggcggcggcgcagcggccaccatcgttccgggaaccttccaggtgccggccaacttcgtgctggattacaactga

SEQ ID NO: 428219 - DNA, 507 bp, Serratia marcescens
gtggcgaagacgccgcaagaattggcggcactggcaaaaagccacaccatagacttattaatatgcggcatgagcgcgcagtcggaaggtgtatcgcaattactcaacgtaccgagatatcgggtgggctgcacgattttactaaccgacaagccctcgcctatcttgtacaaaacgtttttaaccgccggattcaacgcggttttcagcaagcaggcctcgctggtggagttaacggagatatttgagtacagcatctatttccaaagaaagatgtacgtaaagaaccggcagcagctgcgctacctgccgcaagagcgagacgtgttgatggcgctgttaaaaggtgaaagccccaatgacatcgccgacacgatggggatctcttaccgcacggtgagccgttataaacgcagcggcttaaaacgggccggcgttaaaagcctgaatgagatcctcgcctgcttaaaaccgaaattggtcaagagcggcctgaatgtgggctga

SEQ ID NO: 428220 - DNA, 627 bp, Serratia marcescens
atgaagagcgtattgatagtggacgatcaccctgtcgcccgtcttgccgtgagaatgctgttggaaaaggacggcatgatcgtcgccggtgaaaccgacgacggtctggaggcggtgcagcaagcgcgcaaactgttgccggatctgattgtggtcgatatcgatattccttccttgaacggcatcgacgtcgtgcagcgcctgcgtaagaacgagtaccgcggcggcatcctggtgctgaccggcaaagatgacgaccactatattaaacgctgcgccgccgccggcgcggacggctttatcagcaagcgcaataacctgacggaattgcatgatgcgatccgggcgatccgaggcggctacggttatttcccgctcaaccgggcgcgcctcgacgcggcgcacagccaaccgctggacgataaaagcctggtaggttcgctttccgccaaggaattgcaggtgctggggtttctcgccaagggcattaaagtgatcgacatcgcccagcagatgcaaatcagcgataagacggtcagcacctataaacgtcgcctgatgcaaaaactcgaattgaaaaacatggttgaattgtacgacttcacgcaacgcaacaatttggattga

SEQ ID NO: 428221 - DNA, 2568 bp, Serratia marcescens
atgcctaaagcgctgctctgcctgtgcctgtttttgtgtccactcttctgcgtctcttatgccgaccaacctcaaaccatgcggttattcagccgggaaaccgtgacgccgctcaaattcacgctcagcgatagcgactggcgctggctgggggagaaacgcgaggtcaacatcggcacctacgcgccggaaaacccaccgttcagcctgatccccgagccgggtacctttgaaggggtgtccgctgactattctctgctggtattgcgctatttggggctgcgtttccacgtgttccactaccccagccgcagcgcggcgctcgaaggggtgagagcggggaaaatcgatattttgctcgatgacgtcggcggcacggcaccgcctcaggagggcctgatcggcagcgttccttatatgccggaccatcccgcgctggtctcgcgcgaaacggcgatgtcaaaaccgttgccgctgacgccggagccgcgcatcgcgctggtgcgcggctacctgagcgacgagtgggtagccaatcaatatcccaatgccaggatcacccgttacgtctcgccgcaaagcgcattgtcttccgttgcctttggcgagaacgattattttatcggcaacctgacgacggccagctttttgatcgaacgtaactatgcgaccacgttgtccatcgccgatatcttcccacaggaggagacgggtccgcgctttaccttgcgtgcgcaggatacggcgctgctgagctcgattaacgccgtgctacaggccatcacacctgcccagcataaggtgatctttcgccactggagccaggggccgaacctgtggcttttccagtcgcatctgccgctaacggaaagagagcagcgctggctggcgcagcacaatgagctgcgcgtggtgatcaatccgctctatgcgccttttacgctgtttaatacagaaaagcagttccatggcatcgccgccgatattctgcgccttattcatctgcgcaccgggctgaacttcaaggcggttgaagcggattccgttaccgatatgttcgacagggtgaaagatcatcgcggggattttatcgcttcgatgagctatagcccgtcacgcgatagacaactgctgttcacgcgcccttatgtgctgccgccgtttgtgttggtggtgcgggatcggatgacggcgcccagcacgctggccgataatatgaagatcgccgtcacgccggataatgtgctgcgcggctggctaaaacagcaatacccttcgctgacgttaatcgacgccgaaaacgccagcgtcgccatgcaaatggtgaatgagggcacagcagatggggcggtgaacaacctgatcggcgcccgctatctgatcgaccgctattttcgcggcgagctgaaagtggcgacgcgtttgggggaggaacccgcgcgcatcggctttgccgtcgggcgcgatcagccggaactgtacagcattcttaacaaagcactggccgatattccgccgcgtgatatttctatgatcgccaataaatggcaggggacgccagatgtccggctggatacctggaccgtctaccgtacccagttttactggctggcggggatctttgccgtgctggtgattacctcactgatttggaactactacctgcaccgcgaaattcgcctgcgtaaagaggcgcaggccaagctacaggagcaggccggtttccgggaaacgctgtttaacggcacgccggtgccggtgtacgtggttgatgtacagggtaatttgatcaactacaaccccgcttgggcgatgttctttacccaggaaggggaaaagctgagccggcagccgctcagttcaccgctgcatccgttggcggcgattttcaacgatatcatgccgctgtttgccggcactgagggcacgatgtcttcgccacggcactatcaggtctctaacggcgttgagccgcgcacgatcgtgcatcaggcggtgccttataccgatcacactggggcggtggcaggggtgattggcagctggcaggacatcaccgagcatgagcaactgctgggggcgctgtcggtcgcgcgcgagcgggcggaacaggctaacagaaccaagagcaccttcctggcgaccatgagccatgaaattcgcacgccgatcagtgcgattatcgggctgctggagctggcggtgaccacgccgggcgtacaacgcagcgaagcggaaaaagactcgattcgcgtggcgtacgagtccgcgctgtcgctgatggggctgattggcgacattttggatttggctaaaatagaatccggtaaactggagttgaccccggaatggatcccggtggaaacgctggccttgccggtggtgcaagttttcgacggccttgccaggcagaaggggctggcgctcgattgccgcgtagagcctttgcatcccgatgagatctatctggatccgatgcgcttgcggcaagtgttgtcgaacctggtgagcaacgccatcaagtttaccgaacaggtgtggggtggtgatcgtttctggactgtctga

SEQ ID NO: 428222 - DNA, 1071 bp, Serratia marcescens
gtgaatattcaggtccaatgtttgcaacgcggcgagacgcaagcgctgttgacgctgaccgtcaccgacaccggtgtgggcatcgcggatgaggagcaagccgatatctttatgccgtatgtccagtcggaatcgggcaagcatcagcgcggcacaggattggggctggctatctgttcgcaactgacggcgatgatgcgcggaacgatcgaactgcacagccaggtcgggcggggcacccgcattacggtgaagatcccggtcgagcaccgacagcatcaccctgcgtcgcaacccatatcgccggaatacctgagcgccgatcggccgctgcgtattctggcggttgacgatcacccggtgaaccgcctgttgctcaaccgccagttgacccggttgggacatgaagtcatcgaggccgagaacggcgaacaggcgctgcagctctggcaggaacaggacgtcgatctggtgattacggactgcagcatgccggtgatggacggcctggcgctgacccggcagctgaggaaaatgcaaagaaaaccgctgaccattctgggtttaacggccaacgcgcagccggaagaacgcatacgctgcatggctgcgggcatggatgattgcttgtttaaaccgctgcgcttgtcccagttggacatgttgctgcggcgcataccgcggcaacaggcactgcgggaggaaaaaaacgcggcgcctttagcggcattggtcaacctgcctgcgctgcaagcgctggctcagcaagataggaaactgttggtgatgttgctacaaaccacgcgggaggagaatacgcgcgatatgcagcattgccgtcaactgttggcacaggcggcgtggccggcgctgacctcctgtctgcatcgtttggcgggcgcggcgcaaattatcggtgccacgcaggccgaaatctgctgccgcgagctggaaacttactgcgagaccaccgctgcgcccgataaagaacgggtagagtgtgagttgacgcaagcgctgggtgaactggaaaaactgaatcgcgcgattgaaaccttcatcaatgaataa

SEQ ID NO: 428223 - DNA, 474 bp, Serratia marcescens
atgaaataccgctttgcaccgtttattttgctggccggaatggcggcgtcagctggtgcggcaacgctatcgcaatcttcgctgtctcttgcgcaggccactcgattggccgatgcggcggtgcaggcatgcagcgccaaaggctataacgtcagcgtcacggtggtcgatgccgccggtttaacgcgtgccgtgcagcgaatggataaggctgggccgcatacgctggaagcgagctatcgcaaagcttataccgccgtctcgagtgggcaaacgagcggaaaattgctggaaaacgcacaaaaatatccggctgcgcaaaagctgtctgatattcccggtttcttgctgttggcgggcggtgtgccggttaaagaacagaatgcggtcatcggtgctatcggtatcggcggcgcgccgagcggcgacattgatgaagcttgtgtgctggaggcgatcaagtcgtcgatgtaa

SEQ ID NO: 428224 - DNA, 693 bp, Serratia marcescens
atgcaatatttaccgcgcgtatttttgctctctttaatcgctttaggcgcgtcatctgcggcaatggcagcggataatggcaaagaaggctattacggtgcgcttaacctgataaatacttaccagcaggcgaacaatatggcgttgagcgaacgccccggcatcggttcgttcgttgccggcacggagagacatcgcttcctgaatggctctgtggcggcgggctatcaatatggcaacggatggcgtaccgaaggtgagtacgtgttcaaaagggacaaagaatacaccagtgggtcatccactttcgcgaccagcttcaatcatatgaaaaccgattcgcagcgtgtgatgctgaatgtttatcgggactatcagcttgccgataagttcgctgtctatgcgacggccgggatcggattggccaaggtgacggcgggcggctggcaaggtaatgattcgcgccatttcgcggacaatacgcaaaccaattttgcctactctgttggagcgggggtttcctatgaggtcgtggataacctggcggtctatgccggctatcgctacgtcgatatgggtaacgtggagagcgggcgcaatacctttgtgaacgcacgtggtctgcaagatgagaatctgcgcgcacgcctggtgaataacgaatatttgattggcgcgcgctatgttttctaa

SEQ ID NO: 428225 - DNA, 399 bp, Serratia marcescens
gtgagattaaaacgaaccttattgattggcgcaatcacgatgccaatgtggatctcttccgcttttgccgacatgacggggtgcagcgaaaagaaaacggcaatccgcacgcagattgaagacgcccgtattcatggcaatatccaccgtgtttcggggttagaaaaagccttgatggaagtgaatgcgcactgtgatgagagcgaattggcgcagcaaaaacggcaaaaagtcgaagagaaaatccataaggtagagcagcggcagcgggagtacgacgccgtgaaacgcagtgggcaagccgataaaatacgcaagaagttgcaaaagctggatgaggccaaagaagagttggcagaggctaatgccgcgctgcatctctcgcagggtgaggaataa

SEQ ID NO: 428226 - DNA, 408 bp, Serratia marcescens
atgacgatgaaaatggggtttgccggcttgatgcttggcgcgctttctatgcaggcacaggcaatgaagaatccgctgagcgtgcacgtattgaaccagcaaaccggtctgccctcgcagcagatgggcgttacgctggagaaaaaggtgggagataagtgggtgcggcttgccgcccggcagaccgatgcccagggccgaatcggtgggctttatcctgaggcggaaaaatttacccaaggagattatcgaatcacgtttgaaaccggtgagtatttctcgcgcgataatcaggcgacattctatccgcaggtgccggtaatcattcgggtggaaaacgtgaatgaacactaccatgtgccgctgttaatcagccaatatgggttctccacttatcgcggcagctga

SEQ ID NO: 428227 - DNA, 795 bp, Serratia marcescens
atgaaattatctgcatttttaattagtagcgtatttttctcacttactgcatgtgcagcagaaaaaaacgttaatgccccgacatcatcaactattgatggcttatggcaagtgactcaggtcaacatagacaatgagactacccgcacacttaactatcaacttaacgaccctcgattactaggaagggtaatcaatatttccactaaatcaatagaaaacaatctgccggaaaaagacgtctgcacagcgccaaccttaagtattgagagaagcacgctaaatcaatttatcggcaagtcgatgggcggagataaaagcatcacggctaaaaactatgcattgaaagaaaacggccaagcagaagtctctcttttcaagatcgcttgtcactccggatcattcggcccatccgataatggtgcaagctccagctttgccgttctcaatccacaaaaaatgctgattaattggtacgatggttcgctactgcaattagaacggttaccgaaagatcctaaacctgcagcgtctttcgactgtgctaaatctacaagcgttgttgaaaaaactatctgctcagacttcaatttatccgcctatgacaaaagcgtttctcaagcttggctgttggcaaaaaagcaggcgaccgatgtaggggataaaaaactggcggcttctttaaacaacacgcaaaaatcttggttactgcaaagggataaatgccgtgatgacaaagtctgcctggccgatacgatgcaaaaacgaatcgatgaactcacatcatacgattaa

SEQ ID NO: 428228 - DNA, 828 bp, Serratia marcescens
atgaaagcgattagaaaaggtgacagaggaaatcacgtaaaatcattgcaagaattgcttaataaacagggggctattcttaaccctgatggcatattcggtctaaagactgaattagcagtaaaaaaagtgcaacgtaaaaaaggtctgcatgttgacggcatcgctggtagaaaaacattcttagccttgggttcacacgtcgaaacccgagcaccgcaacctcctatcggtggtagtgcaggtcgtcaaggccccggagctatgggcatttcacaaagcggtttaaggtttatctttaatattgaagcatggcgcggagtaagtaaccacctacattggcctggcggtgcaagcggggtcactctggggccgggttatgatatgaaagctcgctctatagaatcaataaaaaataccatgatcgcgattggattagacagcgcaactgcagataaaatcagtgcagccgccgggttacatcatcagcaagctaaagacttcgcgaaagaaaatcacaatttagtggttttaaccgacacacaggaaacggaactacttaaatttatagtgcctgcctatgaaaaagctgttaggaataaaattcttgttccactcacacaacaagagtttgatgcgttagtctcctttgcttataatccaggtggtcgactcaacaacgtcgcagcattcattaatcagagcaaaatatctgatgcaatgacagaaataaaacgtgccattacctcaggtggaaaagtgatgaaagggctgataaacagaagaaattatgaagtcgagctctatttaaatggaaactatcgctaa

SEQ ID NO: 428229 - DNA, 816 bp, Serratia marcescens
atgaaaattttaaaatcatacatgccattattacttttatgcgtggctttcaccgcttcgtcaaataatcactgcgatccttctcggactgaactgcccgccagttgcctcacggaacaattcgccatgtcggtattgtggtatcagaatgcggcagaggcacgggcggctttttatcaagggtatcagttgggcaagctccgacttgagcaggaattaaagaataaatcggagaagccgcgtgccgtcgtgctggatcttgatgagaccgtgctggatgacagcccgcaccaggcctggttgataaagaaccagtcgtttttgcttgacggttgggacgaatgggtcgacatggcagcggcggaagccgtgcccggcgctatcgatttcctgaggtttgccgatgaaaacggcgttaccattttctacctgagtgacagaaagcagtcgcagattgacgtgacgctaaaaaatttacgccgcattaatttgcctcaggcgaaaaaagaaaatctgttgttaaaaacaccggagatgcagggtaaacagagtcgtcgcgacgcgttggaaagccagtatgacgtcgtgctgtattttggcgacaatctggctgactttattgattcaaaaggtaaaagccaggctgaaaggaataaaatgatggaggatgtgcagcaagaatttggcaagcgttttattatcttcccgaatccgatgtatggcgattggtatggcggtattatcgatggccagtttaaagcgaaaaacaatgagctttataagctgcgagcatctaaattgacgccgtttaagtaa

SEQ ID NO: 428230 - DNA, 375 bp, Serratia marcescens
atggccgatatttatctcaccaaaacctttctgggttttgccgcgcgcgagcgcatcagcgacgccacgatagtgaaagcggcgcgagagatgcaacgtcagctgtacgacgccaatcttggcggttgcgtatacaaaaagcgcatcgctcggacgggtgcgggcaaacgcggcggctatcgggtactgatcgtttttcgcgatgaagaacgcctgttttttatgcgcggctttgccaaaagcgagagagaaaacatcagtacggacgagttacaaggattgaaacatctggctgcgctgtatctggattattcgccattcagactttaccagctggtcaacaacaaggaattacggaggctaagcgatgagtaa

SEQ ID NO: 428231 - DNA, 1182 bp, Serratia marcescens
atgttaacagacacgaagctgaaaaaatcgctgggcaaaaaacgcgatgcgatagagatcatttcagatagccacggactgaacgcccggatcagcaaagccggcaaaattacgttcttctaccgctaccggtgggtgaaagagcctgtgcagctatcgatcggcgaataccccgcgatgactatcgcacaggcccgcgaacggcgccaggtgctgcgcggttggttgacggagggtttcgatcctcgtgaaaaaattcgtttagagcgcctttcgcgcaacgcttcgccgacggtggacgaggccttcaactactggatcgacaaatactgccggccgaatggttcggttaagatcgactattacctgcaggtgtaccgcaagcatatcaaacccaagctgggcgaactgcggatggagtcaactgcccggatgcattggctggaggtgctggactctatcgatagcagcgtcatggccaactacatgacatcgctgtgtaaacgcgcgttcaagttttgcgtcaatcgggggtatatcgcggcgaatccgctggaagggctggggccgcgtgacgtaggcacagctcccacgcgcaaaaaacgctatctcgcagatcgcgagattcggcaaacatggcagtggttgaatgaccaccagaccgacgaggcgcgcctgattattcgatttatgctgctgaccgggtgccgcaccgcggagatccgccgggcgtcctgggactggtttgattttgaggatgacacctggacagtgccgaaagaggagtataagactggagtggcggtccgccgcgcgctgccgccgctggcaaaagcgttgctgttggcccatcgcgaaaaggtgaatacccgccatgtggttacctcacagcgggccatgcctgggaaagaatttgataggcctgttcagccgcaggttgccgcaaactacacgcggcgcgtgttcgaaggcaccggaatgaagccgtggtcgatgcatgacctgcgaagaactctggcgacaaagttatcggaacagggcgcgccgccgcacgtaatcgagaagattctcggccacctgatgacagggacgatggcgcattacaatctgcacgattacatggacgatcagcggcattggttgggggtgtgggaggagtatgtgaaatgggttacagggtaa

SEQ ID NO: 428232 - DNA, 204 bp, Serratia marcescens
atgggcgagaatccgatcgtattcacgcgggatattctgtcccgctatcaaatttcagaaaagacgctgtggaaatggcgagacaaagaccaatgcccaagggggtttaagttgccctttccggcaccgacgatccccggcagtccaaaccgctggcgcctttccgatgtgctgacctgggaagacgccaacagcgcaaaataa

SEQ ID NO: 428233 - DNA, 1401 bp, Serratia marcescens
atgtcatcaaatcgaaaaacattcaccccccgcccctaccaaaacctcattatcgaccacgcgctccgggtgccccgctctaacgtctgggccgggatgggtatgggcaaaacagtgggcacgctcagcagcctggaggcgctctactgctccggtgaagagacgcagccaacgctcgttctagcgccgctgcgcgtggcggccagcacatggccagacgaggtcgcaaaatggggccacctgcgcaacattgaaatgcagccgatcgtcggcactgccaaagagcgcgccgcggcgctgctcaacagcaacgccagcgtgttcaccaccaactacgacaacctggtgtggctggttgagcagctcggcggccgctggccgttcggtacagtgatcgccgacgagagcactaggctgaagtcattccggctgcggcaaggcggcaagcgcgccgcggcgctggccaaagtggcgcacaagcacgtgcaccgctgggtaaacctcactggcacgccggcgccaaacggcctgatcgacctgtggggtcaggcatggttcgttgaccgcggcgaccggctggggcgcaccttcggcgcgttcacctcgcgctggtttaacagtattcagttcccaggtcagcagtggtcgaaactagaaccgtggccgcacgcgcaggagcagatgcaggcggcgctcgccgacgtgacgatctccctcgatgccgctgactggttcgacatcgacgagcccatccacaacgtgatccgcgttgagctgccgccaaaggcgcgccagcaataccaggacatggaaaaagaaatgttcctcgaactgaacggcaccgacatcgaggcgcttaacgccgcggccaaaacagtgaagtgcctgcagatcgccagcggcgccatctacaccgacgacgcaggcaactgggccgaagtgcacgacggcaagctgcaagcgctggatagcatcgtggccgaagccggcggcatgccggtgctggttgcctaccactggaaacacgacctcgagcggctgctgaaggcgttccccaaaggccgtcaactcgacgcagatccgcagacaatccgcgactggaacgccggaaagataccggtgctgttcgcacacccggccagcgccggccacggcctgaacctgcaggatggcggcaacattctggtgttcttctcgcactggtgggatctggagcagtaccagcaaattatcgagcgcatcgggccgacgcgccaggcgcaagccggccaccgccggccggtgtggatacaccacatcatcgccgccgacaccaccgacgagatggtgatggaacggcgcaattctaaacgtgaagtgcaggacatcctgctggaagccatgaaaaagagaggcatgtga

SEQ ID NO: 428234 - DNA, 270 bp, Serratia marcescens
gtgaactacatccgcgaatcaacgatcgagcggcatctgttgaagcaggttaaagctgccggcggtaccgcttataagtttacgtcacccgggcggcgcagcgtgcccgatcgcctggtgctgctccctggcggccgggtggtattcgtcgagtgcaaagcgcctggcgaacagcctcggcccgaccaggtacgcgagcacaaccggctccgtgcgctgggcttcgaggtggtggttttggacagtaagaatctagaggggatattgtga

SEQ ID NO: 428235 - DNA, 333 bp, Serratia marcescens
atgccatgctcaaccgataaatcagagatcaatgacactaactgtcaacaggaacaacccacagtaggacctatctatctgcgccagttcagcgaaggcctgagcgtgggctgggaagtagtcaataaaatgcgctacgacaacgccgcaccgggaatgcggagaatcgtgtacccggcgcccatgacagtgccagccgaggtgattagatgtctgtcgtttttcgcaagtgcaattaaaagtggcgagccgtggacggaaacctgccagcgtgattatgacgctgcccttcgagccgccggtcaaaatacaacgtcaggtagcagccagtga

SEQ ID NO: 428236 - DNA, 2133 bp, Serratia marcescens
atgcaaaaactctggctcgacctagaaaccttctgcgaaaccccaattaagaacggcacccatgcctatgcggaaggcgtcgagatcatgctgttcgcctgggcaatcgacgacggccctgtcagcgtgcaagatttcaccgaagaccagcacctgccggcgcaactactcgctgcgctcggcgatgagaacgtgctgatctacgcgcacaacagccattttgaccgcaccatgttgcgccatgcgctgcaacgccagctcccaggggtcgttgcgggcggcgttgagcgctggcgcgatacgatggtaaaagcgctggcgcacggcctccccggcgcgctgggtgcgctgtgtgaagtgctcaacgtcgacaccgacaaggcaaaagacaaagccggcaagcagctgatccagctgttttgcaagcctcggccgaagaacagcaagctgcgccgcgcaacggccaaatcgcacccggtggagtggcagcgcttcgttgaatacgccggcctcgatatccacgccatgcgcgccgtcgacaccaaactgccgaactggaactatcagggtgccgagctggcgctatggcaccgcgatcagaagatcaacgaccgcggcgtatgcgtcgacgtcgaacttgccgaagcggcgatcgccgccgttggcgatgaacaacaacgcctggccgagctgacgcaagccatgactgacggcgaagttcaggcggcgacgcagcgcgacgctatgctccgccatattcttgaagcattcggcgttgatctgccggacatgcaaaaaagtacgctcgagcggcgcatcaatgaccctgatctacctgcgccgctgcgcgaactgctgaccatccgactggcggcctgcacaaccagcaccagcaagtacaaggcgctgatgaagggcgtcagcagcgacggccggctgcgcggcacgttgcaattctgtggcgccagccggaccggacgctgggctgggcgactctttcagccccaaaacctcccgcgcccaacgctggatcaggaacaaatcgatcagggcatcgaggcactgaaactcggtgttgccgatctggtgttcgacaacatcatggaattgaccagctcagcgctgcgcggctgcatcatggcgccgccgggtaaaaagctggtcgtcagcgacctgtcgaacatcgaaggccggttccttgcgtggctggctggcgaggagtggaagctgcaggcattccgcgattacgacacgtttatctacgatgccgctgggcaacgtatttgggatgaactggcaaaagattatcaacgcgccggtcacgatctctacaaactggcctacgcccgcgctttcaacatgacacccgaggacgttgataaggcaatgcgccagatcggcaaggtgatggaactggggctgggattcggcggcggcgtggcggcattcgtgacgttcgcgctggtctacgggcttgacctcgaagatctggccgacgccgcactgccgaacatccctatcgccatccagcgagaggcgcaaagttggtggcaggcgtcggttaagcagaaaaagacctacggcctgtccgagcgcgtgttcatcacctgcgactcactgaagcgcctgtggcgcaacgcacaccccgaaactgtcagcctgtggtcagaactggaaaatgccgtgcgccgcgccatcgcgcaaccgggcaagcagttcaactgccggcggctgaaggttcgcaaggacggctcttggctgcgtatcgccctgccatccggccgcgtcgtctgctatcccggcgctgcgatcgtcaaaggcgatatcacctacatgggcgtgaacccttattcgcgcaaatggcagcgccttaaaacctacggcggaaaacttgtggaaaacgtcacccaagccggcgcgcgcgatgtactggccggcaacatgccagcaatcgaggctcggggctacgagatcgtgctgacagtgcacgatgaagtgatcaccgaggcgccggacaaggatttctactttcacgaccagctaagccggctgctagccactaaccccgcatgggcgccagacctgccgctaaatgctggcgggtttgaggcctatcactataggaaggattaa

SEQ ID NO: 428237 - DNA, 1482 bp, Serratia marcescens
atggaaatccaagagtttgtaagccactacaaaaaccaccctgttctattcattgggacaggattcagccttagatacctagaaaactcgtttagttgggatggtcttcttttgaatgttgctatggagctaaccggcaatgctgaattctactacgacttgaaagccgagagcctagaaggtgacgaataccgatacgatattttagccacaaaacttgaagatgttttcaacaaaaaattggctgaagaccggaacggtaaattcaaagccatcaatgatattttctacgagcatatgaaaatagggaaaaaattaagtcgttttaaaatttatctaacatccatacttaaagatttaaaaatcaaagaatcgatgaaggatgaaataaatagtttaataaaaacaaggaaaaatataggctcagttattacaactaactacgatcaattagttgaggatttttttgagttttacccattgattggcaacaacattcttttaagcaatccatacggctcggtttacaagatacacggttgtgtaagcgaccctaacaacataataattacaggggaggattacgcaaacttcgacaataaatacgagttaattcgcgcgcaattactctcaatattcatacataatcctatcatattcatagggtatagcattagtgataaaaacattaaatacttattaaaaaccgtattctcctatgttgatttaaacaccgaactcgcaaaaagaatcaaagataacttccttttggttgaatacgaaaaagatagcatgtccacagagattacggagcacgacatagatatagaaggcatgtcaatcataagaataaacaaaataaaaacaaataattacaaagccgtgtacgatgccatctcaggtttagttttaccagtctccgcaatggacataagaaaggttcaaaaagtctggagcaccattagaagcggaggcgaaataaaggttaaaatcactgagaatttggatgaacttcgcaatgatgaaatggtcatagcagtgggttcggaaagaaccgtgcagtatatttatcaaaccaaatctgaaatgatgcagaactactttaaaatagttgacgaggcgaatactcaacttattgcgttgcttaacaagcaaaccatagctaacaacgaacacttcccgatatatgcctttagttctatctgccctgagttagaaaacactgaagtatacaagaaaaggcaacttgataaaatagtcgataacattccaagaattaaagcgtgtaaaagtgaagctgtttccattgacgacgtactaaaagagacaaaagcgtataaagttgctaacaccattatgtattgcgtattgaacgataccatttcgttaaagcaactaagagactacttaacttctccgggacacaaagttgacactcaataccgcagacttttatgcctatatgacttcttatcatattga

SEQ ID NO: 428238 - DNA, 549 bp, Serratia marcescens
atgaaagtgaaattgaacaacgtccgcctggccttccctgctctattcgaaccaaaagccgttaacggcgaaggcgatccgcgcttctccgccgcattcatcttcgaccctaaacaccctgcggtggccgagatcgagaaggcaatcgaagccgtggcgaaggaaaaatggggtgccaaggccgaaggcgtgctgaaaacgttgcgctctaccctgaaagtctgcctgcacgacggcgacgagaaagccgaatacgaaggctatccgggtaataagttcgtctcagcctccaacaaagcgcggccgcgcgtggtagaccgtgacaactccattctggtgcaggccgacggccgcccttacgccggctgctatgtcaacgcagtgatcgacatctgggcacaggacaacaacttcggcaaacgcatcaacgcctccctgggcggtgtgcagttcctacgtgacggcgacgcctttgcgggcggcggtgtcgccagcgaagacgatttcgacaacatcgaagaaggcaccgacgcaggcgagttcgtctaa

SEQ ID NO: 428239 - DNA, 1314 bp, Serratia marcescens
atgccagagcaacacgcacgactcagcccctcaggggctgaaaaatggatgaactgcgctggcagcctggcgatggaagccgggctggttgacgaaggttccgagttcgcgctggagggcacagcggcgcacgcgctggcggagatcgtcctgcgcaaccggctggacccgacgctggcaggcattgagctgcaaggcggccagaacgccaccgactacatcggtacctacccgctggcaaaaggtgaaggcagcgccgggccgcaggtaactgacgacatggccgagttcgtgcagcgctatgtcgatacggtatgggcgctggccgacggcaacagtctgctggttgagcagcgcgtcgacttctccgatgtggtcggcgtaccggagcagttcggcaccgccgacgctgtcatcatcacccctaccgagctgcaggtgcacgatctgaagttcggccgcggcgtgaaggtggacgcggtgaacaacaagcagctgcagctatacgccctcggcgcgctggagcagttcggaatgctgcaggacttcgaaaccgtccgcatgttcattcaccagccgcggatcggcaacgaatcagaatgggcgatcagcgtcgaggaactgcgcgcgttcggcgaactggcgcgcgaggctgccgccgccgccatcgtcacggcgaacattgccgagtgcgaaggcatcgacaccctgccggccgacgtattcaacccgggcgaaaaacaatgccgctggtgcaaagcggccggcggcctgtgcaaagccgaagcgcagcaccacctcgacacgatggctggcgacttcgtcgacctcacccagccgctggcgccgcagctggccaccgccgggcagcgcgtcgcggtgctgacaccagaagaactggccgcgctctacaaaaacgtggacgcgatcgaaggcttctgcaaaggcctacgcgggcgcgtcaacagcgaactggccgccggacacactgtgccggggttcaaactggtggaaggcaagcaaggtaaccgcgcctggagtgatgaagaggccgcgcgcatgctgctgaaagagaccttccgctacaagaacgaggaagtgttcgacttcaagctgatcagcccaaccaaggccgagaagctgatcaagaaggagaaaccgcgccgctggacgaaagttgaagcactgatcgcccgcgccgatggcaagcccgccgtcgcccctgaatccgatccgcgccctgcgctggtcatcaatcacgaaaacgactttgaaaacgtggacgccgtcgaggcagccgcggaatttatctga

SEQ ID NO: 428240 - DNA, 717 bp, Serratia marcescens
atgtcgttcacgcagtacatcaccaccccgaaaacctggcccccctcttgcatgctctccgatggttatgtcgaaatcggcaaggcgcagtttcagcagctgaagaaagaagccgaaaaaacacaggttaagccggtcggcctggaagatcagccactgccggtcgctgtggcgctggcggtgctgtacggccaagccagcctaacgcctgaaatgatggccaatgccatcaacttcgccgaaaccaccaacggcgacgagcgtgacgcgcagatcgacgcgctgacgatggcgctgaaaggcgttgaccgcgcgacaaaactgcacggcgccggcgtgttcgacctcgctctgcagatggttgagcattgggacgcgctgccgggcatcaccgagcgccgcgcctacgccgaccttctgctggacaccccgaaagagaagcgcgccgacgtgaagcctgccaagccgaaggcatcggccaaaggcaaaaacaccgagactgtaaccactaccgccggggccgaagcgccggacgctgccgcgctgctggataaaggcaaacagctaatcatccagaaaattgcaccgaaggcgccggcggacctgcgcaaaacgctggatctgttcggcttgaagaaactaaccgactgcccggaagaaaaactgccagacgttgtggcggcgctggagcagctggccgaatccctggaggcgtga

SEQ ID NO: 428241 - DNA, 537 bp, Serratia marcescens
atgcagatatgcaggcttaactacgctgatttatcaagtgatggcaagatagtgaaattacggtgctatggagtggggacattcgacgtgttatcgggtattgagtattacattaacaacccaaactgttcggatcgtgagaaagccgccattcctccaggaacatactggatcgtcgacagaccaaagggcagtattgcaaatcaaattcgctctgaattggttgacctgtatcatctctacaagaatcgccattctgaatggtttggtctcttcagcaatgaaacaatgagtgactacaccgtcgtaaatggcgccattcgaaacagttttagactgcatccactcaacacagatggcaccggtgtttcttggggatgtattactctctatcaggcatctgactttcagatccttcgggatgcgctgctaaggcgtagaaaagtgagagtgcctggaggtcgagggctgatggcgtacggccgtatagatgttcaaggcgtgcctgattacagtaaatgcgtggtatcacgatga

SEQ ID NO: 428242 - DNA, 237 bp, Serratia marcescens
atgaaaaaaagtctctggattgttctgttcttgttgctcacccttttgttgctgcgctacctaccagacggaattttcgacagcttcgtttccaacaacatagaaattagcggtgatggtgaaatagggatgaataatttcgactcggttgtcattgccattaaattgggtgtctctgccatcattgcggcggttgtcctaatagtctgtcgcctcctggtgcgtaatcccagctaa

SEQ ID NO: 428243 - DNA, 210 bp, Serratia marcescens
atggcgtcatcctcccgccgtttcgccattcttcgcatgcccgccgcctcccttataccgttccgcgaagcggacgtgctgcaccccgtacctaatcggccccctaaatcccggtcggtcttggctagcttagcgcagtgtttccctggtggcgtcgtcagtgacgacagtgatccagaatgtctgatgctgaagcgtcagttgcaataa

SEQ ID NO: 428244 - DNA, 960 bp, Serratia marcescens
gtgattatccaacaaacccccatcaactcaggattcgggcccaaaacgaccgccggcgaggtgctaacgggcctggatctgtcaggcactcaggccatcgtcaccggtggtcattcaggtctcggtctggagacgacgctggcgctggccgacgccggcgcacgggtcatcgtcgcttgccgggcaccggcggcagccaaagaggtgttagggcagagcgccggcgtcgagatcgccgaactcgatctcgccgatttaaacagcgtgcgccgattcgccgcagactttaccgcatcgagcctacgggcggatattgtcatcaacaacgccggagtgatggcatgcccggaggcgcgggtggggcgcggttgggaaaggcagttcgccaccaaccatctcggccactatgcgctgaccaatttgctgtggccggccattgccgatggcgggcgggtggtcagcgtttcctccgccgggcatcaccattcggcgatccgctgggaagatgtgcagttcgaacgcggttacgacaagtggctggcgtacggtcagtcgaagacggcgaatgccctgtttgccgtccggttggatcttcttggccgctcgcgggggatccgcgcatttagcctgcatcctggcagcatcgccacgccgctgcagcggcacatatcgagagaagagatgatagccctaggctggatggacgaagacggcaatccggccgatcccgacgcccttaaaacgcctcagcagggggccgcgactcaggtgtgggccgccacctcaccgcagttgcagggtttgggaggactttactgtgaggatggcgatattgccggtatcgccgcacacgacagtcaggcgctggtcggcgtgaaggaatacgcgatcgatccggaacaggcgcagcgtctgtgggcgctttcggcgtcgctgaccggtgtcgatgccttcgcctga

SEQ ID NO: 428245 - DNA, 1131 bp, Serratia marcescens
atgatgtcgatgatgaaagaaaaaaacctggcgatatccagcatgtttttcatgttggggttgtgtttcggcagtttgagctcaaggatggcgacgatcaagggagggctcgcgttgtctgacggcgtattcggcagcgtactgttcgccatgtcggccggggtggtcttgtcgctgccgatatcgggatgggcgatcgccaaactcggcagcaggatggtcggcgtcgcggccattctgatcaacgccatgcttttgcttctggtgccctttgccgcgacggtccctcaattggcggcgttgctgtttttctctgggttcgcttacagcgcggtcaatgtctctaacaacatgcaggccagtatcgccgaggcggtcagcggtaaaacgcggttgccgttctttcacggtatatggggcgtggccgggttcgtcggcgcagggatcggggcgctaatgatcggtcgggatgtcgccttgccgctgcactttactggcatagcggcggtggctctggtgtccgccttgctgtgtcggcgggcattgttcgacaaaccggagttggaacagaccgggcgcgctttcgccatcccggaccgctcgctgttcaactatggcctgatcgttttctgctcgatggcttgtgagggcatcatgtatgactggagcgtcgtttattttcagaatgtcgtctcggtcgatcgaaaatacatcggcctgggttttacggtatttatggcggccatgacgatcggtcggctcatgttgaaccggttcgttgatcggatcggagtgagaagaacgttgcagtggggcggaatgctggcgttcaccggcatgacgctaacgacctggttgccggggttggtgacatcgataatcggttttttcctggttgggcttggcatttgcgtcattattccgctggttgcgggggcggccgcaaggtcttcttccatggcgccaagcgccgccatcgcggcggtgttgaccatcggctttctgggcacgctgatcgggccgccgttaatcgggttcttatccgaaactgtcggtctgcgctatgcctttctggtctgcgtcgcgttgtcgctcggcgtcatttatcgggcagggaaaataccgcagtga

SEQ ID NO: 428246 - DNA, 702 bp, Serratia marcescens
atgctaaaaccatttttggacatcgtcgtacccaccgtaggcgccttcggcgcgatattttttgccctcgtcaaaacgcccttccgcatccggcgggaaaatcacgacaagctgctcaagctgctccaatccgtcgagacggcgcaaggcgaacgcattaacctgctgctgtttagggactatatggggagtaaaaccatcgggctgacggcgttacggctgttattggcgctaccggacagcgtagcggcgctggagcgttatcgcttcaccggtggccgccagcaaatcttgcgcgccacgtccgcgggcttcgttttgcggccaagcgccaataacgctttcaaacgtttcctgctttcgtgtcgctattttttgctgtatttgctgttcgtcacgctgctggtactactccccgcgttgactcaatggggactgcaacagtcaggggtattgattacgccccattcactcagctatctgcctaatgcgcgcatcaccgacggctggcagctgctgttccccggcttattatttattatcattatgttcagcctggcatacctgaccttcagacagctggaacgcgcgggtaacctcagctcggaacgcgccttttatcgctactaccaacgagcgcgtgaggaacaacgatgccgggaagtcctgagacaaatgcgcactgcgctgcgccgagcctga

SEQ ID NO: 428247 - DNA, 3657 bp, Serratia marcescens
ttgacgatttgtcacccgccacacaaacacgataaagccgcgttcaaaccctctgttagacttttttccattactgcgaaagtgcgctttcgcggctttgagagcaatgaaaaggtaacgccgatgataactacagatggtaataatgcagtcgcttccgtggcctatcgcaccaacgaagtgattgccatctaccctatcacgccgagttccaccatggcggagcaggcggatgcctggtccggcgatggccggcaaaacatctggggtgacatcccgcgggtggtggaaatgcagtcggaaggcggcgcgatcgccaccgtgcacggcgcgttgcaaaccggcgcgctgtcgacctcgttcacctcatcgcagggtctgctgctgatgatccccacactgtacaaacttgccggcgagctgacgccgtttgtgctgcacgtcgccgcgcgcaccgtagccacgcacgcgctgtccatcttcggtgaccactcggacgtgatggcggtgcgccagaccggctgcgccatgctgtgcgccggcagcgtgcaggaggcgcaggacttcgcgctgatctcgcagaccgccaccctcaacgcgcgcgtgccgtttatccatttcttcgacggcttccgcacctcgcacgaaatcaacaagatcgtacagctcagcgacgatacgctgcggcaaatgctgccgcaggcggcgatcgacgctcaccgcagccgggcgctgtcgccggatcatccggtggtgcgcggcacttccgccaacccggacacctatttccagtcgcgcgaagccaccaacccgtggtatgacgccaccggccagcacgtgatcgacgccatggcagccttcgccgccctcaccggccgccactatcggccgttcgactattacggccacccgcaggccgagcgcgtggtggtggtgatgggctccgccgccggcacctgcgaagaggtgatcgacaccctgctgacccgcggcgagaaagtcggcgtgctgaaggtgcggctgttccggccgttctccgccaaatacctgctcggcgcgctgccggacagcgtgcgcagcgtcgcggtgctcgatcgcaccaaagaaccgggcgcgctggccgagccgctgtatctggacgtgatgaccgcgctggcggaagcctacagccggggtgagcgcgccacgctgccgcgggtgatcggcggccgttacggcctgtcgtcgaaagaattcggccccgactgcgcgctggcggtgttccgcgagctggcccagccgcagccgcgcccgcgctttaccgtcggcatcttcgatgatgtcaccgggctttcgctgccgctgagcgacgaaatcctgccgcagcgcgcctcgctggaagcgctgttctacggtttgggcagcgacggctcggtctcggccaccaagaacaacatcaagatcatcggcaacgccacgccgttgtatgcccagggctatttcgtctacgactccaaaaaggccggcggcctgacggtgtcgcacctgcgcgtcagcgagcagccgatcaactcggcttacctggtcagccgcgcggacttcgtcggctgccaccagctgcagtttatcgataagtaccaaatggtcgaacgcctgaagcccggcggcaccttcctgctcaataccccttacggcgccgacgaggtctggtcgcgcctgccgcaggaggttcaggcgctgttgcaccaacgccaggcgcgtttctatatcatcaacgccgccaagctggcgcgcgaatgccggctcggcgcgcgcatcaacaccgtgatgcagatggcgttcttccacctgacgcagatcctgccgagcgacgtggcgctgcaacagctgcaggacgccatcgcccgcagctacagcagcaagggccaggagatcgtcgagcgcaactggcaggcgctgggcgccacccgggccgcgctgaccgagatcccgctgcagccggtcgacgccagcagcccgatgcgcccgccggtggtctcggacgccgcaccggacttcgtcaaaaccgtcaccgccgcgatgctggccgggctgggcgatgcgctgccggtttccgccttcccaccggacggcacctggccggtgggcaccacccaatgggaaaagcgcaacatcgccgaagcgatcccgatctggcagcccgacctgtgtacccagtgcaaccactgcgtcgccgcctgcccgcactccgccattcgcgccaaggtggttcagccggcggagatggagcacgcccccgcctccctgcagtcgctggatgtcaaagcgcgcgatatgcgcggccagaaatacgtgctgcaggtagcgccggaggattgcaccggctgtaacctgtgcgtcgaggtctgcccggcgaaagatcgccagaacccggagatcaaggccatcaacatggcttcgcgcctcgataatctgacggcggagaaagacaactacgacttcttcctgcagctgccggaaatcgatccggcgcagctggagcgcatcgacattcgcacctcgcagctgatcacgccgctgttcgagtactccggcgcctgctccggctgcggcgaaacgccgtacatcaagctgttgacccagctctatggcgaccgcttgctgatcgccaacgccaccggctgctcgtcgatctacggcggtaacctgccgaccacgccttacaccaccaacgccgaagggcgcggcccggcgtgggccaactcgctgttcgaagacaacgccgaattcggcctgggcttccgtttaacggtcgatcaacatcgcgcgcgagtgctgcgcctgctgaatgctctggcgccgcagctgccggagcggttggtcaatgccctgcagatgggcgacgtggcgccggagccgcgccgtaagcagatcgccgaactgcgcacgctgttggccaatctcgaaggcgaagacgcgcgccagctggcggccggcgccgactacctggtggataaatccatctggctgatcggcggtgacggttgggcctacgacatcggcttcggcggtttggatcacgtcctcagcctgacggagaacgtcaacgtgctggtgctcgacacccagtgctactccaacaccggcggccagcagtcgaaggccacgccgctcggcgcggtgaccaagttcggcgaacacggcaagcgcaaggcgcgcaaggatttgggcgtcagcatgatgatgtacggccatgtctacgtggcgcagatctcgctgggggcgcagctcaaccaaacggtgaaagcaattcaggaggccgaggcctatccggggccgtcgctgatcatcgcctacagcccgtgcgaagagcacggctacgatctggcgctcagccacgatcagatgaaacagctgaccgccaccggcttctggccactgtaccgcttcgatccgcgccgcagcgccgagggcaaggccgcattggcgctggattcgcggccgccgaacagcagcctgtcggaaacgctgctgaaagaacagcgtttccgccgcctgaacgcgcagcagccggaagtggccagcgcgctgtatcaggccgccgagaaagagctgcaggagaaatacgatttcctcagcctgctggccggcaaggcggaaaaatccgccgcagagtaa

SEQ ID NO: 428248 - DNA, 624 bp, Serratia marcescens
atgaaagtacgtactaaagcacgccgcgacgctatcgtcgaagaagcggcattgctttttcaagaaatgggctatgaacgagcgtcaatgaatgaactggtcaagcggattggcggatcgaaagcgactctttaccgttatttcccttctaaagaggcgctatttgtcgccgttgttcgtgaacatgcaactcagcacctcacagaagccgctgagggactgatgattgatgcgcaaactttcacgctggaacagactttgatgcgttttgccgagcgaaagctgcaggttgttgccaacgataatagcgcaatcgccgtttatcggatggtggttgccgagtctggtaattctgatatcggcactctattttatgatgcaggaatacgagaaagtgtaacaaaactctcggaactcatggcgatagcgatggagcgtaaggaactgcatttggcagatccgcaccttagagctttacaatttttgtcgctattaaccgcagaggttgatatgcgtgtgtaccagcgccaattaaccccgctaagtacaccgcaaattcaggaaatggtttgccatgcagttcacatgtttttaaatggagcggcattcagagataatggctaa

SEQ ID NO: 428249 - DNA, 666 bp, Serratia marcescens
atgtctaattacatcaacgcttttctcttggttgttgcggtacctaccgttattttggccggatgttcggcaaaaccaccggtacggtatgctagcattgattcatcatcattgctcactcctaacactgatgataaatccaaccgtattccttaccgctatgccccgccagtggactggagtaaatacaccaatatcattatcgaaccggtcgttatttatcaaggtggggatcaccagtttggcgatctcttaccggaagaacgcaagttattggcggattatatgtataacaaattcagcgaaagtttgcgtccacacttccgagaggtcagcacaccaatttccggtactatccgattaaaactgacgttaacaggtgctgatacgacgacgtcttttatcggcactatcactaagttagaccctctggtgggagggccttacaatattgtgcaatctatccgtggtgaggaaggattattcaacggctcagtgaattacgttgtggagctttatgatgcttctaaccataaccttctcaacgcctacgtggccagacagtatccgaatgccatgaatatcggtgcaagtatcggctcgctcaacgcggccgaggtgggaattgacaaaggtgcggaagaactggctgagatgttgaattaa

SEQ ID NO: 428250 - DNA, 1497 bp, Serratia marcescens
atggcagatgaatatagtatgcaatcgcaagcgtcctcttggcagagcgtattacccatttcccgtaatctgtattatggcggaaattggcatgctcccgtcggaggtgaagtcagagcagtgaatagcccaggaaccggaacggagttatgcaaagttgcagaagctgacgaacgcgacgtatcttccgttattgacgctgccagaaatggatttcagctgtggcgtcaagtcaagccactcgaaagagcaaaaacacttcgaaaaatggctgctgtaatccgcagcaatttacgcgagctggcgttgcttgatgccattgactgcggaaaccctgtgcagatgttatatggggatgtggctgcggcggcagaactgctggacttctttgcgggacttgtcaccgagatgaaaggaagctcaatcccaatgggagtcgggaccgttaatttttcgacacgggagccctatggtgttgttgcgcgaataattcctttcaaccacccactcctgacgtgtgcggggaaaatagctgcgccgttggcggcgggaaatgccgttataattaaaccctcagagcaaagtccgctctcggcgctgagactggctgagctctttcacgaactgttgccgccaggagtcttcaatgtggtgacaggagggaaggccgttggcgctgcactctcgcagcatccaggcgtttcaatgatcactgtagtcggaaggatacctacggggcgggcggtaatgcgtgcagccgcggaaacgataaaaccggtgctgcttgagttaggtggaaaaaatgccctcattgccttctctgatactaatccagatcaagttgccgatgctgtgatacgtggtatgaattttgagtggtgcgggcaatcatgtggttcaacaagccgggcatacattcatagcgatatatatgaggatgttatcgaaaaggttgcatcgcgcgtgactcgatttaaaccaggcataccgtcagaccctgaaaccaccatgggggcattgatttctcaggctcaattaagccgcgtggaatcttatgttgagcaggcaaagctcgctggggcacggcttattgccggaggctcgaggcccgcacatgaatcactaaagaacggctgtttttttgaagcaactgtatttgctgatgtaaccatggatatggatattgcacgggaagaaatttttggtcccgtgttgtccattataaaatgggatgacaagaaaagtcttattcaacaagtgaatcagttggatcttgggctaacttgttctatatggactgacagcctgcaagacgcgaatcaattggctcaggatgttgaggcagggtttgtgtggataaatgatgtggctaaacattttcttggtgctccatttggtggtgtaaaacagtctgggattggccgagaagagtgtttgggtgagcttttggcctttaccagggaaaagaatatacatatcaatttcacacccaaataa

SEQ ID NO: 428251 - DNA, 2295 bp, Serratia marcescens
atggcgaaaagacgagcagtacctggaattcatccttacgatgggcccgccggcggttggggcgcgctgaaagcgacggccatcgccgtgcgcacgcagatggataccttggaagcgccggtgacgctgatgcgcaccaatcaacccgacgggtttgattgcccgggatgcgcatggccggataaagaacatcgctccaccttccagttttgcgaaaacggcgccaaagccgtgacctgggaagcgaccagcaaacgcgtgacgcccgaattcctggcgcaaaacaccgtgacgtcgctgctgcagaaaaccgattatgagctggaggattatggccgcctgaccacgcccctgatctatgacgccggaatggacaccctgcgcccgctggcctgggacgaggcgtttcaacgcatcgccgacgtgttgcagacgctgccgccggagcaggtggagttttatacctccggccgggcgtccaatgaggcggcctacctgttccagctgtttgcgcgggaattcggcagcaataacttccccgattgttccaatatgtgtcatgagccgaccagcgttggcctgccgcagtccattggcatcggcaaaggcaccgtctcgctggacgactttgacagcgcggagctgattatctccatcgggcacaatccgggcaccaatcacccgcgcatgatgggcacgctgcatgagctggcgcgcaaaaaggtgccgatcatcgtgttcaacccgctgcgcgaacgggcgctcgagcgtttcaccgatccgcaaaacgtcattgaaatggcgacctacagttcgacccctatcgcttcaacctactatcaggtcaaagccggcggcgacgccgcggcgctgaaaggcattgccaaagcgctgctgcagctggatgaaacacaaggcaatgccgtggatcacgcctttattgccgagcacacggaagggtttgcagctttcgccgccgatctggcggccacccgttgggaggccatcgaggcggagagcggcctgacgcgtcaggatctggaacaggtcgccgccgcctacgcaaaatccaacgccaccatcgtgacctacggcatgggcattacgcagcacaataaaggcaccgccaacgtgcgcctgatcgccgatctgctgctgctgcgcggcaatatcggcaaaccgggcgccggcatctgcccgctgcgcggccactccaacgtgcagggcaaccgcaccgtcggcatcaccgaaaagccctcggccgattttttggcgaagctggaagcggtgtttggcttcacgccgcccaaagcccacgggcatgatgccgtgaagtgcatgcaggcgatgatcgacggcgcctcgaaagcgttgatctgcctgggcggcaacttcgccgtggcgctgccggatcccgagcagagcttcccggcgatgaaagcgctggaattaagcgtgcatatcggcaccaaactcaaccgcagccatctgttggtggcgaaacaaaccctcattctgccctgcctggggcgcaccgagctggacatgcaggccggcgggcggcaatcggtgacggtggaggattcgatgtcgatggtgcatgcctcgtccggcaaactcaaaccggcgtcggaactgctgcgttcggaacccgccatcgtggccggcatggccaaagcggtgatgcccgccagcaaggtgccctgggatgagctgatcgaagattacgatgtgatccgcgatctgatcgaaaaaaccattccgggcttcgacgattacaacgcgcgcattcgtcaacccggcggtttccgcatgccgttgccgccgaccgaacgccagtggccgacggcgacgggcaaagcgatgttttccgtgttcagcgggctgcatgaagacgcggccatcgcagagaaagacacgctgcggctgattacgctgcgcagccacgatcagtacaacaccaccatctatgccctggatgatcgctaccgcggggttttcggccggcgcgacgttttgttcatgaatgacagcgatctgcaacgcttggggctggagcatggcgacgtggtcgacctggaaacggcgctgcccggctgcactcagcgcctggagggcatcacggtgatcgcctacaacatctcggccggttcggtcggtgcctactatccggaggccaacgtgctggtgccgttgcattacatcgatgaggagagcggcacgccttcgtacaaatcggtgccagttcgcgtgacgctgagatccaaagaggtgcgtgaggtcaagatcgcctag

SEQ ID NO: 428252 - DNA, 4200 bp, Serratia marcescens
atggctaaaccgactctaatcgttatcggcaatggtatggcaggcgtgcgactggtggaatatctctgtgagctcgcaccagatcgttaccgtatcatgatcatcggcgatgaaaagcacagtgcgtacaaccgtatccagctgacgccggtgctttccggtgagaaagattttggccagatagtcacgcatgacgcgcagtggtatgagcatcacaacatcacattgatcgcaggcacggcggcgacggcaatcgaccgtcacgcttgcaccgtcacggccgccgggcagatctattcatacgatcatttggttctggccactggctcacggccatttctgccccccctgcctggggtcgaattgccgggtatccacgggttccgcattcagcaggatgtcgaaaatattctgcagggagcctacgcaggccaaccggttgcggtgatcggcggcggcgtgctgggcgtggaggcggcggcggccctggcgcggcgtggaatgcgggttagcctgctacatcgcggcacacatctgatggatcagcagctggatgaacacgccggaaaactgttgcacgaggggctctcattacgcggcatcaacgtcattttgcaggctgaaacggtgtcattcagcgctgatgccgctggcaacgtcagcagggtgaatcttaatgatgggcgcggaatagcggcggagcgggtcgtgctctctgtgggcgtgcggccgaacatcgcgctggcacaacggtcaggcttgccgtgcgatcgcggtattctggtgaacccgcagctgcaaaccgctgacccgcacatctcggcaattggagaatgttgccagtggggcgaactcacttttggcctggtggccccgtgctggcagcaggctgaaacgctggcctcgcggctggcggggggcgacaaagccacttcattcgaggtgcagaatgtcccgctgcgcctcaaggtcacaggcctgaatttgttctgcgccggtgaattacacagccgcgatggcgctcagacccataccacctttgacccgtttgacgggcattatcgccagctggtgctctgcgacaaccaactgaaaggggtgttgctgtggggcgatatcagcgatggcccgcaatacctccagcggatcggcacgcccattgggcaaccgttgcccttcagtgtcttcagtcccggtaatgagccggatgcctctggcttacagcctgttaaatcagaaccgttacccgtcgaggtggcgaggagtcattcaatgtcgaaacccgtattggttatggccggacacggcatggtgggccatcattttttagagcagttggttgcgcgtgagctgcatctgcaataccaggtgattgtgtttgccgaagaggcctcggccgcctacgaccgtgtgcatttgtccgaatacttctctggccgcacggcggaatccctctcaatggttgaaaagggatttttcgaatcgaccgggattgaactgcgtctggggcacagcatcgggctcgttgatacaaaacaccgttttgtggtcgatcaccaggggcggcagacggcttacgatgtactggtgctggcaacaggatcctatccgtttgtgccgccgatccctggcaatgatgcgccgggctgcctggtttaccgcacgcttgacgatcttgcggccattcaggcctgcgcggcaaacggcaaaacgggcgtggttgtcggcgggggattactggggctggaggcggccaacgcgctgaaacagctcgggctggatacgcacgtggtggagtttgcaccgcggctgatgggggttcagctcgacgacggcggtgccgcgatgctgcgccgtaaaattgaagcgctggacgtgaaggtgcataccgggaaagaaacccaggccattactgcgggcgaggagagccattaccggatggtgtttgccgatggcagctatctggaaaccgatctggtgctattttccgcagggatccgcccacgcgatcagcttgcgagagcgtgcgggcttgaagtggggccgcgcggcggcattgtgattgacgatcgctgccagacgtccgacccggctatttatgcgatcggcgaatgtgcgctgtggaacgggcagatcttcggcctggtggcgccgggttatcagatggctcgcgcgctggcggataccctgacgggcggcgacgccgtctttaagggcgcggacatgagcaccaaacttaagcttcttggtgttgaggtggcatcgattggtgacgcgcatgggcgtactcccggtagccagaactacagttgggtagacggtccggcgaaagtgtataagaaaatcgtggtatcgcaggatcgcaaacggctgctgggggcggtgctggtgggcgacagcgcggaatacagcacgttgctgcaaatgatgctcaacgatatgccgctgccagccaaacctgaatccctcattttgcctgccgggtcgggcgcagacaaacctgtgctgggcatcgcagccctgcccgatagtgcgcaaatttgttcctgccacaacgtcagtaaaggcgatgtccgtaacgccgtgaagaacggctgccacgatatggcggcgataaaagtctgcaccaaagcggcgacgggctgtgggggctgcgccgcactgaccaagcaggtgatggaatatgcgctgtccgacatgggcgtcgaggtgaaaaaagacatctgtgagcatttcgcgtattcgcgccaggagatttatcacctggttcgggtgggcaatatccgcacgttcggggaactgattgaaaagcacggccacggcagcgggtgtgaaatctgcaagccgctggtcggatcgatactggcatcatgctggaacgactacctgttgaaaccgcagcatttgccactgcaggacaccaacgatcgttatttcgccaatatccagaaggacgggacctattccgtcgtgccgcgcgttccggcgggagagataacccccgaagggcttatcgccatcggcgaagtcgccaggcgttacaagctctacaccaaaattaccggagggcagcgaatcgacctgttcggcgcgcgtctggagcaactgccggagatctggcagcagctggttgatgccggttttgaaaccggtcatgcctacggcaaatctctgcgtacggtgaaatcctgcgtcgggtcgagctggtgtcgctacggcgtacaggactccacctcgctcgcgctgcaattagagcaccgctacaaagggctgcgttcgcctcacaaaatcaaaatggccgtctcgggttgtacccgcgagtgtgccgaagcccaaagtaaagatgtgggggtaattgccacggataagggctggaacctgtatgtctgcggcaacgggggaatgaagccccgccatgctgatttgctggcgcaggacatgagcacagagcagctcattcgtaccgttgaccgcttactgatgttctacatccgcaccgctgaccggctgcagcgcaccagcacctggatggataacctcgaagggggcatcgactacctgcgccaggtgattctggacgacagcctgcaaattgcggatgaactggatcgtgaaatgtctgcggtggtggcgacgtaccagtgtgaatggcagaccactctggcctcgccggatcgcctggcgctgttcagaccgtttgtaaacagtgaggtccctgacgaaggggtcgtgatggtgagcgaacgtcaacaactgcggcctgcaacgcatgaggagcgcagcatgctcgccgtgcctgccgcagaaaatacgcaggagcccgcaccgggctgggtggaagtgtgcagcctgagcgccatcccggcgaatgcgggaatggcggcgcgcctggcgagccagcagattgcgctgttctatctgcccggtcatccacagcaggtttttgcgctgagcaatcatgaaccagacagcgacgccaatgtgctggcgcgcgggctcgtgggcgatgtcaaaggcgaaccggtggtgatttccccgctctataaacagcgcttcagcttacgggacggccgcagcctggacaattcgccgcatgcgctgcgaagctgggcggtgaaagtggaagatggccgcgtctgggttcaggcacgaacgcagggcgttgcgtccgccaaaatcattgaaacggtcaacctatga

SEQ ID NO: 428253 - DNA, 1002 bp, Serratia marcescens
atgagccgaataccggttacccagtatgatccgccattcgccatcacacgcgcaagccatctggtgttgacctcgcaagacctggccgccagcgagcggttttacacccaggtagcaggcatggtgttgactcacaaggacgatcgccatctgtatctgcgcggtttggaagaggcctgtcatcacagtttggtgatcgcctacagcaaagcggagccgcactgcgagcgcattggcctacgggtgtttcaggaaaaggatctggctgcggccaagcggtttttggatctgcaaggccttgataatcactgggcggaggtgccgtttcaggggctcaccctgcatttcaccgatccggtaggcacaccgattgaactttgcgccagtatgccggtgatgccgcgcttgcaccatcaggtgcatttgtaccgcggcggcagcgcccaacggctggaccatttccagctgcatacaccctatgtgcagcgggcggccgaattttatatgacgcagttgggatttcgcgcctcggacatttatatgaacgagcaagggatgggggccgcctttttgcaacgcaagggcaatacgcaggatttggtgtatctgcatgggccggggccgcgtttgcatcacttcggctataccattcccgattcgcaggagatcctgcgcgcctgcgataccgccggcaacctggggttcggtgacgcggtggagcgtgggccgggccgacacggtatggggcacgtgctgttcgtctatctgcgcgatcctgacgggcaccgccttgagctgcataacacgccgtatcagatgatcgatatcgagctggggactaatctgcttgaggcggatcaacgccagcaactgttgccctgggggctgccgccgcagcgcaaatgggtagcggaagccagcacgtttgccggcgcggcgatcgagcatccttcaggcggcggctatccgctggtgctggaagagtacctgtcgcgtatttga

SEQ ID NO: 428254 - DNA, 1488 bp, Serratia marcescens
atggctgatattaacattctgccgcaggtttccgcctttttggcgcaggatcatggacaatttattgatgggcagtatcgagcgacgcccaacgtagagcgtttgccggtggtgaatccggctaacggcaggacgatagccgatgtggctgcggcttctgccgacgacgtggatcgggcactggagagcgccgggcgtgcgttgcagggagactggggccgctgtcttcccgcgcaacgccagcaaattttactgcgccttgccgatctgctcgaggcgcatcgcgaggagtttgctcaactggagaccttgaccaatggcaaactgatcggcgacgcgcgtcgcttcgaggttgaccatacctgcgtttttatccgctattacgcaggctgggccactaagctgcatggcgagacgctggcgccgtccatcccttcgttcgctggcgagcagtacaccgccatgacctaccgggagccagtcggggtggtggcggcgatcgtgccctggaacttcccgttgatgatcgccatctggaaaatcgccgccgcgctttgcaccggctgctgcattgtggtcaaaccgagtgagttcgcaccattgacgctgctgcgtctcgctgagctggctcatcaggccggcgtgcccgcaggggtatttaatgtggtcaacggcggacgtcaggtcgggcagtggctgatagaacatccgcgcgtcaacaaagtcagtttcaccggttccgtgcctgccggtatcgctatcggtcaggcggcgctcaaagccgatctgacccgcgtgacgctggaactgggcggcaaaaatccggcggcatttctcgccgacgtcgatgccgagcgggcggtagacggcatcatgctcgccgggctggtgcatcaggggcaggtttgctcgtccgccgagcgcttttatatccacgcgtcgcgcttcgacgaaatcgtcgagcgggtaatcgcacgcgtcgaaacgctgcgcatcggttcgccgctggatgaagcgacgcagtacgggccgctggccaaccaaccgcattttgcccgcatgcaggcgctgttcgaacgggcacggcagggcggccaggtgttgagcggtgggcaggcgctggtgggggacgggttttacgtcacgccgacggtgatccgcgccaacgggcatgacgatccgctgatgcgagaagaggcctttgccggcgtgctgagtttcatgccgttcgatgatgaagaacaactgctgcagtggatgaatgacagcgcctacggtctgtccgccagtctctggaccaatgatttcagcaaagcactgcgcctgatgcggcgcattgaggcgggcatggtgtggatcaactcgcacaccatcatggatccggccgtaccgttcggtggctggaaggcttccggcatcggtcgtgaattcggcagcgcgttcattgagtcctacaccgagctgaaatccgtcatcatgtgctactga

SEQ ID NO: 428255 - DNA, 852 bp, Serratia marcescens
atgcgaatcgtcagttttattgccaatgggcgcaccggttacggcctgctgcgcggagaaaatgagattgtggacggcagcgccatactgccttaccccgatgttcgcagtgcgctggccgccggtggcattgaggcgtttgcaccgctgcgcgacgcgccggccagcctgaaggccgatgaggtgagctggctgccgccgatcgtcaatccggagaagatcttgtgcgtcggcctcaactatcgcccacatctgcgggaaacgggtcgcgaagcacccggccatccgacgctgtttctgcggttgcccgcctcgcaggtcggtcaggggcagccgctgctaatcccgacggaatcggcgcaacttgattatgaaggcgagttggcggtggtgatcggccagggcgggcgccgcatagccgaacgcgacgccatgcgccatgtcgccggttatgcctgttataacgacggcagcgtgcgcgactggcagcgccacagttcgcagtttaccgccggcaagaacttcagcggcaccggcgccttcggcccatggttgctgagcgccgatcgcattcctgaaccgagcgcgctgcagttggaaacccgcgtcaacggcgaggttatgcagcaggcatcgctggcggaactgatcttctctattccggcgttgatcgcatactgttcgacctttaccacgctggcgccgggcgacgttctggtaaccggcacgcccggtggcgtaggcgctttccgtcagccgcctgtctggctacaggccggcgatcgggtcgaggtggcgatcgccggcctgggcacgctcagcaatccggtcatgcacgataccggcgcctga

SEQ ID NO: 428256 - DNA, 723 bp, Serratia marcescens
atgaaatccacggaaagcccgctgcagctacagggggagttcaagagcctgagcggcgctgcggtggcattgatccgtcgccgcattatcgatgggcagtatcaacccggcagcaagctggtgatcggcaatatttccgccgaactggacatcagccccggcctggtgcgcgaagcgctgtcgcggttggtgaccgaaggcttggtgatcgcccatgaacagcggggattccgggccagcgaggtgtcgttgaaggagctgcaggacattaccgccaaccggcaaatgatcgaaactcacgcgctgcggctatctatcgccaacggcgacgccgaatgggaggcagggatcgtcgccgcgtttcaccgcctcaaacgcagcccgcgtctggaaaatgaggggcaaacgcacgcctggagccagcttcactatgcgtttcatcgcagcctgctgatggcctgcggttcaccgtggatgctgcgtttttccgatctgttgttcgatcagtctgaacgttatcgccgcttgcgttttggctatgaactggccggcgcagtgccggagcgggatgtggacggcgagcatcaggcgattatggacgccacgctggcgcgcgacacggatcgagcgatcgaactgttggcccggcactatcaagataccgcgcagcgaattattgaacagacggacaaccccgctctcaccggtggctccccacgttag

SEQ ID NO: 428257 - DNA, 780 bp, Serratia marcescens
atggatatgaagctggcggataaacacgctctggtttgcgcgtccagcagcggtttggggtatgcttgcgccgccgcgctgttaaaagaaggggcgagcgtctggatcaatgggcgcaatgcgcagcggctggaggcggcacggcaacgactccaggccgaaatcggcgggcaagtgcaggcggtggtcgccgatatcaccacgcaagaaggccgtgcggccctgctggccgcctgtccggacgccgatattctggtcaataacaatgctggtccagagccgggcaacttcttcgatttcgatgaacacgcgtggcttgacgcgctgcaaggaaatctgcttgctgcgctgatgttgatccgcgcgctggcgccgggaatgcgggcgcgtaaattcggccgcatcatcaatattacgtcggcgatggtcagcacgccgcgtgcccacatgacgctgtctgccgcctcgcgcgccggcctgacggcggcctgcaaggggttgtcgcgcgagttcgtcgccgataatgtcacgatcaacaatctgttgcccgagcgtttcgatacgccgcgtcaacagcagatggcgcatatcgccatggaacaacgcggtatcacctttcaacaggcgcggcagagccagatagactccattcctgccgggcgcatgggattgccgcaggagttcggcgccgcctgcgtctacctgtgcagcgagatgagcgggtacatgaccggacaaaacatgcacctggatggcggtgcctatcccgccctgttatag

SEQ ID NO: 428258 - DNA, 1623 bp, Serratia marcescens
atgcaagagaacgaacgatatgactatattgtggtgggcggcggttccgccggttgcgtaatcgccggtttgctggcggaaaatacctccgcgcgcattctgctgctagaggccgggcaggaagacaaaaacctgttcatccgaatgccggccggttttccggagatcgtcggcaagctgatttggccctaccaaagcgacgatgaaccctatatgaaccatcgggcaatgggcataccgcaagggcgcgtattaggcggcggcagctcggtgaacggacagctgtatgtgcgcggccatgcgcaggactacgatgactgggagcagctcgatggctgcaccggctgggggtaccgcgatgtactgccctattttatcaaagcggagtgcaaccagagcctgcacgatgaataccacggcgatcgcggccatctcaaagtcagcgactccggttaccgccacccgctgagctatgccatcgtcaaagcaggacaagagctgggctacccctattccctggatttcaacggtaagcagcaacagggcatcggtttttatcaaacgaccacctttcaggggcaacgctgcagcaccgccacggcctatctgacgccgatgcgccgccggccccatcttcacgtaatgaccggcgttcaggtggagcgcctgctgttagagcgcgatcgcgccgtgggcgttgcctacgtcgatgctgacggcaaacaccggcaggcaatggcggctcgcgagatcgtgctgtgcgccggcgccatcggcacgccaaagctgttgatgcagtccggcatcggcccggcagagcatttgcgcgaggtcggcataaaacccacactcgacagccccctggtcggccaacgcttgcaggatcacctgcacttctccgtcatcgccaccttgaaacagcccatcagcctgctcggacaagacaagggcgtcaaagcgctggcgaacggcctggaatggctgctgttcaaacgcggcatttgcgcctccaatctgctggagtgcggtggctttttcgccaccggcgatgatgaacgtcctgacgtgcaactcatggggctggcggcggcagacaacgtggacgacaaaggccgacaggctcagtgccagcatgcagtctcgctgaagctggcccacctgcggccactcgcacgtggtgaagtacggctgcgggacagcaacccgcgttcgttgccggatattcgtctgaattatctggccgaggaagcggacgtcgccgcgcaaatcagggcggtgcatttgggattacggctctttcaggcgcctgcattagccaatgtgatcgaccgcgtgctgctaccgacgccggatcagcgcagcgatgaacagttggcagagttcgtgcgccaacacgggaaaaccgagtaccaccccatcggcacgtgtcgcatgggtgccgaaccggcggattcggtcgtggatttaaaactgtgtttgcgaggcattagcggcgttcgcatcgcggatgcctcggtgttcccacgcattccggcaggcaataccaatgcgccaaccatcatggtggcggaacgcgcggtcgatatgatgctggcaagcctcgaggagcgaaataatgcataa

SEQ ID NO: 428259 - DNA, 657 bp, Serratia marcescens
atgcataaaaaactgacgctgacgtttgacaacggcccccatccggtgggcaccccgctggtgctgaaaacgctggcagaacgtcgaattctggctaacttcttccccatcggcgagaagatcgccgcagaaggcggcgaggcgctagtcgccgccgtcaaacaggccggacaccgcgtcggcattcataccctgactcactcgctgcctttggggttgggcgccccgggcttcgctcgctatgagattgtcgaaggacaagcccggctcggcgcctacggcgaatcgcccccgctgtttcgcccctatgccggcaaaggcattctcgggcctcacgtgctgaaccaagaagccatcgaggttctgcagcagcagggttttaccctggtactgtggaattcagtgccgcgcgactgggaactgccgacccacgcctgggtagcgcgtgcgctggaggacgtcgccagccaagcctggacggtgatggtgttgcacgacgcgcgtccggaggcgatggagcatctcggcgatttcctcgatcaactggtgctgagagacgtagagatcacccaacaattacccgactgggtgatgccgatccaggccggcgtagcgcgccattctttcagctcgctggtagcgccggcaaacgagtga

SEQ ID NO: 428260 - DNA, 1722 bp, Serratia marcescens
atgcaacccgataacgtgattggcgaatttcattatcaacaatacccggctcggttaccgccgcgggagggcgatcgcgagacgcatcgccatcaggtaacgattgtcggcggtgggccggtcggtctggccaccgcattggcgctggcgcggcaaggcgtcgcctcgctgatcctggaaaacgacactcaggtatgcatcggcagccgggcggcctgtatctcacggcgcagcctcgagatcctcgataaacttggcgtggccgacgcctttatcgacaaagggttagcctggacgcgcggccgcagcttttatcagggtgaacaggtgatgcagttcgacatgctgctggatgacaaccagcaatttccggcaatgatcaatttgcagcagtactacatcgagcagttcctgctagatgaagcgatgcgcaatgacgatttgatcgaaattcgctggggctcggaggtgcaacgcatcgtctcgtcacacgatggggtcagcgtgtcggtgcaggcggcgggcgttgattatcgactcgaaaccgaatggctgctcgcctgcgatggcggccgcagccgtatgcgggaacaactgggattgcatatgcaaggccgggcgcacaaaggccgtttcgccatcattgatatcgaactggaaagcgaaacgccggcagagcgccgggtctggttcgaaacgccgctccgccccggaccgatgtggatgcatcgccagcccgacaacatttggcgcatcgactacctgctggaggacaacgtcagcgacgaagaggggctgaaaccggaaaacgtgctgccggtcgtggaagactttctgaagatggtcggcgaaacgggaaaatggcgaccgatctggatcagcatgtacaacgccaaggcgctgtcgttggatgagtaccgccacggtcgggtgttattcgttggcgatgcggcacacgttgtgccgatcttcggcgtgcgcggtctcaacggcggcctggacgacgcctacaacctggggtggaagttggcctatgttctgcaagggcgtgcgccggaacatcttctggacagctactcccatgaacgccgcggcgcctggcgcgaaaatgccgatagcgcaagccgcagcgcggagttcatgtgcccctctacgcccggcggcgccacgctacgcaacgcagtgctgtcgctggcggcccgtcatccgcaattttcgtcgctgatcaatccgcgccagacccacagcatccgttatgcggactcatcgctaaataccccgacgaacggtgatttgcctgggccggcagtgggtgcggtgctgaccgagtatccgctgttacgggatgagcgccctcaggccttgactgggctactcgatgcgcgctgcttcaccctgctgcgcttcccggcgcaagaggaatatggtgaaacaacaccgccggcacaggcgttgcaggcgcgttatccactgcgcatcgtcaccgtcggtttgccggggcgtccacgtcacggcgatgccggtgacgtggaggatccacacgggcggctgcataccgcttacagcacggcgcaaggcgccctgtatttgattcggccggatggccacgtgtgttggcgttgggggcgagacgaaacggccatgacccaacagattgagcaggcattgctgcgcgcctgtggtaacccaagtggctacgaggagaataccgatgaacgctga

SEQ ID NO: 428261 - DNA, 225 bp, Serratia marcescens
atgaacgctgagctgaacgaccgtcaacgcgatgagatctatcgccatttcgaacagactgccggtcgtttcaccggtgaagcgctggcgctgtttctggcgcggctcaatctgttgctgttggagatgctcgcggatgaacatgcggctcgggctttgattaccgaggccgctcagtgttcccccgaaagcgatcagcctccgggggagaacgccgcgcgctga

SEQ ID NO: 428262 - DNA, 906 bp, Serratia marcescens
atggatatgatcagcgcattgcgcgtgtttaacgccgtcgtgagcggtggcagtttcaccaccgctgctgagatgctcgatctctcacgcccgcgggttagcaaacacatcgccgaactggaacagcatttcggcgtgcgcttgctgcagcgcacgacgcgctcgatgacgctgaccgaggcagggcgtgaatgctatgccttcagtcagcgcatcaccgccgaatgccaggcgctggaggagtatatgggtaatcaagggcaaccgggcggcacgttgcgtatcagcgcgccgcacccatactgccgcgccgagctggcgaccatcgtggcggcttatcaacgtcgctatccgcgtgtcgcggttgagttttgcctcagcgatcagttggtcaacctcattgagcagggcatcgacgtggcgatccgcgtggccaatttgtcagactccactctggtggcgcgccggttgtgcgacattccgcggattctctgcgcctcgcccgactatttggcgaaacatggcgcacccacctcaccgcaaacgttgcgcgaccacaactgcctgatgtattcattgttgccgcgtacggaacaatgggaatatctagatgcgcagggccgagcggtagaagtaccggtgttcggcacgctgcgcgccaacagcggcgatgcgctgctagccagcgcgcttgaaggccggggcattatccttgaaccggagttcgtggtcagggaagcgctggccgccggcgcgctggtcagggtgatggcagaatacgtctggaccagtcgttcactgtatgtgctgtatgttaaccggcgctacctgccggttaacatacgcagtttcgtggacttcctggcagaatattatcagcgcgcggcgttctcccccggaggctga

SEQ ID NO: 428263 - DNA, 1518 bp, Serratia marcescens
atgagtagccaaaacaaaactttcgcccaatggcggcaacaggccgccgggctgcaaattgaaggccgagcctatatcgccggtcagtatcaggattcagccgatggcatgaccttcgtcgatgccagcccaatcgacgggcgcccgctggccaacatcgccgattgtgatgaagccacggtcaatcacgcggtggcggctgcggaacaggctttccaagccggtgactgggcgcggcgcacgccagcgcaacgtaaagcaacactgctgcgactggccgatctggtagcccagcatcaggaagagttggcactcttggaaagcctggataccggtaaaaccatccacgaatcgctggatatggacatgcaggatgtgcagaccgccatccgttattacgccgaagcgatcgacaagatcgccggtgaaatcgccccgactggcgacgcgttccatggcatgatcacgctggcgccgctcggcgtggtggcggtgatgacgccctggaataacccgctgatgatcgcatgctggaagatagctccggcgctggcgatgggcaactcggtggtattcaaaccgtcggagaaagcgccgttgaccggtatccgcttcgccgagctgacccgtcaggccggtatccccgacggagtattcaacgtggtaaccggaggcgcgcaggtaggcaaaacgctggcgctgcacccccgggtgcgcgcaatggcgtttaccggctccacgcaagtcgccaaacagctgctgatttacgccgggcagtcaaacatgaaacgcaccttccttgaaggcggcggtaaaaatgcgcacatcatttttgccgacacgccggatctggcacgcgcggcgcgcttcgccgcgctggggttctgcgccaatcagggggcggtgtgcgcttccggcactcgactgctggtgcaatcttccatcaaagctcagttcctggccttgctgttggaagagttgaagaaatggcagccgggccatccgctggatccggccaccgcaatggggccgttgatcgatgttcaacatcaggccaacgtgttgcgctatatcgaatcggcacgcgctgaaggcgcaagcatcctcagcggcggccaggccgacaataccctgctgccgggagggtatgtactgccgcctacgctgatcgacaacgccacgccggagatgaccgcctcacaaaacgagatcttcggaccggtcgcctcgttgatgacttttgaagacgaggagcaagccattcaactggcgaatgacagcgaatacggcctgaccgtcggcttctggacgccagacatcgccaaggtgcaccgcgtcgcgcggcaactcgaggccggtaccgtgtgggtcaaccatttcctgacgcgcgacattctttcgccgttcggcggtttcaagcaatccggcatcggtcgcgatctgtcgctgcacgccttgccgcagtacggcgaaatgaaggccacatggattgcgctgcaagatatcgccgcccattga

SEQ ID NO: 428264 - DNA, 1626 bp, Serratia marcescens
atgaaacaagataaaatcaccgctaacgtcgggcgccgcaagttcattgccgccagcctggcgatgggggcagcggcggcgctgccgttttccggctatacgcgtaccaccactcgcgccaacgatcccaaatacgattttatcgtgatcggcgccggctccgccggctcggtcgtgactcgtcggctggtggacgccggcctgcgcgtgctgctgctcgaggcgggcccgcgcgacgatatgccggcgatccataatccgccggaagcgatggcgctgtggcactccgccgttgactggggtttttcaactcagccgcagaccttcgcaggtaaacaggatatctattggccacgcggaaaaacgctgggcggatccagcgccatcaacggcatgatgtacgtgcgcggcctgccagaggattatgacaattgggccgcgctgggcgccgccggttgggcctggcgggatgtactgccttatttccgcaaagcggaaaattgcaatatcgccggcctttccgcacagcacgccaccggtggcctactgcaggtttctcgtccggcgatgaccccgctggcccatgcttttgtcgaagcgggtcaacaggcaggcttgcgctgggtaggggattataacgacggcaacgatcccagcggcgtcagcttcccgcaatacaccatgacgccggacggcaaacgggccagcgcctgggtatgctattgcgatgccattagccaggcaccgaacctgtcggtcatgacggaagcccgggtactgaaattgttgaaccagggcgatcgcattaccggggtgcacttcctgcatcgcggtatcgattatcgcatcgaagccaaacatgaagtgctgctgtgcgccgggtcgctcatgagcccttccattctgctgcactccggcatcggcccggcggaacagttggaaaaactgggcatgactgcgttggtcaacctgcccggcgttggcgaaaaccttcacgaccacctggtctgcccgatggtttggtcttctccgcagccggtcgcggtcggcttggcctccggtatcgaagcgcagatcttccataaatcggcaccgcagttaagcgggccggatacccagtcgctgttgttcaccatgccgttcctgcccggcgtcaaccaggggtataccgttacgccgggtttggtgcggccgaaaagccgcgggcgtctgtggcttggttcgaacgatcccctccaacctccgttgatggatccgcaggtgtatgccgagaacgaggatttggagatcatgaccgacaaagcgctgttgatgcgcgacgtgatgcaccagagcgccatggcgccgtggcgcggtcgagagcaaggcatggatggcgtgaacagccgcgcgcaaatgcgcgactatattcgccgcactaccggctcctatcaccatcaggtaggcactgcacgcatgggtgtcgatgacatggcggtggtcgatccgcagctgcaggtgcgcggcttatcggggctgcgagtgatcgacgcctcggtgatgccggtcattcccagcggcaacaccaatgcgcccagcatcatgatcggtgaaaaagccgccgatatgatcctctccagccgttaa

SEQ ID NO: 428265 - DNA, 381 bp, Serratia marcescens
atgattaacaaatctagtctggttgatggtatcctttttcgagatgagaatggctcgaatgaaactgtagttttcaatttttatacttgggtggaaatgcttaaagcggtcattgttaaatatgcgcaaaagtctgaaagtgacgcggagttattggttttatcatcgagcttagtgtgcaagcctatcaacagttatacggctgtctgtctcaggagccatgaaattgaatatcattgggcaatgctgatagcttatggtgaacagtattggctgaaaggcgtagaatccaaacagccttatggctactttgactgggatgtgcaacataggaaagaacataacttagcagaggaaagctttgtttttagcaattcatga

SEQ ID NO: 428266 - DNA, 366 bp, Serratia marcescens
atgagtcaggcaaataatgcggcggtcgagaccttgctggcagacatcggcagcacgcacggcgagctgctggagatcgtacaacaggtgcgccgggtcgccacggcgagcggcagtggcgtcaccgaatcggtcaaatacggcggcatcatgttctcgcatactcaatttttctgcggcgttttcgcctaccgcagtcacgtcacggtggaattcggccaagggcaccgactggaagatcgctatcagcaacttgaaggcaacggccaatatcggcggcacatcaagctccacacgcccgccgaagtgaaaagcaagcacctggcggactacattaaacaggcctacgcgctggcgacagactga

SEQ ID NO: 428267 - DNA, 774 bp, Serratia marcescens
atgaaaaaacttattctcattatcacgatggtagtgtctacgctcatcatgcaggggtgcgaaaaaggtatggatttacaaccgcaggattattttgacggtcagcaattggacattgccaaagccatttatgatggtgataggccgcagttggataaacagttatcatcagtaaacaaagagatcttaaatcgtccagctaaggaagaaatgaccttattgttctgggcaataaacaatgccatctatgataaaaccacacctgaaaggctgaaaattatcactgatttggtaaaagccggcgcagatcctttacagcctcaacccaacacgccaggtagcccagctgaatttgttatgaaagcggataaaggtatctggatacaggctatgttagagggcggactttctccaaatgctagggataaggttcataatcaacccattatatttaatagcatctttgcaaaaaacacagaaacattagaggtcatgttggattatggtgcggatataaatataagaaattcactgggtgatacgctgctcatcgatgctttagactatcactcctatgaccacgtcattcttcttttagaaaaaggtgccgatagcgatataagaggcaactcgggttggacgatgggcaatcagctgcaacggctgattaataggagtcaggacggcagtgaggcgaaagagtctcttgagcgcatcagagacgagctaattaagcgtggcgggaaatggccgcctgctcctgtcagtcaataa

SEQ ID NO: 428268 - DNA, 1482 bp, Serratia marcescens
atgaagctgctctctctcttttctgaacacacggcgccggaaagtttctcccggatactcaccccgacacaagcgtgccatgagctggaacggcattatctgttcggcggcgcagccggcatatcgataagcagccggtattccataacccgtaatactcaatccggtattggcgtcaccggttatcgtgaggacgcggctgtgaagcgcagcgtattcgatgatctcaatcggggcggcttgctggcgattgatgagggaatgggcgcgtggacgccgaccaaatacgcgttttacgtcgacgcggaaggccgattacagcgctatcccggcagctctcttcctgccttttatcctacagggcgcgtgatcgcccgctatgaagaaatggtcagccgctatggccagcgggcaaaaccgacggtgctgccggcgaggcagaatacgacccggaatccccctctgcagcaagctatcgctaccgcagtggcaaccgttgccgccacggtacaggccatccgtccgatgaccaaggcagaacgctggcaagaacgccagtacctgatagggcgaggcaaccgcagcatttacccggatgcgcgcatggcggcacagcgattggcggagaacaacgtcgcggtcgaaaaggcgaagttggctgagaatgtttacaagaccactaacccgctcaaggacacgatagacatccctgagggctggaaggacatcagtaacaatgatggggcgctgggccggcttggtttgagcagtaacatgctttatgacaaaccaatgaatcctgactttttagcccgagtttatcagccagacgaaagtgtctttggcaaggcgatgaacccgacggtggtattccgcggatcgcgggcaccagaattcccggagggaataagccgcgcaacccaaaaagccttaataaggggtgacttatcaggcattaaaaatctcagtgactggaaaaacaacggtgctcagggaatagggcttaattctgaatactacaaaaaagcggttggtattggcgataaaatttcaaaggtatccaatatcgacgttgcaggtcactcattaggcggtggcatggcgtctgctgcctccatggccagcggcaagccagcttggacgtttaatgccgctggattgcatgcgggaaccgtagaaaaatacggcggctctataataggcagtgtcgataatattcaggcgtatcgcgtgaaaggggagctgttgaccaagctgcaggaggttgatttgtgggaggatgccaaagacctcaaattttatccgccggcggtgatggcgaaagaacggttgtccatgttggcgcctgacgccgtgggagtaaaacacacgctttccggtggaacaggctcactgctggataagcacggtatagaccaggcgatacaatgcattgaaaatgaaaaagacgatgacattgccacaatcaagggaagaatatga

SEQ ID NO: 428269 - DNA, 231 bp, Serratia marcescens
atgtcatttttaagtttaattaatatatttggcgaattggtttcaaatattgtacggctcgctgcgtcaaatctcgccgtgaattttatcggtgttattcaacccaactatgaatcattcgtcgtcaccgctcaaaatgtcaccaaaacttcccgcgatctcttaaccccgttgtggcataatgcgcgccaaatcacattccctatgtataaagagcgagcgctgtgttaa

SEQ ID NO: 428270 - DNA, 324 bp, Serratia marcescens
atgttggaaaccacgactcgcgaacccaccacggtgggagaagtgctgcaggaagaatatttaacgccgctaggcatcggccaggaggaactggcaaaggtcttgggcgtcacccgcgccaccgtcaatcgcctgtgcaacgggcatcgacgcatgagcgttgccgaggccaatctgtttgccgatctgttcgaaacgaccgctgacttttggctaaacctgcaggcggcacacgatcgctgggaagccagacagtccgatgcgcagcgtgtgcggctgcggccaatcaaagaaatactggggcgcaatatcactcatgcatga

SEQ ID NO: 428271 - DNA, 291 bp, Serratia marcescens
atgattaaatctttccgcgatcgctacctggagcagttctatctgggaggcagacgcagccgtctgatccccggtgcgctcgagcggcagttggccagaaaactcgatatgttggccgccgcgcagcaagagcgtgatttgcatcaccccacgggtaactattacaaacggctatccgggccatttcagggatggtcaagcctgcgcgtcaatatgcactggcggctgatgttccagtggcggcatgatgccgctgaaaaaatttacctcgatcctcaccaagatacctga

SEQ ID NO: 428272 - DNA, 1296 bp, Serratia marcescens
atgaatcagcgtttggatatcatcggtattggtcttggcccgtcgaatcttagcctggcggccttagggagtgaaatagagggatttacggggcaattcctggaacgcaaaccccatttctcctggcacccagggatgatcctggcggattgcagcatgcagaccaactttttaaaagacctggtgagcgcggttgccccaaccaaccggtacagctttctcaactatctggtaaaaaacaggaagttctaccgtttcctgaccacggaacagcgcaccgcatcgcgtgaagagttcgccgattacctctcctgggccgccggcggcatgcgctcattagcatttaatcaagacgttcaacgggtcgagtttgacgatcggcagcgtcagttcgtggtgaccacctcgaataaggtcttccacgccaggcacgtcagcattgggattggcaagaaaataaagttgcctgattgcgtgacggcgcaaagcgatcgctgtttccatgccagcgaaatgatgctgcgtaatcccgatctgacaggcaaacgcgtggcgatcgtcggcggcggccagagcggcgccgacctgttcctgaatatttttaaaggagaatgggggcaaccggaacagctcgactggatatcgcgccgcaacaattacaacgcgctcgatgaagcggcctttgccaacgaatatttcacgcccgattacgtcgagagcttttactcactggatagcgcggccaagcggcatatgctggccgaacagaagatgacctcagacggcatcaccagtgagtcgctgctggcgatttatcgcgccatgtaccaccgcttcgacgtcctgcgcgagaaattatgggtgcgcctgctgcccagccgttcgctgacggccgtgaaacacacgctggataacgcctaccaactcgaaacgcgccatcatctcgatcacggcgaagaagccttcaagacggacgtggtgatctttgccaccggttaccaatcggcaacgccagagttccttgagcctttggcccaccgtttgctgaccactgcggatggcgaataccgcatcgcccccgactttacctttgagtgggaaggccctgcggagaactgcttattcgccatgaacgccagtatgcataatcacggcattgccgatccgcagttgagcctgatggcgtggcgatcggcccgtattcttaatcgcgctttagaacaacagccgtttgatctgagtacaacgccgagtgcaattcaatggcgaagtgaaggtgtctctcccacgttttaa

SEQ ID NO: 428273 - DNA, 759 bp, Serratia marcescens
atgaggttcttaatcaataaccgaattatcttcgatgaggataactcgacgctggcgttggcggaggagaacctcgaaccggtgacgctcaccacgatagccaatcgtctgctcgcgctgttggtaaaaaataacggcatcttgattagccgggactttattttttccaccgtctgggacgatcatggcaaaacggcctcgaacagtaacctgaacaactatatcgccagcctgcgtcgtacatttgccggcttgggtgagagcgaaattctggttaccgtgccgaggcagggatttatgtttaccgccgccagcattcattccgtggcggacaatatgacgcaggacgaaagcgttcctgccgcgcctttacccgtccggcgccgttgcgatgccattttacctaaggtaacgctgctgtttatcgggattgcgttggtattggcgggcgtttacttttttaccgaacgttacgacaccgcttatcagacccagatcgccagctacaaatcttgccgcgtggagacgctgaacgccagcgagcggatcgacgagcggtatattgccgacgccctggaaaggctcaaaagccgtggttttgattgtgatgtaccggcaacggtttattactctcgattgacataccattatacgaactacaaaaagctgattgatttcatctcgtattgcccgaaacaccgcgttaagaatatggatgcgcactgtgaagatgagtttgaggtgatcaatgaaggttag

SEQ ID NO: 428274 - DNA, 777 bp, Serratia marcescens
atgattttcattataaatggaagggttaagttcaatgaatacgaaggaaccctggagagcgtcaatgccccgcaaaatatgcagccgctagcggccgcggcttgccgtttgctttctattttcgtcaggaacaatgaaatgttgattaagcgtcaacaattacttgaagaggtctgggaagaacgaggactaaaaggaacaaacagcaacttgaataactatatctcactattgcgtcgccatctggcgcaacttggcgagacggagttgataatcacttacccccggcaaggctttaagttcgttgcaaaaaaaattagccgacacgccactgccgaaccggaaaaagaacaaaacataatggaggaaaccgttgttcccacgcaaccgccggggcaagccgcccccagagggcgtggtagcggaaaattattatcggcctggcggcagtttcagagttggaataaatgggttaatctcatcctattcatcagcatcgctgcattgatcatggccagccatcagtactccgtgcgtaacaacctattcagcggcactcagttcgcgggttgccaaatatacaacatggggtgggattacccagagaaggaaacggtaaccgacatggtaaaggcctatgtcaattgccagaaaaagactaaagtttattactataacaaaatcacgcaggataacaggcagtttgaagagaaaatgctcgtatcctgccgagaaaatgcaggccgccaaccttgcgaagtggtttatattccataa

SEQ ID NO: 428275 - DNA, 546 bp, Serratia marcescens
atgaaactgaataaaatcatgctggctgccgttatggcgtttggtgtttcttctctggctcatgctgctaatcagggcagtggcactgtgaccttcagcggttccattatcgatgcgccatgctccatcgcacctgagtctctggatcagaccgttgagctgggcgccatctccaacgtggcgctgaaaaacggtagcaaggcatcgaccccgcgcgattttcatattcagctggaaggctgcgatctgaaaacggaagcgccagggaaaaataacaccgttacgctgacgttcaacggtaccgcttcggaaaccgacaaaaaactgctggctattaccggtgaggcgaaaggcgcgggtattgctattaccgatgctaacaagaacctgatcgaactgggcaaagcttccaatgcgattgaactgcaaaatggccgtaacaaactgagctttgctgcttatctgcagggcagctcggcttctgattcggtcatcgttcctggggaattccaagccgtagccgatttcactctggcatatcagtaa

SEQ ID NO: 428276 - DNA, 543 bp, Serratia marcescens
atgaaacttggtttaacaggtgtgaaaagagttctcctgtttttgggagtgctaagcgttgagggaacagctatatcctcccctctttttcaggggcggataaacatgcagggcgccattaatgatgctgcttgcgccattgctacagagagccgtgaacaagtttttgatctggatgttacgtcattttcggatatttatccgggcggccaaggaaaagaaacccccttcagtatccatctggtgaattgtatttcagcgctggggagtaactcaatatctgaatggagacagtttcagataacttttgacggcaatgttgacgggcagatgtttggcgtgggggggaaggcgtcgggtgtggcactggctatcagcgatgtggatggcaatatcgtcaggccgggaatacctctgccgctaagtaataattcatttaaaaatggtcgattggattatgtcatgaagttaatgactaacaggcagccatttagatcgggtgagtattttacttcggtgagattcaaaatggattattactga

SEQ ID NO: 428277 - DNA, 2541 bp, Serratia marcescens
atgatgtttttgtctgcaggaaagccgtttcgtttacccattctgagcgtctggatagcgctggcattgggcagcctggtgaccaatgctggagccgtggaggaaatccaattcaataccgacgtattggatataaacgatcgcaaaaacatcgatctgagccagtttacgcgcggcggttacattatgccggggacttacggcatgacggtgcatgtgaataaaagcgatcttcctgagcaacaggtgcctttttatgtccctgaggacgatcccaacggtagccgcgcctgtgtaaaccgggcgctggtggcacagttggggctgaaagaggcgatgcagaaggaactgacctggtggcaccagggagagtgtctgaatgaaaccagcctaaagggcatggaggtgcgaggcgatctggcgtcgtcgtcgctgtatctcagcatcccacaggcttatctggactatatctcggaggattgggagccgccatctcgctgggacgaaggcataccgggagtgctgctcgattacaaccttaatgcgcaggcgcaacgtcagttaaagggcggtacgcggtcatacaatgccagcggcaacggcacggcgggcgccaacatgggggcctggcggctacgggccgactggcaagcgagcatcagccatcaaagcggggccgggcagggcgcggaaaaacggttggaatggagccgttactacgcttatcgggctttgtcagcgctgcgttcgaaattgactgccggtgaagattatctcgattccgggctgttcgacagtttccgcttcggcggcgtgagcctgcgttccgacgacagtatgttgccgcccaacctgcgcggctatgcgccggaggtggtgggcgtggcgaaaagcaacgccaaggtaatcatcagtcagcaaggacgggtactgtacgaaaccacggtcgcggcggggccgttccgcattcaggatattgatgatgcggtgtctggtgaattgaatgtgcgggtggaagaacaggatggcagcgtacaagagttcacgatgaacaccgccagcatcccgtatctgactcgtcccgggtcagtgcgctataagctggctttgggcaaaccctccgatatgaatcaccgttatcgagggccgctgttcggcaccggcgagttttcctggggggtgagcaacggttggtcgctgtacggcggtgcactgctgggcggggattacaatgctgcggcgctgggcatcggccgcgatctgatgctattgggcgcgatgtcattcgatatcacccagtcgcgcgccagattgccctacgaccgcgagacgctgagcggcggatcataccggctcagttactcgaagagtttcgacgagctggacagccaggtcactttcgccggctaccgtttctcggagcagagctttatgagcatgagtgagtttctggacgctcgtcagttcgggcgacggttcggcaacagcaaggagatgtacaccatcagctatagccagcaactgcgcgagctggggctgagcgcgtacttaaactataaccaccagacctattgggatcggccggctaacgatcgttacaacctgacgatgtcgcgttatttcgatattggccggttcagaagcctgagtctgtcgctaacggcttaccgcaaccgctacaacgagcgtaacgacgacggcgcctatttgtcgctgtcggtgccgtggggcaatggcgccagcgtcagctataacgccacgcttaaccgcagcgacaacacccatcgggtgagctattacgatcgcctcgacgagcgcagcaactaccagctcagcgccggcggctcgcgcagcggcgcgaatttgagcggctattacacccgcgatagcgatatggcgcgcgttagtgccaacgccagctatcagcaggacaggtacagcgcgatcggcctgtcggcacaggggggcatgacgctgaccgccgaaggcggtgcgttgcaccgcagcaacataccgggcagcacccggctgctgctggataccgaaggcgtgagcggggtgccggtgcgcggctatggcagcgccgcggcgaccaatcgctggggcaaggcggtggtgacggacgtcaacagttactaccgcaacaaggccagcatcgatctcgacaagctgggggataacgccgaggccaccaaatcggtggtgcaggcgacgctgactgaaggggctatcggctaccgcaagtttgcggtgatcgccggggagaaggcgatggcggtgatccggctggcggacggcagcgagccgccgttcggcgccacggtgctgaacgcgcgcaagcaggagaccggcatcgtcaacgacggcggcagcgtttacctgagcggcatcaacgccggcgagcgcatgacggtgcgctggggcggggcggggcagtgcgaggtgcagatgccgacgccgctgccggcggagatgttgaccaccaatttactgctgccgtgtcgggcgctgagcgcgggcgacggcggcaacgaacactga

SEQ ID NO: 428278 - DNA, 756 bp, Serratia marcescens
atgatgagcaaacgtcacgttatcggcctgctggctaccacttcgctgctggcgggggctttgacccctgcggcgaatgccgccatcgcgctggatcgcacccgggtggtgtttgatggcagcgtgcagtcggtgagcctgagcgtcagcaaccagaacaagcagctgccgtacctggcgcagggctggctggaagacgagcagggcaacaagatccagagcccactgacggtgctgccgccggtgcagcgcatcgagccgggcaagccgagccaggtgaagatccaggcgttgccggcggcgaagatgctgccgcaggacagggagacgctgtactacttcaacctgcgcgagatcccgccgaagagcaacaagccgaactcgctgcagattgcgctgcagacgcgcatcaagctgttctaccgcccggcggcgatcgcgccggaacgcaatgccgcgccgtggcaggagcagctgacgctgaccaaacagggcgacaagtacatcgtcaataacccgacgccgtattacgtcactatcgtcgatgcggccaggggcaaaggtgtggccagcccacataattttgaaccgtttatggtgccgccgaaggggcagataccgttgacggtgagcgcctccagcgtaggcggtagcccggtgctgacctacatcaacgactacggcggccgtccgcaattggcgtttaactgtcgcggcgggacttgttcggtggcgccggagaaaaaatcgtcttaa

SEQ ID NO: 428279 - DNA, 534 bp, Serratia marcescens
atgaaaagcctgttattgcgcctgacgctcgccctgagcgcgagcatgagttcgtattgttcagtagctacgacggacaacatgttattgcacggagcgttggttacggagccatgtacgttgcgaatgggcgatgaagatattcaattggagctggatccggttattgacaaatacctctacatgcacagtcgcacgccggcaaagccgtttagcctgaccttacaggattgcgacgtcagcgtgggaaaaacggtaaagctcacgtttagcggtactgaaagcgccgccttgcccggcctgctggctttggatggcggcagccaggccagcggcatcgccttagggatagcgacggcggaggggaaacccgtcgtattgaacaagccaggccaaggctatgcgctggttaacggcaccaacagtttgcaactgcaggtttacatccaggcggagggggaggcgatagcgcaaaagaaaatcagtcttggcgcattctcagccgtcaccactttcggtctggaatatgagtga

SEQ ID NO: 428280 - DNA, 663 bp, Serratia marcescens
atgacaagggaaaaagcgagagtgcatcgctcatattcatatgttgcttacgaactctgctattacgccgtattgggcgggctggcgctgatggtgccactcattattatgacaacgctgtggctcatgcctgcagcgcaagcggcaaacgagctcgatacctacggcgccgacggcgtgctgcatgtgagaggggctttgacggaaagcgcctgtcggctggagatggacagtgccaggcaagacatacgtttgggcgatatcggcaccgcgcagttgcggcgggcgggggatcgtggtgaaccggtggcattttccttgaggttacgcgattgcctacgcagcgtaggcgccggaactagagatgaacgcaccggatctttgagctgggcgccttatcaaccggcggtcactatcggtttcagtgctcctgcggatgcggataatccgcagttggtcaaattggtgggcgtttcaggcatcgggctgcgggtaacggatgccgcggggcgtgatgcccgattgggtgaacgcggcgccccgctattgcttgagcaggggaacaatgtacttacgtataaggtggcgccggaacgaaccccggcgccattaatggccggtgcttatgccgcaacgatagatttcaggctgaattatgactga

SEQ ID NO: 428281 - DNA, 504 bp, Serratia marcescens
atggcaagtgtgagaggaaaactccgggtggcggcatggctgtttttggcattgtcggttatacccgccggcgcctcttgggcggataccgccatctctttcagcggcaccgtgactgcgccgatgccttgctcaattaacggtaaacgggcaatagtcactcattttggcaacgatctagtcactactcgtatcgatggcagtaattacctgaaatcgttggattatacgctggagtgtcatagtaacagcccgaatgcgcttcgcatgcagctgcagggcgatgtctctgatttcaaccagcatgcgttgcgaacgaccacgatgcctgacttggctgtcgagctacgcgtcaacggcaaacctgtggcacctaatagctggtttaagtttatttatcccgagacgccgttgctgcaggctgtgccggttaaacgtcacgatgcgaagctgtccggcggctcgttttacgctacggcgaccatgctggtggattatcagtag

SEQ ID NO: 428282 - DNA, 513 bp, Serratia marcescens
atgtgtccgtattggaaagcgataagagcgaaacgcctgagcgcgttggctctcttggcattgatgcaaaccggcgcggctcaggctgcagccaccgcggatatggtcttttacggcacgctgaatgccccaccgccttgcaccatcaacaatgggcaaaccgttgaagttgattttggcgatcgggtaggggtgagtaaggtggatggtaagaattacctgcaattgatcaactaccgcattacctgtgagcagggcggtggcgggatggcgttgggattgacgcttttcgggccagtcagcggctttgatacggcggctctgcaaaccaacattccggatttggcgctccgtatattgcagaatggtcaaccgcttgaattaaataagcgcatcgatattgcaattgacagcccgcccatgttgcaggcggtgccggttaaaagagcaggggcagaattgccatcgggcgaattcagcgttacagcgacgttgttggctgattatttttag

SEQ ID NO: 428283 - DNA, 984 bp, Serratia marcescens
atgtgtaaaacttattccccttatgtattattgagtgcgctgctctttttattggtaagtgaggcgcaagccttcacctgtaaaaccagtgatggtggggttatttcttatgggggatctactacgcctgttccggtaagagttagtattggcccaaacctggttgatgggaaaaacgagttatccaacctcagtcaaatttcctgcagaaatgatagctatgataatagtttgctggatgtcctgagacttaaatcaatggttgttgtaaagcctgagttatccttttttactattggcgtacagttaaaagataggttttatgagatagcagcaggaaatagtcttaatatagatcaagtggtgcttgctttatggggaacgagcatactgtatcatgatctacctattaatttatatctgaaggtaaagagagagccgtcgtgggacatcgttataaaaaaaggagatgtattagcgcgattccatatggagcaaagaaataataaaccaggttgccctcagtgcggcccttatatatgggagtttgtagccgataatgacgcttacttcgcgacaaccagttgcaccatcaatggcggcaggcagatgagtgtcgatttcgggccgattacccaggacaactttaccactactgtaaacagcgcggtgattaagcagagtcagcatatcgattatcattgcgagggctctaatgccagtcaggatatcgcggttcgtttagtcggtaacgctagcggattcagttctgaggtgattaaaacctcgaatgaaaatattggcattgccatggtgtacaaaggaaaggttgttaaacctaatgaaatgtttaattctaaaattgttaacggcatcggcagtgatacgttgagctttgtgccaattaaaaagaacattccttttaatgagataaaaacgggagcattttctggctctgcaacgttagtattcagcgtgccttga

SEQ ID NO: 428284 - DNA, 969 bp, Serratia marcescens
atgcgaaaaaattacgctccttgcgtattcttgagcgcgtttttgtttttattggtgagcgaggcgcaagccttcacctgtaaaacagctgatggcggaattattcctccgggtggatccaatacacctgttcaagtgagagtccatatagggcctgaatttgtttccgggaaaaacctgatatccaacgtcagccaggttacctgcaagaatgatgtttcttcctggacagattaccttacgcttgcttcagttattgtcaatctgtccgatctttatctttttaatgttggcgtgaccattaatggtgttgattatgacataccggaaaacgaccctttcattaaaaaaagattgctttctgttacaggtctgcaaacagtgtcggttcccatgcagatgtatattagagtaaggaagcaaccctctcgggatatttcaattagaaagggaaccccattggctatatttgctatggtacaagaaaatgataggcaaggatgccctagttgtggtccttatatctgggagttgattgccgataacgacgcttatttcgcgacaaccaactgcaccatcaatggcggcaggcagatgaatgtcgatttcgggccaattagtcaggacaactttaccactactgtagacagcgcgttgattaagcaggagcagaatctcgattattattgtgagggttctaatgccagtcaggatatcgcggttcgtttagtcggcaacgctagcggattcagttccgaggcgattaaaacctcgaatgaaaatattggcattgccatggtgtacaaaggaaaggttgttaaacctaatgaaatgtttaattctaaaattgttaacggtatcggcagtgatacgttgagctttgtgccaattaagaagaacattccttttaatgagataaaaacgggagcattttccggttctgcaacgttagtgttcagcgtgccttga

SEQ ID NO: 428285 - DNA, 543 bp, Serratia marcescens
atgagcccaataaaagttcttattgatgatgagaacggctattttgccgttggcctgcggctaattattgaggaatatgcgcaggagtacgcgaaacgcgtgcgctttctaacctcagatgatgaagaacatcccgatatcgtttttgtctcatcggcgctgcgtatccagtattggcgggtattatggcgttatggcgccgcgtcgcatattgtggcgatcaaggaacgaaagtccggcatccatgaagaccgatcgcttgtgctgttgcgcacatggggaagagaggcgctcagcgcgttgctgacgaatctttttgctaattgtcatggggtgatacgtccattggtgtcccatccgtttacgtatcgcgaatgtcaggtgatcagccaccttcgaagagggatggatcaatcgcagacggccagggagatcggtgtcagtgtaaaaacggtacatagccataaacggtcggtgatgaaaaaactgatgctgaatcgccaccgagaatttatgtattggttaatatcgcaagatgactaa

SEQ ID NO: 428286 - DNA, 528 bp, Serratia marcescens
atgccgctacatggagagtttatcgttaataatgctcagttctcccctttactcatatacggtgttggcacttttctggcttactcgggcaatggaatatatcgtaaccaagccggttgcgtggctgttcctgacaatggcccaatccctcagggccgttatcacatcgtcaacaggctaacgggcggctggaaaggaatgttgagaaccgatcttcgtgatttctattcgtggccgacatcgacaccggttatcaaatatgagtggtttgacctctatcgtgaagatgggaaaatcgacgactatacatggatcaatggggtaaagcggggaaatttccgtttgcatccatcaggccctttaggtatttctttgggctgtattacattgcagcatcggactgactttttagctattcgtcaggcattagtctctacccggccagtcaggttagttaacggcctgatgtcttatggaacgattgaggtcattcttaatggaaagcagacgtgtcccaatagggattaa

SEQ ID NO: 428287 - DNA, 1380 bp, Serratia marcescens
atgtttatccaggaaacgcttaagtttgtggtggatatattaaaggtgccttcggtgctggtcgggcttattgcgctgatcggtttgctggcgcaaaagaaatcgttttccgacgtggtgaaaggcacggtaaaaaccattctcggctttatcgttttaggcggcggcgccacggtattggtcgggtcgctcaatccgctgggcggcatgttcgaacatgcgttcaatattcagggcatcattccgaataacgaagcgatcgtctccatcgcgctggagaaatacggtgcctccaccgcgctgatcatggcgttcggcatggtggcgaatatcgtagtagcgcgcttcacccggctgaaatacatcttcctgaccggccaccacaccttctacatggcctgcatgatcggcatcatcctgacggtggcgggcttcgagggcgtgcagctggtgtttaccggcgcgctgaccctggggctggtgatggcgttcttcccggcgatcgcccagcgctatatgcgccgcatcaccggcaacgacgatattgccttcggccacttcggcaccctgggctacgtgctgtccggctggatcggctcgaaggtgggtaaaaactcgcgctcgaccgaagagatgaacctgccgaaaaacctcagcttcctgcgcgacagctccatttcgatctcgatgaccatgatcgtcatctacctgatcctggcgatctgcgccgggcgggcctatgtggaaagcgatctcagcggcggccagaactacctggtgtattcgatcattcaggccatcaccttcgccgccggggtgttcatcatcctgcagggcgtgcgcctgattctggcggaaatcgtgccggcgttcaccggcttctcggaaaagctggtgcctaacgcgcggccggcgctggattgcccggtggtctatccctatgcccccaacgcggtgctgatcggcttcttgttcagcttccttggcggattggccgggctgttcctgctggggcagctgaagatggtgctgatcctgcccggcgtggtgccgcacttcttcaccggcgctaccgccggggtgttcggcaacgccaccggcgggcggcgcggcgcgatgctgggcgccttcgccaacgggctgctgatcaccttcctgccggtattactgctgccggtgctgggggcgttgggctttgccaacaccaccttctccgacgccgacttcggcgcgatcggcatcctgctgggcaatatggcgcgctttatgtcgaaagagatgatcatgctggcgatcgtcgccgtgttcgcgctgctggtggcgcataacttcctgggaaaacgcaaaggcgcgccggccgctgaccgcgtcgagaaataa

SEQ ID NO: 428288 - DNA, 306 bp, Serratia marcescens
atgagaaaattatcagaaatatcagcgttgctgaaagaaaaacgcattgagttgggctggagccaaaaagactttttaatgaagattggcatgacccaacagcaatatcagcgtattgaaacgggtagcgatatgcgggtaagcacgctgctacggatattggcggcgatggatttggaatatgtcatcgtgccgaaaaagtctgcccgtgatgtggagtgtttgctgcaacaggaagtgagtcgcgcgccggaagccggtaagccgcataatttcgaaaaaaaactgaaagatctcgaggactag

SEQ ID NO: 428289 - DNA, 1266 bp, Serratia marcescens
atgaaagggccgcgacaggttgaatcggtgcaggcattagccttgatattgcatggcgtgcgtgttggcgtgctggcgcattacagcggcggcagaaacatcctgacctttgatccgcactacctcgctttgccggagcatgctcgtcccttgtttacgctaaggcagcgggcgcacccggggtatcttgagcaagttttacagtcatcgcagcgcttgccgcccgtcttatccaatttgttacccgaaggcgcactgcgcggttgggtggcccagtcgttgaaagcccatgtgaacgaggagtttcccttaattgcctgggccgggggaaacctgccgggagcgcttgaagcccggccgctggccgccagtgacatacccgcctgggcgttaacgtcgcgcggcgagctggaagcggtgcaaattaatgttggcgtggaggcgcaaaagttttctttggcaggggtacaaatgaagttttcctctgtgcgcaaagagggccgtttcaacatttcttctcaggtcggcgccgatagctggatcattaaaacgccttcaacggtccatcgtcatctccctgaaaatgaatatacggcaatgcgcttggcgcaagccatcggcgtggatattcctgatattgagttggttgagctgacacgacttgagcacttgcctgatattcgcttggcggatgaaccttatgcttatgccatccgtcgttttgaccgcagcgaaaacgggcgagtacatgcagaagattttgctcagatattcgagatttacgcgcacgataaataccgcggtaaaaattacgatcagatagcggcttatctctatgagtatggcagtgaacctttagcggatgcgcagcaaatggcacgccgtctgttggcgaatattttgctcgccaatggcgatgctcacgtaaagaattggtccatgatctatccaaaccagaccgatgttcggctttctcccgcttatgacatcgtcactacgttggcctatattcctggtgaatctgaggccgcgctcaatatggcgaaggaaaaacgctgggataggatctcaatgcaaaccttcgaacgctgggctgagcgggtcgatattccctggcctgcgattcgtgtgcaccttgtggatgccatcgacaaggcgcgaaatttgtggccggaattattggaaagcctgccgatggcggacgatcacaaatcgatattgcgtcggcattgggccgctttgtcccccgatttccgcctgcgttag

SEQ ID NO: 428290 - DNA, 864 bp, Serratia marcescens
atgatcaagaggctggtgcttttagcatgtttttttcccggtttcagcacggcgtcgcctcctgctgatgttgggcggctgcggtatgatgaacgcaggctgccattagtcgatgtgcagatcgataaccggttacacacgctcatgctggataccggcagcgcagaagggatacacctttatcaacacgatctggagcgtctggtcgcgcaaccgagcctgaaggtggtgcggctggcacctcggcagctcagagatctctctggcggtgaaaatcaggtgtctgcctggcggattagtcggctgtttattggcaatatcccttttaacgacgtcgaagcggtgagttttaagccctggggactcagcctgggaaacgaggtgccggtaagtgaagtgatggggctcgggttgttccgcgatcgaaaagtgctgatggacttcgaaaacgatcgtttgcaaatgttggctcatctgccttcagacattgcaaaatgggcttcttatccgttcgaacagaccgatgaggggctgagcgtgacggccttcgttggcaataaaccgttgcgcctgattgttgataccggcgccagccattctcttttgtttgccgctggcttgccggctggcctcttgttttccggctgtcgttccattgagcctgaggccacgaacctggattgccgagtgaccagattcaccttgaccgatcgccggggccggcatcacaacgatttggctatcgttaccgaaggcccaacgtctgaggtgctgggctttgatggtctgttggggatgggctttatgcggggtcatcgtgtgattgttgatatgcctgaacgcatgctctacatcagtcgttaa

SEQ ID NO: 428291 - DNA, 987 bp, Serratia marcescens
atggttagcctcggtgcctactctgccctgtcacttgctgatgccaggcaaattcgtgccgaaaagctcgcgatactggcgagaggcattgacccacaggctaaagaggcggaagaaacagaacaaaagcaggtagcccaagaaagcattttcctgaatgtggcaaagcaatggttcgtgttgaaacaggccagtgttagcgctaagcatgcggaagacatctggcgttctcttgaaaaagacatactgccatctatagagaatgttcctgttcaggacatcaaagcgcgtttgctgatccaggtgctgaaacctatcaaggcccgtggtgcattagagaccgttcgccgattagtacaacgcatcaacgaaatcatgatttacgccgtcaacactggcttgatttatacaaatccagcttctggtatcggtaacgcattcgaatggcctaagaagcagcatatgccgaccatacggcccgaagaactacctaaactgatacgtacaatctcgatgagcaatctatcgatacctacccgctgcttgcttgagtggcagttgttgatgctgatacgccctactgaagcctccgcaaccgcatgggccgagatcgatatagaaaaccgtgaatggcgtattccggcggaacgaatgaagtctaagcgtgagcatatcgttccgctgtcagaccaattactagaaatactcaaaatcatgcaccctatcagcggtagatgtgagcacgtattccctagccgcaatgacccccgaaactccatgaacaatcagacagcaaatgctgcattaaaacgcatcggttatggtggaaaattagttgcgcatggtctaaggtcaatcgcaagtaccgctatgaatgaagcagagtttaatgctgatactattgaagctgctttagcacactgtgataagaatgaagttcgaagagcctataaccgttccacatacctcgagcagcacgtgtgttaa

SEQ ID NO: 428292 - DNA, 804 bp, Serratia marcescens
atgcgtgacttgacaaggccgttaacgattttcaccagcaagaagccttttaacgaccgttttgctgatgatatgcaatatggcgatatggatgaacgtacacttaagcaacgatatcgtttggggcaagtatcaacgtttatcgattggagtacttataaatcgccctatgaccatccggcaacacgaaatattccggcagctggaaaagaaaaggcggttgcaatgctttttgatgagctgagagctgcatcgagatacttttcttttactggcgtttatcaagggttgatagttaaacttttcaatcatatgcagtacaataacggaactgactttcaagatgttcaaatggacttggcctataaaaggctgatgctgagcgataaatcagaaaatagtacgctaattcgaattaaaagtgttctcgatacctttgattttaactcatatcagttgaataaagatgcatttactcttcagttatcacaaagccgtttgccaaagtatgttcgctgggaagactgcataaatggaatgggagtcagtgtacatgaggtcaatagtacagagatcagtattgattctttgttttttcaagataataaatatactgctgtgattagctataaagctcaggatcattttgggttagataaagaagatattagtaaattaaagtttaattctattgggtttttcaggatttggtttgtacttcaaaggtataaagagtttgcgtttagaccctttttcaccaactttggcgcgaaaataatagtgacaggtgaaaactatgcttaa

SEQ ID NO: 428293 - DNA, 894 bp, Serratia marcescens
atgttactaccaatacgagttcataaacgattcctaactttatttaagactttgcaaattgacgattgtccacagcaatccactttaaatattcatgtgctgaatatcgaaagtaacgaatttatatactgtaaattagttgaagagttacgtgatataataattacttatgtacattcgaataggaggcttgaggagtttaaggagagttatccttcgtatagtcctaaaccttttttcgaagcaatacaaaaatttcgcaattatacttcaaatgaaggtgagttaggtgagctgcttttatatgcttttcttgaagcaggactaaatgctccaaaattactttctaaaatgcaattgaaaacagattctaatgattatattaagggttctgatggtgtacatctattagaattagatggcggttatcaattaatatttggtgagtcaaagctttatgcggaccttttagaaggtgctcgagaagcatttgattccattttagattttaaaagtaatggaatggcatttgaaagagggctgatagatacacatgttataaatgaaatggtttcagaagaaggttatgaaaaaataaaatcaattcttcttccttctggtgatgatgggcctgatcttgatttatcctttggtatattccttggttttgagttgaaaatagatagctcacagttatcattgaaaaacagagagtttagagagtgggttaatgattccgtgaaacaaaatgctactcgcgtggtcaatacgatacaaaggaaaattctcaagcataaactatatggtcacgaatttcacatatatatagttccttttacagatattgatgttacacgaaaaaaattaattcatgaaatgctaacaattaagtga

SEQ ID NO: 428294 - DNA, 2580 bp, Serratia marcescens
atgaatgaattaaatttaagtaaaaaaattcacttggcagctcgtcttgcagaggatgcttttgaaagtgcttattttaaaaaagtttataagtttataaatagcttatacgataacagtttattcaactgcaatccagatgttaatctctccgagagtgataacaataaaatagcacatgctttgcgttttgcagatatattatcacactcttcgaaagaaaatcataggtcatgtgcatttgaaattataagtagaatagccttgttaaaaacacacgatccttattttaaatttataggtactgcagtaattaaccggcttggggtttatgcagcagaaaaactaatatcaaaaggagtgaaattacccttagatagagaagttgattctattattaaaaagttagttcaaaaaacagatgaggatggagtatattttacagataaacaacatgagttgtataaactgttgagaagtagtaagacaataagctttgctggtcccacttcgatggggaagtcatttgttattaatgcatacattaaagaaatagttctaaaggaagagtttaaaaacatagcgttaattgttccaactcgggctttaataagccagaatgcactaaatttaaaaattgacattgcattgcataagcataaaatcccttatgaggtggttacgacatcctacatgattaatggtgatgaaaacaaaagcaaaggctatatttttattcttaccccagaaaggttggttagtctcataagcactatccctagtctaataattgattatatttttgtagacgaggctcaaaagttaacaacaaaaaacgactcgagaagtcttgttacttattcagccatagaacaaacaattagtaaaaaccctgaggcaaggttattcttctcttcacctaatttatctaatcctgaaatatttaatatcttgtttgataggaaagatgcttcggtatatagaaatacagaaggcgcaactgctcagaatatgtatttcattgatctattaaatgacagttttagccatgttaataccgagaaaaggacgcttgaaaaaatagatgagatccccagtgattacaagaatgcaaatgattttatctataaattaaatagcggtaaaagcaaaatagtttattgtggggggatcgaaagcactcttgagagaacacgtagctttatcaattatctcaaaattaataagaaaaaaaccaagccttttaatctagaaatatcttctgagataagaaactttgttcatgataactatgagcttgcagaagcaatcagctatggtgttgctttccactttgggaacttgccgcaatccattcgagatttaattgagcaccatttcaaaacaggaaatattgattatctattctgtacatcaaccctacttgaaggggttaatttacctgcaaggtcagtatttatccttacacataaaaaaggccccagtcctttagcgtcggttgatttttggaatctggccgggagagcaggacgattatctatggaattgtcaggggatattttttgtattagggatgataataaaatttggaataaaaaagctgttgagaatatccttctttctgataaaaacaacatttcactaaagccaagtttctatattgaagacgaggaaagattgagtgatttacaccggataattaccactggtaaaattgatggtgttaaaaatgctgaattccttagaactttaggagatatgataagaatagacactatgagggattctaaggagcttcctctcattaattatttccaaagcagtggaaaatcggaaattttgttaagtgcagaaaaaagtactgaaaatatcaccatgccaatgaatatccttctggcaaatagccatatcgcgattgattcgcaatatcatgcttttaaaaaaataaaaagcctttcagttaatgaactaaaattatcatggcagcctacatatgaagaaattaaagaaaaattaaatttgatattcgatatttatcaagttgagaagtttgcgacaggtagagaacgcctttatttaaattcaattccatactatgcagtattgctgtttcaatggattagaggaaatagcctacaggaaattatttcgggggcaattgcttataaaaagaacaaggttatatatattaaaaatacacctgttctttttgacagcgaaaacccagttcatttaactgcattagttaatgaaactataaaagatattgagttacgtgtaggttaccagttgcaaaattatatttcacattactgtcagcttctgaatcatgtattgcaaggaaatccaggggcaaactggtctcagttcattgagtttggttcgaatgagccagtagtatggcatctacaaatgatgggtttttcaagggatagtgcagtttttctcaaaaagaatttttcaaagtacattaagcttgataatgaactgaataagcttatcataatggatagggaactgattaagcattcgtttagaaaagatggacttcattacttagaaatccaatcgctattataa

SEQ ID NO: 428295 - DNA, 5721 bp, Serratia marcescens
atggataagctcaatcatccgctggcgcggggcgccagctatttgctgatctacctgacggctttccagccgttgcacccggcgttcgccgccggtattaccgccgctaacggcaatacccaggttcatatgaaaccgggcaacgtgccggtggtgaatattgccacgccgaacggggcggggatttcgcacaatacctacaaggattttaacgtcggtacgcccggtgcggtgctgaataatgccatccagggtggcaagacccaactgggcgtgactattgagaatgcaaagggcaacccgaatctgaaagggaagccagcagaacttatcatcaacgaagtcaccggaggcagtcgttccgagctgcagggcaagctcgaggtattcggcaacaaagccaacgtgatgatcgccaacccgaatggcatcacctgcaacggctgcggctttatcaacgcgccgggcgtgacgctgaccaccggcaaaccgcagttcgacaagcagggcgcgctggaggcgctggaggtgaaaaaaggcggcgtcgccatcggcggtaaagggctggacggcagcggcgccgactatgttgacatcatcagccgcgccaccgagctgaacggcaaaatcaacgcgcaaaacctgtcgctgacccagggcgctaaccgcatcagttttaaagacggcaccatcaagccgatcgccggcgaaggcgccaaaccggtgttggcggtggacaccaaggcactgggcggcatgtacgccaacaaaatccgcctggtggccaatgaggatggggtaggggttaacctgaaagacctcaccagcaaacagcgggatattacgctgagcgttagcgggcggattgagttgggcaatacacaggcagcgacagacttgaacgccagcgccagggaaattcatatctcatcgggcgttaaggtgcgcggtgaacgtgacgtgacaatggctgccgatacgctcaataacaacggcaatgttacggcgcatcgcgatatgcgggtgtttgccgatacggtacgcaatgtggcactacgtgatggcgacaacaccgcattgcatagcaacaataatctctggattcagaaagacgctcaggggaataaagccaaacagatagaaaaccgctctgcacgcattcagaccaacagcggtgacttggttatacgcacggagaatttgaccaatgtcaggcaagaggttcaagccgtttggaaaaatactcccgctaactctaaagcgttcaataaatccttggtaggaagttattacgactcacggcaaggtgttgacgctattgtgctgctggagcctgaactgaaggactttggcatcggcagttggtttggcgaaatcaacctgtcgaaaggcgacaaggttaatgtggggaaagacgagtatcttctggtgaaatcgcaggcgccgggggtgataaattcaggcaacaacgcttatatcaacgcgacaacgttatggaacgatcagtcgaatatcagcgcggccaaagatctgatcctgacggggaacgattttaccgtaaagagcattcaactcggccagaaagatcggtactggcgtctgggaacgaacacgtttggcgttggggcgtttgcccgtgacgaagatgcgcctcccggagattgggatctgctgtatgtcacggaaaaagcgccttataccaagcagcaggaacttgtcgtctggcgagcaaaggggcagcaaaaatcatcgattaccgccggcaataatctcactgcggattttaaaaataagatagagatcagtacgccgacgcctcatgaaaatcagctgaatgaagtggtcacctccggcaggccagagtcgctaaaggcacggaatgttctgctgcatgccaaaaacatcgtcggtactgatgcgattcgtgccggcggcaatatcaccgcgattgccgaagatcggattgttcttgggcaaggcattttggccgccggaaaagagctgtctctgacggcggtcaacgccatcgacgcctggcaaagtgagctgaaagggcaggacgtcacgctaaacgccaaaaacggtgagataaagatacattccagcgagaaacctcactacttccgccctgacggttcgcgttggttgggcagccttgaggcttcacgcgatctgtctctcacggctggcagtaccattacgttgctgaatacgctgctggcgccgcaaagtcgcaatatcgccatgacggctaacggcagcattgcaatcgtaaaaaacagcgcgttgttggaggggtcgctattgggggggccggtttctccggctaaacggcaggaatacttcaaccagctgttggccagtggccaaatgagggcaacgggttcggttctgctcaatagcggtggctatctggcgctccgcggcgccaagattaatgcggacaaggacgttacgctgttagccgcccataacgccgatcttaactaccgtgaacttgacggccgattcaatgcgcttttccctgtgtcccgcacgcctgaactgggcagccgggtacacgccggcggcaatttgctgattaactcggcccgcgacatcggcacccagggcggcgcgctctccgctaacggcaatatcacgctgctggccgggcagaatctatggttgtcgaacctggcctattccgccattgatgccgccaacgacaacaacaaagacgaccgccatgtggtcacagccctcagcgcgggtaaaaacctgaccgcgtcggcgaataaccaactgctgacttacggcgccaggctgacctccggcgccaacatgacgctgacctccggcggcgatatgcgtttcgaggcggtgcaaaatcacacttaccgcgagggcggcaacgagttcaccgaaactcgcacccagcaaggcaccgagctgaatgccggcggcctgatgacggtgattgccggcggcagcattctgttccaggcgaccaagctggtggttaaaggattaggggcgaactggaaaccatcggtggcggtgacggattggggaagccggatagcggcggcggagcaggtggttagaaatgcagagcaaaatgttaatcaaaaacagaatgtactgaacaacgttagaaatacgcctgaaggtttgttactcgataatcctgctcagcatcctatttcatacaagcacagtagttctgtaatgataccgggtacggggacttatcacctcgatatggggaagattgaaataaaaacccgttcagatctggatagattgcttaatgagggagggaaggcatttgacccattcccttatggtgtcgatcctgcggaaacatccggtgatggttatgagattgcgctggcaattcgaaaaaagacgatagatgaatatgaaaatttgcgtcaacgcataatcaaaaaaaagaatgagatacacgccgcccaacaagcgttgaattctgttgatagtgaaaaggtaaacgcaaataggaaattagttagcgtccgacaggaagcccaagctaaacatgcggaagaaacaaggctgaaagcccaggtcgatgcccacaaccaggcagaggccatgcgtgtcggcaatatggatattgccgccaagggcggctatctctacgcccaggcgatggaagagtccagccattacgagaaaaaggaaaccaagcgcaaatggtggggcaagaaaaccgaggttaagcagacccgccacgacgtgaccaacaaggttaccgagtttaccgccgccggcaatatcacgctgatgagccgcgacgacagcacctatgaagccagcaaaatcgccgctggacaaaacgcacgcctgaccagctcccgtggccaggttaacttccgcgcggtgaaaaacacctctttcgaacagaccgtcagcaattcgaaaggcttctttatcaagcaggccaataaagggtacgaagacaataagtgggtgctgccgagcattcataccggtggcgccttgaccgtagaggccgccaagggcgtcagcgccgatgtgaaggtgaaaaacggccaggcgctgcaaagcgccatcgacgccctggacaatacgccgggcaccacctgggtcaaagatctgaacaagcgcaacgacgtgcagtggagcaaggtcaaagacgcttacgacagctgggattacaagagccagcacctgaacccggcggtggcggcggtgatcgccattgcggcagcggcggtgaccgcaggcagttcactggcggccacggcggcctccagcgtttccggcgccgtgggcggcggggcggtaaccagcggcgcggtcaccgccgggatgtcttcgctggcctcccaggcggcggtggcgttggtggagaaccagggcaacctgtcaaaaaccctgcaggcgctgggtagcaatgagaacgtcaaggcgaccgccacggcgatggcgatcggcggcgcgctcaacggtttcgacagcgcgatgggctggagcaaggacgcggcgggcaaaccgctcaatccaaacaacgtcaaactgccgcagttgagcaacggtgactggagcaaggtggcgcagcgggtggccgggcaatcggtcatcagctccagcctgaataccgccatcaatggcggcagcttcaaggacaacctgactaatgcgctgctggcgaacatcggcagccaggttcaggccgagggcgccaatctgatcggggataacggtcaggttctcaatataccgggccgggccgtaagccatgccgttctagcgggcgtggccgcagaaatcggcaagggcaatgccaaaggcgcagcggcaggggcgctggcggcggagctggccggggtgatcatcaatgataatttggtcagaagtgaaggctggcaagagcgtcaggctcaaatcagccgcgtagcgggcgcctttgccggagcgctggcgacaggcaaggctaatggagctaatagcggagcaaatgctgctgaagtcgttgagcgttttaatcgtcaactgcatctggatgagttgaacgcgattaaagagttggctaaaggagacaaggaaaaagaggctcgattgttggcagcctcatgtcgacaagttaattgtactgcacaggagtctcttagttcagaggaacgtgttaactatgaagctttgatggaaaaatataaaagcaccaaatatgaagatcaattacttgctaattactgggttttacatgaaaagcaacgctatggtaactatcctctctatcctgaaatggagctgtctcagctatttacttatactgaaagtgacaaattaaatgatggtagtgattttgtattgaatcaatggattgaaaatgctagtaaattttcagggctatctaaagaggctgtgaaaggggccgcaatattattatcaaccgcaggggtagtccttgaagcttctcgaggtggtcgtagcaagccgatagtctttgacggtaaattttattctgctgatgactttaaattcagtaaagaatactatgaaaggctatggggacagggacgaccagctcctttcttacaagcacgtgaaattatgaacagcaaaccgaaggtagtcgcagatccaagaggagctccggggtattttaagtatgagggggctggattagaaatgatatataatccatcaactaagcaagttgggcacattcaaccaatgagaaataaatag

SEQ ID NO: 428296 - DNA, 306 bp, Serratia marcescens
atggagagagagctaaaacgttaccaagatagtgtgaatttaataaagcaatatgttatcaagtataattcacgctgtgaagaattaatcgcagaaatagccaggcttacttatgaggaaagccaattgaagtttgatgagatttataatatacaagaaaaattagcgatagcattgtataaatatgaatttcacctggatgaacatactcgtgacttggtttaccatttcgaacgagatgatcaatattcaaggttattctggtacgaaaaatttaaaaacggtttatcgtggcccgccgagtaa

SEQ ID NO: 428297 - DNA, 1116 bp, Serratia marcescens
atgaaattaacaacaggtaaggcactgctggcgggttgtattgcgatggccatgagccaggcggccatggcgaaagacatcaaggtggcgatcgtcggggcgatgtccggcccggtcgcgcagtatggcgacatggagtttaccggcgcgcgccaggcgattgccgacatcaacgccaagggcggcatcaagggcgacaagctggtcggtgtggaatacgacgacgcctgcgacccgaaacaggcggttgcggtcgccaataaggtgatcaacgacggcattcgctacgtgatcggccacctgtgctcctcgtccacccagccggcgtccgatatttatgaagacgaaggcgtgatcatgattaccccggcggccaccaacgccgatctgaccacccgcggctacaagatgatcatgcgcaccaccggcctggactcggatcagggcccgaccgccgccaaatacatcctcagcgacatcaagccgaagcgcatcgccgtggtgcacgacaagcagcaatatggcgaaggcctggcgcgctcggtgcgcgacagcctgaaaaaacagggcaccgaagtggcgatgttcgaaggcatcaccgccggcgacaaagacttctccaccctggtggcgcgcctgaagaaagagaatatcgacttcgtgtatttcggcggttactacccggaaatgggccagatcctgcgccaggccaagcaggccgggttgaccacccgcttcatggggccggaaggcgtgggcaactcctcgctgtccaacatcgccggggccgcttcggaaggcatgctggtgacgctgccgaagcgctacgatcaggtgcctgccaaccagccgatcgtcgatgcgttgaaagccaagaagctggatccgaccggcccgttcgtctggaccacctatgccgcgctgcagtcgctgaccaccggcatggagcgcagcggcagccaggagccggcggacatcgtcaaggatctgaaaaccggcaagccggtggataccgtgatggggccgctgagctgggatgacaagggcgatctgaaaggcttcgagttcggcgtgttcgagtggcatgccaacggcacgtccacaccgatcaaataa

SEQ ID NO: 428298 - DNA, 1218 bp, Serratia marcescens
atgaaacgccggctggcggcgctggtcttgattgcgctggggctggcggccgtgtttctcgggcgccagcaggcgctgcgcctggcctcaggctgggatcagcaggtttatgtctggcagcgggtttggacgccgcagcacgccgatgcgctggcgcgcagccgcgatctgttcggtgggctgcgcgtgctggcgctgcaggtgcatccgcgcgaaggctggcgggagatcccagccgatctcagcctgctgaagcaggacggccgcccgctctggctggtggcgcgcctcgacggccagctgccacagctggaccaagaagccattatccagcgtctgctggcgctcacccaacgctggcaggcggccgggctgcccgtcaccggcgtcgagatcgatcatgacgccgccaccgcccgcctgccggactaccaacgctttctacagcggctgcaccaacggctgcccaccgctttgcaactcggcatcaccgccctgccggcctggatcggctcacccgctctgcccggcgtactgcagcaggccgacagctccgtcctgcaggtgcacgcggtgctctcgccgcagcaggggctgtttgacggccccttggcgctgcgctgggtgcggcagtacgccgccgtcacaccgaagccgtttcgcgtcgcgctgccggcctacggcatggcgctgctggggtttgatgcgcagggcgcacaggtggagagcgagtcctcgctgcgcgtggcgggcaacggccgcgagctgacggtcgcgccgcagcagatcgccgattttctgcagacgctggcgcagcaaacgccgccccggctgcgcggcattatctggttccgcttgccgctggcggacgatcggcgcgcctggtcgctcgctacgctgcgagcggtgatcgaacggcggccgctgaacgtcgactggcaggtaaaatttaggcctcagccacagcaaaacgggctgtatgatctgataattcataacaacgggccggtggacgccccgctgccgcaagaggtggtcatccgcgccgacgactgcctggcggcggacgcggtcggcaactaccggctggaatccgcaccgcagcggcaacgctttattcgcatcagcggcgatcagctgcgcgccgggcaatcccggccgctgggctggctacgctgccaacaactgacgccaggaggcacccttgtcacaccttga

SEQ ID NO: 428299 - DNA, 396 bp, Serratia marcescens
atggccgagtttaaacgcacacaacgcgactatcctttgtcttttaaaattgctgttgttgagcaggttgaaaaaggcgaaatgacctacaaacaggctcaactgcgctatggtattcagggacgttcgaccgttctgacctggttgcgcaagcatggccaccttaactgggccccaggtcttcctctctccagccgggagttgcccatgagccaaccgtctgcccctttaactcctgagcaaaggatcagggaacttgaagaacagcttgagctggtcacccagaaagcggagttcctggatgctgtcgttaacgtgctgaaaaatgattatgggatcagtgtcataaaaaagcggccaggcaagtcctcacgcaaaaacagaccccaaaaataa

SEQ ID NO: 428300 - DNA, 411 bp, Serratia marcescens
atgggccatcatgtacacagcgatctgcgtactgacaatgttgtgcaggctctgaaacaggccttaaagcagagaaaaacgactcagccactgatccatcactcggaccgtggaatacaatattgttcagcaggttaccagtcaatccatgaaaaatacgggctaatctgctcaatgacagatggctatgactgctatcaaaacgcattggcggaaagggtgaacgggatactgaagacggagtttttgctatcacgcccggcagatttggagcaggcaagaaagatggtgagggaatcgatagaaatttacaacagagagcggcctcaccagtcgctaaaatacaaaacgcccgatgcggtgcatcaggcgttttacaggcataaaagtgtcaacctatgccaggactag

SEQ ID NO: 428301 - DNA, 1707 bp, Serratia marcescens
atggcaaaagataagaaacgtgggtttttctcctggctggggtttggccagaaggaaaaggaagaagagcaacagcaacctgagcagccggtagagcaggcggagcctcaggccgcggagacaccggctgaaccggccaccgccaagctggatgacaagctccccgcccaggaatctgaacctgccgcctccgtcgacaccccgggagagtgggatagcggccaggccggcgaacccatcgcggaaaacctgccggcggcggccgaacacccgacggcgcaagcgttggccgaagagattgtcagcgtgaccgagcaggtagtggcgcagcagcagccggtcgtcgagcccgagccggtggttgagcccgagccggtcgttgaacccgagccggtcgttgaacccgagccagttgttgagcctgagccggttgtcgagcccgagccggttgtcgaacctgagccggtcgtcgagccagagccggtcgttgaacccgagccggtcgtcgagcccgagccggccgtcgagccagagccggccgttgaacctgagccagttgttgagcctgagccggttgtcgagccagagccggtcgttgaacctgagccggtcgttgaacccgagccggttgtcgagcccgagccggttgttgagcccgagccggttgttgagcccgagccagccgctgagcccgagccggtcgtcgaaccagaatcggagccggaagaagaagcgccgcttgaacctgtggtgccggccgctgcgcaagagcaggagcggccgaccaaagagggcttcttcgctcgcctgaagcgcagcctgctgaaaaccaagcaaaacctcggctccggctttatggggctgttccgcggtaaaaagatcgacgacgacctgttcgacgagttggaagaacagctgctgatcgccgatgtcggcgtggagaccacgcgcaagatcatcacctccctgacccagcacgccagccgcaagcagctgaaagacgccgaagcactgtacggcaagctgaaggaggaaatgtccgaaattctggccaaggtcgatcagccgctggatgtcagcgggaaaaccccgtatgtcattctgatggtcggcgtgaacggcgtgggtaaaaccaccaccatcggcaagctggcgcgccaattccaggcggaaggcaagtcggtgatgctggcggcgggggatactttccgcgccgcggcggtggagcagctgcaggtgtggggcgaacgcaaccgcattccggtggtggcgcagcataccggggcggattccgcttcggtgatcttcgatgcggtgcaggccgccaaggcgcgcggcatcgatgtcttgatcgccgataccgccggccgtctgcagaacaaatcgcacctgatggaagagctgaagaagatcgtccgcgtcatgaaaaaactggacgaccaggccccccatgaggttatgctgacgctcgatgccagcaccggccagaatgcggtcagccaggcgaaattatttaatgaggccgtgggcttaaccggcatcacgctgactaaactggacggtaccgccaagggcggggtgatcttcgccatcgccgatcagttcggtatcccgattcgctatatcggcgtcggggaaggcatcgaagatttgcggccgtttaaggctgacgattttattgaggcactttttgcccgagaggattaa

SEQ ID NO: 428302 - DNA, 360 bp, Serratia marcescens
atgagaaaatctacgtttgcggctctgctgttactgggcctgacgccggcgctggcgctcggtgcagcaccggccccccacgccatcatcaaaaccgcccctgtttaccccgaacaggccctgtcgaaaagcaccagtggcgtcgtcaaagtgaaatacgatatcgagcgcgacggcacggtcaggcatgtgcgtattgtgcaggcgaagcctgccggtgtctttgacgaggcggtgctgatcgccatgaaaagctggcgctttgaacgcgatcagccggtgaaggatcgcgaatttacctttaacttcaccaccaaaccgaccaactcggtctatggcaacggggttccgtttcgctga

SEQ ID NO: 428303 - DNA, 342 bp, Serratia marcescens
atgaccaaagcatattattggaaaagtcaggtgtggggcgtgacgtacttttttatcgcgctctattatatccatctcttccagcctagcgtgaatgtcccgctctctctggtcgccgccatcctgagtctgttgctgtatcccttcgccaaaaaagccattgaaacggccgccctgcagttcaccagtgaagcattctggcaccgtgggttgttcgccgataccatcggcaaaggtggggtgctgatcctgtattatgccttctgttttgtcatggccctgccgctgggcgccctgtatctgcttgccctgttcctcagaagtaaaaatccgccttcatag

SEQ ID NO: 428304 - DNA, 636 bp, Serratia marcescens
atgaaaagcttgtggagaaggtcaacaaagccgccggtatttaacgtaaagcaaggccgcttacgcggcctttttattcctaacttaaaaccacgtcctgtggacgtggttatcgactcggttttggctctgcctgtaaaaacctgctcatgccaaaatccctatctgttgtccccacaactgataaggaaattaaacatgagcaggtttcaaagagcttcccacgtactgtggcattgtcaatatcatatagtctggacgcctaagtgccgtttcagaattctcaaaggcaatgttgggaaagaagtgtaccgacagatatggatactcagtgagcaactgaagatccaaattattgaactaaacgttcagttagatcatgtgcatcttttggtgaagataccgccgaagttgtcagtatcagaagtgatgggccacttgaagggtaggacagcaataaggctcttcagcaaatttccctacttacgtaagcataaactatggggaaatcacttctgggcaaagggatactgtgtagacaccgtaggtgtgaatgcagaaatgatccgtaaatacgtcaagtatcaagaaaagcatgaagcggatgataaacagctatcgctacatgaagtgtga

SEQ ID NO: 428305 - DNA, 1728 bp, Serratia marcescens
atgctttttaatgcaaataccaaatttacttatcattcaccggatgatggcgacagcatgacggtgaccggcgatcgtcccagccgacctggccctactggccccacgggtaacgggggcgacagcggcggtggcaataccggcactaccaataagttgatcatgaagcccggtgatgtgcatacctcccgctatggcaaggtcattatcaatgcccagggtcagccaacgatgaacggtgtcgtcatgaactatgagaattcatcggttgtggatgatggtgctggcggtgcaacccgcgtactgaattccatcatcgatgctgccaaaccgccggccggccagaattttggcaataacgccagcatttcggatgggcgctatgccggcaaaaacccggcggcagactataccttcccgctggctgtctttacggcggtccgtcgcggccaaatccccccgggcttctggcttgacaacaacaaggtcatgaccgaggtcacgcaaaaatacgagatcaacggcggcggcaaaggcagtgaccgtaccgggtatcggaaatccaatgtggcggtgcccggcctgaccaatgcgtatcagcagtggcaaaaggaacagcaggacattgcgcaacaggaagccaagcgcaaggcagacgaagaagcccggcgtaaagcggccgaagaggcaaaacgtaaggcggaagaagacgccaaacgcaaagcggcagaggcggaagccaagcgacgcgccgaggaagaggcgaaacgcaagcaggctgaatgggacgctcagaataatgagcaattgcagcagcgtaaacttaatgaagcacagcagcgcattaacacggcaagtacagagaagtcagtggcagagagccgcgccactgaacttgagaagcaacttccagcgctcgaggctgaatgggacaggctgattgcgttatcgaaaaaaggaggtaagacatctcaagcgatacatcgtggcgatgcagaggatgccggtaataaagtcaatgcacacaaggctgctattgtatcggcgcgaactgaagcaaacctggcacagcaacggattgaacaggctcagcgagaaaaactggaggcagaaaagcggctgaacgccctgcgagcagagcggcaggcgcgggaggctgaagaagccaggaagaaagaagaggaggcgatgaaagacgccatcaagacgacggcggacttttacaaggaactgacggagaaatttggcgagcagtctgccaaggtggccaaagagctggccgatgcggccaaggggaaaacgctcaaaaatgcggaggaggcgctgaaggcgtttgagaagtacaaggacgtgctgaacaagaaattcagcgtcgccgatcgcgaagcggtggccaaagcgctggcgtcggtgcgccgagagcatatcgcccagaaccttgccaagttcagcaaggcgttctactacacgggcaaggccatcgatgcctacgatgtcttcgttgtcgagttgcctaaagcgatccagacgcagaacttcagaccccttttcgtgaagattgagaccatcggggcgggcatggccgccacggcgctgacggcgtttgcctacagcgtgatactgggtacgccgctgggcatttttggctttgccatcatcatgaccttggtcagcgtgctggttaatgaaaagcttgtggagaaggtcaacaaagccgccggtatttaa

SEQ ID NO: 428306 - DNA, 327 bp, Serratia marcescens
atgactgaaatgaatcaaacactcaccgacagctccatctctatcttccgcaacctcattgccgacctgcaattctacaaactcagcgatatccaattgtgcgatctcagcgccgtagctcaggaatccgcagaagggttatgtcatgggttagcgtatctggctgaatcgctggagaacggggcatcaatctcaacaaacagcagggtacaaattagcgtctggctcaaagcttctgcgcatctcctccccgccctatcggaacttagcgagcaggcgaacaaccatctgttgcaaatgcatgaaggcaatatttatcagccctag

SEQ ID NO: 428307 - DNA, 414 bp, Serratia marcescens
atgacagacaagcacttaacccaatcaccggcaggtgagtttgttatgtttgccagcgatgacggcgaagtgcgcgttgaatgtcgttttgagcaagaaacgatgtggttgctccaggcgaccatcgcgaatctttatcaagtgactccccaggcgattacgcagcacatcaaagcgatctacgaagaagtggaatttgaacaaaacgcaacctgtaagtcttacttacaggttcagcaggaagggggccgtcaggtaagtcgcaatatcctgcactatagtctgcccttaatctggcccccgcattacagaacggcttcagagttcacgccgccgctgatatgcctcccgtcgccattgtgccagagccagcgatacccgttttggttcgttaagtggaatgctcacaaatag

SEQ ID NO: 428308 - DNA, 3099 bp, Serratia marcescens
atggacaactacaaaactattgccgaatccaacaattttattgttttggataaatacagccgagaatggaaggcagcggaaaactaccaaagcgagaacgacttggagcgggagctgcttcaggacttagtcaaccagggctatgagttactgcccgggctaaataaccctgaggctttgcttggtaatgtgcgggtacagttgcaaacgctcaatcacgtgcaattttccgacggtgaatggcgacgttttgtggaaatgtatctcgataagcccagcgactccgttgtggataagacccgtaaaattcacgatgattacatccatgattttgtttttgatgatggccgcatccagaacatctatctgctggataagaagaatatcgcccgtaacaagctccaggtgataaaacagtttgaacaaaccggtagctatgccaatcgctatgatgtgaccattctggtcaatgggttgcccttggtgcacgttgagttgaaaaagcgtggcgtcgctattcgagaagcgtttaaccaggtacaccgctacagcaaggaaagctttaacagcgagcattctctctataagtatttgcagctgttcgtcatctctaacggcacagatagccgctattttgccaataccacggcacgcaataaaaacagtttcgacttcaccatgaactgggcgaaagcggataatagcctgattaaagatctgaaggactttaccgctaccttctttcagaagcacactctgcttaatgtgttactgcattattcggtgtttgatgtgagtaacactctgctggtgatgcgcccataccagattgccgccaccgaacgcattctgtggaaagtgaaaagcgcctttgaggccaaaaactggagcaagcctgaaagcggtggttttatctggcataccacaggttccggtaaaaccctcaccagtttcaaggtggcgcgtttggccactgagctggagtttatcgacaaggtattcttcgttgtggaccgcaaggatctggattaccagaccatgaaggaataccagcgtttttcgcctgatagtgtcaatggctccgacagtactgcaggcctcaagcgcaatctggaaaaagacgataacaagatcatcgtcacgaccattcagaagcttaataatttgatgaaaagcgagggtgaactgcctatctacaccaggcaggttgtattcatttttgatgagtgccatcgcagtcagtttggtgaggcacagaagaacctgaagaagaaatttaaacgcttctatcagtttggttttaccggcacccccatctttccacaaaacgcgctgggtgcagataccaccgccagcgtgtttggtcgggagttgcattcctatgttatcaccgatgccattcgtgacgaaaaagtgctcaagttcaaggtggactacaacgatgtccgtccccagttcaaagccatcgaaaccgaactggacgaaaaaaagcttagcgctgcagaaaacagacaggctttattgcaccctgaccgtattcgtgaaattactcagtacatcctgaacaacttccggcaaaagacgtatcgccagcaggcgaacgccaagggttttaatgccatgtttgcggtgagcagcgtggatgctgctaagttttattacaagtcgttcaaggagttgcaaaagcatagcaataaaccactgagagtggccactatcttttcgtttgctgccaacgaagagcaggatgctgtaggggatattcaggatgaaagttttgatgtttcggccatgaatactagtgccaaagagtttttaagcgcggccatcgcggactacaacgtgctgtttaaaactaacttcagcatagacagcaatggtttccagaattactaccgcgatctggccaaacaggttaaagctaaggagatcgatctgctgatcgtggtgggcatgttcctgacgggctttgatgccccgatgctgaacactctgtttgtggataaaaacttgcgttatcacggcctgatgcaggcctattcgcgcaccaaccgaatttacgacgctaccaagacctttggtaatatcgttaccttccgtgacctggaacaagcgacggtggatgccatcaccctgtttggtgacaaaaacaccaagaacgtggtgctggaaaagagctacaaggaatacatggaaggttttaccgatgtggtgactggtcaggcgcgacgcggttttgtggatgtggtcagcgagctggagcagcgttttcctgatcccgccaccattgaaaaagaagctgacaaaaaagcctttgccaaactctttggtgaatacttgcgcgttgagcatgtgctacaaaactacgatgagtttgctagcctgaaagccctgcaaagcgtagatatgaacgaccctgaggcgagcgaagtgtttaaagccgaacactatctggatgatgaaaagctagcagagttgcaggccatacgcctgccagccgagcgtaagatccaggattaccgctcgacctacaacgacatccgcgattggcagcgtcgtcaaaaatcggcagaggataaagacaaatccaccatcgattgggatgacgtggtgtttgaggtggatctgcttaaatcccaagagatcaaccttgattacatacttgagctgatctttgagcacaacaaaaaaaccagaaacaaagccgatttggttgacgaagtgcgccgattgatccgcgcaagcctgggtaaccgggctaaagagagcctgctggttgattttatcaatcagacggatctggataagattggtgataaagctagcgtgatcgaagccttcttcgcctttgcccggatcgagcaacagcgtgaggctgatgagctgatcagctctgagaatttgaatgctgaggcggctaggcgctatatcaccacctcgcttaagcgtgaattcgcaagcgaaaacggtaccgagcttaactctattcttcccaaaatgagtccgcttaatccacagcacttgatcaagaagcaaagcgttttccagaaaatcgctgcatttgtcgataagttcaaaggggtggggggaaccatttga

SEQ ID NO: 428309 - DNA, 1209 bp, Serratia marcescens
atgagcaaaacgctaacggaaatagcccagcagttaataggcgctaataaaaaggtgcagttgatctatgcctttaatggtacgggtaaaacgcgtctgtcgcgtgagttcaagcagttggtcgcgcccaagaatggcaatgccgataacggtgaggaagctgagctttcgcgcaataaaattctttattacaacgcctttactgaagatctattctattgggataatgatttagcagatgatattaaacccaagctgaaaatccaatcaaactcttttactgactgggttcttaacgagcaagggcaagatcagaatgtcatcgctaacttccagcgttacacgaatgataagctcacgcctcgatttaatgaagaatataaagtcaaagataaggatgataacgagataatcgttaaggcattttcagaggtgactttttccgttgagcgtggtgatgatgagcactcaggtaatcttaaaatatcaaaaggtgaagaaagtaattttatctggagtatgttttatacgcttgttgacctcgttattgagacattaggtgagataaatcctgactatccggaacccacgccgttcgatgatcttgagtatatttttattgacgatccggtaagttcacttgacgaaaatcatttgattgagctggccgtcgacttggccgaactcattcggaataataaatcagatgtaaaatttatcatctcaacccataacccgctcttttataatgtcttgcaaaatgagcttgggagtgatgaaaaaaagacaagctacaaagccaagtgtttcaaaaaatatcgccttaccaggaatgatgatggtcttgcagaactcgtagagcaaccagatgactcgtctttctcatatcatctgcatcttaaggctgaattacaaaaagcgatagacagtaataagttaagcaagtatcacttcaattatctgcgtaacattttggaaaaaaccaccattttcctgggatacaaacggtggggggacttgctgccgcagtcggatagtggggattccaatccttatgaggcaagagtaatgaacttgcgtagtcattcaaagtacgcaggtgaagaggtgagtgagttaacggaggatgaaaaacgagttttaaaacgactggttaggcaccttgataaaatatattatcctgacctaaaagacgttcaagaaggctaa

SEQ ID NO: 428310 - DNA, 1263 bp, Serratia marcescens
atgagcaatctaagctttatggaaaagctagtgtatggcgttgaagttgaatggaagacattgggggaggtggccgaatattctacaacgcgggtcgatgctgcggaactcgatgcgtcatcgttcgttggagtggacaaccttgttgccaacaaaggtggtcgcgttgacgcgagctatacgccgaatactgagcgtttaacggcatatgagccaggggacgttcttattggtaatattcgcccttacctcaaaaaggtatggaaggcaacaaactcaggcggctgcagtggtgacgttctagcggtgcgcataaggggtatgttcaaaaatacaattagcccagacttcctctactatctgttgtcatcagacggattcttttcgtacaacatgcagcatataaaaggggcgaagatgcctcgtggaaataaagcggccattttgaattatcctgtgccaataccctctccaagtaatcccaaaaaatcgctggaaattcagactgaaattgtgcgcattctggacactttcattgcacttaccaccaagcttagcatagagcttaatgcacgaaaaaaacaatacaactattaccgcgatcagttgttaagctttaaagaaggggatgtggagtggatgacattgggggatgttggaaaatttattcgtggaaagcgattcacgaaggcggatttcgtggatgagggtatcagtgttatccactatggtgagatttatacccaatacggtgtctatgcatcgcaagtagtatcacaggtcagaaatgatatggaagagtctctccgctatgctgagccgggtgatgttattatcacggacgtgggtgagacagttgaggatgtcggcaaggcagtagcgtgggttggagatgaaaaagtggctattcatgaccactgttatgcattccgtcacacaatgaatccgaagtttgtttcttattgcatgcaaacagcatctttcattgccgaaaaagcaaagtatgtggccagaactaaggtcaatacgctgcttataaatgggttttcgaaagtatctatccctgttccctatcccaatgaccttgaaaaatcattagcggagcaggcacgaattgtcgccattctcgacaaatttgatgctctaacaaactctctcaatgaaggcttaccccgcgaaatagaattgcgccaaaaacaatacgagtattaccgtgatttattgttgagctttccaaaaccgaactcggaggtagcgggctga

SEQ ID NO: 428311 - DNA, 1557 bp, Serratia marcescens
atgacaagtattcaacaacgtgccgcgctacagcgccagatctggaccattgccaacgaggtacgcggcgctgttgatggttgggacttcaagcagtatgtcttgggagccctattttatcgctttatcagcgagaactttaccaattatatagaagcgggtgatgacagcatcaactacgcagaactgccggatagcgttattacccaagagatcaaagaggacgccatcaagactaaaggctacttcattcgccccagcgatctctttgttaacgttgtcaaaaatgctagcgaaaatgagagcctgaataccgatcttgcccacatctttgccgatattgaagtttcggccagtggttatccttcagagcgtgatatcaaggggctgtttgctgacttcgataccaccagtaaccgtttgggtaacacggtaaaagacaaaaatgcccgcttggctgcggtgcttaaaggtgtagccgggctggattttggtgactttgccgcgagccatatcgatttgtttggcgatgcctacgagttccttatttccaactatgcggccaatgccggtaaatccggcggtgaattcttcaccccgcagcatgtttccaaactgatcgcgcagcttgccatgcacggacaaacgagcgtcaacaagatttatgaccctgcttgtggctccggctcactgttattgcaagctaaaaagcattttgatgcgcatattattgaagagggcttttttgggcaagagatcaaccacaccacctataacttggcgcggatgaacatgttcttgcacaacatcaactacgacaagtttaacatccaactgggtaacaccctgacggagccgcatttttgtgacgataaaccttttgatgccatcgtctccaacccgccttattcggtgaagtggataggttcagacgacccaacgttgatcaacgacgaccgctttgcgcccgcgggcgtgcttgctccgaaatccaaggctgactttgcctttgtgctgcacgccctcagttacctatcaagtaaaggccgtgccgccatcgtctgcttccccggtatcttttatcgcgggggagccgagcaaaagattcgccaatatttggtggacaacaactatgtggagacggtgatttccctcgcatccaacctgttctacggtaccaccatcgccgtgaatattctggtgttggcaaaaaacaagaaagagaccactatccagtttatcgacgccagtagcttgtttaaaaaagaaaataataacaacgtgctactggacacgcatatcgaacagatcatgcaggtgttcgacagcaaaacaaatattgctcactttgcccaatcggtaccattggagacggttgtcgccaacgattataacctgtcagtgagcagttatatagaagcaaaagacaatcgagaagtggtggatattatcaacctcaatgccgagttgaaaatcaccgttgccgagattgagaagctccgtaacgaaattgatgccattgtggcaaaaatcgaaggaaaggagccggaggcatga

SEQ ID NO: 428312 - DNA, 1341 bp, Serratia marcescens
gtgccgctagagaccctggaaggaaaaaacggtattcaaacgatgatcgaccgcgtgggcacgcgcggccgccagattcgtttgctggttttgtgcgcgctttgcctgatgtgcgacggctttgatattcaggccatggggtatgccgggccggcgattcgggaagagtgggggctggaaaccgcacggctcggcccggtgttcagcgccggtctggcaggcatcgccatcggcgccttcatgttgggctggcttgccgatcggatcggccgcaggcccgccattttattggcgacgttggtttttggcgcgtttacgctctgttcggcttttgcgcagaatgtcgatcaactgttagcgctgcgctttttggcgggcatcgcgttggggggcgtgatgccgaactgtattgcgctggttgttgaatacagcccgagccgtcagcgcgcgacctatatcaccgcaatcacctgcttttttgcgatcggcggcgggcttggcggcattgcagccgccacgctgatcccgccctttggctggcgtgccgtctttctgctcggcggcctgttgccgatgttgttggcgctggctatgtggttctatttgcccgagtccgcacaatggttgttgaaatgcggagggaaggagggggcggttcgcgcgctgttgcagcagatgttcccgtcacagcgagtgcgggaggtcgatctctcggtcagccaggcagaagcaacaccggacaaggcgagcgtgctggatctgtttcgggagcggcggacgacgtttacgctgctgttgtggttggtgaattttatgaaccttatcgatctgtactttctggccaactggctgcccaccttaatgcgggacgccggcctgacgttggagacggcgaatctggctaccggaacgttacagtttggtggggtgctgggtacgctggccttggggcgtctgatcgacaagtttggcgcctacagcgtgcttatcaccggtttttccgttgccacggtgtcgatagcggcgatcggtgttgatccgagcaatctactgctgcttttcagcgccatttttattacaggtatttttgttgtcggcggtatgccgggggtgaacacgttggcggcgggcggttacccgaccttcttgcgttcaaccgggctggggtgggggttgggcattggtcggggggcgtcgatgcttggcccgctcctgggagcggcattgatcgcccgacattggctggcgtcagacctgttgttgctggcggcggtgccggcgatgatatcggctatggcgatagcactaatgtggtggaaaaacgtaaaaaatgatgactga

SEQ ID NO: 428313 - DNA, 213 bp, Serratia marcescens
atgacctcaactgccttcactatttgcctaattcttgccgccgtcatggtgatgatacacccggcattctgtatccccttcctcatcgctgcctacgtatttgcgggcaaaggccgtatggatctagacagcaacaccagcatcatccttgggaacatcggtttttttgttgttctgttcatcttcgcggctattcatcagtcgctaaaatga

SEQ ID NO: 428314 - DNA, 1269 bp, Serratia marcescens
atgaaaaaaatgtttatttatcagcacttccactctgttggcaacggtacctttaaaactggttcaatttttaacttgagtggtagtgattcgttctattgggtttacgactgtggttccaccaggaaaacttctctcaagcataaaatccaaaacatgtccactcatccgtgtttcccaagtaatattgatatgctggttctctcccattttgatgaggatcacgttaatggagttgaggaccttctcagacactgccacgtaaaatccctggtactgcccttctcagaatggacccaaagtgtgcgcgaaatttcggttctgggaaaaaagggaacttcaccatccacagcacttttgcaacttaatcccctgcaatggttagcaactagagaatttgatgttcaagttgatgaggttgtactaatccaaggaggttccgatagaccgcttaatgctcttggtgaagaaaaacccaatccaaagcccgatgactttcaacgtgatgatgactccagtattctcggcgatggctactttactttcaatcagcccacagcacttggcaccatcaagctaagaactattaaacatgaccgccccatgtacgccattaaaagcaattttgagtttatctttttcaatgcggagaaagacttcactgagctggggctgataataaataaggcagggaagttgtattcaaagaaatcaaataggcctctttccgatgtgaaagcagatatccaaaatacgattatgagtctcaatctacataatccgacatccgtaatgcctttggactggcgaaagacattgaagaaatgctatcagaagcattttggtcatacaagccaggcaaaaaacaacatttcgttatgtatgtatgcagctccagctcaaatggaaactagtatatttatggtgagaagtaatctcattatgcgtccaaattcactttctccgacttcgcgtctggcgaccctctgcaccggggatatacatcttactcctgaggtaatttctgatctgcggaaccatcttggaccacaacgctgggacaagattggtttaattcaggtacctcaccacggttctaagaattcatggaaagtgggaaatgctgcattactgtcaccagctcaatttttgcattgtgcttcaggtactaagcaccatccacattcaacggtcattaaagatttaagcggaaaaattgtgcataccgccaacaatactagcggtgtatcaattaaatacttagtttaa

SEQ ID NO: 428315 - DNA, 207 bp, Serratia marcescens
atggaacgcttcttccgcagcctgaaaacagaatgggtgccagcgaatggctacgtgggcaaagacgaagcccggcggcaaatcaatcgctatatattgaattactacaatagcgtcagaccacatcattataacggtggactgacgccagaagaatcagagaacagataccgttcttactgtaaaaccgtggccaatattacttga

SEQ ID NO: 428316 - DNA, 1524 bp, Serratia marcescens; identical to SEQ ID NO: 77500

SEQ ID NO: 428317 - DNA, 651 bp, Serratia marcescens
atgcccgccctgaactccgggcacactataagtaatatctccgcaccatacccggtctggctccggtacagcgaactggcgctcgagcagatttggcaggcatgtatgctcctgacgggcatttttgtactgatattttccgagctgacaactgctcaggttcagggatttcatcagacgcccggcacggtaacggctcatcggaatgccgttttgggtcagcatttcagccagagtgcgcgcgccagcagagccacggctctggttccatgcccggcgtatctcgctgtacaacctgactcgcgccggattaacagtatcgcatcgtttctgccagtaccggtacctgctacggtgtactcccagagcggaacaaagtctgactaccgtgtggctgtcgctcagcctggcaattatcgtgaaccgttcagtgagtcggacatcaagagcgcggtagccttttttaatatcgtattctgttcctccaggcggcgaacctgcttttccagctcgcggatacgctgctgctctggggtaatgggggtggcagaaggcgtaataccctggcgctctcgtctgagctggcgtacccaagattcaagcgtggtagaaccaacattaaccgcttcactggcttgtcgatatgagtaa

SEQ ID NO: 428318 - DNA, 324 bp, Serratia marcescens
atggggaatgcggaaggctgccgccgcgaaccgtatctatgccccgccaaaatcatcacacaagggatcggccatacagggaaaggtgttgctgccgttagtcaggccagcgatcagcagatcgcgaagtggttcgccgaagaccaactggcggcgcagaactgcattgaggtgaatgtcgaacgtaagctggggaaaaaactctctcagggggtgttcgatgggatcgggagttttatttttaatgtgggctgtggccagttcactcgctctaccatgtaccgttatctactggccgaagaaaccgtggctgcatgcgtgtag

SEQ ID NO: 428319 - DNA, 246 bp, Serratia marcescens
atgacaatgcaggagaaagcaaccttcgcggcctacctctcttcggggttcctggtgctggtcggcaaggtgggtaaatggtttaacgacctcactctcaatgactgggcgatcgtcataggtatcgccatcggtatcgcaaccttcgccgccaacatctactttcagaatcgccagacgcgcgccattgagcgggcctctcgcgccggcgccacgattatcaatccgggacgtaccgacaaatga

SEQ ID NO: 428320 - DNA, 666 bp, Serratia marcescens
atgaccccagatgatatccgattggtagttaacgaaattcttcctcaataccaagcatcccaatggcagatctacctgatcgctttatgtattggggggctgattgccgctattgggatttactggggggctaatttaaaaaaacgcggtgagataaatgccagtgaggctctattcgataaaatcagtgagcagcttagacagaacactaaggatgttgaaacaataaagactgcgttgtctgggcagcactgggtaagccaacagacatgggttaacaaagaaaaatattatactggcttaatcacataccttcatgactttatccacgccatcgatggtcaattagactgtgttagaagttcaatttctgttcatgatgaagctattagcgatcctgagttttatgaagaaatgcaggatctaggcaccaaagcttccgaaggactgaatgacttaaggggaccctcattagtgttcctctccgaaaaaaccaatttggccctcgaccaaatgttggcagagctatggaacttgcgagaacactcgacagggcccagatcggaattcctaaagggtagttatgatattcttaatagaaccattgatattgttttgccagaggcgaaaagagagctaagtcaaccattgatgaaaattgactag

SEQ ID NO: 428321 - DNA, 816 bp, Serratia marcescens
atgaccaacgcaatagaacaactcataaaaatgcatgatccgcgctgtgtaagtgcggaatcaatgaatgtaggccgtgggcgcgcttccctggccagggagcagatgctcggggcattagccaccgtgcagcaccatcattcagtcggccttgacctactgatgacaaagtaccgcaacgactttaaggcagagcagcggctacgtgcggcgatctatgagtgggtacaccaacggccacatcctgaacgcgcgacggcagcatgtcagttagccctcagtatcgtgcttgagcgaaaccttccagcacaggtggcgcatctttcctcgttattccgtagatatggcccgcgaacagcccaaacgcggaaaaatattgaagcgttgcaatccgagattaaaacactggaaaagcggcgcagccaagcacagatcaccgatattgaatatcacgaggttggcttcgaaattgccgatataaccaaacggattgagcgggaacgtgctggattacgtgcttggtctgaacaacgcgctgctacaacaaatatatgcccacgttgctccggtaccggccgcatggttaggccgcatcctatagagtgcgaggaatgtggcggcaaaggcaagattccggccaatatggagcatctgcgtaagtccatgcgtatcataggggctgtggttgagcctggagaatgggcaagccggtatgccgagttggtgaaacagtgtatggattggttgtatgtcgaagagtcgaatgcagcacaaatgctatttgagcgcattcaggccgaaaagtgcagctcctaa

SEQ ID NO: 428322 - DNA, 609 bp, Serratia marcescens
atggaatcagttagcaaagaaatattcgacatactaaagtacttgcttcctgggtttgttactgcttggatcttccatgctttaactgctcacccaaagcagaatcaatttgagagaatcatccaggcattaattttcacgctatttattcaatgtgcaaccagtatgactaagtacattcttattttaataggaaaatggcattcaattggtcattgggatgacacagcccagttattttggtcatcgatttttgctatatcatttggttttatccttgtttactacaccaatagcaacaaatttcataacttcttatcagagaaaaacataacaaagcaaacttcttatttttgtgaatggtcagatattttcaataatgttacgtggttcgtaattgttgacttgaaaaatggaagaagggtctatggatggccgctggtgtggccggaagacccttccaaggggcatcttgtcctacaagatcccgaatggattgaaggtaagcaatacattcgccttgcaaatactgagtatcttgtaattagcgcgaccgacattgagtatgtggaatttctcaaaaaagagccggagataaaagatgagtga

SEQ ID NO: 428323 - DNA, 612 bp, Serratia marcescens
atggatgtagatacaattattgttagcgcattgattagtatggtaataagtttgattggcgcttgggtaacgatgaggcttgcgttgcatcgtttttatcgtgaaaaatggtgggataaaagagctacagcatacctggaattagtcgatgtattatatgatttcaaagaaagctatggagttatagaagctagtgaactcgcgaaagtgataactgatcatgatggtgagccgatctatccggaagatattctgagtgattcagatgagtctgaactctggaaaaaaatgcaagtaacccattataaattagcaaaaataaaaggattggggccattaattttcactgaggccgccttaaataaggtatcagcatttataaatagagataataatgtaagacggatggttttacaggatgagatttatgatgtggaagcttatggagagatgaaggcgggagcggataatttatatcaagagtttaaaactattgtcgccgttgagttgaaacttacctctggagtgaaaagtaaactagatggctttattcaatgggtattttcgcaatatattagagcagaagacgaatatcggaaaaatatacgatag

SEQ ID NO: 428324 - DNA, 1260 bp, Serratia marcescens
atgagcttttatgattcttcaaaagtaagtaatataaataaaactaacgcacgcattacccgtgacgttaccagtcatgtctcagagtataagtttgatattaacgaggacgaatattctaatgaagataaggaagtgtttttttatagtgtgctgggtagtgcgtgggctattttttatgagttatttaataacaaaagagattcactagataagaatactatatttaatcaaacacatatagcaagttcaatagagtttacagaagaggattattcaaatgatcctgtgagttttttgtcgaaccttttaagagtcttatttgaattcgactattgggtcggcttacagacatcatacaaaatacttgaccatgaaatattgacaaaactagataagctgtacgcagaaaaggaatggagtctatattatcagtttaagtgggtaagggacaaactctccgtcgcgttggctaaatttgttattgactcaagagagttcgttgaagcgagggaacttgttgcgactataacaaatcgtagggagaaaataagttctgaaattgattttaaacttggagaggccacggaaaggattggttcggaaaagtcggaggctttgcgggaaatagcaaatagatataatgatattataaaagaaatcagagatactgaggcgggagtgacggagtcagtagaaaatatcaaacttaaatcagagcaagtaaatgctcttgaagacagaataagtaaattaagaactgagtacaattttgttggtatatcatcagggtttaataaaataaaagaaaaaaaagagttggaattgagaacatgtgaaattcaatacattaacctttttggatgtttgtttatagttccggttattgctgttttgttttatttcttcaaatcagaagtgatacctaaagatttttcagtggttttctttttgttcccatttgtaacaatagagttggctttgatttattattttagattgttgtatcttgaagcgaaatctataagaacacaattaatacagatagagctgcggttaagtttatgtgcatttatcgaaaattacatggagttcagaaaagataatcatgcaacaggtgacaaaacattagatagttttgattctttgatatttagccctattcaagttaatgacaacaatattccatcaatgtttgatggtgtagatgcaattgctgatttagctgctaaaatcatgaaaggtaaaagcggtaattaa

SEQ ID NO: 428325 - DNA, 648 bp, Serratia marcescens
atgacagccgcgccgcgtactaagtcctcgagaaagcataagacggaggtgttgggtgttctgctacctggtggcggcatcaaatacgcgaccgatcacgacagggacacgatgaaaggggtgccaacgggcactcctatcgccatgcgaccgatcggcgaccgccggaacctgaagcatcaccgcaaattctggaagctgctggagttgggtttctcgtactgggagccggattggacgttcgttagcgatccggagaagtggatcgcgcatgaggtagcgaagacactggcggcgcaggctggcgatccgctgctttatgacaatatcaccaagctgattgccgacagtgttctacagcgcgtagcggctcagcgccagcgccgctttgacgccgaagctgtgaaaacgacggaggcttatctcaatcacgtcatggttaaagccggcttctacgatctagccgctaacccggacggcggaacgttgaagcagcgttggagcattgccttcgtcaacatgagccagaagaaattcgacaaggtttatagcggcgtcgctggtgtcatctggaatgagacgctgcaacagcacttcaccgatgaacatgagatggaacagacgattagccaattgatgagtttttga

SEQ ID NO: 428326 - DNA, 666 bp, Serratia marcescens
gtgatcgatttttcaaacacgccatacgttgaggcgttggctgctcttaaggtggctccgacgcacgagctgaaagaaattggcgaccagtggtgcacgccggccccactgttttggggcatcaatgcgatgttcgggccgcttgtacttgaccttttcagtgatggcgaaaacagcaaatgtgctgcgttttacaccgcagaagataacgctctggtacagaactggtcagtgcgtttatcagagctaaagggcgccgcttttgccaatcctccgtacagcacggctaagcagcatgaaggtgaatatatcaccggcatgcgccatatcatgcgccatacccatgggatgcgagagctcggtggacgctatgttttcctcatcaagtcggcgacctcagaagtgtggtggccggaggatgcggatcatgttgcgtgcattcgtggccgcattggctttgatgtgccgtcgtggtaccggccggcagatgcaaggcaagaggcgaccagcgcaggatttggcgctgcaatcgccatatttgataaggcttggcgtggtccagcacatagctatgttagccgggaccagttgatggcgcatggtggagtgttcttggcgcagatccgtagggaagctgagcgcctggctgaaaggagtgtcgaatga

SEQ ID NO: 428327 - DNA, 348 bp, Serratia marcescens
atgatccaaaagccccaagtctccgacaaggagcgtaattgtatcaacgacgggatccgcaaaatgcgtaaggcgggccgttttgatgatgcaaatactcagctgaatagggttatcgctgcagccagcggtgccgactggcattcactccgcgatctggaaaagttgctggttcagatgttccctggagagggggatacccagacggcgatcagcgcgcgcctacgggaaatttcgccggtcgctcatgggttggtgaagcaggtccgcaccgcgcataacgacgagtccggcaaaaccacctggttctatcgccttgtgccttcacattcggaggtgcgcctgtga

SEQ ID NO: 428328 - DNA, 1083 bp, Serratia marcescens
atggcgaaaagacaggaaaagtacgacgctaacttgcctaagtatcttacgtacagaaagaagttcagatcttactattggtggaatccattaactgagaaagaaattcctctcgggaggattgctcgcaaggatgcgatagcgcaagctatagaggcaaatcattacattgaaaaagaccacactccattagctttaatggaaatattgaagaatgaaaaagagttcacactttctcattggcttgagaaatacgatgctattttaaaaaggagaaagctggcagaaaacacctataaaattcgttcggggcaaattataacaatcaaggataagctgggtaatatgccgctaaaaagtatatctaccctacatatttctgaatttcttgaaccatgggttgaagaagggaaaaacgcgatggctgcaggattgcgatctgtcatgtcagatatctttcgcgaagcaatcgttgcgggtcggattgaaaccaatccagtcgcaccgacaagagcccctaaaacagaagtcagcagggagcggctggaatatccgcagtacttaccgatccgcgaagctgcccaagcgcagccacagtggttcccgcttgctatggatcttgcgctggtaactggccagcgaagggaggacattgccaatatgcaatttacggatgtcattgatggacggctctatgttgagcagatgaaaactggaatgcagatcgccattcctctaaccctcaccctggcagcagcaggtttgactctcggcaatgtgatagagcgctgccggcggcacagtactaccaacttccttttaagtgccggcatcaggaaaaacagccctgatggctcactgcaccctgacgggttaaccaaggggttcgtgaaagcgcggaacaattcaggcataccattgagcgagaatcccccaaccttccatgaaattcggagcctggcaggccgcatgtacgagaaagagtacgggaaagagttcactcaaaaactgcttggccataccagcgaaaagatgacacagaagtacctggatacccgtagaaaggagttcattctgttgtga

SEQ ID NO: 428329 - DNA, 198 bp, Serratia marcescens
atggcaagcgggattggtggcacgctttgccgcacgcctttattaatgaagaacataatcatgagcacgatggacctttccatcatcatcggcatcctggttatgctcgccctgtggcttggcgcactcttcaacatcggtgatatcaccttgagcatttcacgtctgttccactggattgaaagccaacgcggctaa

SEQ ID NO: 428330 - DNA, 843 bp, Serratia marcescens
atggatttattcagttatctgacgctggccctgcccgatttaagcccctaccgttgtcacgtccatttcgcgtcgaaaaacaactacgacgaagatccgctgaccgagtttgaacacgacactttcgatgaatggcagtgctggcaaaagaaaaaggtattcagccgcccgtatgtggtttcgttgatccagacggagaacaagctgcgctggatgtatgcaggaacctatgagaccggcgaactgccgctcgatacggagcctgtcagtgggcgtgatgaggcctactaccgctatgcgctgacgccagtcgccgccctcagcgagtatgccggccggcttcatgtaacacgggcgccggcggccaatgcccgggtgtttgtccgacggggggaggctgtggccccgtatctggcgatcaccgacatctcccctgcccgtcgctccctggggcgctttccgggttaccgggaggtgtgcattgacatgcggaccctcggattgatcctccgggaagataaccggtcgtggatccgcgcacttactgatgtcaaggggatatacctgctgaccgatgaggaaggcgggaagctgtatgtgggtaaggcggatggctcggagggggtatggggccgctggatgagctacctccgaaccgggcatggcggcaatgccggcttgaaggaggcattcggcgatctcgcgggcccgcggttagatcaggtcaaattttccgtgcttgaggtcatggggttggactgcgaagagggggagattgaccggcgtgaggcgcactggaaacgggtattgctgacgcgccgctttggtcataaccggaactga

SEQ ID NO: 428331 - DNA, 1134 bp, Serratia marcescens
atgcacttttatgtagatgaaaccggccataccggcccgaacctttttgaccctactcagccggtgctttcttacggcgtgctttcttcgccggacgacctggacaaggttgccgaagcagggcttgctgctttgcgtaagaaactgaaggtacagcgcctgcatgccgcagaactgggcatataccgtcttggtgatgtggtcgatacgctgcttatcctgcagaagaagcaccggatgcggtttgatgtctggcaggtggttaaacgcgatcacgctatcatttcattctttgatcaggtgttcgatcaaggcatgaacccggtggtgccctggacggcctactggaccccgctgcgctacccgttgctgctgaatctggctaatctttttgatgacgagctggctgaaaaagcgtggcgcgcccgccttgagccccatgatgaacgttcatccacgcttttcagcgaggtctgtggtgtgttgcttcagcgagtcgatgctttgggtgacgcccgatcagttgaaatcattaccgatgccctgtcctgggcgatggtcaactttgacgagctgagctacaactgcaaaaccggtaagcaaaagctgcagatcatgcccaacatgattggattccagtccgtcctgcacggaatttgttcccgcctaggggcgcccaaccgcaaggccaatatcattgtggatcagcagtcgcagttcaacaccacccaacgggagctgagcgtcttttatcgccagatccgcgagcagccgtgggagctggggcccggcctgccggtgatgaacatgaagaacatgccggagaaaccgctggttttccagtccggaacccagagtgccgggctggagctggttgatatctatctgtggaccttcaagcgctttatggaggagaaagagctgactaagccgcttacccgcctggtttacaccaacctcaaaacggcacgaacggacagtgtttcgctgaactcgatcggtatccggcttaaggagttttttggaaacctaccggagccaacggcggaaatgatacaaaaggcgagtgaataccgggatcaggaagaggcgcggcgcctgaaacatcgcgtccctgccccctccctgctctga

SEQ ID NO: 428332 - DNA, 399 bp, Serratia marcescens
atgaagaagttaaacaaagtcatagtgtggtcaagcccattgatactgttgattaacatgataatactttattcttcgagcgtaatattatcgttagatctctctaaatttcatgaattgaaatatagcttttatttgttctcaatatttattactccaatcatgttggttctgtacgtggtcagcattttcaattatcgaaagaacaaatggcactcatcaacagcaatgactgtaataatggctgcaacattgatagctaatgcagtgagttttccatttgcataccactatttttataagaacgacagtattactatcgcgacattcattctgtcatccctgctcggtctctatgtctgctgggtgctttactgcaacaagaaaaacctcgcgtaa

SEQ ID NO: 428333 - DNA, 1242 bp, Serratia marcescens
atggctaacaaaccgtacattgttgtaaaccaattccacggcaacatcctggttggcgatccagcacgtgacttcacacctggtcacgttaatctgtcctattacgataaagacggaaaatatcttggcacttatggtgccaaccacgacaacagctggagtggtattctggaggaaacagagactaacaaagcacgaatgtccaagggacaagcgtggtataaccagtcttatatttatcctgaagaaaattcctttctaaaatcgtgggattacgtgcgacagggttcaataaaaaccaaaaacaaggagaaggaatacgagctatggggggggaactgtgttgattttgctacccaagctttgtgtttggttaatgaaaacttaggtaactatcttaaggatggttctgttcttaaagcctactctaaacttagagacaccgcatgtcctattgataattcacatcgacaacgtcgtagtttgcaaagtaatattgatgacttcgaaaggatttatggcgtgaaaatcctcagggttattcctgcaaatattggtagcccgttaaaactttatcgcgactcaaaattcgttaacgacagctattcaattcctagacgtcgggtaaatggagctcctgctgccgagccttcaaactatgcatgggataacgtgaaagagtttctcgttactcgaggaaccaactgcccttctagtaagaactatttggtcgcatatttaacgcttgtgtcacccattgtcatcaatctagacggacttggcattaaaaccacttctgtagtcggggcaaaagccatgtttgacatagctggttctggcgatcgatgttacacaggctggatcacacctggctctggcttcctgatttgtgataatgaaggcaccggacaggttgatagcatcaacgatatgtttggtgggatggaacggggtgaaggattctttaaactggcccgactcgacagtaacaatgatggggttattgatcaatcagaccctgctttctcaaaactgaaagtctggatcgataaaaatggagatggtattgtcgatgatggagaaatcttttcgttagccgaacttgggattgaatctctctgtgtcgaatttgacaatgtagatgaagaagacgataacggcaatatgatcggcgaaagagcatatgccgtcattaatgggaagaaacacgagatgtctgacgtgtattttaaatacttctaa

SEQ ID NO: 428334 - DNA, 522 bp, Serratia marcescens
atggagccgcaacaggaagggatctcgcgggcgttaacaccgggcgaagtcaatctggcgcgttcggtgtttggcagcaccattttctatcagaacgtcttagtccactgcgacagctacctgccgtttgggttgcagaatcagtacacggcgatgagcccgaatggggaattgtactttcgtagggctttatatcgatctgattttacggtgcatcatttggcacagcacctgtttatccacgagatggcacatgtttggcagcatcaaagaggcatgtgggtgcgtacccgtgggcttctcagttgggcggtgagctatcaatatcggctcgatcggttgctgttgcgtgagtatagtatggagcagcaagcatcgataattgcagactatttctatctcaagaagtttggcgttagcgattttatcggtttatacggtaggaattactcagggatagtagacagaagtacattgtcaaaatttcaacccataatcagaagcgcaggactgccactatga

SEQ ID NO: 428335 - DNA, 990 bp, Serratia marcescens
atgactatttcacctgacgagttaatggattgcttaaaactcaaagaaaaagagttggatataatcattggtgggccaccttgccaaggtttttcatcacatagaataaaaaatgctggtgtaaatgatccaaggaacgaattgttaattcgttactatgactttgttaaaatatttcaacccaagatattccttgttgaaaatgtgccgggtttactttgggaaaagcataaagtctacttaaataacttcaaaatgcttgcggctaatagtggttataaaatagtcgggccattaaagctgaatgcaaaagattatggagttcctcaaaatagaggccgggtatttatcttgggtcttagagatgacatttctctcaacgaaggtgattggccaccacctccaactcattttaaagataaaacccctcattggattaatgcttctgagatttttgaaaaaccatcaccatcggtttttgaaagaattagtgttgttttaggtcaagatgtcactcagacattaaaattcaaaagtccccttaaagaggataagagtgacccgaataatgtacacatgaaccatgccgactatatgattgaaaggttcaatttaacaccaattaatggtagtcgggaagatgttgattttagattaccatgtcattctaatggatattcaggtcatacagatgtttatggtcggataaggttgtcaatgccaggcccaactataactactggttgttttaatccctcaaaaggacgtttcctgcatccgtgggataatcatggaattaccgtgagacatgcggcacgatttcaaacattccccgatgattacattttttctggtggcatcattagtcaaggtaaacaggttggaaatgctgttcctgtgaatctagggaaaattcttctgaaatcttgtattgaaataataagcaataactctcaaagggatgataaaaatgcagatgagatctcttag

SEQ ID NO: 428336 - DNA, 876 bp, Serratia marcescens; identical to SEQ ID NO: 100946

SEQ ID NO: 428337 - DNA, 1371 bp, Serratia marcescens; identical to SEQ ID NO: 100945

SEQ ID NO: 428338 - DNA, 1695 bp, Serratia marcescens; identical to SEQ ID NO: 100944

SEQ ID NO: 428339 - DNA, 711 bp, Serratia marcescens; identical to SEQ ID NO: 100943

SEQ ID NO: 428340 - DNA, 591 bp, Serratia marcescens
atgatgaacagtttatctcaggctgccaacggattgctgatgcagctggttatggatctcagaagtggctatctgcgccgctgcgaatcgctgggactgaaccgcgaggaaatgcagatgctgcaggggctctcgctcgaagagcttcactacctttccggcagtgaggtgtcgatcatcagtgtgggcatcaatcacggcaatctggtgcgcatgctgcagcaggcccggacggaacagaaacgactccagcgtatcgatcgggcgctggcgctgggcggctccattgaactgatggccaattacttcgggctctccagtacggacgtggcggcccgccgtcgtattgccggtatcgatgtccggccggggcgcggtaacgcactgggtgatgaggaaaacgccgccctgtggcgtcagtggcaaaagtccggcgttgaagatgcggaaagtgctgacgggctggacgtaatgatgctggctgcagaacagatgaacgtctcgctgacgtccgtctggcatgccgtccgcggctggcacaaaacccggcagccttctccggcacgaacgccggtaaggaagacggcatga

SEQ ID NO: 428341 - DNA, 249 bp, Serratia marcescens; identical to SEQ ID NO: 100941

SEQ ID NO: 428342 - DNA, 1239 bp, Serratia marcescens; identical to SEQ ID NO: 100940

SEQ ID NO: 428343 - DNA, 714 bp, Serratia marcescens; identical to SEQ ID NO: 100939

SEQ ID NO: 428344 - DNA, 555 bp, Serratia marcescens
atgattcgccctgtgttcctcctcacctccttctttttactgagcggatgcgcaacaacggactgggctgcgattaataaacaggtcagcgataccgctgcgaacctgacaaaaacgttaggcggcaacgacagcggagaaagtggcgggatgccgctgatgagcccggcggggcaacaggccatgcagtccgtcgataaaacgttctccgtgccggtcgatgtggataccgcggcggcccgcctgaagcgccattacaaatttatctccacacaggagcttgaggcactgcggcaggccgcaaatgacggggactggaaagcggcggcagaagatgatgcgcatcccgtctgggacgccatgccgggcagctactacaaaatgggctccgactggaacggacgtgatcacctggatatcgaaatcgagaaaaacgggtccggcagcaggctctatgttgtctatcgctcatcatcatcacagcgtctggccgggtccggcgtcacgaagctgatgaatgatgtccgcgctgttgcggcgggggaaaaacgctga

SEQ ID NO: 428345 - DNA, 2022 bp, Serratia marcescens; identical to SEQ ID NO: 100937

SEQ ID NO: 428346 - DNA, 471 bp, Serratia marcescens; identical to SEQ ID NO: 100936

SEQ ID NO: 428347 - DNA, 537 bp, Serratia marcescens; identical to SEQ ID NO: 100935

SEQ ID NO: 428348 - DNA, 438 bp, Serratia marcescens
atgggagcacgttacgattcagacgttgttgcctgggccagtgaacaggcagctttactgcgtgccggaaagctcagtcagattgatattgagaacatcgccgaggagattgaagacgtgggcaaaagtgaaaagcgtgagctggccagccgtatggctgtcttactggcctaccttcttaaatggaagtttcagccaacccatcgaggtaaaagctgggagttaaccattaaaggtcagcgtgatttgattgtacgacgtctgaacaagacgccgagcctgaaaagcgcgttttctgatcctgaatggcttgcggatgtgtggtttgacgcccgcgccgatgcttccaaagaaaccggcataggtctggatatctttcctgaagacagcatctggacaacagatactattctcagtaacgagttttacccggactga

SEQ ID NO: 428349 - DNA, 666 bp, Serratia marcescens; identical to SEQ ID NO: 100933

SEQ ID NO: 428350 - DNA, 759 bp, Serratia marcescens; identical to SEQ ID NO: 100932

SEQ ID NO: 428351 - DNA, 723 bp, Serratia marcescens; identical to SEQ ID NO: 100931

SEQ ID NO: 428352 - DNA, 636 bp, Serratia marcescens; identical to SEQ ID NO: 100930

SEQ ID NO: 428353 - DNA, 534 bp, Serratia marcescens; identical to SEQ ID NO: 100929

SEQ ID NO: 428354 - DNA, 573 bp, Serratia marcescens; identical to SEQ ID NO: 100928

SEQ ID NO: 428355 - DNA, 489 bp, Serratia marcescens; identical to SEQ ID NO: 100927

SEQ ID NO: 428356 - DNA, 2100 bp, Serratia marcescens; identical to SEQ ID NO: 100926

SEQ ID NO: 428357 - DNA, 759 bp, Serratia marcescens; identical to SEQ ID NO: 100925

SEQ ID NO: 428358 - DNA, 348 bp, Serratia marcescens; identical to SEQ ID NO: 100923

SEQ ID NO: 428359 - DNA, 243 bp, Serratia marcescens; identical to SEQ ID NO: 100922

SEQ ID NO: 428360 - DNA, 387 bp, Serratia marcescens; identical to SEQ ID NO: 100921

SEQ ID NO: 428361 - DNA, 357 bp, Serratia marcescens; identical to SEQ ID NO: 100920

SEQ ID NO: 428362 - DNA, 660 bp, Serratia marcescens; identical to SEQ ID NO: 100919

SEQ ID NO: 428363 - DNA, 951 bp, Serratia marcescens; identical to SEQ ID NO: 100918

SEQ ID NO: 428364 - DNA, 1500 bp, Serratia marcescens; identical to SEQ ID NO: 100917

SEQ ID NO: 428365 - DNA, 411 bp, Serratia marcescens; identical to SEQ ID NO: 100916

SEQ ID NO: 428366 - DNA, 2859 bp, Serratia marcescens
atgctttcactgtttacgcgtaataaatccaccgaccggcagacgccggttgatgacggccagtccgttcaggcagatgaaaccctgaccgcggccgtgaagggccggcaacctctgaagcgccccgggaaaatgacgcgccaggatgaggagaaggtttatcacgccaatccgtccatcattgactttttgccctgggcagaatttctcgatgaagagcagtgtctcctgcttgatgacggcgtgtcggtgggggccgtttatgatgtgacaccggtggcgaccgaagggcgaaccgaagagcgcctggagcagatccgggactcggttgaggatgcacttcaggacagctttgatgaacatgacgtgaatccctgggtcgtgcagttcttctgccaggacgaggacgacactgacgcgtacctggacaggctgcgcgggtatgtcaaaccacatgcacagcgcacggcgtttaccgacgcctggctgggtgaaatggagcgccatatccgcagtatctcccggcctgagggactttttactgactcgctgattaccggccagccgtggcgcgggcagcagcgccgcacccggatggttgtttatcgctggcttggtaaaagccgggatccgatgccgccggtggcgatgctcaatcaggtgtgtgaccgggtcgttaatgccctgggcggggcggggatccgctgcacccggcagaacggcctgcaggtgcatggctggctgctgcggctgttcaatccgtcaccggactgggtggagaaaaccacgctctatcggcaggctgcttacgcagacccgcgcgagacacctgaaggcaccgtgccggtcagcaatgattttgccgaaaccctgtggttcacgccgccggtttcagacccggaaaacggcgtgtggtggattgacaacaagccgcactgcgcggtggcggtggaaaaactgcgtacaccgccggagccgggcaccctgaccggcgagaaaagccggggtgaaaagaaaattaatgccctgatggatatgtttccggaagggaccatggtgtgcatgaccgtggtggtacagccccaggaccggcttgaagagcagtttaaccggctgtcgaaaaatgcggtcggtgagaataccgagtcgggccgcgtccgccaggatgtgaagacggtcaaagagtatctgggcaaccggcacaagctgtaccgggcggggatcaccttcctgctgcgcggcgacgacatgaccagcctgaagcgcaagcggctggagctgtccaccgtattgctaggggccggtctgcagccggtacggccggagtttgaagaaggtccgctgaacagctggctgcgggcgctgccgatgtgctttaacccggacagcgacaaaaaacactggtatacccgtctgacatgggttcagcacctggcaggacttttgccggtaaccgggcgggaaaccggcacggggcatcccggcttcagctttttcaaccgcggcggggatacccttacattcgatccgctcaacaagctcgaccgcacccagaacgcgcatctgctgttgttcggcccgaccggggcgggcaagtcggccacgctgtgtgccgcgctctcccagctgatggccgtccatcgtccgcggctgtttattgcggaggccggcaactcgttcggcctgctggccgacttctttgacagcctcgggctgacggtgaataaaatcagcgtcaaacccggaagcggcgtcagtctgccgccgtttgctgatgctcacaaactggtggaagaaggcctggccgcccaggccgtggatgagagcgacctgcctgatatcgacacggacgacgatggcgaggatgacaagcgtgacgttctcggtgaaatggaaatctccgcgcgcatgatgatcaccggcggcgacccgaaagaagaggctgaccttaagcgtgccgacagggcgatgatacgtgaggcgctgctgatggcggcacatgctacgtataaggaagggcggcagatgctgccgtctgacctgcagaaggcgctgtacgacattgcctctgacaacgatgagggcgtcatcaatgtccgcaatgctcagcgcaaggcgaaagcggcggaaatggcggaatccctgggcatgttcactcaggccgggagctttgaagcggagctgttcaaccgcgaaggggagctgtggccggaagcggacgtgacgctggtcgacctggggcatctggcgcgtgagggttacgaggcgcagatggccctgaccatggtctcgatgaccaacatgatcaacaacatcgcggagcgtgaccagttcctgggccgggatattgtcttcacggtggatgaggcgcatatcgtgacggtcaacccgctgctgtcgccctacatgacgaaggtggtcaagatgtggcgtaagctcggtgcctggctgtggctggccacccagaaccttaaagactacccggatattgccgaaaaaatgctgaacatggcggaatggtggatttgtctgaccatgcccccggaggaggtcaaagatatcagccgtttccgcgcgctcacgccggagcaggaatcggtgctgctttccgccagtaaactgtcggggtgttatacggaaggcgtggtgctggcgaaacggatcgaagcgctgtttcgtgccgtgccgcccagtctcttcctggcactgggcatgacggaaaaagaagagaaagccgaacgccgggcgctgatgaatgaatttcactgcagcgaactcgaggcggcaaaacgcgtcgcgcagaatctggaccgtctgcgcggtctgacggataaacaacaggagcctgccacggtatga

SEQ ID NO: 428367 - DNA, 378 bp, Serratia marcescens; identical to SEQ ID NO: 118217

SEQ ID NO: 428368 - DNA, 660 bp, Serratia marcescens; identical to SEQ ID NO: 100913

SEQ ID NO: 428369 - DNA, 399 bp, Serratia marcescens; identical to SEQ ID NO: 100912

SEQ ID NO: 428370 - DNA, 993 bp, Serratia marcescens
gtgaatacaaaaccttcccgcatcagaaccacagtgtgctcgctggcggttgccacggtactgggtacggcaaccgcgccggcagctgttgcagcacttaacacggcgcagattattgccagcgccgtatcgcaaaactgtatcagctggcgtgtcagtggcatctgttactggctgttctgcaccccctttggctgcaaggtgcgcacgtcggtcaaagtcacccacttcattcctcaggcagtcgtttcgacctatgtcgcgccgggcggcaacccgtggcaggaaatggcgtttgtcagccagaccgccggcgggctggaaagtgccgtgaccagcgggctttccggtgtttctgccggaggagccaatccggcagacatgaaaaatcccggccagcgcaagtccgccgtgcgtttcaagtatgccgatgcgattggccacccggccacctccctgattggcggcagtattccgggctattcctgtgataccgcagccaccccgttaatgccttacttcctgagtacgctggattcggcggcctggcgcacgggcgtaccggagtccctgtatccggaagcgcttgtgcccggccagcgggaaatcggcagtcaggcagcagccaatatgtggggcaacatctatccccgttcggggtttatcagccagaccgatgatgacaaagcctctgccgtggtggcgcagcgtgtggcagacattatcacccgcgccgggcagccccatgtttatcaggtgctccagggcagccatcatgacgggtactggccaccgggcgaagtcacggaaaacaccggcacgcgcaatcacaaatggcagcggctggctccccacatgactcagtcatgtgccgtcttcccggacgggagctataccgccgcgagcgataacaatgaagcctttgcgttctggcagccctacagctgctgcaaaaagcgcgggcagaaatttttgggcagcactgatatctga

SEQ ID NO: 428371 - DNA, 1476 bp, Serratia marcescens
atgaggaaaaccgtgaaaaaaacaccttcattttcagccgttcgcttaagcctgctgctgaccggctcactgctgactgtcctcccgggcgcgcacgcggccgatgatgacaataccatcctgggcatgtccctgccgcaggtgaacaacagcgccatcggttacggcaagtccgtcgatggtgcggtgtcggacaaactgttctacaccctcggcggcggctcggtcatttcccagccggccacgcgcggcaatatgcagaagctggggctgaataccggctggagcagtgacctgatgtgcggcaattttgatctgaaaaccacagtcggcaaccagctcaacggcgtcacatcaggctttaaaaacctgatgggcgacgtgattcagggggccaccggcgcggtggccagtctgccggcgatggtcattcagcgggctaaccccggtctgtatgacatgctcaccaacggcgtgcttcaggccaatgtgtcattcgacaaggcgcaactcaactgccagaacatggcgaaaaaaatgatggacttcagcgacagcagtaactggacgcagcaggccatgatggatgagtacaaatccatcgtaaacagcggtgatgctgacgcagttcgtgttgatgacgcaggtcgcaaggccagcggcgcgtcaggtagtaactgggttggcggccaaaaacgtgggggggcggggcagcccgcgatacgtgtcacccatgaccttgtcgctgccggctacaacatgatgaacggtctgcccgtcacgtctgattcgaccgtgggcgaaagcagctgtaacggtggcgcatgctctaaattcggcagcgcggaagaggcggcggccatgaccgtgaaggtgctgggcgatcgctcgatgcgcacctgtgccaacgcgagtgaatgtaccagcggtgatgcggatgaccagcccggtacgaccgttgccggcaccggttttgccccactgctggaagaggcaaccaaagccaacgctgagcagctggtcaggctcgtcaacggtacggaaaagcccacggccgcgaatctggcgaagctgaaaactggcggactgccggtgacggccggcgtgattaaagccctgcagcgtgatccggataacgcggccctaaccgcccgccttgcaggcgaactggccatgtctgacacggtggaaacggcgctgctgatgcgtcgcatgatggttaccggtatgtcggagccgaatgccgctgcccagccaaaggccattgataccgccggccagcgcattgaggcgctggatcgggaaatcgcggcgctgaaaaacgagatggagatgaagcgcgaactgtcacgtaattctgtgctgaccattatcgacagggagaatcagcgcgtcgaaaccaacccgcagacccagtccgatgacaataccgacagtcgcttcaaccagatggcagcgccgcagtcggctgaatga

SEQ ID NO: 428372 - DNA, 339 bp, Serratia marcescens; identical to SEQ ID NO: 100909

SEQ ID NO: 428373 - DNA, 1521 bp, Serratia marcescens; identical to SEQ ID NO: 100908

SEQ ID NO: 428374 - DNA, 516 bp, Serratia marcescens; identical to SEQ ID NO: 100907

SEQ ID NO: 428375 - DNA, 1272 bp, Serratia marcescens
gtgttcgccctagtcgatgttaactcattttacgcttcctgcgagacagttttcagaccagatctccgtggcaaacctgtggtggtgctgtctaataacgatggctgcataatagcccgttcctcagcagcaaaatcacttgggttaaaaatgggcgatccctggttcaaggttggtcgtgaggctgagaaaaagggtgttgtagcattttcaagtaattacagcttatatgctgatatgtcagacagagtgatgactattttgcagttactgactccgcgtgtggaaatttacagtatcgatgaagctttttgtgatcttacgggtatgcgtaatctgttatcgcttgaggtgtttggccatcagatacgtgatcagattaagcgaagaacacatctgactgtgggagtgggaataggccctacaaaaacgctcgccaaactggctcagtatgcaagtaagcgctggcccgcaacgcgaggtgtggtagatctcagtgacagacagcgtcagcgtaagttaatggctttagtaccagttgaggaggtctggggtataggacggcggctgggtaaaaaattacagtttatgggcattaacaatgcacttcagctggctgagctgtcgccttcattcattcgtaaacagttctcagtagttgttgagcgcacggtcagagagctgaacggtattccttgcctcggtttagaagaatttactgccccaaaagaacaaatcatatgctcccgatcttttggagaaaaaccgtcggacgaagtcagcctgcatcaggccatttgcgctcatgctgaacgtgcagcagaaaaactccgtgcagagcatcaattttgtaaacgggtagcagttttcatcagtaccagccctttctcagaaaatgaggtgttttataagaatcaggcggtaacagagcttgctgtacccgctcaggattcacgggatatcattaacgcggctataaaggcatttgatacgatatttgtaccagggcaccgttatcatcgtgctggcgtgatgctcactgatttccgaagcgctgccgtatctcaattgaccctttttgatgactttcagcctcatcgtaacagcgaagagctgatgacattaatagacagcattaaccattcaggcaaaggctctgtttggtttgcagggcaaggtattaaagatgcatctatgggctggaagatgcgcagagaaaggctttcccccgccttcacgactaagctaagtgatataattaaagtgaagtga

SEQ ID NO: 428376 - DNA, 699 bp, Serratia marcescens; identical to SEQ ID NO: 100893

SEQ ID NO: 428377 - DNA, 900 bp, Serratia marcescens; identical to SEQ ID NO: 100892

SEQ ID NO: 428378 - DNA, 618 bp, Serratia marcescens; identical to SEQ ID NO: 100891

SEQ ID NO: 428379 - DNA, 279 bp, Serratia marcescens; identical to SEQ ID NO: 100890

SEQ ID NO: 428380 - DNA, 633 bp, Serratia marcescens
atgccggatgacgatgtgctgaaggaagcaactgaaagcctgggggtgttgccagagactggtatggaaagggctaaaggcattgttctggtagaaggaaagtcggatgtcactttcctgaggcatgcggccagttcatttaaacaatcaggtgtgctgccagcctctcttgaggacgtgaaaattgtgccagtcctcataggaggatgcgggagcgtcaaacactgggttaccttaaatctggccaacgatctggggcttccctggtgcgtatttctggactccgatattgggggagaccctgcacaggttctgtccattcagaaacgtaaaaaagaagtggaggaagccggtaaggtattcttcgccacgcgcaaacgtgaaatagagaactatctctgcccggatctgatcgaagaaattaccggtgtagcagtcacgtttacggacacctgtgacgctaaaaaaataatcggccgggctgtgggaatgaaacccgataatgtgcttgataaattctggccccagatgacagcggaaagaataatctcaagatcaacctatcatgacggaacgcaggaaagaattgaactgattgagatcctgagcgacattatttccatgacgagataa

SEQ ID NO: 428381 - DNA, 351 bp, Serratia marcescens
atgaaaatcaaaaacaccctttttgttatattaatgttatccctgccagcaatttctgccgaacattcggaaatgaaaatgtcagatatgcactcatcggcatcgtcacaggaatatatggctggcatgaaagacatgcatgaaaaaatgatggccgccgttaatgagcccgatcccgataaggcctttgcaaaaggtatgatcgcacaccatgaaggagcaatagcaatggctgagaccgagcttaaatacggaaaagatcccgaaatgagaaagcttgcgcaggacatcattaaagctcagaaaggtgaaatcgagcagatgaataaatggcttggcagtcaaaaataa

SEQ ID NO: 428382 - DNA, 432 bp, Serratia marcescens
atgaaaaatatcgtattagcatctttgctgggctttggtttaatttcttcggcctgggccactgaaaccgtgaatatccatgagcgcgtcaacaatgcacaggcccctgctcaccagatgcagtctgctgcggctcctgtcgggatccaggggactgctccccgtatgaccggtatggaccagcatgaacaggccattattgctcatgaaaccatgacgaacggatcggcagatgcgcaccagaaaatggtggaaagtcatcagaagatgatgggaaataacacagtatccacgaccgtcccttcaacgtcttacgcggcgatggatgagcatgaaagagcagcggttgcccatgaattcatgaataacggtcagtccggcccacatcaggccatggccgaagcgcaccgccgcatgatcaatgtaggctga

SEQ ID NO: 428383 - DNA, 1476 bp, Serratia marcescens
atgcatagcaaaccttccagacgccctttctcactcgctctgcggctgaccttttttatcagcctgtccacgatactggcttttatcgccttcacctggtttatgctgcattctgttgaaaatcattttgccgagcaggatgtcagcgatcttcaacaaatcagcaccacactgaaccgtatactgcagtccccggtggatccggatgataaaaaaataagcaaaataaaggaatcaattgccagctaccgcaacgttgcccttttgctcctcaatcccaggggtgaagtgctctttagctcagctcagggggcggcactacgcccggcagtgaattcagcagattttagcgagcacagccgcgcacgggatgtctttctctggacggtggaggatcctgcgggaccgatggataccgggtccgaaatgaagatggaaacatacaggattatcgcctcctctggtcaggcgatatttcagggcaaacagcagaactatgtcatgctgactggcctatccattaatttccatctccattacctcgatgcgctgaaaaagaacctgattgcgattgccgtcgtgataagcctgttgattgttctgatcattcgaatcgctgtccgtcaggggcacctgccccttcgtaatgtcagcaatgccattaaaaacatcacctccgagaatcttgatgcgcgactggaaccgacacgcgttcccattgagctggagcaactggttatctcgttcaatcatatgattggaaagattgaggatgtctttacccgccaggccaatttctctgccgatatcgcgcatgagatcagaacgcccatcaccaatctggtgacgcagactgaaatcgcactgagtcaggatcgaacacagagggaacttgaggatgtcctctattccagtcttgaagagtataaccggatgaccaaaatggtcagcgatatgctgttcctggcacaggcagataataatcagctgatacctgacagggtcatgtttgacctcagagcggaagtcatgaaagtcttcgagtttttcgaagcctgggccgaagaacgcaatatcacgctcaaatttaacgggatgccctgtctggtcgagggagatccacaaatgtttagaagagcgatcaataatctgttatccaatgccctgcgttatacccctgagggacaggcaatcaccgtctcaataagaaaacaggggagcttttttgaccttgtgattgaaaatccggggaaaccaatccctgaagagcatttatcaaggctgtttgaccgtttttatcgggtggatccgtccagacaacgaaaaggagaaggcagcggcatcggtcttgcgattgtgaagtcaatcgtggaagcacatcacggaagagtgcatgtggaatcggatatacgctcgacacgttttattttatccgtacccagactggagaaaatgattccggatccccaacactga

SEQ ID NO: 428384 - DNA, 681 bp, Serratia marcescens; identical to SEQ ID NO: 117745

SEQ ID NO: 428385 - DNA, 1386 bp, Serratia marcescens
atgttcaaattaaaattactcagcattagcacgatattcatcctggcaggctgcgtgtcgcttgcgcctgaatatcagcggcccgcagcaccggtaccccagcagttttcactgtcccataacagcctgacgccagcggtaaatggctatcaggatacgggctggcgtaacttttttgtcgatccccaggttacccggttgatcggtgaagctctgactaataaccgtgatttgagaatggctgccctgaaggttgaagaggcccgagcccagttcaacgtcacggatgcagatcgttacccccagctgaatgcctcatccgggataacatacagcggtggtctgaaaggtgacaagccgaccacacaggagtacgacgcgagactggagctcagctatgagctcgattttttcggcaaacttaagaacatgagtgatgctgaccgccagaactactttgccagcgaagaagcccgtcgggccgtacacatcctgctggtctccaacgtttcacagagctatttcagccagcaactggcgtacgaacaactccgtattgcgcgggaaacgctgaaaaattatgaacagtcctatgctttcgttgagcaacagctcgtgaccgggagtacgaacgttctggcacttgaacaggcgagaggacaaatcgaaagtacccgcgccgaaatagccaaacgagaaggcgatctggctcaggcaaacaatgccctgcaactggtgctgggaacgtaccgcgcacttccgtcagaaaaagggatgaaaggcggggagatcgcaccagtaaaattgccaccaaatctatcttcacaaattttgctgcagcgaccggatattatggaagcggaatatcagctgaaagcggctgatgccaatattggcgcagcgcgagcggcctttttcccctccattaccctgaccagtggtctttccgcaagcagtacggagctgtcaagcctgtttacgtcaggaagtggaatgtggaattttatccctaaaattgaaattcctatttttaatgctggcaggaataaagccaatctgaagctggctgaaattcgccagcaacaatcggtggttaattacgaacaaaaaattcagtcagcctttaaggatgtttccgacacgcttgcgctgcgcgacagccttagccagcaacttgagtcacagcagcgttatcttgattcacttcagataactctccagcgtgccagaggattatatgcaagtggtgctgtcagttacatcgaagtgctggatgcagaacgttccctcttcgctacgcagcaaaccattctcgatcttacctattcccgacaggttaacgaaattaatctgtttaccgcgctgggtggcggttgggtagagtaa

SEQ ID NO: 428386 - DNA, 354 bp, Serratia marcescens; identical to SEQ ID NO: 19861

SEQ ID NO: 428387 - DNA, 1086 bp, Serratia marcescens
atggatatggacctggtgccaaaatatgctgatgaaagcggcgataaaagcagtggcgggatccgtatcgatccaacgcaggttcagaatctgggattaaaaacgcaaaaagtcacgcgaggaatgctgaattattctcagacaatcccggctaatgtcagttacaacgagtatcagtttgtcattgtgcaggcgcgctctgacggtttcgtcgaaaaagtgtatcccctgacgattggcgatcatgtgaagaaaggcactccgcttatcgatatcaccattcctgaatgggttgaggcacaaagtgagttcctgctgttatccggtacaggcggtacgtcaacccagataaaaggggttctggagcgacttcgtctagctggtatgccggaagaggatattcaaaggctgcgttcaacccgcacaatccagacccgttttaccattaaagcacctattgatggtgtcattactgcgtttgacctgcgcaccggaatgaatatttcgaaagataaagtagtggctcagattcaggggatggacccggtctggatcagcgctgcagtgccagaatctatcgcatatctgctgaaagatacgtcgcagtttgaaatttcggtaccggcttatccggataaaacattccatgtcgaaaaatggaacattcttcccagcgtggatcagacaacccgtacgcttcaggtccgtctccaggtttctaataaggatgagtttctcaagccgggcatgaatgcctatctgaaactgaataccaagagccaggagatgctgctgataccaagccaggccgttatcgataccggcaaagaacagcgcgtgattactgttgatgatgaaggcaagtttgtgccgaaacagatccacgttctgcatgaatcacagcaacagtccggcattggctccggcctgaatgaaggcgataccgtggtggtcagtggcctgttcctcattgactccgaagccaatattacgggcgcgctggaacgtatgcgccaccctgaaaaaacagaaaacagtatgccagcaatgtctgagcagcctgtaaatatgcattcagggcactga

SEQ ID NO: 428388 - DNA, 3147 bp, Serratia marcescens
atgattgaatggattatccggcgctctgtcgccaaccgtttcctggtcatgatgggcgcactgtttctcagcatctggggcacatggacgataattaacacgccggtcgatgcgctgcctgacctgtcagatgtgcaggtcattattaaaaccagctatcccggacaggccccgcagattgtagaaaaccaggtcacctatccgcttaccaccaccatgctgtccgtacctggcgcaaaaaccgtgcgtggcttttcacagttcggtgattcgtatgtgtatgtcatttttgaagacggcaccgatctgtactgggcccgttcgcgcgtgctggaatacctgaatcaggttcagggcaaactgcctgcgggtgtgagctctgaaatcggcccggacgccacgggagtgggctggatatttgaatatgcccttgtcgatcgcaacggaaaacacgacctttcagaactgcgctctctgcaggactggttcctgaaatttgagctgaaaaccatcccgaacgtggctgaggtcgcttcggttggcggcgtggtgaaacagtaccagattcaggtcaatccggtaaaactgtcccagtacggtatcagcctgcccgaagtgaaacaggcacttgaatcgtctaaccaggaggccggtggctcatccgttgaaatggccgaagcggagtatatggtccgtgccagcggttatcttcagagcattgatgattttaataacatcgtcctgaaaacaggtgagaacggcgtgccggtttatctgcgggatgttgcccgcgtgcagaccgggcccgaaatgaggcgtggtattgccgagctgaacggccagggagaagtcgctggcggcgtggtgatcctgcggtcgggtaaaaatgcgcgcgacgttatcacggcagtgagggataaactggagacgctgaaggccagcctgccggaaggcgttgaaatcgtgaccacctacgatcgcagccagttaatcgaccgggcgattgataacctcagttccaaacttctggaagagtttatcgtggtggccatcgtctgtgctctgttcctgtggcacgtacgttctgccctggtggcgattatctctctgccgcttggcctgtgtatcgcctttatcgtcatgcacttccagggactgaacgccaatatcatgtcgctgggagggatagcgattgccgtcggtgcgatggtggatgccgccattgtgatgattgaaaatgcgcacaaacggcttgaggagtgggatcatcagcatccgggtgagcagattgacaacgccacccgctggaaggtgattaccgacgcctccgtggaagtgggacccgcgttgttcattagcctgctgatcatcaccctgtcctttattcctatctttaccctggaagggcaggaaggtcgtctgtttggcccgctggcattcacgaaaacgtactccatggcgggagcggccgcactggccatcatcgtcattcctattctgatgggattctggatccgggggaaaattcctgccgagacaagtaaccccctgaaccgggtgctgatcaaagcgtatcatcctttgctgctgcgggtcctccactggccaaaaacaaccctgctggttgcggccttgtccattttcacggttatctggccactgagtcaggtgggcggtgaatttctgccgaagattaacgagggcgatctgctgtatatgccgtcgaccttgcctggcgtctctccggcagaagctgcagcgctcctgcagacaacagacaagttaatcaaaagcgttcctgaagtggcttctgtatttggcaagaccggtaaagcagagaccgcaacggattccgcgccgctcgaaatggtggaaaccacgatccagctcaaacctgaggatcagtggcgtcccggcatgacaattgacaagattattgatgaactcgacaggacagtccgtttaccgggtctggcaaacctctgggtgccgcctatccgtaaccgtattgatatgctctcaaccgggatcaaaagcccgataggtatcaaagtgtccgggactgttctgtccgatatcgacgcgacggcgcagagtatcgaggcggtagccaaaaccgtgcctggcgtggtgtctgtcctggctgagcgacttgagggcgggcgctacatcgatatcgatatcaaccgggagaaagcctcccgctacgggatgacggtaggtgatgtccagctgttcgtctcttcagcaatcggaggtgctatggtgggtgagacggttgaaggggtggcccggtaccctattaacattcgctacccgcaggattaccggaacagtccgcaggcgctgaaacagatgccgatcctgaccccgatgaagcagcagatcacgctgggcgatgtcgcggatattaacgtcgtttctggaccaaccatgctgaaaaccgaaaatgcccggccagccagctggatttatgttgatgcccgcggcagggacatggtgtcggtggttaacgacattaagacggccatcagcgagaaagtgaaactgagaccgggaaccagtgtggcattctccggacagtttgaactgcttgagcatgccaacaagaaactgaagctgatggtgccgatgacggtgatgatcattttcatcctgttgtatctggcattccgccgggttgacgaagccctgctgatcctgatgagcctgccgttcgccctggttggcggaatatggttcctgtactggcagggcttccatatgtcagtggcgaccggaaccgggtttatcgccctggccggggtggcagcagagtttggcgtggtcatgctgatgtatctgcgtcatgccattgaagcgcacccggaattgtcccgtaaagagacgttcacaccggaaggtcttgatgaagccctctatcatggtgccgtactgcgtgtccggccgaaagccatgaccgtggcggtgatcattgcgggtctgctgccaatactctggggaaccggcgcaggttcagaagtcatgagccgtattgctgcgccaatgattggtgggatgatcacggctccgctgctgtccctgttcattattcctgccgcctacaaattaatctggctgcgcagacataaaaaaagcgtgtcataa

SEQ ID NO: 428389 - DNA, 441 bp, Serratia marcescens; identical to SEQ ID NO: 97789

SEQ ID NO: 428390 - DNA, 2442 bp, Serratia marcescens; identical to SEQ ID NO: 97790

SEQ ID NO: 428391 - DNA, 198 bp, Serratia marcescens; identical to SEQ ID NO: 97791

SEQ ID NO: 428392 - DNA, 738 bp, Serratia marcescens; identical to SEQ ID NO: 97792

SEQ ID NO: 428393 - DNA, 1818 bp, Serratia marcescens; identical to SEQ ID NO: 382973

SEQ ID NO: 428394 - DNA, 897 bp, Serratia marcescens; identical to SEQ ID NO: 382972

SEQ ID NO: 428395 - DNA, 915 bp, Serratia marcescens
atgattgttattcgttttcttctttatctggatttgatggtaatatttggattgccattttttcagatatatggaataagcggtgtcagacatgaaacctataacctgactaatttcaggtcgtttataacctttgctgttgttacaggcatcattcttactggcattaatatgctcctggtatctaatgccatgagtggagtaactgacctcagagaattatccatccatgttatcgagatggtgatagaagaaactgatgtgggtattagctggattgtcaggctctgtgccctgtttaccacactcggtgctttgttcctttacactaataagagagtattgtcctgcctgctgatgacgatgagtgggggcgtggcgctggctacacttgcctggggaggacacgccgttatgcatgacggtctgcattactatctccatttactgagcgatctgacccatctcggcgctgcaggtgcctggacaggtgctctggttgcatttgctatcctgctgatgcgcagaaacgagcataatgcacagagcgtcattgtgatatctgactccctggcaaaatttgccacggcaggaacggtgattgttgtagccctgatcctgagtgcgctggtcaactatctgtatattgctgagggtaacttaactcccttattcaacagttcctgggggaggatattgcttgccaagacggctctgtttgttctgatgcttcttctggctgcagcaaaccggtttcacctgggtccccggcttgaagttatggtcagggaagggaattatgatcgcagcgttgccctgatgcgaaacagcatcctgacagaattcgttgttgcgattatcattctgggcgccgtagcgtggctcggaatgcttgctccgtctcaggtcagctag

SEQ ID NO: 428396 - DNA, 681 bp, Serratia marcescens; identical to SEQ ID NO: 19849

SEQ ID NO: 428397 - DNA, 1401 bp, Serratia marcescens; identical to SEQ ID NO: 382968

SEQ ID NO: 428398 - DNA, 270 bp, Serratia marcescens; identical to SEQ ID NO: 129772

SEQ ID NO: 428399 - DNA, 552 bp, Serratia marcescens
atgccgggcaaccgcccgcattatgggcgttggcctcaacacgattttccgccatttaaaaaactcaggccgcagtcggtaacctcgcgcatacagccgggcagtgacgtcatcgtctgcgcggaaatggacgaacagtggggatacgtcggggctaaatcgcgccagcgctggctgttttacgcgtatgacaggctccggaagacggttgttgcgcacgtattcggtgaacgcactatggcgacgctggggcgtcttatgagcctgctgtcaccctttgacgtggtgatatggatgacggatggctggccgctgtatgaatcccgcctgaagggaaagctgcacgtaatcagcaagcgatatacgcagcgaattgagcggcataacctgaatctgaggcagcacctggcacggctgggacggaagtcgctgtcgttctcaaaatcggtggagctgcatgacaaagtcatcgggcattatggaaggtgcgaacaagttcctgatatgagatcatcatattcatccggagcgcatcccagagggacatcatga

SEQ ID NO: 428400 - DNA, 981 bp, Serratia marcescens
atgagccatcaactcaccttcgccgatagtgaattcagcactaagcgccgtcagacccgaaaagagattttcctctcccgcatggagcagattctgccatggcagaatatgaccgctgtcatcgagccgttttatcccaaggcgggcaatggccgacggccctatccgctggagaccatgctgcgtattcactgcatgcagcattggtacaacctgagcgacggtgccatggaagatgccctgtacgaaatcgcctccatgcgcctgtttgcccgattatccctggatagcgccctgccggatcgcaccaccatcatgaatttccgccacctgctcgagcagcatcaactggcccgtcaattgttcaagaccatcaatcgctggctggccgaagcaggcgtcatgatgacccaaggcactttggtggatgccaccatcattgaggcacccagctctaccaagaacaaagagcagcaacgcgatccggagatgcatcagaccaagaaaggcaatcagtggcactttggcatgaaggcccacattggtgtcgatgccaagagtggcctgacccacagcctagtcaccaccgcggccaacgagcatgacctcaatcagctgggtaatctgcttcatggagaggagcaatttgtctcagccgatgccggctaccaaggagcgccacagcgcgaggagctggccgaggtggatgtggactggctgatcgccgagcgtcccggcagggtaaaaaccttgaagcagcatccgcgcaagaacaaaacggccatcaacatcgaatacatgaaagccagcatccgtgccaggggggagcacccgtttcgcatcatcaagcggcagttcggcttcgtgaaagccagatacaaggggctgctgaaaaacgataaccaactggcgatgttattcaccctggccaacctgtttcgggtggaccaaatgatacgtcagtgggagagatctcagtaa

SEQ ID NO: 428401 - DNA, 366 bp, Serratia marcescens; identical to SEQ ID NO: 81328

SEQ ID NO: 428402 - DNA, 648 bp, Serratia marcescens; identical to SEQ ID NO: 81327

SEQ ID NO: 428403 - DNA, 603 bp, Serratia marcescens; identical to SEQ ID NO: 81326

SEQ ID NO: 428404 - DNA, 348 bp, Serratia marcescens; identical to SEQ ID NO: 81325

SEQ ID NO: 428405 - DNA, 987 bp, Serratia marcescens
atgaaaaaaacgacttcacacaaggcggcccgccgtccggcaaaacatactgacctttatcgtcagatcaccgaccgcattgttgtcgctctggaaaacggcgtcgcgccctggcgtaagccgtggcgcgcggctgccggcatcggtctggccggtctgcccctaaatgccacaaccggacgtcactacagcggcgtgaatgtcctgcttctctggatgtcagcggaagagcagggttttcgcaataaccgctggatgacttaccggcaggcgcagcaggctggcgggcaggtgcgtaagggtgagaaagccaccctggcggtggtttataaggactggacgaagcaggcggaggatcgcgaaggcaaccgcctttatgacagtgacggtaaaccgctgatggaaaccgtgccgatgcttaaacccctgcagctgttcaacgctgagcagtgtgaggggttgccggcagaggttgcggcttcacctgagcaaccgccgacggtggatgaggacggcatactcagcccggacgtgatgaacagggtgatccggatgtttaacgccacaggggttaaacaccggatgctgcctcagaaccgggcttattaccgtccgctgacggatgaaattgtgatgccggtggctgagcagttttttacggaggcggactgctggtccacgctgctgcatgaactggtacacagtaccggtcatgcgaagcgacttaaccgggaggggataacctcctcatcccgcaagttcggggacccggtgtatgcctttgaggagctcatcgccgaaatgggcagtgcgtttttgtgtgcccaactcggggtattcggtgaggttcagcacgacagctatgtggaccactggctgaaggtgctgaaatctgacaaaaaggccctgttccgcgcctgccggcatgcccgggaagcgtcggaatatctactggcactgcctgaaagtcaggctgtggcggcgtaa

SEQ ID NO: 428406 - DNA, 933 bp, Serratia marcescens; identical to SEQ ID NO: 81323

SEQ ID NO: 428407 - DNA, 684 bp, Serratia marcescens; identical to SEQ ID NO: 81322

SEQ ID NO: 428408 - DNA, 1509 bp, Serratia marcescens; identical to SEQ ID NO: 81321

SEQ ID NO: 428409 - DNA, 1644 bp, Serratia marcescens; identical to SEQ ID NO: 81320

SEQ ID NO: 428410 - DNA, 1002 bp, Serratia marcescens; identical to SEQ ID NO: 81319

SEQ ID NO: 428411 - DNA, 567 bp, Serratia marcescens
atgtttgcgatgccacaaaacgatacccccgtcgaagctgatatcactcagccgacgacggtcatcgatacgttgaaaatgctggtacgttacaaagcgtgggcgaatgcgctgacctttgacaccgtgatgtctttgccggccggtgaagccttgcggccgcggccgacccgttttggcaatatggtgcataccttgaatcatgtctatgtggtggacgatatcttcaggcaccacctgcaaggtcggaaacatggctacctcgcgcgcaacaccgagcaagcgcctgcgcttgacgctctgcggtgtgcggtggaggaaatggaccgctggtatatcgaacaggtggataactggtcgcccgaggcgctggcgcaggtggtgcagttcgaattcgtcggcgggggggaaggtcgcatgacgcgccaggaaatcgtgctgcatgtcgtcaaccacgcgacctatcatcgcggttttgtcggcgatatgctctatcaggtgcccttcgcttcgccggcgaacgatttgccggtgtttcttcgcgatcactaccgccgggcgccgtga

SEQ ID NO: 428412 - DNA, 852 bp, Serratia marcescens
atggtttttggcatgcagatggtggatgtctttggcgccgggccactcgccggcaatccgttggcggtgatcgcgggcgccggagcgttgtcgacggaggacatgcagcgcttgacgcgttggttcaatctgtcggagacggcctttttactgccgccgacgcacccgcaggcggattaccgggtgcgaatattcacgctggatcgtgaaatgccgtttgccgggcacccgacgttgggcagctgccatgcctggctcgctatgggaggggcgcccagcaacgagacggagatcatccaggagtgcggagcaggattggtgagcattcgtcgcgagggagggcggttgtgttttgccgcgccaccgttgattcgttccggggcgccgtcaggagagacgttggccgacgcgttgcggtttttggggatcgcgtctgatgaggtgctcgatgccgcctggatcgataatggcccggggtggctggggatccggctggccagcgccgagcgggtactttccctgacgccggcgagaagctggccgcgcagagtggacattggcgtcgtcggcccacatgccgagggtgacgcagccttcgaagtgcgcgcttttttgagcgatcatcttggcgctatcgtcgaagatccggtcaccggcagtctcaatgcctccctggcccagtggttgttcgcaagcggcgtggtcagcggcggatatattgccgctcagggccgctgtcgtgggcgcaacgggcacgtgcatatcacccgcgacgagggtggccggatttgggtgggcggcaatacgcgcattcaggtcgaagggcggttgcaagggattggcacggcgtag

SEQ ID NO: 428413 - DNA, 630 bp, Serratia marcescens
atgaatgtcagtcagcttgcgttggtttatggcgcatatcttctcgcaaccgccagtccgggccccagcaacatggcgatcatgggcgtggcgatgcgtgacggccgctcacccgcactggcgctggctgccggggtggtgaccggatcgctgtgctgggcactgttggccgcgaccggcctttccgccgtgctggccacgtatgcgcaggcgctgtgggccatcaaaatcgtcggcggcgtgtatatgctgtatctggcgctgcgcgccggccaatccgcattacgggcgtctcccgtctcgacagggatagcggcaggggatggcgggcgatcttatcggaagttgtatcggcagggcgtgctgatgcatctcggtaatcccaaggccatcatgtcctggatggcgatcatgtcgctgggtttgcgacaaggggcgcctgaaggcgttttaccggcgattatcggcggttgtgcgttgctcggcgtgacgattttcggggggtatgccctgctgttctcaacggcgccgatgatcgcgttttatacccgggtgaggcgctggattgaaggaatgcttgcgctgctgttcgcttgcgtgggcctggagctgttgatatcgcgggggtaa

SEQ ID NO: 428414 - DNA, 1350 bp, Serratia marcescens
atgcggcttcaatcgccctggcaacctcgcctggccaatgcggaagtcaccaccgtcgagcggctggtgttggcgttaggcgacgacattatcgagggtaaactgcagggtggcgatcgtctgccggctcaccgtacgctcgcctggcaattagagatcggtctgggcacggtgaccaaagcctatgccatcctggaacgacgcgggttggtacgcagcgtgaaaggccgcgggatgttcgtggcgattcgccacgcccgtgaaaaacgcgaaatcgatctttcgtccaatgcgccgccggcggtgctgaccgatcgtttgctggcgcgcacgctggccagcattgcgcggaaaatggatgcggatcatctgaacctctattcccctccgaccgggcatctggagcaccgacgtttgttggcccgctggctcgaaaacgtcggcgtcacgatcgaaccgtcgaatctggcgctgaccagcaatgcccgtcaggcgatttcactggcttttgacctggcctgcgggccacgcgggacgatactgacggagagaatcagctatcccggtgcgatcgcgctggcccggcgcaaaggccattgcttgatcggtatcgatatcgatgcgcaaggcatggtgccgcaagcgctgtctcgcgcgctcgagcgtgtctcctgcggccatactgcggtctatctgacaccgacgctgcataacccgacaacggccaccatgagcgccgagcgcaggcagactatcgtcgagatatgccggcaggcgaatgtctggatcatcgaggatggcgtgtatgccctggggcattcagcaacgcctgcgctcgcgacattggcacccgagcgggtgttccatgtcaatggcctgtcgaaaacgctcggcccggggttgcggatcggtatgctgactctgccgcccggcatgcaaaacgcggcggaagaagccttgcaagatattcccttcgcgccttcgccactgtcttgcgcagtggtgggggagtggctgtccagcggcgcggtcgaggcgataccgcaagcgttgcgccatgaggctcagcgcagagtgcatctggccacctcgatattcgacgccggcgaatgcgtatcgcatcccgacgcttatcatgtctggctgccgatgccgcgcgaaaccgccgagtctgtggccgccgccgccgcattggccaacgtaaaagtgacgccgccggacgccgtgatggtggaccgcgacgaacgggcaacgggcattcgcctatgcctgggttccccttcgctgaacgagctaacggcaggcctgacgcagctggcgcagctgttgaaagcacatcggaacggctga

SEQ ID NO: 428415 - DNA, 129 bp, Serratia marcescens
atggtgctgaaggcgggggcggaagtggcggtgaacgaaaacgccacgctgtcgctgggctacggcgggctgctgtcgcagaaccatcaggacaacagcgtcaacgccggttttacctggcgcttctga

SEQ ID NO: 428416 - DNA, 903 bp, Serratia marcescens
atgggaacatttttcaagcaaatctatcgctatacgcatgcgcgcccttttaggcataacgaaaacctctggccttacgtcaagataaaacgtgccaccagcggagagatcgtcgagttgaattaccgtcggcaacgcgtgccgctcgtgcaattggccgatctgaaagcgcgtttctctggcgatatattgctgactgccaccggcccctcggtgaagaatctccacttggaaaaattcccggccatgcctgccatgggcgttaacggcgcctattatttgcatgatcaggtggattttagattctatgtcattgttgatatgggttttatcgataaaaaggcggaaataatcggcgatatcatcaccgactctcgcctgacgcttttcactacggtgcacggcgtggctaaaatcatcgacagattcagcctggagaaagtgaagtgccgtttggcagtgattgaagatgccgcctttaaaatctaccaagccagaatagtcaacaaagaactgtgggcggcctatcacgataacaataatgtcgcatttgccgccgatagacaggatatcgcttttagccacgacattcgcaacggcgtcttcgatgctggcactgtcgcctactgggcgctgcaaattctaacgttcttgggtttcgaacaggtgtatatcattgggttggatatgaacaactttcaccaaccccgtttttatgaagcagcggaaaataagctgccaaccgagttggaggacaagatcaccagtctgatcatgccgtcgctgagccatgccagcaaaatgatgaaagccaagaacatcatggtaaagaacctttccgtcgccagcgcagtcagcaatgacattttcgacaagatcaatcccgatgaaattttcaagtaa

SEQ ID NO: 428417 - DNA, 1170 bp, Serratia marcescens
atgaaattttcaagtaacgcttttcagccacggcaactttatgtcgtgttcctgtttctgttttcctttttcagcgctattttttgtggctatacaaaagtgaataatctgtttcaccttgccgctatttttttcacgatcgcgctgtatcgcaatgcagatcttcggctaaccttttcgctgaatcatgaagtccgccgcgggctgggtctgaccgcagcgatgttatgctacttcgctttcagcaatctttggtctaacgatccggccaatatcgaatcaaccctgacgcacagcgtttacctgctgctttatctgaccatgctgatcagcgtgcttaacggcgcaaaacgcgatttgctgtttaccgtcatcacgctggggctcactctcctgtgcctgtattcgctcgtttttgatcaccaagaaattctagtcagccggcaggtctcgaaaagcaacccgggtcccggaaacgtcattgatttggcggggctggcagggatcggcatcttccttagcctgatcgtatttcgcgagaagcggcgcctggttattctggccgtcatacccattctgctcggtaccatgctgctgacccaaagtcgcggaccgatgatttccctatttattgccttgctggtaacgcaatcctataggcacttaaaactgaagcacgccgcttattttcttatcgcgctggtcgcggttagtacagtgattttatcttcagaaatagggcaattgctgctggcccgtttcgaagaaatgtatacccaaagctcccttcgcctgagcatctggcgccatattttcgagctggtcggccaaagtccttactttggttatggattcaactatgagctgtctttcactaattattccggtgagtacatacgcaccacccacagtctctattggggcgcgttactgaaaggcggcatcgtgggtctgtcactgttaatggcggtattaagctatagcggcttgctggccctgcggcgcctgcgcgacggcatgcgtctggaagccgcgctgtttatctttattctgctgttttatacatcgcaggggatgttcgtggtaggtaacccgtctgaatcctggtacttattctggttcccgttggcggtcatcatgacgaccagagtgaaacccaacgccggttaa

SEQ ID NO: 428418 - DNA, 1095 bp, Serratia marcescens
atgtcgaaacaatggaaagtcaagctggctaacgcttgtctccgattttatacgaagtttggcagcaactataaagataagcgctcgtttgataaaaatcgcgattttgagcgtattgctattttttcgacaaccgcgttgggcgatttgatgttcaataccccggcgatccgtgcgatccgtgaacgttatccctccgccaaactcacgttggtatccagctacaagaatggcggtttagtcggaaccagcagctatttttccgacgtcatttattgggatcacaaagccaaggatatgctcggtgtcatccgtcgattgaaaaagaatcgcccgcagttggcggtgatactgcattcgaaagcgccatatgatgttatcacggcgatatgttccggttgcgagtacttatttaaagatgtgtataaaaacgatttgagcggtatggagcagtggttgaccggcatcagcattcgcgatcgaggccacctgattcaacgcaagctggatctggttagccaattgggatgcgatgcgcagaatcgggaaatgtttattccggtggattttcctcaacagccgaaaccactgggtaaggtggtgattgggtttcaaatgggggcttctgagaccttgcgttgttggccggttagccactttatctgcctggcgaaaatgttgctggcgcattcgacggagtatcaaattgccttgatcggtgcaccaaaagagcaagtgatagagcgtgaatttatggcgggtttaacggaggaagaacagagtcgggtatccagttatattggcaaaacgacgttgccgcaattgttgggggctatagacaatatggatgtgctggttaccggtgataccgggccattgcatttggccattgcgctgaaaaccaaaaccgtcagcctgttcgtgaccgccgatccgaaacaaacgggtccttatcagaaccctgagctgcatcaggtcatgcacgtaccgacggagacgcagcaactgagcgatgtacagcgccggcaacctttaagcattatcaccagtcagaaggtaatggagaaggtcatgttgagtctcggtgtcgcataa

SEQ ID NO: 428419 - DNA, 2829 bp, Serratia marcescens
atggacaatatcgaagttcgtggtgctcgaacccataatctgaaaaacatcaacctgattatcccgcgtgacaaactgatcgtcgtcaccggcctgtccggttccggcaagtcatcgctggctttcgatacgctgtatgccgaagggcaacgccgctacgtcgaatcgctctccgcctatgcgcgccagttcctgtcgctgatggaaaaaccggacgtcgatcatatcgagggcctgtcgccggcgatctccatcgagcagaaatccacctcgcacaacccgcgatccacggtcggcaccatcaccgaaatccacgactacctgcgcctgctgttcgcccgcgtcggcgagccgcgctgcccggatcaccatgtgccgctggcggcgcaaaccgtcagccagatggtcgataacgtgctgagccagccggaaggcaagcgcctgatgctgctggcgccggtggtgaaagaccgcaagggcgagcacaccaaaacgctggaaaacctggccgcccagggctatatccgcgcgcgcatcgacggtgaagtgtgcgatctgtccgatccgccgaagctggagctgcagaagaaacacaccatcgaagtggtggtcgaccggttcaaggtgcgcgaggacatggcgcagcgcctggccgaatcgttcgaaaccgcgctggagctgtccggcggcaccgcggtggtggcggatatggacgacgagaaagcagacgagctgctgttctccgccaacttcgcctgcccgatctgcggctacagcatgcgcgagctggaaccgcgcctgttttccttcaacaacccggccggcgcctgcccaacctgcgacggcctgggcgtgcagcagttcttcgatccggatcgcgtggtgcaaaaccccgagctgtcgctggccggcggcgcgatccgcggctgggatcgccgcaacttctattacttccagatgttgcgctcgctggcggagcactatgagttcgatgtcgaagcaccgttcaacaccctgagcgccgacgtgcagaaggcggtgctgagcggctccggcaaagagtcgatcgaattcaaatacatcaacgatcgcggtgataccaccgtgcgccgtcatccgttcgaaggcgtgctgcacaacatggagcgccgctataaagagaccgaatccagcgcggtgcgcgaagaattggcgaagttcatcagcaaccgcccttgcgcctcgtgccacggcactcgcctgcgcgaagaagcgcgcaacgtgttcgtcgaagacaccacgttgccggagatctccgatctgagcatcggccatgcgatgaccttcttccagaacatgaagctcagcggccaacgcgccaagatcgccgaaaaagtgctgaaagagatcggcgatcgcctgaaattcctggtgaacgtcggcctgaactacctgtcgctgtcccgctcggcggagacgctctccggcggtgaagcgcagcgtattcgtttggccagccagatcggcgccggcctggtgggcgtgatgtacgtgctggacgagccgtcgatcggcctgcaccagcgcgacaacgagcgcctgctggaaacgctgatccacctgcgcaacctcggcaacacggtgatcgtggtggagcatgacgaagacgccatccgcgccgccgaccacgtgatcgacatcggccccggcgccggcgtacacggcggccaggtggtggcggaaggcaccgtcgacgacatcatggcgcagccggactcgctgaccggccagttcctcagcggcaagcgcgagatcgccattccggcgcagcgcgtgcaggccgatccgaccaaggtgctgaagctgagcggcgcgcgcggcaacaacctgaaggacgtgacgctgacgctgccggtcggtctgtttacctgcatcaccggcgtttccggctccggcaaatcgacgctgatcaacgatacgctgttcccgatcgcccagcgccagctcaacggcgccaccatcgccgaaccggcgccgttccgcgaagtgaccggcctggaacatttcgacaaggtgatcgacatcgatcagagcccgatcggccgcacgccgcgctccaacccggccacctataccggcattttcaccccggtgcgcgagttgttcgccggcgtgccggaatcgcgcagccgcggttatacgccgggccgtttcagcttcaacgtcaagggcgggcgctgtgaagcctgccagggcgacggggtgatcaaggttgagatgcacttcctgccggacatctacgtgccgtgcgaccagtgcaagggcaagcgctataaccgcgaaacgctggaagtgaagtacaagggcaagagcatccacgaagtgctggagatgaccatcgaagaggcgcgtgagttcttcgacgcggtgccggcgctggcgcgcaagctgcagaccctgatggatgtcggcctgtcgtacatccgtctcggccagtcggccaccacgctctccggcggtgaggcgcagcgtgtcaagctggcgcgcgagctgtcgaagcgcggcaccggccagacgctgtatatcctcgacgaaccgaccaccggcctgcacttcgccgatatccaacagctgttggcggtgctgcatcagctgcgcgatcagggcaacaccatcgtggtcatcgagcataacctggacgtgatcaagaccgccgactggatcgtcgatctggggccggaaggcggcagcggcggcggcgagatcctggtcgccggcacgccggaaaccgtggccgagtgtgaaaaatcgcacaccgcacgcttcctgaaaccgctgttgaagccgtag

SEQ ID NO: 428420 - DNA, 750 bp, Serratia marcescens
atgaccacagcacaccctctgcatggcaaagtcgcgttcgtccagggcggctcacgcggcatcggcgccgccatcgtgaaacggttggcgagcgaaggggccgcggtcgcctttacctacgccgcctcagccgatcgcgccgaagcggtggcaagcgccgttaccgccgccggcggcaaagccctcgccatcaaggccgacagcgccgatgcggcggcgctgcagcaggcggtgcgccaggcggtcagccagttcggcaacctggatattctggtgaacaatgccggggtgtttacgctgggcagcaccgaggagctggcgctggacgatctggatcgcatgctggcggtcaacgtgcgcagcgtgttcgtcgccagccaggaagcggcgcgccacatgaacgacggcggccgcatcattcacatcggcagcaccaacgccgagcgcgtgccgttcggcggcgcggcggtgtatgcgatgagcaaatcggcgctggtcggcctgaccaaaggcatggcgcgcgatctcggcccgcgcggcatcaccgtcaataacgtgcagcccggcccggtagacaccgagatgaacccggacgccggtgagttcgccgagcagctcaagcagctgatggcgatcggccgctacggcaaagatgaagagatcgccggcttcgtcgcctacctcgccggcccgcaggcgggttatatcaccggcgccagcctgagcatcgacggcggcttctcggcgtaa

SEQ ID NO: 428421 - DNA, 1521 bp, Serratia marcescens
atggatcaggtgcaccggcccccgctcttgcaacaaccgcgcataagcgcccggatcctctttctcccctccgctaatcagatatttcaactgcgccagtgcgccactgatgctgtgcacatactgattgaacagcgcagtggtcaagaacagcgtggtgatgcgatggcgttgcagttcggccgccagacgctcggcctccatcatcacctccggcgcgatcaccaccagcgcaccgccattcaacagggcagcccaaacctccatcgtgctggcatcaaatgccgggttggcggcaaaggcgatgcggtcgtcggcgtcaaaggcggcgtagcggttgttgcgcaccagacgcgtgatcccctggtgcggcgtcatgacgcctttcggcgtaccggtcgagccggaggtatacatgatgtaggccgtcgcgccgctcgacacgcgcaacgccgggttaccgttatgatcttcagcttcgcgatcctcgaccgtcagctgcgggatctcctcgtcgccgatggcgtccgtcagcatcaggcaggcgccgctgtcatcggcgatccacgcctgacgcgcggccggcagttgcggatcgatgggcacatacgccgccccggccttgattaccgccaattgggcgcagaccagttcgatgctgcgcgccagccgcaccgcgacccggtcgcccggttgtacgccgcgctcaatcagccgatgcgccaaccggttggcgcgcgcattcaactgtgcgtagctgagccgttgcgcatcctggatcaaagcgatggcctgcggcgtcagccgcgcctgctgttcaaacagttcgtgcacgcaggtatccgccgggtaagcttccgccgtatgattccagcggcacagctgcagcgcatactcttcatccggcatcacctccagttcacagaccggtgtctgaggcgcctgctccaatgcctgcgccaatgcgctcaacgcctgcgccatatagccacacacgcgctgcgcttcaatcggctgcctgacctgcgccgtcaggcccagcgaatcaccgccgtcctcgaccgacagcacgaacggatagttggtgcgttcctggctatcgagcagcgttacgccggtcggcaatgcggtgtcctcgccactgttatgccggtagttcagcagggcactgaacagcggcgtgcccgcggcgacgccgctgcagcgctgcgccaacgccagcggcgcatgctcatgggccagcagcccgctcagccggatgtgcgcctgcaacaccgccgattccgcgccgacctcgttgacatccagccgcagcggcaacgtattgataaacaatccgagcgcccgttccgccccgtctccggcctgcatgcggcccaacaatacggtgccgaataccacctcatcgcggccggtagcgcgcgccaacacctgcgcccaggccaggtggcacaggctggccaggctgacgcccagccgccgcgcctgccgccgcagctgttggttgagcgcaggcggtaa

SEQ ID NO: 428422 - DNA, 1131 bp, Serratia marcescens
atggcagaagaaaagaaaaatgctcaggtgattaacggcgatattgccgaactgaaatcgctgtctacgctgcgccagcgtgtggtcagcgacggtgaaatcgtctccaaatcggccaacggttttcggctggcgaatggcaataccggcgtgatgctgcgcaacgatggacgcgatttttatgcgctgacgacgccggtagggcaggcgcttaacgggcagtggaataccttacgcccgttctcattcaatttggcttctggccgggttgcgatgcaaaacggcgtggacatttctggtggggcggtggtgtcacacaacgcaggtatctccacctcgaccaccggcccgaccccgcttatcaatggacaaatctataactccgcacctttaaaaagtgatttcactagcggcaatgtcaccacaaccaccatgttgggatcccgcgtcattccggggaaggataacttcgggttaatttcttaccgcgactggcaggggaattggaacgaacttcaggtcagaactaacgcggaactttccgtcgggcaattgaccaaacgcaattctgacggctggttttttgccagccctcctcagaatgcagatagcaataaagaatcccttaccaagggattgtacttgcaagctccgaataacaagcatgccaatatttatcaccatgaccatgtgaaatacaacgaactcgttatcaacgtgggcaatggcggtcggaatagttggttcgttttcaaagaagatggctatgccgttaccggaggtggttggaacagcagctccgacgcccgcatgaaaacggacatcacccaaatcgaaggcgcattggacaaactagcccgcatcggcggctacacctacctcaaacagggcgtgcctgaagccggggtgatcgctcaggaagtggagagcgtattgccgcaggcggtcacccaaaccgaattgaagctcaacgacggcagcgtgctgaaggatgcgcggggcatcaatatcaacggcgtggtggcgttgctggttgaggcgcttaaggaggagcgctcacttcgagatgccgagcgcgaagcatttgaagctcgattggttgctttggaaaaagcgattgcgatcgcctga

SEQ ID NO: 428423 - DNA, 258 bp, Serratia marcescens
atgacgattaaaaacatttctgactttacagagaatcaatttattgattttgtaaggaggataaaagaagccgattttcctacagaagcagagcatgatgatgctatttatcaatttggtcagttaacagaacaccccgatggctgggatctcatctatcatccggtttctggcgcggataactcagcggaaggggtaactaagacagttaaggaatggcgtgccaagaacgcgaaaccgggcttcaaacaagggtaa

SEQ ID NO: 428424 - DNA, 801 bp, Serratia marcescens
atggttttggagtacagcttgcgtaagcatgcttcaatacctgttcaaattgagtggatgcgtttgtcgcgagaccctgccagttcttggtattctcaaaacggcggcgaaggttggaccaccgagcgttgggcgacgccgttctctgcgtttcgctggggaattcccgctttctgtaacttccagggccgggcattttactctgatgcggacgtgctgtatctctgcgatatcgcagagatttggcatcatccgatgaaggagggcacggccattttggccgcgggttccggcaaagatctccgcttgggggaaatgctgtgggattgcgaggcagcggcgcgattcttgccgccgctggacgagttgcgccgcgatccattggggcataaaaaaatgcagcggttctttgaagaacatcccgagttcgttgagccgttgaaaccggaatacagcaatctagatggtgacgatttgccattggaagcgttgaaggcgttgcattactcagatatgagcagccaattttcccaccgttactcgcttccgagactgcgggctgaaagccgcgagcattggtttgatggcaagatccacagccattatcgcgatgatctgcgcgaactgttcgaacaatactatcgcgaagcgctgcaggccggttataccctggaacagtaccagaatgtgcagttattcggcggtttcaataagcaatcccagaaaaaatatgatggcaatccgattacgcgcaagaaacaaccttttttgcgccgcgtcttgagcggtttgctggattag

SEQ ID NO: 428425 - DNA, 681 bp, Serratia marcescens
gtgctggccgacggcagcatcgacttcgacgacgccagcaaaaccgagaacacccgcgtctcctatccgatttatcacatcgagaacatcgtcaagccggtgtccaaagccggccatgcgcgcaagatcatcttcctgaccgccgacgccttcggcgtactgccgccggtatcgcgcctgacgccggagcagacccagtaccatttcctgtccggcttcaccgccaagctggccggcaccgagcgcggcatcaccgcgccgactccaaccttctccgcctgcttcggcgccgcgttcctgacgctgcacccaacgcagtatgccgaagtgctggtgaaacgcatggaggccgccggcgcccaggcttacctggtcaacaccggctggaacggcagcggcaaacgtatctcgatcaaagatacgcgcggcatcatcgacgccattctgaatggcgacattgagcaggccgagaccttcacgctgccgatcttcgggctggaggtgccgactgcgctgccgggcgtcgatccgtcgatcctcgatccgcgcaaaacctacgccgacgagtcgctgtggcaggagaaagcgcaggatttggcgcagcgctttatcgataacttcgccaaatataccgtcaccccggcgggtgaaaaattggtgaacgccgggcctaaacggtaa

SEQ ID NO: 428426 - DNA, 1371 bp, Serratia marcescens
atgttcacgatgtgcgaaaagtatgtcgatgggaagatggttttaattttatgggtgaacaagtatcaggattatagttcgggcttttggtatgactgggaagatccttataaactgagcatgctggttgggataaaacatgatgaaacagggagagaaagtcagcagctctttcagttatatggatttggcagagataagcgcttcgtcaaggtgataccaacaccaaggtctgggagatatacgtttacgctcaacgcgaccgtacatgctgataaaataggcagcgctaatgatatctatgttcgtttaagtaaggaagtaaacatcgcccctgatggtgctgaaaccttaatgaagctaaatgatgaaatagagaagcataaagatgaaccgtttgcttatatttttgataaagaccatcaaatacccatgcgctcaaacgttgatagatattatgccaataatcaaaatggcgtgttgttggtgattcctgatgtgagaaaacgagtgccgtcattgcttctggatatgaaaaaaaggacgtcgttgcgttgtgagatgaataacaatgcggtaacggatgacgggaggcggcaatcatctgaaatttattatccggttggcgcatgggggcggttagctttccctgacattgtgctaaacgttaattattttgatatcagggcgcaaagaaacggtactacctggctgagtaatggctgtgcaacgccgcttggtatgtattatgacaatattagcggtggttcaacacagcctgagcaagaaaccagtgattatttccctgggctgcgccattttgttgatgagcataataaagccgcgccggttgacacatttttttgggaaatgaatcaacctggagttccgttgcatattgtaataaataccgatcgtttcagcacagaggctacgaattacgctaataagctaacgaatatgagaggccaatttgtggccttttccggtacctcgttgattccacggcgtgatgatggtccggaagggcagccggataatgggccagcccaaacgacccggattgccctgggttaccataacaagcaggatcgtctttatatttttcacggcggtgcttaccgtgacggcattgaccgtggggatctgaccgcgttgttccgggcattggaggccaaggtagcgatagaactggacggcggcggctccgccgccttagtgattaaggacggcgcggcgaaatgggggggcggcgagttacccaagagcagttgttctaactctggcgcctggtgttcgccgataaaacaacctgacggcaatgcccgccctgtaccttcctggttgggaattgagctgagccagccctga

SEQ ID NO: 428427 - DNA, 1023 bp, Serratia marcescens
atgaaaaagatagtttatgccttattcttaatgttgataagcaacgcccccgtctatggtaaaaatacgtcattcacaacggcgtcggccattaatgcgcgtaacacaacacatcaattcctcttaagtgcgaaaaacgcctatgagatttataacctggaaaaactgggaaatgcattatcctcggctcaccagagtgcgccacaacgcttggatgtcctatttagcttgggaaatacctacatactgcaaggagatattcataaggcactagacgtctatgccagaataaatacccaaaccggtggtgatattgatgcgctgacctatctggtgatgtacaaacactatctggggcaaccatttaccaatgaaatgtcagccctaaagaaaatcagtgagcaacgagcaaaagatgtgacgaccataatcggtaatatcaacgagcaattagccatgccaatagcggaaaaacttcccgccggctataacaaaaacaacccagcactaattatcaccttgggttatgcattaaaagaagatggtaccatggatagcatcttgatcgaccggctggaaaaaaccttagccatggctaaaatgctgcctgaggctaaaattgtcgtaacaggcggcgtgccgaaacatgataaaagcgaaggcatcgaaatgaagcaatggctgattcaccaaggcatagatgaaaaccggataattgccgaaaactacgcgacagataccgtagaaaattttatttattcgcgttacatcatcaaacaagaaaaacgaaataacattgtcatcgtcagttccgcaacccatgtgcgcagatgccatgtcattttacaatccctcgctctggccaaaggggaacattatgatatcactaccgtcgcagcccctgacgcctccgaagaagaaatgaaattcgaagggaaacgcaaactgggtatctatcgtgatgcgctgcgcgcctatggattgtatatgatttctgccgcacctgaattctcgctaaactga

SEQ ID NO: 428428 - DNA, 648 bp, Serratia marcescens
atggacgcaaagcaagttgcatatggaattttggatggaatttcgaccattcccagcgggatgtatcatggcgtcgttcgcacttggcagggggctggattggctggtagtagcctcaagactagaaaccaagaagaaacagaacgtttcgcccgtatggttaagtcgatgggtaacagtgaagaacccttacgacgcctgattactattgtgatcactgatttctatcagaaattagacgctagcggcaaagagtccatcaataataaactagcctatggtgccggtcgtcttggtggacgaactggggggcaatttgcattggcgcaatttgcggctcacatgatgctaaggaaagcgacctctgcattagcctataaacaatttgtacgctttggcgcttcgttcactctcaaccttttaatgttacagggacttatcgaagaggcagcccaagcatcccgacgaatgcaagttaagtttcctcaaacataccggaaggtgtcggcgttaaatttagatatggcatatttcttggttgaggagcaactagagccgtatctccaattcattaacagccaccctatgctttgtaaaggtattcagaatgaactctgcaaaatcctctctgaccagaaaactcactaa

SEQ ID NO: 428429 - DNA, 1041 bp, Serratia marcescens
gtggccggagatgtcgttactccagaagtccaggccgcacagcacatcgctgcagacgcgctcggtcggtttgcccttgtccagcaccgcgccgacgcccggcagatccaccacgaactgggtcgggccgtaagccacgcccgtcggatccgggatgcggaattcttcgggaatatcctcgacggtcgccaacatgccagggccgttgatggctttgcccaggttgatcatcccccagccgtagagcgcgtcgatgcccggcgcgcccatgtcggtggcggtggttttcagcacttcagccacctgcgcgccattcagatacgggaaacgctccatcagcaccgcgacgctgccggccacgtgcggcgccgccatcgaggtaccgcttttattggcatagccggtcgtcaggtcgtccacactggtgcctgcgatcaccgagctgtacacccgggtacccggtgccgagacgcacaaactggcggtatagccgcaacgggaagagaaagtgctgatgctgaagtcaccgctattggtgggatcctgcaggctggcgaccgacagccagttcggtgcaatctccggcacaaaataggccaggccggccatggcatcggggttattaagattgccgtcgttaccggcggcgaagatggtgaccacgccgctgcgcgccgcatcgatcgcgccctgataggcgccgccgggtttggtgccgaggatctgttttatctgatcgaactgcttttgcgcatcgtttactgtgaaatgcggataagccgggtcataaccgccctcatcaaacttctcggtaatgccgatgccccagctgttattgatgatgcgcgcgccgctggccaccagcgcatcccaaccggccttatacaccgcaccgtcgttaccgagcacaatgccgtcctccgggccgggatcgccattctccgcactgatgatctgcgcgttgaacgccacgccgtgcatggcgccgccgtcgcggctgccggcggcgatgccgcccacatgggtgccgtgcgagcctaa

SEQ ID NO: 428430 - DNA, 825 bp, Serratia marcescens
atggcgaatgaagatgagttacgtattgccctgtcgccggtgcagcttgcggcggtgctgtctgatgagagtgtcactgaaggtgaaacgctcagtaaccgtctgcttggcggtttggggcttgccggtggtgtcgttgagctgatgggggcgggggtgttgtgttacgcgccggatccgacgtttatcaccaaagttgggtgtttggtggtgggaacgcatagcctggacagcatcaaggccgcttccaatcagatgattaccgggcatccaacgactaccgatacttatcagtctgccgttttattggcgcaaacattgggtgccgatcgggaaacggcctataacgtcggtttaacggtcgatattgccgtgccttttgtctttgccggagcggttggcgcagcccgagtcgcatccgtgcgcatggggcgggttaagctggttgagcatgagtcccctacggggatgaaaccgggtgggcataccattaaacgccatgttggggtgacgaaagagcaaccgttagagcgtttaaaaaatccacgagtgaacaaggcctcttcgtttaaatcattaggggccgcggaggtcgccgtcagctcggcgttaaaagccaataaagagtggataagactgtgggccacgaatcctgcgggaaggccaaatctggaattgacccatattatgtccagcgatattggttatggcctgagtaaaaattcaacgcaattagtgagaacatcacgattaaaggttgtgttgcactatcagcagtttcaaggtaaaccctatttcatactgacagcgtttcccgatttttga

SEQ ID NO: 428431 - DNA, 762 bp, Serratia marcescens
atggctgccgcaaaactttggactagggaagaattactactcgctttcactctgtatagtcagattccgttcggcaaacttcattcgagaaatcccgaaataatccactatgcaaaattgatcggacgcacgccgtcagcactcgcaatgaagctggttaacttagctagcttggatccgtacatcatcgaatctggtcgcagcggtttgaaaggggcctccaaggccgatcgcgagctgtggaaagaaatgagccaagatatggatttgttcaatcagcaatgccaaacggcaatggaacacttggagaaaccagacgcacctgagtttgatgaagagccaaaagatttcagtggcagagataagttctctacagtcaaaacacgtgtagaccaaaacctgtttcgcaaaaatgtgttggaagcttacgaatatcgttgctgcataaccggattagaagagccagcattactcgttgctagccatatcctgccttggagccactcaatcgaacaacgccttaaccctagtaacggattgtgcctgtccagcctgcatgacaaggcttttgaccgtgggctaatcactttcgacgaagacttgagactggtactatcaaataaaatcaagctattgaaaagcagtgtctatgtggaaaacttcgagaaatatgagggagaaataattagcacgcctataaatcattctccagataaagctcatcttgcttttcatagagagaatatcttcattggaaattag

SEQ ID NO: 428432 - DNA, 1746 bp, Serratia marcescens
atggctataacaacttataattcccttgtgcagaaaactttttgtgataatgctattcgttcagtagtaatgatagatgacgattttattacttattctgactctatcaaagcacttaatagcgagataaaattagacccagcaaaaattgattcctcaaagcgtgctgctaccctcgaagaatattttcaaactaagaatatgatctgtgatattgacaacggttcagtaaactttgatgttgaccgcatccgtaagtcagatttggtcataatggattatcatttagataacaatgcaccggataaaactattacaatattaaaagaattaaaaaattccgatcatttgaatatgattgttatttatacgagagaggagctcaaaacagtttggatgcaaattgcttcttctctaagagggatcgaaaattttaatgatagaatacttgaaacagaaaatgatgaattaattgaatactggcagagtgttattttacctgatttgacccacaaaggagaaagggcattaacgagggatgaaactgtactatatatccaagatgactgcctatgtaagcgtattaagaaagcaatccgaaatgatggaagccttacagagcaaaatgatattaatttcattgctaagatgatttctgaatatgcagtcgctgaaaatgccgtcattccagattatatgacaaaaagtatggttgtaggggatactgccggtattaaatggattcaaagtggtaatatatttatcagtgtgttccataaggataaagatgatcatgaaagtgatggtgagagaatttggcaaacactaaatgaatcattaattgaatggaacccatcttactatcaaattatcaagtcagagattcaaaatactattgaagcagaagcactttctttcaataaccatttagctaatgatggttatggtcaagctggatggttgaatcaaatattaaattccgcttctgatgaaattaaaaggaaaaacattgaatttgtttttagtaatttatctgaagaactctatgaaagattgaagggaaataaatctttagtaggcttcattaatgatgtttttgaaacatatacaactgattttaaaagtggtggagaagcgaaatcattagagtattgttcaaaacaaatgaatttacctgcaaatgcaagctcatttaatgagatgtatcatgctttgaacatgaatttgtcttctaaaaattttgaagaaggacatatttcaacaggtacaattttcttcgatactgaatctgaaaaatggtatttatgtgtttctgctgcttgcgatcttgttcctactcagggtaatgatccacatcataaaagattaagtcctcatcgtttaattaaggtgttagaacttttcaatgctaaccagaataaagcattacctaatgcagaacaatccaagtatatttatgtaattcataagaataccagaaaatatttatccatatttgaaggcgataaaactttgccagtggttgattatatggttgttttaaatcacggtcatactgttccgggggaagagaaaaatatactttcagcggtattcttgagtagcatgaatgacaacgtacaaaatgtaccagttaaactgaaattaaagtcccagcttcgaagtggttatgctgaacgataccaagctattgcgtcgcaatacagttctagaattggtgtagattatgtatctatgatgccttaa

SEQ ID NO: 428433 - DNA, 951 bp, Serratia marcescens
atggcaacactcttaaagaaatggggagaagaaattaaaagtgatagagctatatattactctaaagctatatcgatagttgactcaattaatgtcaatactgagatcgagaatgttttaaatttactcgatagcatttatattgaaacaattgactccctaacattcaaataccaatctataaataaaggattagaaaggttatttgaaggagtaaatttagattccgctttttcgctatcagaagaagaaagagagtatttcgaggataaagctaagagtttaaatgctttggctcagttgggaatcagcgtcgaaatactctcacacgagcttgaagaaatggactcgatggttacacgaggactaaattctttgccttcaaccgcgaaggaacacccaggtttcacattggctctgaatgcacatagatcattaacacaacaaatcaggtttttatcacctttgaaaatatctggatatcagtcaaggcaaaaaatttccgggaaaaatataatggattatatcctgaaattttttggtgatcgctttgaaagacaacgtatttccattgagttcggtgatgattttaagaacatatctattaatgatataccttcacgaatatatccggtttttactaatattataaataacgcaatgtattgggtgagtttgtccgataatcgtcttatcaaaatagattttgttaattatttagttataattgcaaatacgggccctgctatagacccagatgacattcctcgtttatttgaattgttttatagcaaaagagctaatggtcatggtgtcgggctttatttatgcagggagaatttagctgtagcacaccacaagatttggtattctgatccaaatgttgaagatgactatttaattaaagatggtgctaatttcgtaattaagttcaatggagtggagtcataa

SEQ ID NO: 428434 - DNA, 894 bp, Serratia marcescens
gtgctggatagcatcaagattaaattgcaatattggctaccgaagctggcgctgacccgcctggcgggctggggcgccgacaaacgggccggctggctgacccaactggtgatcaaggccttcgcccgcttctaccgcgtggacatgcaggaagcgcaaaatccggacctggcgtcttacgccaccttcaacgacttcttcgtgcgcccgctgcgcgatggcgcacgcccaatcatcgccgacgccaactggctggcgctgcccgccgatggcgccatcagccagctcggcccgatccgcgacgatcaaatcttccaggccaaaggccatcactacagcctggaagcgctgctggccggcaactacctgctggccgaaccgttccgcaacggcctgttcgccacgacctatctggcgccgcgcgattaccaccgcgtgcacatgccatgcgccggcgtgctgcgcgaaatgatctatgtgccgggcgatctgttctcggtcaacccgctcaccgccgccaacgtgcctaacctgttcgcgcgcaacgagcgcgtgatctgcgtgttcgacaccgacatcgggccgatggtgcaaattctggtcggcgccaccatcgtcggcagcatcgaaaccgtttgggccggcaccgtcacgccgccgcgcgaaggcatcatcaaacgctggacctacccggccgccggtgaagagggcgccatcgcgctggaaaaaggcgccgagatgggccgcttcaagcttggctccacggtgatcaatctgtttaccgcaggcagcgtgcagctcgcgccgcagttgcaaaacggcaccgtcacccgcatgggtgaggcgttcgccgaaatcccggccgccgctgaaacaccacagaccccgctctaa

SEQ ID NO: 428435 - DNA, 129 bp, Serratia marcescens
atggtgctgaaggcgggggcggaagtggcggtgaacgagaacgccacgctgtcgctgggctacggcgggctgctgtcgcagaaccaccaggacaacagcgtcaacgccggtttcacctggcgcttctaa

SEQ ID NO: 428436 - DNA, 1320 bp, Serratia marcescens
atggaactttcccaggctcttggcattatcaatttcaccacacccgagcgtgctcgctctctttccgaccttatccccgctgaatttatccagcaagccctgacgcttaccgataccgtcaccctacgcaagcgaaaactccctcttgaatcgatgatttggctcgttgttggtatggcggttttctgcaaccgtccgataactgaaatcgttggcctgatggacattgtggaccgaaacggatgcccgttcactgcccgcagttcggttatccagcgccgtaaaacgttgggtgaagacgccgtgcgtgaactgttcgatatcactcagcggcactggaatcagcaggcggcacacccacgctggcatgggctgaacctcttcgcggtggatggcgtggtctggcgtacggcagatactccggagaacaatgcggctttcagcagaacccgtaatcaaaacggcgaggcgaactatccgcaggtgagaatggtgtgtctgatggagctgagcagccatcttatcaatgccggcgcctttgacagtgaacaggtcaatgaaatggtactggcaactcaactggcagaaaaaacgccggataacagtattacgctgttcgacaaggggttctactctctggggttgcttcaccactggcagcaggccggtaaggctcggcactggttgctgccgctgaaaaagaatacccagtatgaagtgctccatcgcctggggcgtggtgatgagttggtgacgctgaaaaccagtccgcaggcacgaaagcagtggccggcacttcctgcgacgctgacggtaaggttgctgacccggagagtggatgggaaagagcgccaggtgttgacgtcgctggtggatcccttccgttaccctggtaatgatatcagtgagttatatagaaaccgatgggaaatagagctgggttaccgggaagtgaaacaagggatgctggacagtcgttggacgctaagaagccggttgccggacctggtgagacaggaactgtgggggatcctactgacatacaacctggtgaggtatcagatggtcaacatggcgagccatctgaaaggcgattacctgccttatcaactgagttttagtggtgcgctaagcgaaatcacgcggctgttaatcacgttaccctggtgctccccgggcaagatgccgggagagctcagaacgttgtatgaacaggctaaatggctggtgttgccaggtcgcagagagcgaagttatccgagagagctcagagccagaagcaggaaatacccagataaaaaagttgctggccacccttaa

SEQ ID NO: 428437 - DNA, 258 bp, Serratia marcescens
atggaactgaaaaaaaacatcagtgattacactgaaattgaattcaaaaaactaattgaagcaatcattaattgtgacggtgatgagaaaactcaagataacaacctcgagagttttatcaatattactgagcaccctagtggttcagatttgatttattatcccgaaggaaataataatggaagccctgaagccgttatcgaagaaattaaggagtggcgaaccaaaaatggtaagccttgcttcaaacaagggtaa

SEQ ID NO: 428438 - DNA, 1227 bp, Serratia marcescens
atgtacgacaatgaattgaaagcttttgcgagagatcaagagcagaagttgatcagcgccttggcaaatactagagaacactctagtaccaattttgaagtaagaaatcgagatgactatcagcgtgattacgcacgaattctgtattcatcatcatttcgcagattacagggaaagatgcagctttttgaagtcgatcctgaaaaattcaacagaaacagattaacgcacagtcttgaggtagcgcaaatcgccagaagtatcgcatcagacctcgaactggttcatcctgtggtggttgaactggcagctctcgcgcatgatatcggcaatcctccatttggtcattcaggtgaaaaactgcttaacgagctgtctgaggatattggaggctacgaaggtaacgcgcaggcgctacgcatcctgaggaagcttgaaaaaaaatatgcagactttagtggtttgaatctgacttaccgcagcttgctttcggttattaagtaccccaatacccgttctactactaacaaatttatttatgatgacgactttgatttttacaagagcctgctttctgaaaggcagctcgatctgaaatctggagagaaaacgattgatgcgcagataatggatcttgcggatgaaattgcctatgcagcacatgatctagaagatgccctaagccgaaacatggtcacgatcgaagacattgagtatgaatttctgatttctgacaaattccaaggcgctttagatcagtttagggaaattgtcaataagtcaaaagaaacagccttacgggcaatttcactcaagacctccgaggagtttgcaatgattttccgtaaggaattgacctccaatattgtcaatcgcctcgtcacggacatttctgtaataaataacaaaaatggctttcatgagcttggattcggaaatcagggtgtcttatctgagggtctaaaaaagcttctttttaaagtcattatgcgaaaacgtaatatactcacctatgagttcagaggaaatgtgataatcaatgatttatacgttttctataacaaggatgaaaactataagttcctctcccctgaacttaagttttccttgccaaaagaggacactgatgcatttgagatcaagaaaaagcgggcggtggttgactatatttccggtatgatggacacgtttgctataaaagaatgggaaacgcattgcctgaaataa

SEQ ID NO: 428439 - DNA, 966 bp, Serratia marcescens
atgtcatttcaagatgcggttggtatgatagatcgcctgttggatatagtcgaatactatcattcccgtgatggcatccacagagatatcaaaccagataatattatactacggtgtaataaaccggctgatgctgtattggtagatttcggtctcgcatggcaacctcaagatgagaacgctcatgctactgataatggccaagagctaggcaatcgtttcttaaggcttaatgagcttgcgccagacagccctaataaacgagatcctcgaagcgatattacctttgtagtaggaattttattttacgtattaacaggaaaaagcccgtatgttttagaagaatctgtgactgggcgtcgacctcaccaacgtgatggagtatctgaaagaattcatgccgctactaatgattgggcaatttcaatgtttgcattgttcgaccgtggtttttcaccgctattgaatagtagatttcagacggcacaagagttgagaaaggagttgaagagaatgagcgaaaataaacctacattggcggatggtgagatccttttagaaatcaaaaagaggttggaagcgcaaggtgctgaggcaaatagtgtttatatgagtaaaataagggaagttgtaagcaaaataattttagtccgtaataatatcgtagaagagattggcggtcatctgtctggagttgaaactggatactataaatctgagccccgtcactcttggttaaacataggatttgataccccgggtacttcgtatcctcgtttccgacctacgtttgactttcaaattattgctgatgaactcatcattactgtcttttcagaagatcgacagggcgttgctcaaattatctggcgcacggatgttgcaaactctgattttggtgatattttccgtggtaagatcagagagatatttgttaccgggttgagcgagatttttagtcagtag

SEQ ID NO: 428440 - DNA, 537 bp, Serratia marcescens
atgtctttaaattatattgacttagatgattcaaccaaaaaattcatgctcaaagaaattaaattcgatcaagagaataatagtttctatttgagcaactttcttactattcaaggtaaaactgtgtggccatctttgttagaagaagcatctcaatatgatgatgcatggcttgagcaagaaatcctaaagaggggtttactggctacccattaccctcggagaaagcctaacagcactgagatgattcaggctaaagtccctcacactgctgctcaaactttagccgaaggagaattcaatcgtttatacgcccgaggcttgagctcgcgagcaaaagcagaaggaattgaatttgttgaagcttacagagcaagacactcagaaaatcctcgcccagaatctcaagctataatagggaaaaagttccgacctgaagaaatccttgaggatttacgtaataacccaggcgttgatactgcattaggagtccctcctggccctaattccggaataacaattaaacttgttaagtaa

SEQ ID NO: 428441 - DNA, 900 bp, Serratia marcescens
atgcccgtgaattttgatctcaacgatctttatgccttccgcgcgctggtggagtacggcaattttcggctggccgcagagtccatctgcctgtcgcagtcggcgctgagccgcaggattgagaagctggaaaacgcgctgggcagcaaactgttcgatcgcaccacccggcgcgtgactttgacgctgtacgggcaggcttttgccgagcgttcggatcagctgctgatgaatgtcgaagcggtgttggccgatatcgataaggtcagccaggagcgtaccgggctggtcaccgtcgccacggtgccgtcggcggcctactatttcatgcccgacgtgatacgccgcttccggcttcgctatccgcgcgtgcgcgttaagctgatcgacggcagcgccggcaatgtcatcgaggcggtcaccggcggccaggccgatttcggcatctgctttgccgggcgcctgcagcctaatcttgaatttgtgccgttggtgggggacgtttacgtggccgcctgccggcgcgaccatccgctcgccggtaaaaagagcctcacctggcgggagttttatcagcaggattacgtgtcgctggataaaacctccggcaatcgcaatctgctcgatcagcgcctggaacacatcgtgccggagcgccccagcgtgtgcgaaactcgccatgtgacgaccatgctgggcatggttgaggcgggcatcggcattgccgccgtgcccgccatgtcgatgcccgcttcagagcactcggtgttgacgtcggtgccgctggttgatccggtagtgaaacgcaccgtaggcctcatcagacgcggcggccgcatgcagtctttcgtcgccgccgagctggaaaagctgattactgaacagtatcactctgcctga

SEQ ID NO: 428442 - DNA, 900 bp, Serratia marcescens
atggccagacgcaatctcaacgacttactctctttcgtcaccgtggcgcgtgagggcagctttacgcgcgctgccgcccagctcggcgtgacccagcccgcactgagccaggcgatttccgggctggaagaacggatgcaaatccgcctgctgacaaggaccacgcgcagtgtgtcagtgacggctgccggggagcgactgctgcagtctgtgggccatcgtattgatgagattgaagccgagctggacatgctgacggcactgcgtgataaacctgcggggaccgtccgtattacatgtggacctaatgttctgaagaccacgctgctgccaaagctgacaccactgttacgcgaatatcctgatattcatattgagtttgatgccaaccacgggttccgggatatcgttgcggatcgttttgatgccggcgtgcggctcggagacactatcgacaaagatatgatagccgtacccattggcccgaaactgcgcatggcggctgtagcttcccctgagtattttgcccggtgcgccgcccctcagacgccacgcgatctgatgcaacactgctgtattaatgagcgcatggttcaatcggggaaaatttacgcctgggagtttgagcaggaaaacggtaaatttcacgttcgggttgaagggcaaatgacgtttaatacatcggaacacgtcgttgacgcagctcttgccggactaggcattgcctttttacctgaagaggagttcggcacacatctgcaggaaggaaaactgatccgcgtgcttgaagaatggtgccgtccttttcccggctactatctttattatcccagccgtaaacagccttccccagcgttttcactcgttgtggatgcgttgcgtattaaccggaaaatttaa

SEQ ID NO: 428443 - DNA, 351 bp, Serratia marcescens; identical to SEQ ID NO: 220538

SEQ ID NO: 428444 - DNA, 1137 bp, Serratia marcescens
atgacgctgtgcgtcttcgccctgatcgcctccgaattcatgccggtcagcctgctgacaccgatggcgcagacccttcgtgtcaccgaaggcatggccggacagggcatcgccatttccggggcatttgcagtggtaaccagcctgtttatttccgtgctggcaggcacgcttaaccggaaaacgctgctgctcggcctgacctgcattatggcaatttccggtgctgttattgcgatggcacccaattacctgacctatatggcgggcagggccctgattggcattgtggtcggcgggttctggtcgatgtcggccgcgacggcaatgcgtctggtcccggtgcatcgtgttccgctggcgctggctattttcaacagcggcaatgctttggctaccgtcgtggctgcccctctgggcagctggctcggatcggttgttggctggcggggcgccttcttctgcctagtgccggtcgccatcatcgcgtttgtttggcaattactcagtctgccttccatgtcggtcacccgtcaggcggcggcttcccgcaacgttttcacgctgtttcgtcgccgggtggtcacgctgggcatgctgggtgtggggatcttctttatggggcaattcacgctctttacctacattcggcctttccttgagacggtgacgcgggtggatgccgcaacggtgaccctggtcctgctggttattggtgtcgcgggtttcatcggcactacgctgattggccgggtgttaaaacgcgggttctacccgaccctgatggccatcccggtactgatggccatcaccgcgctggcactgattgccttcggcagtcaggtagccatcgtgacggcgctgcttgggctgtgggggttgatttccactgccgcaccggtgggatggtgggcatgggttccgcgtaccctccctcagaatgccgaagcgggcggcggactgatggtggcgatggtgcagctgtccattgctctcggttcgacggtgggcggcctgcttttcgaccatcacggctaccagagcaccttcctggccagcgccgcgatgctgattatcgcaaccgtactgatctttctgacctcgcgggcagacacttctgccgcagaccattcataa

SEQ ID NO: 428445 - DNA, 147 bp, Serratia marcescens
atgacagttaaagcttacggtgcccatgcgggcacactgccgctggagccgatggatatcacccgtcgcgcccccggtgcccatgatgtgcagattaatatcgcgtactgcggcgtctgtcattcggataacgccaccctggcttaa

SEQ ID NO: 428446 - DNA, 1029 bp, Serratia marcescens
atgaaaaaatttacgttagcgctggggctgttgatcagtgcatttgcttcctctgcggcggatatgtcccgtggggccgataatttttataagagcgataaggtgacgcagcaaaaagtcacctttaaaaaccagtatcagatggccgtggtcggcaacctgtttatcccgaaaaagatgaaccagaatacccgacacccggcgatcgtcgtgggtcacccgatgggagccgttaaggaacagagttcgaatctttatgcgcagaagctggcggagcaggggtttgtcacgctggctatcgatctctctttctggggcgaaagcgagggcaaaccggggcacctgatttcaccggaaatctacacagatgatttcagcgcggcggttgattatctaagcactcagccgtttgtcgatccggatagtatcggtgtattaggtatctgcggcagcggaagttttgttatcagtgctgccaagattgacccgcgtatgaaagccattgccaccgtcagcatgtatgacatgggggctgcatttcgcaacggcctcaaccattcccagacgccggaacaacgaaaggcctttatccggtcagccacagagcagcgtttagcagagtttcagggaggcgagacggcctacattcccggtaccgtgaatacactggacgcttcaacgccggatattcagcgtgagttttttgatttctaccgcaccgaacgcggtggttacaccccgaagggtgagaaagaagcactgacgacgaaaccgatgttgagcagtatcggcaagtttatgaacttctatccgttcaacgatattgaaaccatttcaccgcgtccgatgctgtttatcaccggcgatcgggctcactcaaaagagttcagcgaggatgcattcaaacgcgccggtcagcctaaagagctttatgtcgtaccgggcgcagggcatgtcgatctctatgatcgtaccgacgtgatcccttttgacaaactgacagactttttccgtaagaacctgcaataa

SEQ ID NO: 428447 - DNA, 987 bp, Serratia marcescens
atgaactataaacatctgggtcgtaccggtctgcgggtgagccgcatcggtctcggtaccatgaatttcggtgagctgacggatgagccggccagcttcaggatcatggatgaagccgtggatgcgggtatcaacttttttgataccgccgacgtctatggcggaccgcagtcgccggatatggcaaaggggtacgggacatccgaagagatcatcggtaactggttggcgcgcagtggccagcgtgatcgaatcgtgctggccacgaaagtttaccagccgatggacacgggcccgaatgacaaatacctgtccgcttaccatattcgccgggcctgtgaggccagtctgaaaagactgaaaacggaccatatcgatctctaccagatgcaccatatcgaccggaacaccccctgggaggagatctggcaggccatggaacagctgatccgtgagggtaaaatcagctacgtgggcagcagtaactttgccggctgggatattgccaccgcacagtgcacggctgatgcgcgcaacctgctggggctggcatcggaacagagcctttacaacctgacccagcgcacggttgagcttgaagtcattccggcactgcgccattacggcattggcctgatcccctggagcccggtcgggatggggatgctgggtggcgtgctgaaaaaaattgccgatggccgccgggcaacaccgcagctgcaggcacaaatcaatcgcttgcggccgcaactggaggcctgggaaacgctgtgtgatgagctgggggagctgccctcagacgtcgcgttggcctggctgttgcagaatcccgtggttaccgctgtgctcagtggtccgcgcacagctgaacagcttcgtcagaatctcaatgccctgacgttgtccctttcaggcgatacgctcaaaagactggataccatctggccgggaccgggtggggaagcccctgaagcctacgcatggtaa

SEQ ID NO: 428448 - DNA, 1194 bp, Serratia marcescens
atgacctcgacaccttctccccgcggtcgccctacgttacgggtattgggtacttcggtgaccttgctcgaactgttgcgtcaacgggcagagcaggacctgggattgcatatcgaatatcacattcacgatgtgcaagacgcccagcgtatcgccgttatgcacccggagcgttacgatctctacgaccaatggtttcacaacgtggattttgtctggccggcacgagccatccagccgttggagattaaaaggttggcttactgggacgagattaacgatttgcctaaactcggcgccctgtttcccggcgggcgattgggtgacggcagcgtgccggtaaaccgcctgtatgtccaacatgaccgtagtctgaacagccggcccaccgatcacatcagcatgctgccgctgacgcataacgccgacagcttcgcctatcatgaagctcgcttgccgcctgcgcttcacgacgaagaagaaagctggggatggttgctgcacccggcattttccggccagtcggcgctgcaggacgatgcggcgatgggcgggctggatgcggctctggctgcgcaaggcgcagggctcgcgcgtttcgccaacgtcggcaacctcagcctggaggagatagacagcctgaccgacgtgctgtccctgctgcatcgccaggggcacttcgccgcattttggaccagccaggacgaagcctgccggttgattgacgatccgcgcgtcaatatccaaagcctgtgggcaccgacgtattttcgtcatcactcgcggcaaaaagattaccggctggcgacaccgcgtgaaggctaccgcgcctggtacggcggcctgtcgctttcacgctgcgccaccggtaaaacgctcgacgccgcctacgcttacctcaactggtggcaatccggatggccgggcgcagtgatggccaggcaggggtactatatttccaatccccagcgcagccggccttacctgtcggccgccgaatgggattactggtatgccggcaaagccgccagtgaagatttgccggacgcttacggcaacccgctcatcgctaaaggagaaatccgcgatggcggcagctatgagcagcgcatgagtcacattgccgtctggaactccgtgatggatgaacataactatctggtacgacgctggcaggattttcttcgcgcctga

SEQ ID NO: 428449 - DNA, 1029 bp, Serratia marcescens
atgaacccagaagataaactgccggtacacgtgttgagcggtttcctgggcagcggtaaaaccaccttgctccaacgtttgctggcagggcagaacctggatgatgtcgccctgctggtcaacgaattcggtgaggttggcatcgaccatttgctgctgggggagatagcaccggacaccgtgctgttgcccggaggatgcgtctgctgcgcgatccgcggcgagctgaaacaggcgttgttggcgctgtatgaacgccgtcaacgtggcgaggtgccgccattcaacaaagtgatcctggaaaccaccggcctggcggatccggcaccgatatttgccacgctgctgcaggaccggcagttacagtaccatttcgttcccggtaccatggtcacgctgatcgacagcgaacatgcctggcagcaagccaaccatcatcccgaatggttggcccaggtcagcgccgccgattggctggtgctgagcaagaccgatcgcgtgccggccgacgaagggcctgcgttactggcgtacctgcagcaattgaatccgctcgcgcaaaccgccatgagccaccaattggccaagggcgatctcagtctgttcgataccccatcccgcccacaggtgcctatgcgctttcggcgctggccggccgttccccccaaacagggggcaacacgtcacagcccgccaggacagcagacgcaccctaccaccgagacctgtatcatcaccttcgagcaacagataaactggtcggctttcaccgtctggctgtcgatgctgctgcattgtcacgggcaatctatactgcggataaaaggcatgctgaacgtgctggaaagcgatacgccggtggtgatccacggcgtgcagcacagtctgcatcccccggaacatcttgccgcctggccggacggccagcggcacacgcagttggtcttcattctgcgcggccttgaccccaagcggctgcagaacgcatttcaacgttttctacacccttttacgcagccatccttctga

SEQ ID NO: 428450 - DNA, 309 bp, Serratia marcescens
atgtgcggactctgcggactgttgaacgatacgccgcaatggagcgatccgttgcggcattctggcctgcccatgcgccagcgtcggctgcaacagctggcgatactgaatcgcgctctggcccccttaaaactgacgctaagcgacatccacggcagcagttggctgctggccggcgctaccggacagcaggcgatcgttacccgcctggatcagctttggcaagaggccgaacggctgctgaaacggccgattgacccgctcgatgaacgctatctcaccgccctcatctctgcggaggcgccatga

SEQ ID NO: 428451 - DNA, 747 bp, Serratia marcescens
atgatgttgaaacaccgccgcgcaacgatcaccggcgccaccagcggcataggcgctgcgattgccctgtcgtttgccagggagggggcggcgctgatgctgagcgaccgcgacggcgccgggctgaacgctatcgtcgaacgctgtcgggcagagggcgcaacctgccatggcaccgtcgccgacgtcggcaaaccggacggcgcccgacggggcgtggaggcatgcctgcagcggttaggcggtatcgacattctggttaataacgccggcatgctaacccaggcaccctgcagcgaactgacgctggagatgtgggacgagatgatggcggtcgatctgcgcagcgttttcctcgcttcgcagcacgccctgccttatatgcgccgacaacgctgggggcgcatcatcaatatcgcttcgcaattgggcattaaaggcggcgccgaactgagccactatgccgccgccaaggccggcgtgatcggcttcaccaagtcgctggcgcttgaagtagcctgcgacaatgtgctggtaaacgccattgcccccggcccgatcatgaccccgttggtagccggcatcagcgacgcctggaaagaggccaaagcgaatgaactgccgctgggacggttcggcctggccgaggaaatcgcgccggtggcgctgctgctggccagtgagccgggcggcaacctgttcgtcggccaaacgctggggcctaacgccggcgatgtgatgccctga

SEQ ID NO: 428452 - DNA, 798 bp, Serratia marcescens
atgttcgaggactcgtttatgattgaaaaattatcttcacctcaaccggtggcgctgatcagcggtgcagccagtggcataggattggccctggcagaagagtatgcccgccgtggcgtcaggatcgccgccggctattttccccaggatccgcatgactatcggcaagcggcggagcgcgtcgccagcgccggcggcgatgccctgtggttggaactggacgtggcctccaccgcctcggtggaagcctttgccctgcgcgcggcagaacacttcggccgcgtcgactatgcggtggccaacgccggcctgctgcgccgctcaccgctggaagagatgagcgaccaacagtggcatgaaatgctcaatgttgatctcagcggcgtgatgcggctgtttcgcgcggcgatcggccagatgcgcggcggcggcagcctggtggcggtatcctccatcgccggtggggtctacggctggcaagatcatgcccactacgccgccgctaaagccggtatccccggcatctgtcgttcactggcggtggagttagccccgcgcggcattcgctgcaacgcggtgatccccggtttgattgaaacgccgcagtcgctggatgaaacccactcgctggggctggcgggcctggccaaagccgcacgaggcattccgctggggcgcgtaggacggccgcaggaggtcgccgccctgatacgcttcttgaccggcgacgaagcctcgtacatcaccgggcaaagcctgattatcgacggcggcctgacggttcgctggccagaatga

SEQ ID NO: 428453 - DNA, 1341 bp, Serratia marcescens
atgagcctctataaaaagacaacggtcaacggctggcaaccccagcaattaaccatcagggacgccaaattcgcaacatggatcgccttcttcgcctgggtcttcgccgtctatgatttcattcttttcggcacattgctgccggaaatcggcgatcactttggctggagcgaagtagaacaggccgaactggccacctgggtggcggtaggcggcgcgatcatcgcgctggctatcggcccgctggtcgacaaactcggccggcggctgggcatcgtcgttaccgtcggtggcgccgccgtttgctcgctgctgactgcgatcggcggtgcctgggggaaaggtgcgctgatcggcatccgttccgtcgccgggctgggttacgcggaacaaaccgttaacgccacctacctcaccgagatctacgccgctctcgacgatccggccctcaatcgccgcaagggattcatttacagtctggtccagggcggctggccggtcggcgcactggtcgcttcggcgctgacggcattactgatgccgatcataggctggcaaggcagttttattttcgccgcactgccgtcgtttatcatcgcgttgctggcgttgaaactgaaagagaccccgcagtttcaaatccaccggcacatccatcaactgcgccatctcggtgatgtcgagcaagctcggcaggtcgctcgcgattaccaggtcgattatgacgcgcatcagcatgccgggctgtcagccgcattccgcggcgcttcgttgcgcgccacgttggtgctgggcggcgccgtgctgatcaactggttcgccatccaaatcttcagcgtgctcggcacgacggttctgactaaagtgcacagcgtctccttcgccaactcgctgctgattctggtgctgtccaacctggtgggttattgcggctacctgacgcacggctggttaggcgatcgtttcggtcgccgcaataccatcgccgtcggctggatgatcggcggcgtgtcattcgccgtgatgcttttctgccccagcaacctcccgacgatcgtcgcgctgtacagcatcggtttgttctttctgatcggcccctatgcggcggcgctgtttttcatcagcgaaagcttccctaccgccatccgcgccacggccggggcgcttatcggcgcgatggggccgatcggcgccattatcgccggcatcggtaccaccaccgtgctcagtgacggcggccattggcaaaccgccgcgctgtggttcggcgcagtgccctgcttcgcttccggcatcatcatgctgttcgcccgccatgtggcgccgcacagcgtgcactaa

SEQ ID NO: 428454 - DNA, 882 bp, Serratia marcescens
atggctaaagaaatactttgcgcattcggcgtcgatgtggacgccgttgccggttggctggggtcttacggcggtgaagattcacccgacgatatttcacgcggcatgttcgccggtgaagtgggggcgccgcgcttgcttaagctgttcgccgatcacaacctgcgcaccacctggtttattcccggtcactccatcgaaaccttcccggcacagatgaaagcggtcgcggatgccgggcatgaaatcggcgtgcatggctacagccacgaaaacccgatcgccatgacgccggcgcaagaagaggcaatcctcgatcgctgtattgagctggtgacacaattatccggcaagcgccctaccggctatgtcgcgccctggtgggaattcagcaacgtcactaacgaactgttgttgaagaaaggcatcaagtatgaccacagcctgatgcacaacgacttccacccttattatgttcgcgtcggcgacagctggacccgcatcaactacagccaacatcccgacagctggatgaaaccgctggtgcgcggtgaagagaccgatttggtggagatcccggccaactggtatctggacgatttgccacccatgatgttcatcaaaaaatcccccaacagccacggcttcgtcaaccctcgccatctcgaagaaatgtggcgcgatcagttcgactgggtctaccgcgagcacgactatgccgtcttcaccatgaccattcaccccgacgtctccggccgcccgcaggtgctgttgatgttggagcgactgatcaaacacatccagagccatcaaggggttcgcttcgtgacctttgatgaaatcgccgacgactacctgcgccgcatgccgcgcaaagtctga

SEQ ID NO: 428455 - DNA, 1368 bp, Serratia marcescens
atgaatcacacgccttggcatgccctccctgatgccattcagctgacgagcgcgtttcgcgaaggaacgctgacaccgagcgaacttgtggaacacgcgttgtcatcagccgccgaagcgccaacggttttcatctgcctgaccccggatcgcgcccgccgcgaagcggctgaagcgacccgacgttggcgccgcaatgcgccgctcagcgagctggatgggattcccatggccgtgaaagatctgttcgatatggccgcaacgcaaaccagcgccgggtccgcgacccgagccaccgccccgccggcgacacacgatgcggcgacgatcgcgcagcttcagaaggccgggctggtcagcatcggcaaaaccaatctcagcgagttcgcctattccggtcttggccttaacccacacttcggcacccctgctctcttggatcgtcacggcacggctcgcgcaccaggcggatcgtccagcggttcggccagcgcggtcgcgcgcggtatcgtccccatagccatggcgaccgataccgccggttccgttcgtatacccgccgcctttcacggactgattggctaccgcagcagtcgccaacgctatagtcggcacggcgtttttccgttgtcccccagcctggataccctcggccccctctgccgcagcgttcgcgacgcgatcgctctcgatcgggtgctggtacccgcgccccatccgctgtcgccctatccgctcacgggcatgacgctgcgggtcgatcccgacgtcttgcacgatccgcatgtacaacccgcagtccgccaaaatttgcaggcggctctggcgcacctgagcgcggccgacgcacgtattgacgagcgtccggtcgccgcgctgcgtcaggcgctcatctggatagccgaacgagggtggccaggcgccgcagaagcgctggaacagcatcgggaacgcctgcacagccccttggccgagagtatggatccgcgcgtgcgcagccgtttactggcggcggaaacgctccccgccgatctgctggtgcagtttttgcgccagcgcgccggctggcagcagcaaatgcgcgatgaattggccggtgcgctgctgataacgccgaccgtcgcccacgtcgcccctccgctggccgcactggaaaacgacgcggcgctgtttgcccaagccaatctggccaccttgcggctcaccatgccaggcagcctgctggacatgccggggattgccatgcctaccggccatgatggcgatggtctggcgaccagcgcactgctgtcgctgccggccggcgacgatgagcgtctgctccgaatggcactcagtatcgaatatcggttgacgcaacagaattaa

SEQ ID NO: 428456 - DNA, 1011 bp, Serratia marcescens
atggaaaaaacgagagtggagaaaagcagcggtgaagtgcgcgccggcgcgcgttatgaaatgatccgacaaaccctggatgaggccattcgtgcggggtcggtgcccgcaggattggtattgcttgaagggccgctggcggacatgtttggtaccagcagggtaccggttcgcaaagcgttggggctgctccatcaagaggggctgatagcgcgtttcgaaggccgaggttttatcgtgacgcctgaagggggcgaagtagagccgcagcgtttgccgcttaaccgagccgtgttgggattgtgcccgcaggaagaattggtggatacccgtagcacgagtgagaaggtattcagcgatctgcaggaggcgttgtctacctgcatggtgtttggccactaccaggtcaatgaagccagcgcggcggaattttataatgtcagccgcagtgccattcgcgaagcgttgatgaggctgcgcgatcaagggctggtagagaaagagccctatgcgcaatggctggccgggccactcaccgcccgagaaatcaccgatcattatgaaattcgagcctgtctggagcccgcggccttgctcaaggcggcaccccatctctcgcgccagcatgtgttagacagcctggaacgcctgactcagctggaacagggcacattttccctggcgagcctggagcgggtagaggaagacttgcatatccattgtctggcgccggcggggaataaaaccctgctgggggtgttgcgtcaaagccagtcgccgctcatcgtcacgcgtattttctacgatatgctggggattaaggttgaggaagcgatgttgaatgaacaccgcctggtgttgcagatgttgttgcagggtgccaatgacgcggcggcgctggggctgcaggagcatctgcgtcgcgcacagatgcgtaccttgcaacggctgaaggtcatttcggtattgccggaacccgccttgccgccttatctgttgcggctgagttag

SEQ ID NO: 428457 - DNA, 864 bp, Serratia marcescens
ttgaaaaaatcaatgttgctctttttgccgctcatttattcatgcaatgtatatgcaaataaaaatctctgctctgaaaaaacatcagccaacaacgcctttaataatgccatcttggctcaagagtggtcagctaagaaaacgcctaaaaaaatcagcatgcgtataaccagcaaggatgactatatctcggctgattcccaggtagagtttgatgactgcggtaccctgctgcattcacgcgctaaaaaaaccgtcaggtcacaaattaacaagagtattttagtgatccagttcagcagcacgcttgataaaaaccatagcaactgggattacagctcaacatttaacatgtctatgattgagaatgacaatgcccgccatgagctgatggcgcaagaaatcagcggcaccgtgctcaccgatggcggtggccgaatcgtccgttcggaagaggcatccgacctgctagtcaagcaaaagcaccagtcaagcaaggcggtaacaacatatttagccgatgacgccgggaggctgtccaaggcaaaacgcgttagtacgctgggcaatgacagtggcaacaccgtttatagttatggcgctaaaaatcttttaataagaacaaaatcaggtacaaccaccgcagattttacttatgataacgacgatagagagttaaccagcaaagaagtgatgaagtccttcaccacagaaacgaccacaaccacctgtaaaagctggaataagtttggaagatgtattaatgctcagcaaaatatttcaattttgattaaagacgtgaagaaaaaccgggataacgtctacgaccacgttgcagaaataaagtatgactatgtttactag

SEQ ID NO: 428458 - DNA, 732 bp, Serratia marcescens
atgctaacatctgatccacgttatcaacttctagctgtatatagtgcacaacatctccgtgcggttgctggcagagtcattgctcgtgctgagctgccacctctgaatttttctacgctgctctggcgctcaatgtggcaatcaccaattccacctcttttacaccctgaatcaggtaacgaatttttacaggaaaacggctgcccctatccacgaccttatggccttgagtcgtggattacgaccaataataaaggtattctcgatttccagtctgctaataagattatttatttggctagttttattgaaaaagactggggtcttagcaggcaaatgccaatatggagaaaacacacaacgaaccggatcaacggctatgcatataatattgttcagatgtttatgtatgatgggctttcggatgcttatccaactgaatactatgttacgttcgactacgatcttttgagtggcgagttgaaaaataaaaggcttaatcactgggtgtctacataccaaaaaaaatcgaaagatccctttgtcgttgcatcaatggaaattactcggatatctaatatgagatcaatatttctatggcaagttacgcttgagacagttaaagggttgtgtacatctttaacggtggaggctacaccgggtgattcatatttaagctatgttcatcccgtcagacaaaagcgagttcatccatttattggctatatttga

SEQ ID NO: 428459 - DNA, 201 bp, Serratia marcescens
gtgaccgtgaaaatacctttgaacctcagttaccagacgcgtattgcgcagatggacatccagatttggtccctctatgccaaaggcatgaccacccgcgaaatcgtcgccacgttcaaggaaatgtacgatacgggcgtgtctcccacgctgatatctaaagtcaccgatgcagttaaagaacaggtgacaaagtggtaa

SEQ ID NO: 428460 - DNA, 408 bp, Serratia marcescens
gtggctaaggctgcgagcaccggtggctataacagcatgaccgtgcaggacatgatgcagggagccgcggagaagcgcttcgaagtgacgctcccggacaaaccggtgcagtggctgacggacaatggttcggcgtatacgacgcatggcacgcgcaagttcgccacagagttgaatctggaagcctacacaacggcagcgagcagcccacagagcaacggcatggccgagcggttcgtgaagacgatgaaggaagactacatcgcgttcatgccaaaaccgaatgtgcgaacggcgctgcagaaccttgctgaggcgttcaatcattacaatgaaaaccatccgcacagcgcactgggatatcactccccgagagaacaccggcgcctgcgggcattgttaacttaa

SEQ ID NO: 428461 - DNA, 291 bp, Serratia marcescens
atgttcctgtttgttagcggcgatgaaattcacatcttaaagtatttcatcttcgggcctggttttgtttccagcgcgatttataccacggtgattacgctcggctcacagcaagcgagtgtttcctcacccaatctggtgaatttcattctgacctgtggaacagtcggcaccatgttgacctttgtggtcaccgggccaattgtggcgcacttaggcgtacatgcggcgctgttcggcgccctgctgctggtggcgggcgcctatctggtggcgaaacgcagcttttga

SEQ ID NO: 428462 - DNA, 966 bp, Serratia marcescens
atgaatgaagtcatctcaacagcagttaacggcgtcgaatttgaccctcgatacagtgaaattgaattcacgttatcggaatttgacagccaaaccgatccgctgaatgccgtggataatgcacgcgacatcaattggcatgctattcgcgagcaatccgccgccttacttgaacagtgcttcgacttacatgtcgtgctgtggtttatgcgcgctaaccttcatatcgatggtttttcggctgtctatcaaggcatcacgactatcgacggcaaatatgccgaagaggggagcaccattttccctcaggccgatatggagccggcgacggacagcttccatgcggccgcgttaggctggctagccacctcgtcctgcctgcacgaaatcaaaaacagcaagatcttccccgatacgccgttaaccaccgatgaactgctcaatatgcgaatggacgagcaggaaggcaaaagcctgcatttttcggaagtggtgaaggtgttggggcaggctgacagctattttgccggcagaaatatgccgtcattaaaagaacagctgtcgcagggaatcgacgccctggagcgcgtggaaaactacgccaacctgcaggctgaagattaccgtctggactgccgccaggtacgcgactatttagcgctcttcagccgccaactgctctctctcgaacagcaggaattgccggaggagatcggcgctgcgccggctgacgcggaagcggcggaggcgccggccaccctgcctggcaaatatatccgttcccggcaggatgtcatcttgctgttggaccaggttttggactatttccaaaactatgagcccagccatccggcccccattcttattcgacgttcacaaaaaatgatcggtatggacttcgcgacgattgttgaggagcttttgccggaatctctggcctcgttaaatcaattgtccgggaagtaa

SEQ ID NO: 428463 - DNA, 558 bp, Serratia marcescens
atggctaaggactcaagctctcagaaatttatcggtaaaaataacgcgccccgcgtgcaaagtgaatatgacgtagagctctacggttcacaaaagaaagtagagttaccttttgtcacgggggtcatgtccgatctctctgggcatcggaaaaaacctttgctgccgatcgaagagcgaaaattcctgacgttcgatcaggacaatttcaacgatcgcatgcgggccattaaacctcgtcttcaattttacgtggagaataccttgagtgaggacgatgcgctgctggacgtggaattagagtttgaatcgatggaggatttttcgcccggcgccatcgccaaacgggttccgcagatgcaacgcctgctggaggcccgcgaacatctcacggaactgatcacgtatatggatggcaaatccagcgcggaagaggtggtgaagaatctgctggagaagcccgattttctgcatcgtttggtgacggatgcacgtaaaacggtcgcggatgcggaacaggatgtgcaggattccgggaataaaggagatgaggaatga

SEQ ID NO: 428464 - DNA, 1527 bp, Serratia marcescens
atgagagcgaggcaacgacgctattcagctaagcagcaggcaacggcggtcgctgaagttgaaacgcaggaaacggaaaacgagcttgacggtctgctcaagcgttcgttccggcccagaacgaacgaggcctcagaagcggttcgtcgggccatcggcacgctgtccgaatatgccaaccagggcaaggtcaaggtcagccaggatgtcgtattgaccattgaatcgctgatcgcccagatcgacgagcagctttcgcagcagatgaacaatatcttgcaccataaggagttccagaagctggagtccgcctggcaaggtctgagttatctggtcgacaataccaacgtcagcgaaacgctgaagattcgggtattgaacatcagccaggatgagctgacgcgcaatctgcggcgctaccgaggatcggcctgggatcaaagcccggtgttcaaacaaatttatgaacaagagtatggccagtttggtggcgagccgttcggctgcatcatcggcgattttgagttcgatcacagcccgatgagcgtgacgctgctgacggagctggcgaaaatttccgccgcctcgcactgtccgtttatttccgccgcttcgccgtcgctgctgcagatgagcaagtggaacgaattgggcaacccgcgggatatcggcaagattttcaccacgccggaatacgcttcctggcgccgcctgcgcgaaagcaacgattcgcgttatctggtgctgaccatgccgcgtttcctgtcgcgtttgccttacggtgcgaagaccaacccgatcgaagagttcgctttcgaggaggccgtcaggccggatatggatgatgatttctcctgggccaactcggcgtatgcgatgggcgtcaacatcaaccgcgccttccatgagtacggctggtgttcgaaaatccgcggcatcgaatccggcggctcggtggaggaactgcccgcctacgcgttcccttccgatgagggcggttatgagctgacgtgcccgacggaggtcgccatttccgatcggcgcgagcaagagctgtcagacgccgggttcttgcctttggtgtatcgcaaacattctgatttcgccgcctttatcggttcttgcaccatgcatgccccggcgaaatatgaagatccggatgcgacggccaacgccaagctttcctcccggctgccgtacatttttgccacgtgccgctttgcacactatttgaaatgcatcgtacgcgacaaaatcggttctttccgttccagagacgatatgcagctgtggctgaatgactggctgatgaattacgtggatggcgatccttccgtgtcgacggaagcgacgaaagcgcgtcgtcccttggccgccgccgaagttcgcgttgaggatgttgaagacgatccgggttattaccgcgcacatttctatttgcgcccgcattaccagttggaaggcatgaccgtgtccttgcgattggtatcaaaacttccgtcagccaaaaaagatgggagcagataa

SEQ ID NO: 428465 - DNA, 525 bp, Serratia marcescens
atgagcactaaagctttagtagactattttttgaagattgaaggtgttgacggtgaatcccctgaccaaacttatccgggatggattcagctgcaagcctggcaatgggcggaggaaaatgccgggcgctggggattcggcagcggcggtggttccggcaaagtcgaaatgaaagactttgaattccgtatggtgagcaataaggcttcgccgaagctgtttctgatgtgcgccaccggcgagcatattcctcaggcaaaacttgtttgccgtaaatcaggccagggtcagcaagattttattgccgtgaccttcagtaactgcctggtttcctcattcaagaccgtgggtaatatgccgctgaactccaccatcggtactgaaatcgataccgtgctgcccaccgatgttatcaagctgaatttcgcacgtatcgaagttgagtacaaagagcaaaacaacgatggctccatgggtgcggtgattaagacggggtatgacctcaagcttaacgcccgcatctga

SEQ ID NO: 428466 - DNA, 447 bp, Serratia marcescens
atgaaagcgtcattacccatgctattcgataagctcagcgtgagaagtcaaagcggcagcgccgataattggcggcgcgtcctggtgcgcgatatcgaattcttattgaatgacgcatcgcgcagcgcagatttaaaacttcacgattatgcgcacagcgaaagctcggtattgaattatggcctgccgtcgctgagccaacgaataccgattaataccgatccgctaacgctggcgagacatatacaaagaatcattacgtcttttgagccacggctggatccgaaaacgattcgcgtggtgccggtagtgaatgagcgtcaatcgtatgtattggcgatcttattcgatatctatggcacctgctcattaccgggtgacgaaatgctggtgaatttgcgcatagctcttgattattcctgtggcgccgtacacgtatttgattaa

SEQ ID NO: 428467 - DNA, 1842 bp, Serratia marcescens
atgttcagtgagcgttttctccaattatataatgatgagctgcgttattttcgcgaggccggccgtcagttcgcctcttcgcatccccaggtcgctcagcatttaggcatgcatatcgacggcgtgctggatcctttcgtcgagcgcctgttggagggctctgcttttctttgcacccgcatccaggaaaagctgaacaacgagcagccagaattcgccttgcaaatgctttcgcgcctggcgcccttgtggtacacgccggttcccgcgatcgccaccgttgcgattaagcccgatctctcttttccccagtggcatagccaggtcgacctgccgcgcgggagccgaatgaccctgaacgatatctcgctgaacaacaaacccgccaccttcaccacggcgcggcatattaaagtgcagcccgttgagattgcactggcggaatgcgaaatcctgccgcctcaccatttgcccgacggtgccgccaggcatatgcaagactgttcggcctacgtcagaatcggcctgaccacgcacggcgtgttgcccatctcggaactggatctcgagccgctgcacctgacgttggcggaagatacggtgcgggccaatcagctgatggccgcgctgcttaatcgcaccttgcgcatcgtgctatgggcgaaaaacgacgatcggccggtcatcaaagtcttgcaaccggaaagcctgcgtctgggcggcgtcggcgacgaagaggcgctgttgcccaccgcggtgggggaattgcccggcaaccgcctgatgcgcgagtactttgcggcgccgagccgcttcttcagcctggagctgcatggcgtgcgggactttctgcgccaatgtgaacgcgtccatgaattcgagattttgttcgcgcttgagcaacgcccgctaacgctgatcggtcgcgtcaacgccagggattttcatcttttcgcgaccccggtcatcaacctgtatcgccgccattgctcgccggtgctgctgacgggagagcgcacggagcatcagctggtggtcgatcgtttgaacacctcgctgtatgagattcatagcgtcaaacaggtgaagggcatgctgcccgacggcaacccggtgattttctcttcgctgcaggccgacgtgcactacgactgcgagcgggagccggccggctatacgttgcaccgccgccgggaaccgtcgccatccaaatacaacaacccgcacctgcccaacgaagatacctttatcgccatttcgccgggcaaaagcggcatcgacatcgatgacatcacgtcgctcagcgtcgaggcgctggtctgcgaacggcatctggtgcctgcgcacctgcagcaaccgcattttcagctggaaacggcgatgccgatccaccaggtggagatcgtccgctatccgagcaaccctgtcgcggtgcctaacatcagccaggcgtggcaagcgatccagatgctggcctccaatcctttgcgccatgcgcgccctgacgtgcaggattgctcggcgctgttgcgcgactggctgtcgttgttctgccatcaggatgactccagccagcgcaaacgcatcgccagcatcaaaaacgcctgggtggagcaccacttcgaacgcaatcaggggccggggccgctggcctggatccgcggggccgagatcgccgtcaacctaagcgccaaccatcatgccgatcacggtgcctatctgttcggcaaaatattgcaccacgcgctgagccaatacggcgacctgaaccaaacgttgagcatgaagctgttgctggatggggaaacccacgccgactggggggcgctctactatggctga

SEQ ID NO: 428468 - DNA, 1029 bp, Serratia marcescens
atggctgatatgtcgctgatgcgcgaaacggcgctgtcgttggaacaggcgccggcgccgggggcccaaggcgaaagcgtgggccaggccgaaatccgcgggctgtccaatcggcaggatttcttcgagctgttgcggcgcatcgagcgtgcgcagccggatgcgccgcggctcggcgtctccaacgatcgcagccgcgaaaggctctgcatcactcagccggcggatatgggctttgcctcgcgtgaaatcgcctccatcgtacaacgccctacgcaggtgctgattcaggcgcggcatttcggcatgttcgccccttacggcccgctgccgatccatgtgaccgagcacgcgcgcaccgaagtcatcgccaggcgtaatcaggcgttccagcagttcgtcggcatcgtcagccagcgcttcgccgtactgcattaccgggcctgggcgcaactgaaggcgatgatcgggcatgaccatgacgatgacaaaaacccgttcttgcatcatctgcggcagacggtgggcgtcgacacgacgttggccgtgaacccgcatatccagcgcctgcgcgaagcctatcccggcatttatctgccgggccgccgctcgctgcgccagcttaacaagatgctggcggcctacttcgccgttcccatcgaaattacgccgcgctacgccaaatggatcgacgacggcaaaaaaaacggcagccaaaagctgggcaagctagggagcacgcgcatcggtagccgctttttcgatgcccagtacggcgcgcatattcaaatcgggccgctgggggccccgcattatcagcagtatcagcgcggcagccggcggctgcaggcgctggtgagcatctgccatgacttcacgagccatcagctgatgttggacgtcagcctgctgatcgccacggagccgggcatggcggcgcagctgggcggcaagtcgctgagtaaagacagctggctgaaacctaagacagggacgtttaggcagctggtttatcaatcaacaacttaa

SEQ ID NO: 428469 - DNA, 2586 bp, Serratia marcescens
gtgtatcaacgagaacgtcttttttcgcgattgggccactttgcttatcagtccttcgttgaagccaccaagctgtgccggaccttcaggcacgaatacgtggagcttgaacactggctgaaagttctggtggacaaagaacgcggcgacttgccgctgatcctggcgcactacgcgatcaatattcagcgcgtaagcgatgcgttggatcgcattctccataccttgccaaaccggacgaatgcggtggtggatctgtcgacgcagttggaaacggtggtggaaagaggcctgctgatgagccagctcgccgaaacgccgtccggcggcgtgcgcaccatccatatcctggtcggcattctgcaggatcccacgctgcagcgcagcctgtaccggctgagcgaagagtttaaaaaactgccgatcccgcagctgttcgacgactacccggcgattctggcggagtctgtcgaacacgaggaggaagaagaagaaagctacggcgcgctcggcgaggcgccggatgcgcccgagacggtcgagatactcgataaatggtgtgcggacctgactcgtcaggcgcgcgacggtgaaatcgacccggtgattggccgcgaagcagagctgcgccaggtgatcgacattttgctgcgccgtcggcagaacaacccgattttggtgggcgaagccggggtcggcaaaacggccgtggcggaagcgctggcctgcaagatagcccaagggcaggtgccgccgctgctgcagggcgcccggctgctgtctttggatctggggcgcatgcaggccggggcgagcatgcggggcgaattcgaatcgcgcctgaaagcgctgatcgacgccatcgcgcattcggccgtgccggtgattttgttctgcgacgaggcgcatacgctggtgggcgccggcgggcaggccggcaccggcgacgccgtcaacctgttgaaaccgatgctggccaggggcgcgctgcgcatggtggcggcgaccacctggtcggaatacaaacagttcatcgagccggatgccgcgctgacgcgccgtttccagtacgtgctggtttcagagccggacgaagagaatgcggtgaacatgatgcgcgccatcgccccgcattttgcgcagcaccacagcgtcaagatccgcgagtcggcgctgcaggcggcggtgcatttatcgctgcgccatctgccgtcgcggcagctgccggacaaggccatcagcctgctggacaccgcctgcgcgcgggtggcgctgagccagcatgcgcagcctgaaaaaatcgagtcgctcgaggccgggctggcggtgaagcgtaccgaaatgcacggcctgcaggaagaaagcaaattcgacgatctggcgctcacccgcatcagcgaattgcagcagacgctcagcgagatggaaggagagctggatgcgctgcgtcagcggcaggcgcaggagcagcaggcggtcaccaccttgctcgatgcagagcagcagtcgccggatcgtttgccgcagctggccaccgagttgggcgagctgcaggacggcggtctgccgctggtgtatccgtgggtggacgatcgcgtcgtggcggaggtgttgtcggattggaccggcatccccaccggccgcatgctgcaaagcgatctggacaatgcgctcaacctcaaccaactgctgagtcgccagattttcggccagcagacggcgatcgacgaaatcgcgcaggcggtgaggatctcccgcgccggcatccaggcgcacgatcggccgttgggcgttttcatgctgtccggcccgagcggcgtcggcaaaacggagaccgcgttcgccctggcggaggcgatgtacggcggcgcgcataacctgatcgtcttcaatatgagcgagtttcaagagtcgcacaccgtctccacgctgaagggggcgccgccgggctatgtcggctatggcaagggcggcaaattgacggaggcggtgcggcgcaaaccctattccatcgtgctgctcgacgaattcgacaaggcgcatcccgatatccatgaagcgttctatcaagtcttcgacaagggcgtgatggaggacggcgagggccgcatgatcagcttccgccagtgctttattttgatgaccagcaacatcggcgccggcgaaatagaagcgacgctggcggaaacgccggagctgaaaactgaggcgttgcgcccgatgctgcacgacgtcctggcgcgctttttcccggcggcgctgttggcgcgcatgaacgtcattccttacgtgccgctttccaccgaagcgataacccatatcgccaccaaacagatttcacgtttacagcagcgtttgcacaaagaagtgggcgtgtcgctggtgctggagggcgacatcccaggctggatcgccaaacgcatcagcgcccatccatcgcgcggaagagcggtcgagtcgctgctgcagcaggcgatcttgccgccgatcagcaatgaagtgctgcagcgcaaacggacgggacaggaactgcagaatatccaactcatggtcgagaacgatagcttaagtgtttatttcgactga

SEQ ID NO: 428470 - DNA, 2262 bp, Serratia marcescens
atgcctttaatcgaaattgataacccggtgttagccgaattaaatgcgtttccactcagcttcaccacccaagaagggttgtcgagcaactcgcaatattcgctcgaattcgaatgcgaacaggcggacgtggattatgaatccttgctgggtgaagggatccgcatccagatagaaaggccggatttcggctcgcggcctttctatgcttacgtgatcggcgcgtccgatgcggggcagcatcaggataagttcgtgtacaaactggagctgagcacctggctgtggtttttgatgcagaaccgcaacagccgtattttccaggatctgaacgtgctcgacatcatcgagcaaatcttctctcgctatggctttgccgactaccgtctggatattcaaggcacctatccgacgcgtgagtattgcgtgcaattttccgaaacggattttgcgtttatcagccgcctgctggaagacgaaggcatctggtattacttcgatcacgccgaggataagcacacgctggtgatcaccgaccggcaggatttcgacgatctggatttcggttacgccgtgttgccgttcatgccggacagcgaagaaaaccgcgccatccgcgaagggatccagcgcatccagcgttcccgcaaagtgcgtccgaatgaaatcgtgctgcgtgacttcgacttccagaacccgcgcaagaacctgcaaaccaaggtggaagagagccgcctcggcctgcagaacacgccgctggagtggtacgactacgcggcgggctatgtggatactgaacgcggcgagaatctggcgcgtttgcgcctggaagaaatgcaaagcgacggccacctgctgtttggcgagagcaacgccgtcgggttgatggccggcaaggacttctccttgattttgcacccggacgccaaccgcaaccgccgcttcaaactgacccgctgcgactatgtgttcgtgcaagatggccccgacagcagcagcgacggccgcaacgtgacctgccgtttcaacgcgttgaacgacgacgtggcgttccgcccgctgcgcgagacgcccaagccgcagatgccgggcatccagagcgccaccgtggtcggcgcgcccaattccgaagtgcataccgacaagtttgcgcgcattcgcgtgcacttccactgggatcgctacaaaaccaccgaggaagacagctcgtgctggatccgcgtggtgcaggcctgggcggggaaaggctggggcgtgatcgccatgccgcgcgtcggccaggaagtgttggtgacctatgtcgacggcgatctcgatcgcccgatggtgacaggtatcgtttataacggcgataacccgccgccttatcaactgcctgaatacatcaactactcggggatggtgtcgcgttcgctgcgctacggcaaaccgcagcatgccagccagctgactttcgacgacaaccgcaacaacgaacgcgtcatgctgcacgccgaacgcgatctgcaaaccacggtcgagcgcaaccaggccaccgaggtggggatggacaagttcgacatcatccgccgcacctttacggactggttcaccaaccacgtttcttacaaggattacgtcttcagcattaccggatttaacgcgtcgatcaccggcgtcagcgcctcgatgaccggcgtcagcctcaccgccaccggcgtcagcacctcgttcaccggcgtcagtacctcgttcaccggcgtcagcacctcgtttaccggcgtcagcacgtcgttcaccgggttgagcacgtcatttaccgggcagagcaccagctgcaccggcgtctccaactcgatgaccggcgaaagcaactcctttaccagcatcagcaacagcatgaccggcgaaagcaacagctacaccacggtcagtaccagccagaccggcagcagcaccagctttaccggcgtgagcgtgagcaccaccggctcatcgaccagcaccaccggctgcagtatcagcaccaccggttcctcgaccagcaccaccggctgcagcatcagcaccaccggcagcagcgtgagcaccaccggcagcagcgtcggcaccaccggcagcagcgtcagcagcaccggcagcagcgtcagcaataccggcagcagcgtcagcaataccggcagcagcaccagcacgacgggggtgtccatcagctacaccggcgcgtcactgtccgagaccggcgtcgatttgaaaaaagtcgggatgcaaagcaaaaactaa

SEQ ID NO: 428471 - DNA, 2226 bp, Serratia marcescens
atgagaatcatacggccacagcaattggtagtgattaaagggggttaccagatcggcgcagacagccggctcggcatcagcgtcgtggccggatgctacctgtcccgaccggaacacttcgtgaacgaagccgaaatctgggaggcgtggaagcgtgcgccgctcagtctgccggtgttggacgttgctgagccgaagccgttcgccgaatacctgatcgccggccatgccggcgtcgggcagccggtaaaaacgttggacgtcagcgccgacatcggtgggcttaagcgccgttggcgggtggagggcgaagggcgacgcggcgcgatgggggcggaaccgttcctcagcgtgccgctggaccacacctcggcctggggcggtaaagacagcaaggagaacccggtggggcgcggttgcaatgatgggctgcggccgctgctgatgaccttgtccgccgaaggttccgcacaggagcgttccccgctggcggcgccggcgccggtgccacacgagttttcgctgcgcaaggcgcatatcgataaggtggcgggccagatcgcgagcaaagcctatctggagaaggcgtttcccgggttgccggccgatatcgatcggcgctattaccagatggcgccgccggcgcagtggctgccggaagcggcgtggccggatagggtgcccttcgaactgcagggcgtcggcgcgcagagccaggcgattcgcggcgagctgccggcggtgcgcgggcgggcattcatacgccgccacgatagcgaaggcctcgaggaaatcgaactgcagcgaaaaacgctgtggttcctgcctgacagcgacatggcgttgattattttcaccggcaatgcgccgctgacgcatcttctggacgagtccatcgagtccctgatgctggcgttggatcgttgcgacgcgccgcgcccgttcgattatttccggcaggtgcaccataaacgcagcgacgacgacgcttcgcccttcgagttcctgttcgatccggatctgatgccggcggagatggggttgaacgtcatccaggcggcgtcggatcaccccagcgatctgcgttacgatccgtcgcccacgtctttgggcgactccgccgttttctatcaacgcattcgcgaggcgattgccttgcaccagcaacagacggcggcggagcccgcccccgtgacgttgcccgatttgccggatctgcctgccgaagagggtaacgacgcgtttttccccgctagcgcgaccgtggaagggaaaaccttcaccggattgcgcagccctgcgctgtcggacaagcattttctgcaatgccgttttgagcgctgcgatttttcacaggccgttctggagaactgcaccttcgaaaactgcgtttttgatgcggtcaacctgacgcaggcggcgctgcgccggatccgcatggtgtcgtgcaccctgcaaaagccgctgatggcggaaagcgtatggcaggaggcggtcctcgaaaaagtgacgctggaagagccgcaggggcaaggcatgcgggccgagggcgtgaagctcgattactgcgtcttcgagcggggagatttcaccgcgagccgctttgagcgcggggcgattggcaacggcatgttcaacggctcgacgctgatccgcgcgcaattcctgcaaggggagctggacgcctgcgtcttcaaccgctgtctggccgagggggcggtggcgctggatatggcgttaaccaagaactcgtttcttggcggcaattggcgcggcgtgcgcttcgaacgttgccgaatcgagagcatgacggcggggatgcaggtgaatttctcccacggcgtgttcagcgactgcggcttcaccaaagtggggctgaaagcggcgcgtatggagaggtgtcagctgcagtacagcgttttcaccgaatgcaatttcgacgaggccgacctgacggcttgcgcgatcgtcggctgcgacctggccggcgtgcggtttaaagacagcgtgctgacgcacgcccgctggcaaaacagcagcgcccagcaagcgatgttttataacgccgatttgcgcgatgcgggatttgagcagtgcaacctggcggcggcgaatctggcgatgacctggcaggacgccggcacccgtttcagcgggtgtttgctggagcgggcgtgctgggtaccgcgcagaattattcagggggactatgcgcatgaaaactga

SEQ ID NO: 428472 - DNA, 1161 bp, Serratia marcescens
atgcgcatgaaaactgaaagccgcgtgattcagcaggccctgcctgacaccgaggtgattgagctggaggtcgctcaggcggtgtcgcagacgccgcccctgccgcgaaccttcaaaaagcggcgcttccacgatcgcgagctgaaagggctgacgctgagcgactgtttttttatcgactgccatttcgagcgcgtcacgtttgaaggatgcgatttgcgggcggtgcgctttgagggctgcaccctgaaccaggtcaacgtggtcggcggcagcttgctgcgcctgtcgttcaacgaatgccggtttgacaacctgacgctgcaacgggggctgctgtgcaatctggcgtgcaacgacaccacgctgcgtgggtgctacatcggcgactgtctgctggacgactgcagtttgatccagtgcgaggtcaacggggcggaagtcgagcgcagcagcctggggcacctggccgtgcagtccagcatcctgaccaacctgatgttccaacaggacatcattcaggacgccaactggtatgcctgccaactcacgcagtgcctgtggcaggcatcgaccctcgaacgccacatcatggggagctgccggctggagaaatgcagctggcagaagatagaggggcaggcgcgcatctggttcacctgccgcctgtcaggctgcaacctggcccagctgcggctgcagggcgccagctttcaccgcagcgagctggaagggtgctcgttcgccgacagcgatctgacgtcggcgatctttgccgaagtgcaggcgctgcgctgcgatttcgagcgtgcgacgctgaccctggcgcaggcgcagaaggcccggttcagcgaatgcgcgatgaacggcgcccactgggggcgcgccaggctgacgcaggcggagttcagggcgtgcgatctggcgctggccaacatggagcaggccgagatgcgggaggcgaacctgatggaacagccgttgaccgccgcccagcaacagagcgcccgcctgcatggggcgaagcgtcatcgcgccgaaaatgtgccgcttaccgccgatccgttcttgagtgcgatcgacgcctggtatgcgcatcaacaaccgggaccgcggcaaccgtcgtatcaacggccaacaggagtaagcagatatgtataa

SEQ ID NO: 428473 - DNA, 615 bp, Serratia marcescens
atgtataagtccagaagagagcatcagaaggtctatgccaacgccagggtgacgcctttgcagttggtgcgcagcgctccgcttgccgaacaaggggggcgcaaggtggtgacgctggcggccgacgccaatggcggcctgtatgtcgatggcatgcgcgcccactgcctggcggtcgccaccagctgcctggttcagccgctggcgggcgatcgcgtttgcgtcatcgtcgacggcgacaaattggtcattaccgagatcctgtcgcggcaacaggcgcacgccgtcatgacgctggacagccgcagcgccaacttgcgcatcgtggcgccggagatcgaactgcaaggcggcaagcggctgacgttgcgcagcccgcactttacgctgctgacgcgcagcagccgctgggtcgccgaaacgctgcaccaaatctctcaacgcctgtttgtgcgcagcaagcacgcaagccggcgggtggaggaaaccgacgaggtgctggcgaagcacatcattcaggatgcccggcaatccctcgtcatcaacagtgaaattggttccctgaagtcttcggcggtgctgaagatcgacggcggccagatacatatggggtaa

SEQ ID NO: 428474 - DNA, 366 bp, Serratia marcescens
atgaccgcagccaacaacaacacggccgggatcagcttcgccggctgtgacccgatgatcccggcgccgggcccgaataccgcgcccaacaataccggcataccgaacgtgcctaactatttcctttgcggcggcaatgaacagaacatcggcagcattcgcgtggccaccgtcgattcgggcggggtgatcggcgccgcctcggggacgcattcggcacagatgcagccgatgcaggggtcggggaagtatttcaccggcggcatgccggtcacgcggttaggtgattccagcacgacgaacaacaacaacatggtcgccactcaggtcgcgccgagccagaccaaatgtttcgttaatgcatag

SEQ ID NO: 428475 - DNA, 507 bp, Serratia marcescens
atggtgaagacgctccgggggatcgcggcagggggactgttggcggtggggatgctgagcgggtgcagctggttttctcacgacgaggctgccgatgcggggcgtcgattgcggtttatcgatgtcgaggtgaccgccaacgacaacgtgaacccgaatgcggccggggaggcgcagccggtcaaggtgtgcgtcatcgaaaccaatcgctcggggtggatgcccgaggggattggcgatggcgccccttgccgggagacggcaccgtcggaaggggcgctgagccggcaccagagcattttgcaaccgagggagacgctgcgttatcgcttcgaggtgccggcggggcaagagcgatgggtcgtcgtgggggcggaatttcagcaaatcagcggggtattgccgctcgccgagcaaaaatcgcccgcgcaggctgattcgcaaatgaaggtgatggtggggatgacgtcactcagcatagtgactaacgacaaaatggatgaatga

SEQ ID NO: 428476 - DNA, 1359 bp, Serratia marcescens
atgttacctaaacaacgcgtcgcctgggtagaaggcatgttgatggaaccgcagcatttccagcagcaggaacgttttttcgagcacttgattgaagcgcgcttgcgcagcgtcgaaacctttacctgggggttcctgacgctggaaattgacaacgggctattggagcagggcaagtttgcgctgaagaaagccaagggcgttttccccgacggcacggcgttcagcatgcctgaggatattccgctgccgccaccgctggtgctgggagagggctgccaggggaaagtggtgtgcctgtccgtgctgatggacattgccggcaatgcccagatcgatcttatccaggatgagcggaaaagcagccgttttcgcaccatggacgccgacgtgccggatcgcaaccacggtgtcagcctggagggaacaccgcgcgtgtgcacgatgcagctggggagtctggtgacgcggctaagtctggaagatgcggtcagcagcgcggaaagcgtgctgccggtcggcttcgtgcgcgaactcaccagcgatcgtcgggtgctgctggatgagcgcgccctgccgccgatgttggacttccgcgccatcggctggctgcccgcgttcaccaccgaattgcttgggctgatcagccagcgtctggagtcggtgttccgtccggatgtgcatatgacgatcggcgggctgtccgagctgctggaactgctgctgctgcaaaccctgagcgagttcaatttgcgcatcagccaactgttggccagcccgcaggtgcatccagaaaccctgttcgacacgttgttgagcctgctggggcggctcagcatcattcccggcggcgagcggctctgggaccgggccgacttggtgtatctgcacgatgagccgcacaactgctatttccagctgttcgcctcgattcgccgcgcgctgtcgctggtgatcgaagcgccggcggtggcgctgccgtttatcgatcgcggcgacagcatctacctgtgcccgaacgactcgcagctgcggctggaaaaactggtgtttgccgtcagctgcggtttgtccatcgagcatctgcgctcgtatttccccgcgcaggtcaagctggggccggtcgagaaaatcattcagctgatcgatctccaattaccgggcgctcgcttgctgccgatggcttcgccgccgcggcacataccgtattacccgaacagcatctacttcgaggtggatcatgccgacccgatttacaaggaaatgatgggcggctcggcgatggcgctcagcatcgtgggtgatttcccggacctgcgttttgacgtctggggattaaggcaagggagggtgggatga

SEQ ID NO: 428477 - DNA, 1512 bp, Serratia marcescens
atgaacgaattcgagaggaaaatccgcgaggcgatggcggtaacgcgcaacaacgcgaccccgcgtctccccacgtccggctcggtgggcaaaaccacggcggaaatcgccgcgctgtccttcggcgcgcgggcgttggccgccaagctgcggccgggaagcgccggggtggcggcgccccccgaacccaaaccttatgaagcagaaaccgccgtcccggaaagcgtcgaacccgcgcctggcgatcgccaggccgatgcgccgccgacctcgagcgggctgtttggccgcgccgcgctgagcaagcccggcgtaatgatgggccactgggacaacccgctgatcgccgccgccattccggtattgctgcaggtggagcgggtgcgcgatcagaaacagctgaacccggcggcggtgcgtgcgcagatcgtgcgggagatccaacaattccagcagacgttgctggcggatcacgttgcgccgggcgatgtggacaagctggcctatctgctgtgttcctacgtggacgagtgctgcatgagcacgctggagtccggggaactgaacctcagcctgctggtggagttttatcgcgatgcctggggcggggaaaaatgcttcgagcacctgcaagagtatctggccgcctcgccgcgcaacaaggagatcctggcgttttacgatctgatcctgtcgctggggtttgaggggcagttccacgtgatggagcgcggcgcggtgctgttggccgacgtgcgcaatcgccttgacggttatctgtacagccagaatccgacgcagacgctggccgatgccgaaccgagcaaagtggtgcgcaaggccacccgtatcacgccgctcaaactgctgtgctacggcctggcgatagcgctgctggcgtatgcctcggccgcctggtatctgcatgaccagtcccgcgcgctgcgcaacgccattctggcctggacgccgccgcagccgcgcaaaatcaacattatggagacgctgccgcagccgctgccgcaaatcctcagcgaagggtggctggaggtgcgcgccgatccgcgcggctggctgttgatcttcacctccgacggcgcctttgccaccgggcagtcgaagctgtcggaagagtttaaaaagaaacgcaatattgagcgtctgggggaagcgctggcgccgtggccaggcgatctggaggtgatcgggcataccgacaacaaaccgtatcgcaacacctccaacaactccaacctgaaattgtcggaagcccgcgcgcagacggtggccgacaagctgcgggaatcattggccaacagtaaatacaaccgcaccgtgacgtcggtcggcaagggcgatcaggagccgctggacgacaacgcgacggaagaagggcgccgccgcaaccgccgggtggacatcctttggaaaatcggcgagagggagatggcttcaccgtctgccacgttgaatcaggcaggggtagccgccgaggtccccgaggataactaa

SEQ ID NO: 428478 - DNA, 3480 bp, Serratia marcescens
atgatacgtagatcattcatattggtgattgccttgctgctgtgtgcggtggtgtggtggattgggccgctgatcgccatcggcacctaccggccgctgctgtcggtctgggtcagaggcatcatcatcgccctgatcctgtgctgggcgctgtggccgttcgtggcgacgtttttatcctgggtgttccgccacgcgcgggcgccggccccggctaaaagaaaaaccgcgcagcgagatcgcgtgacctcgcgtttttacgacgccttgcgcaccttgcaatacgtcggcacgtcgaagcagcgcaccccctggcagcgtttcaaataccgcctgacgcgccgttatatcagcgaaaagccctggttcctcgtcattgggccgccgggcagcggcaaaacctcgctgatcggcgaaagcggcgaacgtttcttgctggctgaacactatggcctgcagcagaccgtggacgtcgggccgacccaggattgcaactggtggctggcggagaactcggtgtatgtggacacctccggtgaatggctgcagctgaacggccttggcgaagacggcgccagggcgcgcgataccctgttcaaactgatccggcgccaccgccgccatccgggcatcgacggcatcatgctgtgcctggatgcacgctggctgctgcatgcctcgctgacggaaagaaaatccgtcgccgatgcgctgcgcgtgcgcctgctggaaatggcctcatggttccgctgcgagctgccggtctatcttaccatcagccacctcgatcaactggtcggcggcgagaccttcctgtcgatgctgggcgacgacctgttgcaaaaagggatggggttcagcctgaaccgggccgaacaaggcgaaaccccgttcgagcagtatgaagatctctaccgggagatggtggcgcgcgtcagccatcacgtgctcgaactgctgcacgatgcgccggacggccagaaccgccaacagctgctgttcttcaccgagtcgttgggatcgctgggcaacccgctgtattcgctgctggagcagattttcccgcaaacgccggtgggctacgcctgccatttgcaacaggtatggctgggcagcaccatcgccttgccgccgcagggcgcgatttataacgcggaagcggcggatatctatgaagcccgtcccaccgggcgcatttaccacccagagctgaattacgccaggcaggagcgcggggtgctgcagcagtcttctcacgccaggccgctcggcagccgcatgagttccctgggccgctatgtgctggtgctggtgctgctggcggtctcttttaacctgctggcgatgcgttacctgtgggagagcgattacatctcttacattgcggcgcgctttgacgaaacgaagcgcatcgtgcgcgaaataccggtcacgaaccgcgtcagcgacgatgtcatctccgcctatgagcagctgggatacatgaacgcgcagctgggcggcgaggtttcgccggtgccgaatccctatttcgagcacaagctgatcaacagcgcggcgcaaaagacctaccaacgccatttgctgcagatcttctggccggcggtggaaaactatatcgcggacgaactcaagaatgacgtttcggcgtccaataaggacgtctacggcacgctgaaagtgtatctgatgatgggcgaaccctcgcaccgttccgccgaggcgctggtcgactggttcatgacgcgctgggatagctttatgccgcagggctacaccgacatgaacaaaggcattttcgcttaccacctgcgggaaatgttctctctgccgaatgcgccggtcatgaaaatgaacggtgatctgctgcgcctggcgcgggtgaaagcgatgaatattccgatgcaggtcagggtggtgcgccgcattgaagagaaaccgctaccggcggcgatcaacgacatttcgttggccgatgctgcggggccgaacgtgtcattgatgctgcgccgcaagagccaggcgacggtcaccgataccgccgtgccggggttctatacccgcgccagctaccgcgatgtcttcctggcacagctcgatgacgccgccaaagacatgatcgaggaagagtcctgggtgctgcgcgacagcgcggaagggaaaaacgcggtgaactcgctggcttcggcgcagaagctggccgacgaggcgaggaagctttacctcatcgagtatgcggacaaatgggatgctttcatgcgcgacgtgcgcgcccggccggtcaacgggctggaggatgcggcgatattggcgcgccagctgtccgatccttcatccccgctggccaacctggtgcgtttcgccgcgcgtgaaaccagcatgaccggcaccaaccagggcgatgcggcgagctggttcgatcgccagcgcaatcgtattgaacagcagcggcgtgacatcctcggcgagatttccggcgagcgcgcgcgttttcgtctcacgccggaacgcgcggtggaagaccgttttgagctgcttcgccgcctggggtatcagctgttgcagaccaccaacgccagcaacgatccgctgagccgcagtttcgaagcgctgtacagccagctgaccacgctctccacctcattgcgcggtggccaggtggtgcccgccggcggcacgctgaagcggctgcagctggatgcggcgcgtcagccggaaccggtgcgcagcgtcatgatggatctgttgcaggtcggcgacagccaaacgatccagcagagccagaagaacctgagcaaaggcgcttcatcgctggcttccgggctgtgcaagggcagcatcagcgggcgctatccgttctcgcgcaacgccagagcggaggtcggcatcgaggacttctcgcgcatgtttgggcagaacggcgccatgcagcagttcttcgatgaaaacctggccgcttacgtggatgtcaacgcgcagaaatggaatgccaaaccgggatctgaggggatcgtcaatgcgagcacgctcggcgcgtttgaaaatgcccgtttgattcgcgacaccttcttcaccgccggcgacaaactctcgttttccatgttcatcaggccgctgtccctgacgccgaccatcacggaagcgaccctggacatcgatgggcaggtgattaactacagccatggttttagccaacccacgcgtatcgactggcccggcccgaaaggcggcagctatgttcggctgaccttccgcaccggcaccggccagatccaggtcgccagtttcgacgggccctgggccctgttccggatgttcgacgccagcaatcccgtgccgctttccagcgacaggcgagagctgacgatgtcgatgtcttcggtggtgggcgtgctcaaactggaactgcgctcgacgatgaaagatttcccactttggtcacgggcgttgcgaggattctcgtgcccgaaagcgatgtaa

SEQ ID NO: 428479 - DNA, 354 bp, Serratia marcescens
atgttagatccagccaaaattttagaaaccatgaaggccggcggcaatttgggcaccaactcccaatcgtcgctgagccagccgtttatgcaaggcgtcagcaatattcaaatgtcggggccggatgcggccaaatcggtcatgagtaacgtgacaaaatcttgcgatgatatgttcggcaatatgaagggcatttttaatgggctgcagtcgaatgtgaacgcacaccaaaaaatgcaaacgggcgaacagccgaaagattttaatgtttctatggacgatcttcgcccggcgattgcgaaagggttcccgcacgaaatggcggacttcttttccaaagtgccgaaactgtaa

SEQ ID NO: 428480 - DNA, 228 bp, Serratia marcescens
atgaaagaactatccgcaattgaaattgaacaagtgaacggtgctggtttttttggtgacgtagggacactgattggcagtgcagtgggaaccggtattgataccctttccgcgattgccggtgttaacccggatgccaaaaccgttgtcggcaccatcggtaaaggtattggtctggccgtcgatgcgctgatctccagcggattgcagatcatttcaaaactgtaa

SEQ ID NO: 428481 - DNA, 291 bp, Serratia marcescens
atgaaggttttgacgacaccggaaagacctttccgctatgaagatctggcggaaaaaattgtcaccgaggccagaagccgcttgggctgcgccgctctgcggtttttagactgcctgatccaggggtatggcccgccggtgattgtctttgatatctataataatcacggtaagttgcaaacggtgaaactgattctccccatcggaagtcataagcagttaaaaaaagatcacctcgggctgatcgcctgcctggaggctaaaaaactgatgagattaaaaaagatataa

SEQ ID NO: 428482 - DNA, 135 bp, Serratia marcescens
atgttctatattatgttttttttcgatatttatctggatatattgcgctcttggagtaaaattaacttatcagagaaaattattggcaccgtatcacggatggcaatgatgcactataaatatatcttacggtaa

SEQ ID NO: 428483 - DNA, 576 bp, Serratia marcescens
atggagcgcgtcaatattgctatcgtcgatcaaaatcaatttttcaagcttgggttggggctcgccttgcaagagggttttctccagaatggtgtcaaggccaagatcacgggagaggaacgggccaacattatattccgggcgccggataagcgggtgtccatcaatttttgccatacccagcttttgcagggcaacttttcttctattccgctctatttttcaatactggagcataaaacgatttttccaaaaatccattgcaatctagaggccggaagcattacgcgcaaagacggcgtggcggcgatcgtggataaggtcatggtttgctatcgcaagaaaaacagtttggtttcaagctattgcccgcgttgccgcacccagttgacctttagcgaagggaaggtgtgccgtctgattcatctgggatactcgcaaaatcaaactgcgatgttgctcggcatcagtccgaaaacggtcagcattcataaacgctctgcgatgagaaaactgaatatcgataacaatattgaattcttgcgctggttaaaaatgcacagcgactcttgttaa

SEQ ID NO: 428484 - DNA, 870 bp, Serratia marcescens
atggctgattttgtaagggaaacggtttccaaaaatcatttcaaattattgcaggacctttatggcagagatctgggcggggagcgtttcctgcactggaagcatctgctcgatccgcattgtggcgcgccaagggagaagacgggcatattttacaaggatcgggagcgttatctcgggatgttcgtttccagcttttatccctttaagatcaacggggttaatgtcaatgtcaatatgcttggcgatcttggcatccatcgtcaggtaaagtccgccaccgtattgaaagattttttcctgcaggccagacggtcggacgtggcggcggatatttgcttttccgatgacaggaagatccgggtttacgaaaaaatatttagaaagtatttaacaaccaatacccaaatctatccttatgtcgaattaaccttaaagcctgacaagtttatggcatttcgttttgctgaaagtgggctcgcacagcaggcaagcttcatcaataatttagggcgggaaaaagatcgccgcgcctttgagtatattgaaaaacaccccctgtaccataaaattcattatatcaacaaaggcagccactacgccgtgattggctgttctcatgaatgtgccgaactcttggatatttccaacccttccagggagtgtttttcctgggccatcggtgtgtgtcggcatctgcatagccgttgcaaggtaatgatccccctcgctttttataagtcggtttgcgctcaggcggcggaggtcatttcagaaaaacgcatcaacatgcttatcggctattactcacaaaagataagcgatctgatgccgaaagaggtttgggtatgccgcatggatcgccgttaa

SEQ ID NO: 428485 - DNA, 5787 bp, Serratia marcescens
atggaagaaattcctgtatcaccctactcaaaagtttttatcgatgaatatgatcgccatcctgaaggctgcaattacaacgtattggtgctgcagcgaattgagggcgcgctggatcccatccggttgcaagccgcgctgaatgcgctggtgcaagatcatgtactgctgaacagccatattcatgaacaggatggcgagctgtattggcgccgcaatgacgcaatctatccgttgcagcattacacggaccgtacgctgctgacgcaagtgattcgccggcccttcgatatttaccgcgggccgctttatcgctgggcgctattcgccgagggagagcggcgctataccttggcgttggtcggccaccatctggtgattgacggcgcctcttccgacgagtttttctccctggtgagccagtactatcgccaacagcggctggcgacgcgcgtcgaggcggccgagatcgccgccgttaaccggcaactgcagcaggaggtgaagcaactggccgccgagggggcgctggcgcattggcgcgccgaagcggaaagtttgggcgcgctcgaggtgccgtttgagcgaagcggcgccggccgtgaagacgaagcgggcgagctgcgtttccactttcccaaagcgcaatggaaagcgctgaaacaggcctcggggatacggcgagttaatgactttctggcgctgctggtgctgtggggcatcttgatggcgcgcagtggcaatcaggaaacggtctacatcagctatccggtgtcgatcaagaaggggcaaaagtttgcgctgggcggccatgtgaacaccagcgtgttgcctctctctttgcgtgacggtgcgagtttttccgacgtttatcgacgggcgctggcatttattaccgccgcgccgccgcagtcgcgccaacgttttaaccagctgcccacgcaagaggtggtgcgggcgttggggatccgcgcgttaccgatctcctttgcccaaaccaacttgcgcgatgcggcattgccgctggccgattgcgccacctggccgctattcgaagccaatcacgatatggccagcgcggcgctctcgctggaatacgaagaccgggccgatattgatgcgttgcagttccggttgcgctttcgccagggcatgtttgacgaggaagacatgcgcgactgcgcggggcattttactcgcctgatgcaacaggcgatgagcgcgcctgacgccccgttaagccacatggccttctatcccgccgccgacaggtcgccgccggataatgagagtctcccgctgccaggggagaccctcagcgcccgttttgaagcgatcgcgcaacgctatccggaaaacatcgcgctggagtatgaggggctgcgcgtcagctaccgtgagttgaacggcatggcgaacagcctggcgcgcgagatcgtgcttcgctatgcgtcgctgaccggggccgagccccaggccgacgcgccgatcgcgctgtacagcgaaaaaagcctggaaatggtcgtggcgctgctggcggtgctgaaaaccggcgcggcctatgtgccgatctcctgccattatccccaggcgcgtattcaacatattcttgcggaaacgcgggcggccttggtgattgccgggccctctatgcagacggcggcggaagcgttggcggcgatgatgccgcatccccaggccgtgctgacactgggcgatctgagccgcctgccgcatgaacggcataatctgccggtggtcaccgccgccgaacggcttggcgcgatcatttatacctcggggtcgacgggagtgccgaaaggcgtgatgctcgagcagcaggcgatgtgcgggttggcgaccgcgtccggtatcgcgattacgcccgaagatgtcttgttgttcctgtccagcccggcgttcgacgcggcgacgttcgaagtgtggggcgccttgctcaacggcgccaaactggtggtcatccgcgacacggaagatatcgccggcgatgtgccgcagttggaagcgctgctgcgtcggcagcaggtgtcgattctttgggccacgcgcagcttgttcgatcatctctacctcagcaaccccgatctgtttgccgggctgcgctatctgctggtgggcggggaggcgctgaccgccacgctgatgcagcgcctggtgcggcaaccccaccgtccgcagtgggtcatcaatggctatggccccaccgaatgcaccacgttcaccacgatgtacgctatcgctcaggacgaagcgcgcagcagcattcccatcggcagggcgataccggggcgtgagctctacgtgctggatcgctggcggcaaccgctgccgccgggcttggccggcgagttgtatatcggcggttcggcgctggcgcgcggttatctcaaccagccgcagcaaacccaggcgagtttcatcgagttgcacggccggcgcttatacaaaaccggcgatcgggtgcgttggctgcgcgacggcaatctggaatatctcggcagaaatgattgccaggtgaaaattcgcggattcaggattgaactcagcgagatagaaaatgcgatcaatgccctggagggcgtcgagaaaggcgtagtggtggatgtcgtccatcgggagagcaagcgccttgccgcctatttgctgatggcgcggggcgtggcctgggatcctgccgagctgcgctcccggcttgagcgcagtttgccggattatatggtgccgtccagctatgtcgagattgacgagataccgctgacggttaacggcaagttggatcgctcggccttgcccgcgccgcaattcgcgcaaagcgggcgttatgccgcgccggagaacccgctggaggcgctgatttgttccctgtggtcgaacattcttggcgtggagaccgtgggcatcgacgacgactttttccgattgggcggcgattcgatccaaagtattgtgttcaccagtgaattgagcaagtcgggttaccacagcaactcgcgtgcagtgttcgaaaccagaaatgcgcgggctctggcccagcgcattctgcggcagcaagacgcggttaccgcgctcaacgaacagggcgaactgcagggcgaattcgagctgctgccgattcagcgctggtaccgtgagctggcgccgaaccgcagcgccttcttcaaccagacttttttggtgcgggtaccgccgatgtccgccgaacaggtcgccgatctggtggccgcgctggcggatcagcatgacatgctgcgcgcgcgttttagcgtcgacgacgccggcgttatcgtgtcgcagcgctacctgtcagcggccgacggcggcccttcatggggctactatgacctggcgctttgtcgccaaagccgcgccgagctgctgcgtcaatggcaatcggggtttgatccgacgacagggccgatatgccgcttcgtttacatctttgacagccgcgcccccggctacgcgctgatgttctgcgcgtttcatcatctgatcgtcgatgtggtttcctggcgcgtcatcgtcagcgatctgcagcggttgcatcagggggaatcgctgccggcaaaaggcaccagctaccgccaatggggagaacggttaaggcaatacgcggcaacccggcaagaccaatgcgcttactggctggcgatgatcgccgggcagcccgattacgccacgctcagcggcgtggtacaggcccctgaattttgccgcttcgagtgcgatgtggcgttgaccgcgctgctgatggacggttgccaccaggcctacaacacctcggtgcgcgaagtgctgttagcggccctggcgccggtgctgcaggcatggcacggcagtgcggacagttacctcacgctggaacaccatggccgcgatatcaatgacgataagatccggcttgagggcaccgtcggctggttcaccgccttgatgcccttgcgcatcaccgcgcacgagtgccaaaaaaccacgctgcgcgccatcaaggacaggctgagaaagatgcctgaccacggtatcggttattcggcgctgaaatacgcttcagcgccgggcgatgaggtgccggcttgcctgcggcgccaccgcctgccggccatttcgttcaattatctcggcgcgttcaacgagcaggccgacgacgcgttatgggccttgatcgaccaaacggcggatttggaaaatggcgcgatgccggtcagcggcaacgtattggatctggtgctttatgttcacgacgatcggctaagcatcgtcatgtcaggtttgctgccgcatgaaacgctgtcgcggatcgggtcgcactatgtcgacagcctgtcggcgctggtcgagcactgctgccacgaagccagcaacggcgtttgtctcgccagcccgggtgatttcccccatgccgacgtcagcctcgccgaattggatcgctggcagcaaaagcatcgtctcgccgccgttttcgaagccacggtaacccagcgagagttgatgtatttcaaccgactcaaccgcgagtatcagatcgaccaggcggtttatgagatcgcggggccgttgcagcccgaggtgttgaatcaggcatgggcgctggcgctgcagcggtttgaaatgctgcgcgccggatttgacgatcaaacccgccgcggccggcccaacgtctttatctgcgagaagctgcaggcgccgatcgcgatggacgattggtcggatgccgcgccagcctctctggaggaacggatggaggcgctgctggcccgggagagggagaccgcgtttgagctggatgcgccgccgttgattcgctggcgcctcatcaggttgcatgcggacgagcactatctggtgcagacctttaaccacattctgtttgatggatggtcgctgggggtcttgttcggccagtggttcaacgattacctcgccctgttggcgggccgggtgccggcgctggagattaaccgattcgagccttttgccgcccatgtgcgcacgcacggcaatgatcctgaggcgcgggccttctgggcagactatttgcgggatgcgccggtcaatcaacgcttgccgctgactgccgcaccgcagctcgtaccgcaggggcgccggatgcgtcagcatggcgacgaattctccagcgcgcagatggcgcgcctcaccgcgttttgtcggcggcaggggatcacggtcaaccaactgacgcagctggcctggatgctggcgctggccgaggcgctggcttgcgatgatatcgccatcggcacgaccatgagcgagcgcccggccgacattgagcaggtgcagacgctgtttggcctgtgtgtcgcaagcccggtgctgcggctgcgggcgattcgccgccgccccctttatgagctgctggatgacatcgcggattcacaaaccttccggcagaaatacgccttttccgaactgaatcgatacgacgagaattgggtgcccacctcgccgttcggcagcctgttcgtgttcgaaaacatgccgaaaccggcgatggatccacggctgccgtttcagtgccgcgtgatggatatcgtcagcggcagcaatcaccaaacggtgctgtgcctgttccccgaggcggaacggctcgccatttcactgttttatgattcccacgagatcgctcgggaaaacatcgtcgaattgggccgacgttttctgattattgcgctcgcgatcgccaatctcccgcccgacagcgacatctgcgctgaggacgggattatccaggctgaggaggcatga

SEQ ID NO: 428486 - DNA, 828 bp, Serratia marcescens
atgtggctggcagtcgacggcaaaataaagtaccgggcgatcgtgagcgatcttgacggcaccttgctcgatccgtccgggaatttatccgatgtgacggtggaaacgctcaacattttacagcgtcgggggttggaaatcgtcattgcaacggggcgctgcgatgcggatgcgcgcgggatcgtggacgggttggggttctcgccggtgatcgtttcttgcaacggcgcgatggtcaacatcgaagggcaggcggtggcggatagaagctattttttgcccgcagagctgcaaaccgggctgatcgattttttagtcgccagcccgttccacgtgaccctgttcacccgagagggctggatgatggccgaagagaacccgcatttttctgactacgtcaaaacgtcgggcgtggcctgccgctatgtcgagcctgaggccatgaagcggcagcggatattgaaggtactggtgcatggcgacgcggcgccgatcgagacgctctttggccaggtcaaccaggccttcggcaaaacgctgtccatctgtaagtcctccacggaaacgatagacatcatggataagcatatttccaaggccagaagcgtggccgactatttgaattccaaacagatagcgatgcgcgattgcctctccttcggcgatgcgatgaacgatctggacatgctgcgctgggccggaacgggcgtggtcatgggcaatgccatgagcgaattgaaacgcgctctgccgttgaatccggtggcgttgcccaatagccgcaatggcgttgcagactatctctgtcgtgaattcggtctgttctga

SEQ ID NO: 428487 - DNA, 234 bp, Serratia marcescens
atgaaagaactgactgaagcagaagttatggcggtatccggcgcgggcatcgcttccgacgccggcaaaatcctgggtacgggtattggcgccatcgtggatgccggcaccggtcttttcggtatccatgcggatgcgtcaaacgccggcgcaaaactcggtgaaggcattggcgccgtcatcgatgccgggattagcgcgttctcgcagttgtttggccgcaaatcctcttga

SEQ ID NO: 428488 - DNA, 399 bp, Serratia marcescens
atggcaaataaaatcatgctgattatggttatcaatctttttgtggcggtggcattggcggtgtttaacgtcatctatatccaaaagaagatggatatccgctaccccagtgacgccaccccctttcaggtcgcggagaaagcgcaggccagaatcctgtctatgagacagaccgcggtgtttttaaacaacaatcccgtggtggcgtttacgttggaaattactgccaagcgcaggcagttcaccctgacggatcatcgcgaggtcgtgctctacgtcgccatgagtcgttatcaggagaaccgcatctatagcgtgctggtgggcgaaaacgagaacgatgtgatgttcgaaaaagacagcttcggctacccgatattatttcatcacgcctcgtga

SEQ ID NO: 428489 - DNA, 1542 bp, Serratia marcescens
atgcccgtttgccgccgcgccggcctgcgagggcggggcaaagccaactatcgtgggggaaaaatgttaaagatctccgcttatattaccttgatttggctggctttggccgtctgccggtacgccgcggccaaggaggaagacacctgcttcgccgatgagcacccagcattacagacggtgatcccttgctataaccagcaactggccacgctgcccctgtcattttcgttaaaaagcgtggagagcggccaacacgcggaaattcgtcattatcggctgatgtcgcaatcctggtcgccgcaagacgcgatccggccgacgcagtggtggcacgacgtggacatttatattcccaacggggcattcaccggtaaagcgttgctggtgatgagcgaagactgcgcgtgcagcgccgccggcccgggaacgtcgggcaatcaaaagccggcgttttcagctgaggcgctggcggcgcagagcaaaacggtggtggtggtggtcaatcggctgccttacccgtacctggaataccaaaatgagggacggcgccgttcaggggcggatagccgggcgaggggatggcgattgttcctggatgatgccgatgaatatttgatgatgccgctgcatatcccgatgacggcggcgctgtcgcaaaccatgacgctggcgcaacgcgaattgcgccagtgggggatagacaaatttatcgtcgcgggcgtgtctgaggggggaaccacggccatgctgacggcgctttcagatgagcgcatcgatgccgtggccgccattttccctgaggggatcgcggcgcggcaggtgatgaagcatacctatcgcacgtatggcgggcgttggcctttggcgtttcatccttattaccaactgggcatcgatcggcgcatagagaccccggcgtttgacaagctgatgcagattgaagatcccatcgaatatccccctctggccgagcgcgggcggcctccggcaccgaagtatttcatcgtcgccggcggcgacgaacgctatccgcccgacagcacgcggttttatttgaataagctgccgggggaggtctcgatgcgagccatcgccggcgacgagcgcacggtccccgaacgcgctgttctggccttggtcaaccgtcgtcagcgtgatattgcgctaccgacgatcgaggtgcagagcaacgcctcagagacggcgctgcgcacgctccgcttttccgagccgccgatcagggtgttgcgctggactgcgcataaccgcacggcccgagattttcgctactcgtgcggcgtgcgttatacctcggcgccgctggaggcgaaccgcggtgaatttcggctgaacgcccctgcacagggttgggaggccacctttatcgaagccgagtttagcgacgggtatatcgcgacctcgccggtctttatcacccctgacgaccgctacccgatcgccgcaccggcgggcgatggcctggcgtgtgaaaccttaccgggccgagggctgggggaggattatcgccatgacgattaa

SEQ ID NO: 428490 - DNA, 540 bp, Serratia marcescens
atgatggaaaaaaaagtgattatgttggcattggttgtggcgagtttttcgagtgctttgccggccctggcggcagacgggcaggttaattttaccgggaatattgttgatgccgcgtgcaaggtcacaaatgacttgagtaatccattaaatgttgttctgggcgatgtggcccgaacggcatttgcggggggcaagggatccacttcctcggcgactaaatttacgctggaagtgacggattgtccggatacggtaaaaagcgccaccgttaagttcgacggcgcggccgataatggtgacaacaacgtattgcagctgacccaggaaacggatgtcgccacgggcgttggcatccagctgtctgatatttctaataatgttcttccgctttacacggcctcaacggcctatccgctggcttccggcagcggcgtgaaaaacaatcttgattttaccgcgcgttatatttccacgcttgcagatgtgactgccggtaaagccaatagcgtcgcgaccttcacgctgaattacaactga

SEQ ID NO: 428491 - DNA, 684 bp, Serratia marcescens
atgcggtttaattgctgcagtgccctaatgggattcattttattattatttttttctacggcgcaggccggtgtggttgtcggtggaacgcgagtaatttttaacggtgaaaaaaaagaagcctcaatcagcgtcgacaacccggacaacgaaccttatttaatccagtcctggctggataatcaacagagcggcgtggataagatagcctttatcattacgccgcctttatttcgtctggatgggcatcaggagaatatgctgcgcatcgtccgcgtcggcgatgacttgccgaaggataaagagagcctgtattggatgaatataaagtccattccttcgacagaacacacgggtaagtcgaacacgttgcaaatcgcggtaaaaacgcgcctcaaactgatttatcgccctgcggcgctgctcaaacaggttcccgaggatgtgactcaacggttgacgtggcagcgcgtcggcaaggaattaaaactcaccaaccccacgccgtattatatgaattttcattatgttcgcatcggcgggcgcgaaatgaaagaggtgacttatatcgcgccgatgagtagtgaaatgttttcattgccggtttctggcgcgtcgtcggtcagttggaaattaattaacgactacggcggcaccggcaaggagcatcagtcaggtatttaa

SEQ ID NO: 428492 - DNA, 2583 bp, Serratia marcescens
atgataactcgtcagcgtagagcagcgaagcgggatgcttggctgaagcgcatcgtcttattcacggcaaccacggcggtatgcggcaacatggccaaccctgccttttcccgtgactatttcaatccggcgttgctggaaacggggcgttcgggccaacagcctgttgacctgtcggtgtttgaaaacggcaaccaggtgcccggcaagtatcgggtggatatttgggtgaatgacatgctgatggagacgcgtgatgttcggtttgtcatcaagcccggcggcgacgataaagccggcctgcagccttgcctgacgggggaggatttacaacggctcggcgtgaagatcgagcggtttcccgcattgaaccgcgcggaagagtgcgcgaatttggccgccatcccgcaggcctcggcgcaatttcaatttaaccgccagcggctggtgctgagcattccccaggcggcgttggaaaatcgggtgcgtggttatgtaccgcccgaactgtgggacgaagggatgccggcgatgctgcttaattacggtttcaccggcagcaacagcaaggggcgcgatcgttttacccagagcgcaagcagctactacctcaacctgcggccggggttcaatctgggggcctggcgggtgcggaattacaccacctggagctacaacagcggcggtggcgggcggcagtcggaagatcgctgggacaccgtctatacctacgcccagcgcaatatcatcagcctgaagagcttgctcacgctcggtgaaagcagcactccgtccgatgtgtttgacagcgtgtcgtttcgcggcgcgcagctggcctccgatgacgacatgttgccggaaagcctgcgcggctatgcgccggtggtgcgcggcattgcgcgcagcaacgcgcaggtggtcattcgccaaaacggttatgtcatctaccagagttatgtcgcgccgggcgcgttcgagatttctgacatgtatccgaccggcggcagcggcgatttggacgtgacgatcaaagaggcggacggcagcgaacagcatatgaccgtgccttttgccagcttgccggtattgcaacgcgaagggcgcctgaaatacgcgctgacgtccggccaatatcgcacttacgatcacagcgtggagaaaaaggttttctcgcagggcagcctgatttacggcttgccggccggctttaccctctatggcggcgggcaattcgccggcccgtatcaatccttggccttgggggtgggtaaaaacctgggtgagttcggcgccctgtcggtggacgcgactcaggcctgggcgaaacaggaacatcagccgaaaagcgacggccagtcgtggcgcgtgcgctacagcaaaaacatcgtagcgaccggcacgaacttcgccattgccggctaccgctattcgaccagcggctattatgggctgcaggaagtgctggacacctaccgcagcggcaaccgctacgccctgacagaccgccgtaaaaaccgcgccgagattacgctcaaccagaatttatgggagggggcgggttcgctttccctcagcgcggtcagcgaagattactggaattccgagcgcaacatgcaatcgctgagcgcgggttacaacaatagctggaatggcatcagttacggttttaactacagctacaaccgtaattcacaggcgatttacggtgactcagaccggggacaacggcgtatttacgatcgcgaccaactgtttgccttcaatatcagcgtgccgttggagaaatggctgagcaacacctacgccacctatagcctcaataccagccaaaaaggcaataccagccatacggcggggctcaacggcacggcgctggccggcaacaacctcaactggagcgtacaggaagggtatggcaatcagggccagggcaacagcggcaatgccaaccttgactggcgtgccacctacggcgaactcgtcgcgggatacgcttacgatcgcaaccaacagcgcgtcaactatggcgtaaaagggggcgtgattgcccacgaagacggcgtcaccttcggccagccctttggcgagacggccgccctggtgacggcggccggcgccagcgatgtggcggtcggcaaccaggtcggggtgaaaaccgactggcgcggctatgccatcgttccttatgccaccccttatcgcaacaactcgattcgtcttgatgtggagagtttgccggatgatgtcgatctcgcgctgaccaaccagtcggtcacgcctacccgcggcgcggtaagccgggcgaatttcaaggcgcacgtcggcaaaaggatcctgatgagagtcacggatccacatcgggtgcctctccctctgggggccagcgtccgcgatgcggatcattcggcgcagccgttcctgattggtggggatgggttggtttatctgtccggcatggcggaacaaggccggctcatcgtgcagtgggggcgaaataccgagcatcagtgccgcatcagctatcaactgccggcggagaaacccgctgcagggatccaaaccctcaatggcgtttgccaatag

SEQ ID NO: 428493 - DNA, 942 bp, Serratia marcescens
atgaacgtttttatcaggatattcggttacggcgctctgctatggctggcgacgctaacgacggtggcgtatgccggcacctgtaccaccaacgcgaaaaccatccgcatggggttgctgacgctggccgtggatccgcgtattgaaatcggcgaacagttggctgtccgtacggaaaacagcatcagcggcacgacgttttcttttctttgctcgggctcggtggcctatcgttccctgtcgccgctgacgccgagtgcgctgcccggcgtgtttgaaacgggcatcgacggcgtaggcgtgacgatttcggacctgtggcagagcaataagaacgtgcctttcaatacggcgatttcgcccaacctgctgacgccgtggatcaaccgcaatgatgtcaggctgacgtttatcaaaaccggcccgattaaaaccggcggtgatatgggggggaagattatcgccagatattatctggactcgacctcggtattggacttgagcatttccggcatgaaggtcattcagaaaagctgcctggtggatttgaattataaaaatcaaacggtggacttaggcagcccaaaacgcagcgaatttaatggggtcggcagcagcgcggtgtcttccgaacgtaacttcttcgtggtcctgcaatgccaggaagacaatattccggtacaggtgacgtttgaagcggccggaaattcgccgggcgtaggcatgatcgctattgccgacggttctgatgcggcaaagggcgttgccgtggaggtcctggacgagaaccgtaatccgctcacgttttcccggccgattaactatcacaccgctgccgaaaaagagatcagaattcccttaatggcgcgttataagcagacgggggacattagccccgggcaggccgatgccgtcatgacattcaccattacgcagaattaa

SEQ ID NO: 428494 - DNA, 360 bp, Serratia marcescens
atgaaagaactgtctgttatcgaaatgaatgaagtgtcaggcgcctattcctgggatatgagcaatgggctggccggcctgattggcagcgccgtcaccaatgccgcggaagccgtttcgtccgttgctttgggcgccgcggtcggcagcatggcgggcgccgtcatcggcggtaagcacggcggcgacggcggtggtctgctgggcgtcggctccattggccagggcgttggcatggtcgctgcgggtattctgggtggcgtggccagcggcgtggccgcggccgttgttggctgggataccaccctggaatactccaaaaaaggcctcgatgggctgattaacggcaccatcagctaa

SEQ ID NO: 428495 - DNA, 1296 bp, Serratia marcescens
atgagtgataataagagcagaaatattttccgccaggaggcggtcaattatcaacgtcaaagatggaccggcagagcgctgctgatttccggcgcgtccagctctgtgattgccgtgacgtgcctcgtttttattcttattttggcgagcgcgctctatttttgtgaatatacgcgcagggtggatgtcgagggggaggtgatcagtattccgcattcgacgaacgttttttcttcccaatatggctatgtgaatcggtctttccaccaggccggtgatgtggtggaaaaagacgagccgctgtatatcatcgatgtttccagaagcacggcctcgggtaatgtcagccatattgccgcgggtgaaatcaacaagcagatcggcaatctggattcgatcatcagcaagctgaaaaaaaacaaagacgcgatgctggagaacctgagaaaacagatcgacagctatgagatagcgtataaagaaacggaaaaacttaacctcagtgccagagacggcatggaaaaaatgagggagagtttgaaaaactatgagcattacctgacgaaagggctgattaccaaggatcagctgaattatcagcgttcgctctttcagcaacagcagagttcctatcaggcgctcaacagccaaaagattcagcagaatatccagctgtcgcagctgcgcagcgatctgctgattcgcgccgccgattacgacaatcaaatatcgcaaagcgaatcgcaacgcagcgagctgcaacgccaattggcggaatccaacgccggcgaccaggtgattatcaaggcgccgctgaaggggaaaatcgagtcgctgagcgtgaccgccgggcaggtggtcgagagcggcagcagcctggcgcagatcaagccgattgagaacatcaaatattatctggtgttgtggctgccgaataacagtttgccctacgtgaaaatcggcgatggcatcaacattcgctacgaggcttttccctcggacaagttcggccagtttccggggcgcattgaatccatctcttcggttccggcttctccgcaggagatggcggaatacagcagcggcaataaaagggagcgaaacgcctactacaaagtgttggcgtccatcagcgacacgcaattcagcgacaaagggaaatatctggagatcagcagtgggctgcaggccagggtgattgtgttcctggataagaaaccgctttatcaatgggcggtcgcgcctttgtatgacataaaaaacagcgtagtggggagagtcgatgaaggatcataa

SEQ ID NO: 428496 - DNA, 2118 bp, Serratia marcescens
atgaaggatcataatctttttgaacggatcaacgaaaagttaacgttctctctgcgtaaacgggtgccgagcatcttgcagtcggagtcgtcggagtgcggcctggcctgcctcgcgatgatctcttcttattacggatttaatgtggatatgctgagcctgcgacagcgattcggcatttccacccagggcgcgaccctgggcaccctgtcacaaatcgcggcgcaaattcagctgaagacgcgggccttgtcgctggacatcgatgaaatcaatcaactgaaaacgccctgcgtattgcattggaacatgaaccatttcgtggtgctggttaaggttcagcgcgcgggctttgtgattcacgaccctgccttcgggcgccgagtgattggcctgcaagagatgtcgaaccattttaccggcattgcgctggagctgtggcccgacaaggcttttcagcaagagaccttaaagacccgtttacgcctgctggatttgatgaaaaacatcgaggggctgccggggacgctgctcaagatttttgccttatcgctcgtcattgagtcggtcaacctgctgctgcccgtggggacccagctcgtgaccgaccatgtcattcaggcgcatgactacagcttgctgacggtcatctgtttggggctgatcttcttcaccctgtttcgcgccgtggtcagcatcgccagggcctggatttccatcgtgctggggacgctgaccgatatccagtggaagacgacgctgttcgaacatctgctgaagctgccgctggactttttcgagaagcggcacctgggggatatccaatcgcggttttcctcattggatgcgatcagaaccacctttaccaataatatcgtcggcgggatcatcgacggcatcatgacagtcggcttgttcgtaatgatgatggtctatggcggctggctggtctgggtggtgtcaggcttcaccctggtctacatcctcatcagaatgatgacctaccgcacctaccgccaattctcggaggaacaaatcgtcaaggcggccaaggccaactcgcatttcatggagacgctgtacggtatttccacggtcaaagcgctgggcatcaaggaaacgcgctccagctattggctcaatttgaatgtcgatgccgccaataccaatatcaaaatcacccgtttcaatatgatgttcggcgggatcaatacctttatcaccacgctcgatcaggtggcgatactttggctcggcgccatgatggtcatcgacaattctatgacgctcggcatgttcatggcgttcaacgcctatcgcggccagttctcgcagcgggcttccagcctgatcgatctggcgatcggcctgcgcatgctgtcgctgcacaatgagaggatatctgacatcgtctttaccgatgcggaggcggagtccgcgccgcggcaggtcttcgaaccgggcaagggggttgccgttgaggttaaaaacctcacctatcaatatgacgcgctgtcccggccgatctttaaagacctggatatccgcatcgccgccggcgagagcgtcgccatcgtcggggcgtcaggcgtggggaaaaccaccttgctgaaggtcatgtgcggcttgctcaacccgacctcgggagagatcctggccgacatgatggatatccataaaatcggcgtgaataactaccgcaatgcgatcgcctgcgtgttgcaggacgaccggttattctccggctcgatcgcggaaaacatcagcggcttcgaggtcaacgccaataaagagtggattgtggcctgtgcgatgcacagcaacattcacgaggaaatcatgcagatgccgatgggttacgaaaccctgatcggagagctggggaacggcatctccggcgggcaaaagcaacgtttgtttattgcacgcgccctctaccggcgaccaagcgtgctgtttatggatgaagcgaccagccatctggacgttgagaatgaattggcgatcaatcgggcgatatcttcgctgaatatcacgcgcgtgattgtcgcccacagaaaatcgacgatcgactcggcggatagggtggtggcgctgggggccgcgagcggcggctaa

SEQ ID NO: 428497 - DNA, 1434 bp, Serratia marcescens
ttgaacctgtatgccgccctgcgtcagcgcgtggaaaatacgccctggtacgccaaacggaaaagctaccgcgtgctgttctggcgcgaaatcacgccgctggcggtgcccatttttctggagaacgcctgcgttctgttgatgggggtgctgagcacctttctggtgagctggctcggtaaagaggcgatggccggggtggggctggcggacagcttcaacatggtgatcatcgcctttttcgccgcggtggatctcggcaccaccgtggtggtggccttcagcctcggcaagcgcgatcgtcggcgggcgcgcgcggcggcgcgtcagtccctggtcttgatgaccggcgtggcgctgctgttggcggcaggcatccatctggcgggcgaaccgatcatcgatgtgatcgccggggcggcctcgccggaggtgaaggcgctggcgctctcttacctgcagaccacggtgtggagctacccggcggcggcgattgcgctgattggcagcggcgcattgcgcggcgcgggcaacaccaagatcccgctgctgatcaacggcggcatgaatatcctcaatatcatcatcagcagcattctgatttacggcatgctcggctggcacgggctgggcttcgtcggcgccgggctggggctgacgatttcccgctatatcggtgccatcgccattctctatgtgctggcgatcggttttaacccggcgctgcacatcacgctgaaaagctatttcacgccgctgaagatgagcatcctgtgggaagtgctggggatcggcattcccgccagcgtcgaatcggtgctgttcaacggcggcaagctgctgacgcagatgttcgtcgccggcatgggcaccaacgtgatcgccggcaacttcatcgctttttctatcgcttcgctgatcaacttgccgggcaacgcgctgggctctgcctcgaccatcatcgtggggcggcggctcggcaaaggcgagatcggccaggcggagcggcagctgcgccatatttactggctgtcgaccctcgggctgaccgccatcgcctggggcacggcgccgctggccggcgtctttgccgcgttctatacctcgcaggatgacgtaaaaacggtagtgaaaaccctcatctggctcaacgccgcctttatgccgatctgggctgcttcctgggtgttgcccgccgggctgaaaggcgcgcgcgacgcccgcttcgccatgtgggtgacgatgctgggcatgtggggctgccgcgtggtggccggctatgtgctgggcattgaactgggcatgggcgtggtgggcgtctggctggggatgtttctcgattgggcggtgcgcggcgctttgttttactggcgcatggtcagcgggcgctggctgtggaaatatccgcgggtcaggcgcacggacgccggatag

SEQ ID NO: 428498 - DNA, 264 bp, Serratia marcescens
atgataaaacgcacgccaaaacaacaagaattacaaaacctgcagcagcatttattaaccacgctgcaccgcctctgccctgtggccaacggtgcggcccccccgccccccggcgagtggcccaccactcgccagctggccgagtctaacgacatcaccatctatcaggcgcgcaacctgctgttgaatctggccggcaggggcaaagtgttggtcacgccggggccggtcaataagtcgttgcgctggtacccttccttctga

SEQ ID NO: 428499 - DNA, 546 bp, Serratia marcescens
gtgcgccgatttattcaccctttagtgtctccttgcatattgatggccacgctgatgagcccggccgtgtcggcggcgcccagctctcaaggctgggggcgcgtaaatatgcaaggagccattattgataccgcttgcgcgatcgccgccggcagccgcgaacagactatcgatatggccgtaatgccgacgggaaatatgatgcgtgacggtttgggcaatacacatgccttcaccattgaattaatcaactgcacgcttgagcgcccgaagccgaatttaccggactggcggcagtttcaggtggttttcgacggtgatgccgagggcgatttattcggcgtgcacggcgaagcgaaaggcatcgcgctgcaaatatccgatggcctggggaatattgccgcgccaggtcggccgttgccgcttggcgatataacgccaggcagcatgtcgcttaattattccataaagctggttgccaataatcaaccgatgcgtgcaggggattatttttccgccgtgcgttttaagctggattattactga

SEQ ID NO: 428500 - DNA, 609 bp, Serratia marcescens
atgaaacgagaacggaaaaaaatcggcgcaggcgcgttgctgctggcgctcagtctgggcgtgatagcgatgccgccggcgcaggctgacgaggtggacaactggcaggtagagggcgccaatggcgtgctgcaggtgtatggcgcgctgacggagagcgcctgccggctggagatgaccagcgcgcggcaggacatctggctgggtgagaccggcaccgcacggttgcggcaggtcggcgatcgcgggcagccggtggcgttcgagctgcgcttgcaggattgtctgcgcaccccgggcggccagcgtgatgcgcgcaccggcgcgttgacctgggcgccgaatcagccggcggtgacggtcagcttcggctcgacggcggacagcgacaacccgcagttggtgaaagcgcagggtacctccgggctggggctgcgcctgctggacggccgcggccgcgacgttcgtctgggcagccgcgggcaaccgctgctgttgacgccggggcaagatgcattgagctacagcgtgacgccggagcgaaccgcggcgccgctgatggccggcgcgtatcgggcgacggtggattttaggctgagttatgactga

SEQ ID NO: 428501 - DNA, 492 bp, Serratia marcescens
atggcacagaagataacgcgttgccgggcagcgttctggctggcggggatgctggcgctgggccaactgccggcgcaggcgaccacggtgaacgtgcgggtcaccgtgctttcgcccccctgcatcatcaacggcgggcgcccgattgaggtggactttggcgatgaggtgatgaccacccgcatcgacggcgccaattatcggcgggcggtgaattacacgctgacgtgcagcgggcagagcagcaacgggctcaagctgcaggtgcagggggcggcgagcggtttcgacggccagctgctgcgcaccagcaaggacgggctaggtattgcgctgctgaacggcggccgccgctggccggtcaatcaatggctgagctttacctatccggccgcgccgacgcttgaggcggtgccggtgaaatcggcttccgccaggctgacggcgggcgagttcaccgccggcgccaccatgaaggtggattaccagtaa

SEQ ID NO: 428502 - DNA, 492 bp, Serratia marcescens
atgaaacaacgttttacggcgagcgtgctgctgtgcgccgcgatggcgtgccctttcgcctgggcggaaaaaacggtcgacatgcagtttcgcggcacgctgatcgcgccgccgccctgcacccttaacgacgacgggatcatcgacgtggacttcggcgatcgcgtcggcatcaacaaggttgatggcgtgaactaccgacaaaccatcggctaccgcattcgctgcgaaccggggatcggcaaatgggacatgttgctgagcctgaccggcaccgccgcgacgttcgacgaagcggcggtgcaaaccaatcggcgcgctctggggatccgcatttaccagaacgcccaaccgttcaaagtgggcagcgcactgcccgtcgatcccgccaaaccgccggtgctggaagcggtgccggtcggcaaaccgggcgaagctttgacggaaggcgcattcgaggccgcggcgacgctgcgggccgactaccaatga

SEQ ID NO: 428503 - DNA, 573 bp, Serratia marcescens
atgaacaaggaggcgcgcgtgaagacaatacaagcccgccgccggccaggcggccacggagccatcggtctgctgttgctgacgctgggcgtgaacggcgcggcgcacgcggtggacaacctgcgcatgcacggagcgctggtggcggagccttgcgtcatccagccgggcgacgaagacatcgagctggatttcggcacgctggtcgacaaatacctgtacctgaaccagcgcacgcaggggcaaccgttcgagctgcggctgacggagtgcgatctcagcctgggcaagacggtctcgatcaccttcaaaggcacggagaatgcgcagctgccggggcttctggcactggcggcgagcagccaggcgcgcgggatcgccatcggcatggagacgccgcaggggcagccgttaccgctcaacagcgccggcggcaagtacccgttgcagaacggcagcacggttatcggcgtacaggcttatgtgcgcggcgaaccggaagcgatcgcgaagcgagctatcggtcgcggcgctttcagcgccattgcgactttcagtctggattaccaatga

SEQ ID NO: 428504 - DNA, 843 bp, Serratia marcescens
atgcagcgtgttcacttcagatggatgtacttactgtttggcctgctgccggggctgtgctcggcgcaaatatactcgtacgtgaccaagagcaccggctcccccagcaacgcgtcctatgaatttgtgctcgaaagctgggatacggacgattcgtcgcccaatccctgttaccagcaaagtatgtgcgcggtggggatcaaccaccgccacaccagtgccaataccggcggcagtacggcggtgacaccgtcgacctctatcgtcggctcagggcgctacccacagatcacccaattgaggacgatgggcgaactcagccgcttctaccaaaacatctatccgttgccgattgtcggcgcgacttctcatgtgggggacgctatcactcaggagtgtgtcgggctgttttataccaccagttcctcttccgttgttcagggggccagtgcgagattgatgccgagcagcgtttgcggcatcgcgccaccgccggtcggggtgtgcggcatcgatgagcaacagctcgatctgaaccacggggtgttgccggataccgaactggtgggcaacacggcgcgtggcagcctgcgcgtggtttgctcgcagaagatgaacatcgtcatgtatatccgcgtcggcagcaatggccgcctggatctggggaactccggcgtttacagcacgctgcgcatcaatggcgctctgggcaacctgggttaccagttcactgcggatacgcgcggggttacggtgccgatcacttccacgctcggcgtgaccggaacggtcaaggccggcgattactcggggcaatcggtcgccattctggcgctgccgtag

SEQ ID NO: 428505 - DNA, 606 bp, Serratia marcescens
atggaaagcaccatcactctggcgtttatcgataatgaccgtttctttattgaaggattgcagcggctgctgctggcgtatttctcgcgctgcggcatgcgggttcagctgctggacgccgcacaggcgcatcgggcggatatggtgttccagtccgtggagcgagactggcaggcgcgtttctgcctgcgttcagtgagcggcagccgatcgatcaactttgcgctgcgtgagccgggcgatattcgctggcgcgataagccgcgttgcatcagcgaaacgggggtgatcttccgcaatgactcgccggacagcgtagtcagacagctggacctggcgctggcggcgcgggcgcaaagcggggcagcgcaccgctgccattggtgcgaacggcagcgcattacccgccgcgagcaggacgtgatgcgctatctggcctgtgaattgccgcagaccaccattgcgcgcaacctgcacctgagcgtgaaaaccgtcagcaaccacaaacaggcggcgatgagaaaactgggtttcaaacgcaacgcggatctctaccactggctgcgaatgggcgggttgaaaaccgtagagcggccgcgagggtga

SEQ ID NO: 428506 - DNA, 330 bp, Serratia marcescens
atgattatgctgagcaattcaaggttgtatgctttttcaccaggtgaccccctgacgttaccgctgtttgccgatcgcgtggcctgcggctttccttccccggcgcaggactatgtcgagagcaggctggatatcggcaagctgctggtgcggcaccccaacgccacctacttcgtgcgcgccagcggcgagatggagcgtgcaggatggatcaggcactaccgacagattaagaaactgagcatccgagaaacagcagacgcgacaggctacagtacttcccaagtttgtcgcattcaggccttctataaagaagttgagactgattaa

SEQ ID NO: 428507 - DNA, 435 bp, Serratia marcescens
atgattatgctgagcaattcaaggttgtatgcttttttaccaggtgaacccctgacgttaccgctgtttgccgatcgcgtggcctgcggctttccttccccggcgcaggactatgtcgagagcaggctggatatcggcaagctgctggtacggcaccccaacgccacctatttcgtgcgcgccagcggcgagtcgatgatcgacggcaatatccaggatggcgatctgctgatcgtcgacagcgccctgacgccggagcacggcaatatcgtgatcgccgcggtggacggggaattcaccgtcaaaaagctgcagcgccaccccgacgtgcggctgttgccgatgaaccccgcctacgcgccgatcgtgttcgacgatgaggcgcagctggagatcttcggcgtggtgacctttatcgtctacgcggcgcggtga

SEQ ID NO: 428508 - DNA, 339 bp, Serratia marcescens
atgactccagacgtcacgctatcaacttactcatatggattcttattttcctatttttcattgtcactcatcactttagtgacattatattacttaaaaaaattatcggctcgcaaacacaattatctattttttgttttcaactgtctcattgtagttgccatgggcgttatacagctctcaatctttgcatacgggaatgactttcttaatctcttctacccgctaggcaacgataactatgtctctattcgctacggcagtttgatattcacctttatctacttaactcaactaccaaaaaacacctattacaaaaaagaaaagaatagaagttag

SEQ ID NO: 428509 - DNA, 762 bp, Serratia marcescens
atgcaatacaaaacaaaagtagatctggatagatctatcgatgaactcaaaaaactatcaagaacgttttcacgacagtatctatacaccaacgaatcaagagctaatttctcactggaaatagaccaacttattcagtttgcaaaaagggatatcagtatacactgcacatcctacgctggggcaatcagagacattgaagacgagactaattatcttaaacgccaagcttttgctatcgacgcaggaaaaaactcgctctatatatcaatagaaaaaaagaagagtaacaacaccaccaaccttattttgaagcagataggttttgtcggtggcggaacacaaatattcgccggagtcggtacttgtgcagcgaccctaggtatggcgtgtggcggttttggcttaccgctgattgctcaaggcacgaacaatatttatgagaacggttactatttacttttccgaaaagataaatcaggcagtgtaagaaatgcctatcgatatactgcaaaagcactaggatatagtcaggatgttgcggatacaatttatggcactgtagaccttagcctatctggatatggaatgatcaggaaaacattaaaaccagatgcctggagattatataggcatatcaatagcgactttattcgtggttggcaagagatgggccgaacaggtttgacgattgaggttatatcagatttaacaaccggaagcgggatgtacgaactcataaaggacaaccaaagaaaatga

SEQ ID NO: 428510 - DNA, 1311 bp, Serratia marcescens
atgtttttgcgccctcaccatttccagcaggcggaaaactatctcgaaggctatatgcgcaactggggccaggcccacagcggctgtttctgggggttcctgaccctggatctggaccaaacgctgctgcgccagggcaagattgcgctcaacgccgccagcggcatcatgccggacggcacgccgtttcgcttcgccggcgcccagcaggcacccgcgccgctgaccatcgccgaaaacaagaccggtgaaaacgtggtgctggccctgccgacctatcgcgcggggcgtgaagacgtgatctttcaggaaagcccggaggcgctggcgcgctatctggcttacgagaacgaagtcgacgatctcaacgccgtctcggtgggcagcgcggcgctgcagttcggccgcctgcgcctgcggctgatgctggagagcgaactcaacgccgaatggaccgcgctcggcgtgacccgcgtgctggaaaaacgcggcgacaacagcctgcgtctcgataccgcgcagatcccgccgatgctgaactgccagggcaacccggtactgaaaaccttcatcaacgatctgcagggcctgctgcaacagcgcagccagcagatgagccagcgcctgctgcagccgggccgcggcggcagttccgaaatggtcgatttcatgctgctgcagctgatcaaccgccatcttggtcaggtgagccacgcctaccacctcgaccatctgcacccggagcgtctgttcgccgattggctgcagttcgccaccgagctcgccagcttctcggcgcagcgcaccccggaagggcgcctgccggtgtatgaccacgacaacctggcgctgtgcttcggcaagctgatgctgttgctgcgtcaggggctgtcggtggtgctggaagacaacgccattcagctgacgctggtcgaacgctcccacgggctgaacgtcgccaccgtgcaggacgccaaaatgatgcgcgatttcggcttcgtgctggcggtgcgcgccgacgtggccgcagaggtgttgctgacccatttcccggcgcagatgaagatcgcaccggtcacgcgcatccgcgatttggtgcagctgcagctgccgggcatcggtttgcgcaccatgcccgccgcgccgcgccagatcccctatcacgccggctacacctacttcgagctggaaaaaggcggcgacctgtggaaacagatggaaaaatccagcgccttcgccctgcacctggccggcgaattcccggggctggacatggaattttgggcgattcgcagccatacggaccggtaa

SEQ ID NO: 428511 - DNA, 1068 bp, Serratia marcescens
atgacgcttgaagcagaaagcgttcggcagcaaatagagcgcggtgaacctctgcaggaatgtgatatcagccatttggatctgcgcggctgggatttgtccggcatgattttttcacgagtaaacctgcaaggcatagatttcagcggatgcaatctgcaggaggccaccttcagcgaatgctgtctggatcagtgctgtttcgcccggcaaaccttgcaccagaccaccttcaatcagtgcgccctggcgggtgccaacttcacggaatgccgactggagcaaagcattttcaatgaatgccggttgaacgacgccagtttcaaacagaccgtgctcgaccaaacgcagtttatgcgctgcccgctcgaacgcagtgacttttgcgcgtctattcaggatcgcgtgactttctacgaaacggcattgttgcaggttaatctggctcaaagtcagttgacgcttgtcactttttttcgtcttgacctacgtacgactgaattaaaaaactgttttttcgaccgcgtcacgtttttcgaatgtgaccatcgaggcaaaagttacgccgggcagcgtctcatcgcctgccagtttaccgataaccaactggacgacgtcgatttcagccaggcgacgctgcgccagagcaatttcaagggcgcttcgctgcggcgtgccaacctgacgggcgtgcaagcgcagcagtcgctgtggctggaggccaatttgactcaggcgcagtgcctcagcgggcagttcgatcaggcgatcttcagcgaagcgacgctggatgccgccaacttcagccaggcgcgcctgtatcaatgcgtgttccagcgcagccgtgcggcacgctgtgatttcagcgacagcgacctgacctacgccgatttctgttatgccgacatcggcgccgccgatttccggcgcgcgcgctttatgcgcacccgcatgcaccgcgcccaccagcagcaaacgcgctggggcgatcgcagcggaattctcgagcgcgacgaagaactgtacgccgccgaaacctggagcgcacagcgccagagccgaatctga

SEQ ID NO: 428512 - DNA, 2529 bp, Serratia marcescens
atgaaagtcgtaaaacctttgcgtctgagcacgcttcatcgcccctaccgttggcagggggaaaattaccttggcgtctccgttttggcattagccgatatgggggcatccccacgtctgcgtcccgagcctgaactatggcagctcgccagcaaagagctggcactgagcgggggcgtgctcgatctcgccttccccaaagcctgcgcagaatttcttgccaccggctacgcctatacccatcatcaagctgataaaacggcttgtgcggttaaaatccaactggatacgctggagaaaacgctggtggtcttcggcgatcgtcactggatcaatgaccgcccctcatccccactcccctttgatgaaatgcgtctggattggagccgcgctttcggcggcccacaatgggttgaaaacccgcacggccttggcgctaacccagaaacatgtccacggggttctcgctgccctctccccaatatcgaacccctgcacaatcgactgagctcgccgcgccagacgccgctccccgtcagctttgacgcgctggacatcaattggccgcgccgcttcagtcgcataggcaaaaaatatgacgccaactggctgcaacatgaattcccagggttggccagcgatactgactggcgcctgtttaatatggcggataacgatcaacagtggccacagcgcgacgcacttccgagcggtgccacctatcgcatttggaacatgcacccgcagatcccctgtcaacacggacagctacccgcatgggtagcccgttgttttatcaatcgtctgcggcacggtgagcctgagctcgaagagatcgccatgcggcacacgacggtctggttctttccacatcgccaacagatgctgttgatttatcacggcagcgcacgcattgacgaagacgacgccgctgacgttctgcaccttatgccggcgttagagctgtctggggccactcgttctgccaatcattatcgcaaagtgttgcgccaacgcagcgataccgagaaaggcggtttattcgcttttcgcgagaaagaactggtacctgaatcagctatcggcccctggctggatacggagcaatcgacggaagaaagcccggcggtacgcaacctcactcgctatcagcgacacctgcagcaacactatcgcgatcgccggctctcggaaggccaggacatcgatgaagcgcttccccctacggaacgccccgcattggatgaattgcccgactatgtcgaacgtcttgaacaagaagccgagcaaagacagcaggccctgtatgacgaactacgagcccaaggggttgatccgcaaagcgtcgccgagccgccgttaagcagtgggcatgaaaacttccagcagatgcgggatctgctttaccaacacagcgatcctgccgatcgccgccgtctggaagaacaggaacaggcgctgtaccaggcctacctgatgaccgcacaatcgcaaggtccagcgccacgcctgagcggcgacttagcaacgataatacgtaaccgcgcgatggccacccaacgcggcgataaaaacttcagcggtatcgatctgaccggcgccgatctttccggattggatctcaccggcgcagacttcagccgttgtttgctggaaaacgccaatttcagcggttgccgcctcgaccatgccaattttgaacaggcgatgttggcacgggcagacttcaccgacgcccgcttgcaaggggttaacctcaatcacgcctcgctggcattggcccactgtgtgaacgctgacttttctcacgcaaccctggtggaaaccaatattcaggaaacgctgttcaaaaactgcaatttcacgggaagcagactggagcagttggcgggataccgcacctttatgacgcagtgtgatttctctcaggccacactctctgtgatcacgatgatggctttaacactgagccagctgaaatttcaccgagccaagctggagaaggtgacgttcattcgctgccaactcgaaggattcgacttcagccatgctcggctcgatacctgttcgttggtcgaaacccgtgcggaaggctgctcttttcagggtgccaggctgcaaacatgctcttttgtcgcacaaagcgcgatgccaggagcaaacttcagcgaagcgacgctcaagcaatgcaatttgcgtcagttaccgctacatcaggcctgtttccgtcttgcacggattgataacagcgacttttccgaggcccagctcaccgccgccaacctgcagaaagcgaacggcaatggcagcttgttcatccgctgcgacttcagcaacgccgatctgtcgaatgccagttttgtcagcgcagtgatgcaaaaaagcctgttcagcggtgccgacttgcgcggcgcgaatttgttccgggccgacctgtcgcagtcgcggatcgacggttcaacaaaaattgaaggtgcttatacccggcaaacgaaaacgctgcctcgcaccgctcaggagaaagtatga

SEQ ID NO: 428513 - DNA, 486 bp, Serratia marcescens
atgggttcgtttattgactttgcgacacaggatagtctctggggaaaagtcgtctttaccctgttcggcattttggttggcggcgtactcatcgccgcaatttgcaaaaatattttgccgacaaataaaccactgtctttccctgcacgtctgctcatctttgtcgtgctgatgttggcacttctgaaatacaaccagtacgtgatgtcggcggtgaattaccccgcagagctgatcggtttccttatcctgcccggtttcctgatggtttacttgggcgtaacctctcccggcggcgggctgtcgcagatgggagaactgggatgcttcgctctgctcgccgcactgctggtgctggcatccgccgtggtcggtttctttgcgccctatcacctggaaagcggtgttcaatttacagccaaggcaatcgctgccgcactatccgtcgcaacagtcctgttggtacgcaggggtctttccatataa

SEQ ID NO: 428514 - DNA, 2373 bp, Serratia marcescens
atggatcgccttatcattgcgcacacgcctttgcccgcccatcagctgttgttccgaagcctttccggtgaggaaaaactggccgggctgttcgaattcgacgtcgagctgctcagccccgacaatcggctcgatctgaaagcactgctgggacaaaaaatcacgctggagctgcggggcaatccgttggcgccgcgttatctcaacggcaatatcacgcgcatgacgctctccggaagagaagccggcggcaaccgttactatatctaccgcgccgtgctgcgccccacgctgtggtatctgacgcaaaaccgcgactttcgcatctaccaggaaaagaccgttcccgacatcctgactcaggtgctggggcagtatcaggtgaaaatcgataatcgcctgagctacgactaccgcatctggggatactgcgtgcagtaccaggagagcgatttcgacttcatcagccgcctgatggaacacgaaggcatctattactatttcacgcaccagcaagacggccatacgctggtgctggctgatgcgccgtcggcacatcaggaactcgccggctacgccagcattccctatcagctcgcggaaggcggcctggtggaaaataaagacagcatcaacagctggagcgtctcggacgccattacgcccagcctgtatagcctggacgactacgattttcgcaaaccgcgcgcgcggttgctggaggcccggcagaatcccgcctcgttcgcgcaggacaaagccgaggtgttcgactggcccgggcgttataccgatcacgcccacggccagttttacgtcaaggttcgccagcaggagttcgaagcgcagcatgaacagatgagcggcgaaggcagttcgcagggcattgcccccggctaccgtttccaactgacccaggcgccgcgcacggaagacaaccaggcctacctggtcgtcagcgcgcattacttcatgcaggaaaacagctacgccagcaatgataacgacgccggcgagcaacgtaccgaatttcaggtcgtcccggcgggcatcaactggcgccccgcgcgcaccacgccctggccgaaaacccatggcccgcaaaccgccgaagtggttggcccggaaggcgaaagcatctggaccgataaatatggccgggtgaaactcaagttccgttgggatcgccacggcaacggcaatgaaaccagctcctgctgggtgcgcgtctccagcgcctgggccggctggaaatacggcgggatccagatcccgcgcgtgggtgaggaagtggtggtcgactttatcaacggcgatccggatcgcccgatcatcaccggccgcgtttacaacgaagacagcatgccaccgtgggatctgcccggcgacgccaccaaaatgggctttatgagccgcagcaaaggcggcggcaccgacaacgccagcttcctgttcctggaagacgcgcccggcaacgaatctttcgacatgcacgccgaacgcaacatgaacatgacggtggaaaacgacaagaacgtcaatattgacggcaatcgtttcacccgcatcggcaaaacgcaggaccaccaggttatcggcaatgccactttcctgttcggctcaatgcgtaataccaccgttaccggacctgaaaccgccacgttcaacagcggacaacaggtaggtattaaagccgggcgtcagttcaccattcacgacggcggcgataacgtcaacattactggcgatcagactattctgctgaagggcaatcgccaccatacgattgaaaacaagcagacccaactgattaagcaaggccaggacaccaccattgagcagtatggccagtccacgaaaatcgaaaccggcgacaagaagctggagataaccagcgggaaccagagcaccaaattggcggccggcgacaagagcctcgatatcaccggcaacctgacctctaccgtcagcggcgaagaaacgcgctctcagaataaattaaccgtcaccaccgccacagactacgtgcagaaagcgtcgaagattaagatcgccaccgtcgatggcgaaggccccagcggttcggatatttacatccacggcaacaaggtgacggttaaaagcgacagtgagcacattatcatccgccccaagaacatgacctggactaagtggctggatgtcggcatcaagactggcgcggcattctccattaccggcggcttgaccgtcgatgttaaaaccgccgcggtagtgaagttcgaaccccagttcatcttgtataaaaaaggtccggaagccgatttcaacgatctgaaaatgacttattgttccattaggctcgcgattgcgatcctgacatccatttcataa

SEQ ID NO: 428515 - DNA, 951 bp, Serratia marcescens
atgttggctacgttgtttttcggccgccgccgccgctggcgtcaggcccaactgcccgcgctggcgcaactgtcgccgccgcccgccgcgcaggcctggcgacgactgcgtcgccaccggccggcgatgatctcgctggcgttgctggtactgttggcgttgctgtgcctgattgggccgtcgctgtcgccgtggcgcgacgacgccggcgatgtgctgaatatcaatcaggcgccgagcggcgcgcactggttgggcactgactttctcggccgcgatatctgcacccggctgctgctggcggggcggatatcgctgaccatcggcctggtgtcgatgctgctgtcggtgacgctgggctatgtgctgggggcgctcgccggttatttgggcggcgtggcggacaggctgatcatgcgcttcgccgatctgctgatgaccattcccggcctgccgctgctgatcatcatgggggcgatgctgaccgagctcgacgtctcgccggactaccgcatctacatggtgatgatcatgctgagcctgctgggctggccgtcgctggcgcggctggtgcgcggccagatcctgtcgctgcgcgagcgggatttcatgctggccaccgaggtgctggggctctccacccggcggcgtctgttcggccatctgctgcccaacaccgtgccgattttggtggtggtggccaccatggcggtggctaacgccattctcagcgaatcggcgttgagctacctcgggctgggcgtggtgccgccgacgccatcgtggggcaacatgatggatgccgccaacagcctgatcgactttcagcgccgcccctggctgtggatgccgccggggctggcgatcttcgtcaccgtggtggcgatcaatatcttgggcgacggtctgcgggacgcgctcgatccgaaaatgaacggggtaacacgatga

SEQ ID NO: 428516 - DNA, 1035 bp, Serratia marcescens
atgatgattattcgccctatagagcgtcgcgatctggcggatttactgacgcttgccggtaaatccggcattggtctcacttcactgccgcaaaatgaagataccctgtcggcacgcattgagcgggcgttaaaaacctggcaaggcgaacttccgcaaagtgaccagtgttatttgttcgtgttggaggacagcgagcgccggcaggcggtgggtgtctgtgcgatcgaagtggccgtcggcctggcggaaccctggtacagcttccgcgtcggcacgcaggtgcacgcttccaaacagctgaacgtctataaatcggtgccgacgctgttcctcagcaacgaccataccggccattcggagctgtgcacgctgttcctcgatccggattatcgtcacggcgagaacggcaagctgctgtcgaaggtgcgtttcctgtttattgccgcgttccgcgagcgcttctcacggcgcctgatcgccgagatgcgcggtttctccgatgaaaacggccgttcgccgttctgggagagcgtcggccaccatttcttctccatcgagttcgccaaggcggactacctgagcggcaccgggcagaaggcgtttatcgccgagctgatgccgaaacatccgctgtatgtcgatttcctggccgaagacgcgcagaaggtgatcggcgaggtgcacccgcaaaccctgccggcgcgccgcttgctggaggcggaaggcctgagctatcagggctacgtcgatatcttcgacggtggcccgacgctggaagccgaaatcgaccacatccgcgcggtgaagcagagccgcctggtgaaagtggtgctggatgacacgccgatgcgcgccgatgcgccggtgcatctggtggccaacgacaactatcagaactaccgcgcactgttggtcaatgccgatctgtatgacgaccgcctgcatatcaacgccgccaccgccgcggcgctgggcgtcgagcagggcagcccggtgcgggtgctcccccttattgcacaggagaaagcatga

SEQ ID NO: 428517 - DNA, 1506 bp, Serratia marcescens
gtgacgcaagatccccatacgccagcgcccgcctacctgctggaggtcagcggcgtcaaaaaagcctttggcccggtcgtggcgctcaggaatgcggagttttgcctgcggcgcggatccatccatgccctgtgcggcggcaacggcgcgggtaagtccacctttctcagcattctgatgggctttattcaacccgatggcggcgacatttttatcaatggccaacgctgcgaatttcatcaccctcgggaagccctcaacgccggcatcgccatcgtgcagcaggaactgagcgcgatcccggacctgacggtggccgaaaacatttggctgggccgcgagccgagacgcttggggttcgtcgacttcgcaacgctcaaccagcgcacaacccgcctgctcaaagaactcgatttcaagatcgacgcccgagaaaaaatgcgcaacctgagcgtcgccgagcaacagctggtcgagatcgccaaggcgctgtcgcatgccaatgccgacatcatcatcatggatgaacccacctcggcgattggcgaagaggatgcgcagaaaatctttcagacgcttcagcagctggcggcgaaaggtaaaggcattatttacgtctcccaccgtttgtcagagatattccaaatcgcggacagctacaccatcttccgcgacggcgcctacatccatgaaggctatatcgccgacatcacccgtgaacagctgatcgaacacattattggcggcgagtacgacagcgagttcgccaaattcaatcagcccggcgaagaggttttgctggaggtcaacaacctgtgttggcgcagcaagataaaagatatcagcctgcagcttaagcacggtgagatcctgggcatctatgggctggtgggctcgggccgcagcgagtttctcgatcttatcttcggcattcaacatgccgacagcggcacgatccgcttgggtgacaaaacgttgaaccgccactctccgcgcaaggccatcgacagcggtattgcctacgtaacggaagatcgcaaggaaaccggcctggtgctgtgccgctccgtcagtgaaaacatcaatatcgcttcttttgccgccatcagccggatggggtttgtcagcgagaaacgagagcaggcgcggacccgcgacatgatccagcgcttcaacgttaaaacccatgacggcgaacagccggtgggcaacctgagcggcggcaaccagcaaaaggtcgtgctgggccgttgggcgctgctggatccggaggttttgctgctcgacgagccgacacgcggtatcgacgtcggggccaagaaagagatctatcgatttatgtcggagttcgccttgcaaaacaaagggatcatcatggtttcctccgagctttcggaaattatcggcatgagcgatcgcatattggtgtttcgtgacgggcagttggccggcgagctttcggcagccgatgcgacccaggcagcactgatgaaacttgcggtttaa

SEQ ID NO: 428518 - DNA, 213 bp, Serratia marcescens
atgagcacggatacagatgaaagctataagcacattcctttgaaagaaggagaggtttgccctaaaactggggtttggactgtaggtgagaataatagctttgttactaaagaagtctttgaaaatgagctttgcaaaacaattaacgaaggtgaattagcgccaagagtcccttacggcctaccttattgggtgttctacgaagagtgttaa

SEQ ID NO: 428519 - DNA, 870 bp, Serratia marcescens
atgaagaaaatcattatggctgctgtgctggcgctgtccgccctggctctcaccggctgcgagcgcgccactgtaccggcgggctatgtcggcgtgaaggttgacctgtacggcgacaccaaaggcgtacagcagcaggaagtgggcgtcggtaaatactggctgacctggaacgaggaaatttaccagttcccgaccttcaaccagctgcatgtctacgatcagcctttcaacttccagaccaaagactcgatgagcgtgtcggccaaagtcggcgtcgagtactacgtcgaccagagcaaggtctcaaaagtgttccagacctaccgcaagggggttgaggagatcaccagcgtaaacatccggcagaacatcgccgacgcgctgatcaaagactccggcacgatggacatcggcaccctggcaggcgaaggccgcacgcagctgctggataacgtgaccaaagccgttaaggccaagctcgacccgatcggcatcatcatcgtgaagctgagctggaccgacgatctgaaatacccgcaacaggtcaccgactccatcaacgccaaaatcgaagccacacagaaaacgctcctgcgcgagaacgagatcgcccagaccaaagcagaagcgcagaaaaccattgaggcggcgcgcggcgaagcagagtccaacgtgctgcgcgccaaggcagaatccgaagcgatcaccgtgaaagccaaggctgaagccgacgccatcgcgctgcgcgccgaggcgcttcgcaaaaaccccgaagtgttgcagctggaagcgatcggcaagtggaacggcgaactaccgcaatacatgaccagcggcgccagcgcgccattcatccaggttaaataa

SEQ ID NO: 428520 - DNA, 201 bp, Serratia marcescens
atgcgaatttatttatcggtattgctgatcgtggcaatggccgcggccgtctacggcttcgctgtgccatcgctgatttcggcgcgcttctcttttgcggtgctgctcggtttcgcgatcggcgccctgttccctgctgtggtcgcctttctgacctaccggcttttgtacctccccatcacaaggaaatttaagcgatga

SEQ ID NO: 428521 - DNA, 546 bp, Serratia marcescens
atgaaactgactttacctaattcacgcctgactttcccttccctgtttgaagcctcagattttgatggcgacggcaatttcaaatatcgcgcgggtctgctgatcccaaaaggtagcgacaacgataagaagatttgggcggcggttaagcaggtagcaaaagatgcctggggtgctaaatacgagagcattttggaaagcatcaagcacatcccaaaccgtgcgggctatcgcgatggcgatgtgaaaggtgcagaagaatatgcaggctgcatgttcctgaatgcgtcaaacaaagctcgcccgttagtgatcgaccgcgacaaaacgcctttggttgctgctgacggtcgcccatatagcgggtgctacgttaatgcgattgtcaccgtttatgcctacgacaacaaaggcaaaggcatcggcttctcactgggcggcatccagttcttccgcgacggtgacgccttcgctggcggtggtgtggccagcggcgaggacttcgacagcatcgaggaaggcaccgacgcgggcgaattcgtttaa

SEQ ID NO: 428522 - DNA, 522 bp, Serratia marcescens
atgcctgagatatggaaagacgtcatcggatacgagggtctttatcaggtctcaagtaagggtcgagtgcgaagtgtggacaggcttgtcagtagcggcggccggttgcgcaaagagaaaggccgggtaaaagcgctgtccgccaaccatgacggctacccccgcgttgggctgtacaaagacgggaaaggtaaatacttttcggtgcatcgactcgtcgcagccgcattcatccctaaccctgaaaacaagcctcttgtggaccacataaacgggatccgcagcgataaccgcgtcaaaaacctccgctgggccacccattctcaaaataatgcgcactgccacagcacgtctagaaattcaggggttgttggcgtgcgccgcagggacgcttgcaagaaaaatccttgggaggttagcggttcagttggtggcaaagaaataacaattggctacttcccaacgctgaccctggcaattcaagcacgtaaaaagcatttgaaggaggtgttcagtgactga

SEQ ID NO: 428523 - DNA, 135 bp, Serratia marcescens
atgaattccttgaaacagatgcaacaccgtcaccgcgtgactggtgcggattttcacaccccgaaaacaggcggcctgcgctttctggcggcgctgctcttaatgacaactttccttctccttgtagcgaggtaa

SEQ ID NO: 428524 - DNA, 369 bp, Serratia marcescens
atgccgaacattaagcgttatgaagtcgaatacgactggaaaggctctctgatcgttgaaatcaaccacgatgtaatgacggacgagaagctgcacgaaattaacgacttttggtctaacaacacctaccgaatcagtaagcaaggcagcgttttaaacgcagtgctggccatgcttgcccaaacggcattccttatccagatcagcaacgactacaacacctacggtgtggtcagcgcattctcgtgggagaacggcgaggggcaagaaggctggccccctatggacggctccgaaggtatcaagatcatcgactgccaaatcgacttattcgataccgacgacatgaccataacagccgctaaatag

SEQ ID NO: 428525 - DNA, 183 bp, Serratia marcescens
atgaaatccctacatttcatccattcaggcgtcagcggctgcgctgaagtgtctggcgccaccgtgtttgtgcgctacgccggcgccggtttccacctgtcggccgccaaagacggcctgcgcaaaaagatcatggccgagctggcaaaagccgccctgctgccgaaaacaatccgttcctga

SEQ ID NO: 428526 - DNA, 171 bp, Serratia marcescens
atgaacaaattcccgcgtgtttattactacgcatcccgcaaaaacaagttcgtcgaaatcactcacgcgccagttaacggcatcagcaccaaggtaaccaaaccagtgagcggcaaggttgaagcgcgtcagatcgccaaagagctgaacggcgtcgcctggaacttctaa

SEQ ID NO: 428527 - DNA, 618 bp, Serratia marcescens
atgaaagaggcaggcatcacccaggaaaagcttggggagatgataggccgtactcaaggtgctatagcccactggctaaacggcaggcgagagcctagccttcaagaaatagctaacatcatgaaagcgcttaacattgatgagttaaaactcagcagtgaaggcgtcgtcagcaatggacagaataaagatgagttggaattcgccggacatccccgtaacggagctataccagtgaaaggcgaagcgtggatgggggttgatggcgaattcgaaatggttgaaatagagggcggctggatcagaatgtacagcggcgatcctgatgctttcgctttaaaggtcaaaggcgatagtatgttcccccgcataaacgccggtgaatatgttgtcatcgagcctaatgctggctattgccctggcatggacgtattcgttcgtactatgggcggtaaaaatcttatcaaacgcttggggtatgacagaaacggtgtataccaactactaagcgtcaatcagacccatgcccctataactattgaccacggactggtaagccatctctaccctgtcgccgctatcgtaaccagcgcacgctatctcgaaatcaacagctaa

SEQ ID NO: 428528 - DNA, 210 bp, Serratia marcescens
atgaacagactaaaagagctgagaaacgaagctgggttgtctcaggccgctttggcggaggctatgggagtatctcaaggcgcgattgcgcactacgaaaaaggtttccgcggtatgaaagccgatagtatcaacaaattgttgctggtgctttcaaaacacggggttcactgcactttcgaagatattttccctaagaaaaaggcgtaa

SEQ ID NO: 428529 - DNA, 2193 bp, Serratia marcescens
atgccaaaacaacaaatatggggcgccgcgccggatgattggttccacttttcgttcgtgctggggctgacccccgatctgctgccggttgtgtcgcgccctgatgcgccgatctcgccgaccagcaaactcaagaccaccggcaaaacgccgagccattacaacgggcagggcatggttgccggcctgaaggactggaccgcgcgcaccagcaccgatgacgacgtcggccgctgggcgaagcaacccgattacggcatcctgctgcagacgcgcaccgttcgcgcgctggatgtggacgtgtccgatccggttgtcgccgacgccattctcagcgcggtcgccaccatgatcggcccactgcccaaacgcatgcgcgccaacagcccaaaattcctgctggcgttccagctcgaaggccagatgtcgaaacgcatcctgcgcaccgaagccggcaacatcgagttcctggccaccgggcagcagttcgtcgcgctgggcacgcacccgagcggtgcccgctatgagtgggacggcgggctgccagacgagatccccgtgctgggcgccgacgacttcgaggccgtgtggtgcatgctggagaccgttttcggcgttggcgagaccgtcgtcgagaaagaagggcggctgcgcgaccgcagcgcgcgcgacgctggcgccacggacgagacggccgactacctcgatgcaaacgactggacactcgactggggcgccggcggtgagcgctatatccgctgcccattcgaggacgggcacagcaccgagagcgccgataacaccgctaccgcgtatttccctgcgggcaccggcggctttgagcaggggcatttccgctgcctgcacgccagctgcgcgcaccgcaacgacggcgacttcctcaacgcgatcggcatccgcgacaacgatttcgacgtgatacccgccgagggtggcgaggagtacctgccgctgccggcgttctcccgcgacaaaaacgggcagattgaagggaccataaccaatgtgctgctggcgctgcgcaggccagacctctgcggcgtgcagatccgcctcgatgagttccgtaacgaggtcattctgaccacgccgcgcggcgaacatctactgctgcgcgacgagtactacaccaagatccacgaaacgctcgagcgaaatctccagttcaagaaattccaggagacagagatcaaacggtccgtgcgcctcatcgcttacgaaaaccggttcgactcgcttaaggactgggtaaaccagctgcctgcctgggacggtgtgccgcgcatagacacgttcttctgccgtcattggggcatcgactcctcggcctacagcaaagccgtggggcgctactggtggacactgctcgctgggcgggcccttgaacccggcatcaagggcgacatggcggtggtgctggtcagccagcagggcaagaacaagtccgaggggatccgcgcgatggcgccgacaccagagcactatatggaactggacttcgaaaaacctgcagctgagcgcgtgcgtgagatgcgcgggcacaacgttatcgagctgggcgagatgcgcggcatgaacaaggctggcatcggcgccgtgcgtgtcaccatctccacgcgcgcagaccgtaacagggggctgtaccgggagcattacgacacgctgccgcgccggtgtggtttcatcgcaacggtgaacactgacacgccgctgaccgatacagagggcaaccgccgctggctgccgatgaccatcccagacgacatcgacggtaagcacatcgccgcgcagatcgccactgagcgcgagcagctatgggcggaagccgttctggtgttcaaggctgaggggattgcatgggagcgcgcggagacgctggccaagaccgtgctgggcgattacgaggtgaaagacgacgtatgggtgtcgtgcatcgctgagtggctggaggctgaatctaccgagctgaacgacaactccctcgtgaagaactgcgatcgcgtgccgctgacctccaaggacctgctggtcgaggcaatcggctttaaggcgccgcaggtcaaacgcggggacgaaatgaaggtagccaaaatcatgaaggatcttgggtacaaaacgaaacgcctttgtaccttgccagggcaacctcgccattgggtgaaaagcgactag

SEQ ID NO: 428530 - DNA, 279 bp, Serratia marcescens
atgctaagagattcagacactttaccatcagctgaaaccctgatggaccaagccggtaggacggcaacaacgtggcttcgtacagccattatcgaaatcgacgaggcgttagggaaagggtatgcaaaaaaccacccggagctaatagcaggctttatgcaggccgcaggtgcggacgagatagcgatgcacctgcgcggacttgccatatcacaccggcgaattgaagagagtttagacgtgctgctggaccgtctatccagaaacgataacgcgtaa

SEQ ID NO: 428531 - DNA, 384 bp, Serratia marcescens
atgcgtagaaacatgcaagaagttctagagcggtggggccgctgggctatcagtgaagaaaaatgcacgttggtggactggccggcgatgtccgtcacgccagcgcgccttccgatggcggggggcggcaaaacgtgcagcgatgacgacgggctcatgatcgatggctgcgtaagtcgcttcaaaaagctgcgcgacagggaggacgtgctgatcctgggcctgcgctacatcggcggcctgccgctgcgccagatagcgcaggcgctgaaaatggacctcaacgcggtgcggcgctcgctgtactcgacggaggcgtttctggaagggtgcctggcaacgctctgcattccgttggacatggacccggaagtgtgcgaataa

SEQ ID NO: 428532 - DNA, 345 bp, Serratia marcescens
atgaccaacaatccacatgactggccggactggatagcgctgctgcagtcatggtggcgcggagaaacgccgatcggcggcgtgctgctggccgttatcaccgcagtgctgcgcatggcgtacaccggcggcggctggaagaagacggcgttagaagggctgctgtgcggcgcgctgacgctgacagcggtatccgcgctggagtatttcgacctgcccaaatcgctctccccggcagtgggcggcgcgatcggtttcatcggcgttgagcagttccgcgtcttcgttctgcgcttcttcggcaaccgcttcggcatcggcgataacaacaaaccgcaggcgtaa

SEQ ID NO: 428533 - DNA, 612 bp, Serratia marcescens
atgacacaagaccaattccaacaggcggctggcatcagcgccgaactagccgcgcgctggttcaagccgatcaccgcggctatggccgagttcggcatcacaacaccggtgcagcaggtgatgttcatcgcccaaaccggccacgagtcgcagggcttcacccggctggccgagtcgtttaactacacgccggcggcactgctgacaacgttcggtaaccgcatcagccgtgaccaggcggcgatgctcggtcgcacagcagatcaccctgcgcgccaggaggcaatcgctaacctggtctaccaagggcgctacggcaacaagctgccgggcgacggctggaagttccgcggccacggcctgatccagatcaccttcctcgacaaccacaaagcctgcggcaaagcgctgggcctcgacctggtcgccaatcccgatctgctgatggtcgatgtgaacgccgcgcgctcggcgggctggtactggcaaacgcgcaatatcaaccaggtggcggccgatgtccgcgaggccacccggcgcatcaacccggcgctgcatgctctcgaccagcgcacggcgcgctatagccgcgctattgcggtgctcggatga

SEQ ID NO: 428534 - DNA, 447 bp, Serratia marcescens
atgacatggccgctaccgcattggcaggccgctgtcgtggccgtggtgctcggcctgctggcgtatttcgcatatagcaatcaggcgctgcgccacgagcgcgacaaattgcaaacggccaacagccagctgtctggccagctcgactggcagaacagcacgcagcgtgcggtgtccgccatcgacgaacaccgcacccaggaactgaacgatgccaagaatcagattgatgatctgcagcgcgctgttgccgctggcaatctccggctgcagctcgccgccacgtgcccaaccaccggggccgccggcgtggttgatgcaaccagcccccgacttactgacgccgctgagcgggattatttccgtctccgagagcgaatcgaaaccgcccgcagccagatagctggcctgcaggactacatccgcaacgtgtgcctggcgaagtga

SEQ ID NO: 428535 - DNA, 288 bp, Serratia marcescens
atggacaacgtaaccaagttgaacctgattaaaccaggcgagacagaccccgcaatcgagcatgacaaagaaaagatccggcgcatcctgctcgatgttctggataaggtcgacaccgaaatgctgcgcacgctggtgctggtcgccattactgacgacggttcggtagtgcaggggcgccatgtgctcggcaactaccattcgctgctcggcggtttaagccggtcggcatacatcgttaaccaactgctggacggcgttaataacgccagcgagcaggaatattaa

SEQ ID NO: 428536 - DNA, 261 bp, Serratia marcescens
atgttcactttgaaaattattactgccaacggtaacgaagttatccacgctgcgcaggacccgatcttccaccaggccagcaacacgatcacctttcagggctacgacaacctgagcaactcagtaacgctgggtgaaggtctgacgaatgcgggcggcgatgtggcctacctgatgggggcaagcggcgcgactctggcaacgtggcgttatcgctcaccggtgcgctgtggcaattcgctgcaaccaatggaatgctaa

SEQ ID NO: 428537 - DNA, 225 bp, Serratia marcescens
atggcagaacttaccgaccagcaaaagctgcgcctcagcatcctgtcgctggtgcagaacgacaccgctgcggcgcaggaggcgatcgactacatcgccgatgactccctaaagctggagctgttcaaccgtcagtatgcgctggcacaggctgagcaaactccgttgacccgtacgattaaggcgatccagggcgtgaaagacgctttgccgcttttccagtga

SEQ ID NO: 428538 - DNA, 237 bp, Serratia marcescens
atgagcaacaaatggccgatttttacaggtaacaacacccaggtgaacgctgtaaaaatcagcgctatccgtcagcaggacaacggctacggcgttatcacgccagagggcggctaccccgcggttaccgtgaccgatagctttatgcgcgactggaaacctgttgtcggcggctatttggtgcaggacgcaaccggccaactgttgttcatgtccgctgctgctttcgaagcatag

SEQ ID NO: 428539 - DNA, 561 bp, Serratia marcescens
atggcaggaaaactcaaggacaaaaaagagcttttttgccgcgaatacatcatcgatctgaaagcagcaccggcggctgagcgggcagggtatagcgcccgttcggcctgcaacatcggcccgcgcctgctgaaagagccagaagtcctcgcacgcatcgacgagctgaagcgcgaacgcatttcgcagctgggcattgatgccaattacgtgctgctgcgcctggtggagatcgaccagatggacgcggcggacatcttcaacaatgacggcagcatcaagccgatcgttgactggccggcggcttggcgtcgctacctcagcggctttgatctggccgaaatgttcgagggccgcggtgaagaccgtgaaatggtcggtttcctgaagaaaatcaaatggcctgacaaggtgaaaaaccttgagctgattggcaaacacatcagcgtgcaggccttcaaagacaagatcgagactgaagacgtcaccccgccggcaaatcgcgaggtgcgccagtcccgcattaaggagttgctaagccgtggtagacgcagcgattga

SEQ ID NO: 428540 - DNA, 1506 bp, Serratia marcescens
gtggtagacgcagcgattgacatcgacgacctgaccgacgaggagcaggccgaactgctcacattgttggaagaggaagacgagtatcgccgcacgcatctgctctacgagtacagtccgtacgctaagcagcgcgagtttctagacgctggcggcgactacaccgagcgctgtttcatggccggcaaccagctgggtaaatcattcactggcggcgccgaggtgtcgtttcaccttacggggcgctacccaggcactgaaggttatcccgacgacggtgcttacgatggcaactggcagggccgccggttcaacgagccggtggtgttttgggtaggtggcgagaccaacgaaaccgtcaccaaaaccacccagcgcatactctgcgggcgcattgaagagaacgacgagccaggctatggcctactacctaaagaagacatcatcagctggaagaaatcgccgttctacccgaaccttgtcgatcacctgctggtgcgccaccacgcgccgaatggcgtcgaagatggcatgtccatctgctacttcaagccgtactcgcaagggcggcagcgttggcagggtgacacggtgcacggcgtctggttcgatgaagagccgccgtacgcgatttactccgaaggcctgacccgtaccaacaaatacgggcagttctcgctgctgacattcaccccgctgatgggtatgtcgcaggttgttgagaaattcatcaagaacccaagcaaggcgcagaaagtggtcacgatgaccattcacgacgccgagcactacaccgacgccgagcgcgagcggatcatcgaatcgtacccggagcacgagcgtgaagcgcgcgccaagggcatcccgacgatgggcagcgggcgaatcttccagatccccgaggaaaccattaagtgccagccgttcgaatgccctgcgcatttttacgttatcaacggccaggactttggctggaaccacccgcaggcgcacgtgcagctgtggtgggataaagacgaagacgtgttctatctagcgcgcgtatggaagaaaagcgagaagacggcgacggaagcatggagcgctgttaaatcgtggtctacgcgcatcccggtagcatggccccacgatggacatcagcacgaaaaaggcggcggggcgcagctcaagacgcagtatgccgacgcaggcttcctgatgctgaaagagcacgcaaccttcgctgagggcggcaactctgttgaatctggcctgactgaacttcgagatctcatgctggaaggccgcttccgcgtgttcaacacctgcgagcctttcttcgaagagttccggctctaccacagggacgagaacggcaagatctcgaagacaaacgacgacgtcattgatgctgtgcgttacgcctacatgatgcgccgattcgcgcggatgatgcgcgatatcagaacacccaaagagaaaaaaatcccagcgccaattcggccgatccaacgtcccacgaggtag

SEQ ID NO: 428541 - DNA, 2178 bp, Serratia marcescens
atggctgacaacgacaagcagcaggacaggctgcaaaccatcctgacgatcttcgatcgggattggatgtcaagcgacgaagccagaaccgaagcgaccaacgacctgtatttttcgcgagtgtcgcagtgggatgactggctgagccaatacacaacgctgcaatatcgcgggcaattcgacgttgtccgcccggtagtgcgcaagctggttgcagaaatgcgccagaacccgatcgatgtgctttaccgcccgaaagacaacgccgacccgaacgcggcagacgtgctgatgggcatgtatcgcactgacatgcgccacaacacggcaaaaattgccgttaacgtggccgtgcgcgaacagatcgaggcgggcgtcggtgcctggcgcctggtcaccgattacgaagaccaggacccgaccagcaataaccagattatccgccggctaccgatccatgaggcgtcctcgcacgtcatctgggacagcaacgccaagcagatggataagagcgacgccaagcacgtgacggttatcaacgccatgagcatggacggctggaagagctacgccgaggagaacggtttcgaccccgacgatattcccgacttccagaaccctgaccagacatggcttttcccgtggctgaccaaggatgtggtttacgtcggcgagtattacgaggtcgaggaaaagaaggaaaccgcgttcatctatcaggacccgctgacaggcgaaccggtgagctacttcaagcgcgatatcgcgaatgtgatcgatgacctcgccgagcgtggcctgcggaaaattgcagaacgcaaagtgaagcgtcgccgtgtatacaaaaccgtgatcacctcgtcgtgcattttgaaagaccgcgagccgatcgcaggtgagcatctgccgatcatccctgtttacggggagtggggatttgcgggcgacaaagaggtctatgagggtgtcgtccggctgacaaaagacggtcagcgcctgcgcaacatgatcatgtcgttcaacgccgatattgtcgcgcggacgccgaagaaaaaaccgttcttctggccggagcagatcgccgggtacgagtacatgtacagcgggcaggatgatttcccttactacctgctgaaccgcaccgatgagaacggcggcgatattccgccgcagcctctcggctatatggacaacccggaggtgccgcaggctaacgcgtacatgctcgaagcagcgaccaacgccgtgaaagaggtcgcgacgctcggcgtcgacactgaggctgccggcggtaacgtggcctttgacacggtcaaccagttgaacatgcgcgccgatctggaaacgtatgtgttccaggacaacctcgcaacggcaatgcgtcgcgacggtgaggtttacgccgcgatggtcaatgacctctacgacgtgccgcgcactgtgttgatgacgctcccggacggcagcgaaaaggacgtgcagctgctgacgcaggttgtggactatcagaccggtgaggtggtcacgcttaacgatatccgcggccggtatgaaacctataccgatgtggggccgtcgttccagagcatgaaaaaccagaaccgcgcggagatccaggagttgctcggcaaagtcccgcagggcacgcctgagtttcagatgctgctcctgcagtacttcacgctgctggatggcaagggcgtcgagatcatgcgcgagtatgccaataagcagttggtgctgatggggctgaaacagccagagacggaagaggaacagcaggcagtgatgcaggctcaacagcaacaaggccagccggacgccgcaatggtgcaggcgcagggtgtgctgctgcaggggcaggcagacctgcagagagcgcagaacgaccaggcgaaaatccaggtcgatgcgttcaaagcacagaccgatgcgcaggtctcggccgctcgtgtggttgagatccttgcttccgccgacagcaccaagaaaaacgatgtgatcgccgcgctgaaactgctcggcgacttccagacgaagcagggcgacagtgcccgcgctgacgctgagcttgtccttaaagggcaacgccaactccattcccgccgtatggatttaaccaatctgttacggcaagcaaatcaaccctccggcggagcagccgagattcctcaatag

SEQ ID NO: 428542 - DNA, 912 bp, Serratia marcescens
atgaccgataccaccgaaattcaggcaactgaaggccaaaccttgtccagcactcagcaggcggcacctgttgaaggccagctgatcgataatgccaacggcagcgaaggccaggagagcggcttcgatattgtcctgaaagacgatgagaccaaacctaagcaggacccggcgacaaatgcccatttcgccgccaaacgcatcgagcgcaagcgtcaacgcgagcttgagcagcagatggaagcggtgagccgtggcgaactgccggataacctgcgcgtggcgcctgagctgccggcgcaaccggacattaaccagtatctgtccgatgacggccttgccaaatacgactacgaccagagccgagcgctggccgctttcaacgccgctaataccgagtggctgatgaaagcgcaggatgctcgcagcaacgccgtagccgaacagggcaagaaaactcaggcgtttacgcagcagtcagccgtttatgtggatgcagcccgtaaacactacgacgcggccgaaaaactcaacctgccggattatcaggcgaaagaggacgctttccgctcgatgctcgctcctggcatcgatgcggagatcatggcgttgttccctgaaaaatccgcagcgattttctaccacctgggcgcaaacccagagaaggcgcgcgacatcctgagcctgccgcaaacgcaggccatcatcgagctgactcgcctgtcagaccgtttaactctcaaaccacgcggtaagcaaatctccggcgccccagcggttgacgagcctgtgcagggccaggccgctgcggcgaaccgagattcgcttcagaaacaaatggaagctgccgccaacaaaggcgacaccgcgacttaccgcatgcttaaacaaaagcttaaggaactcaaataa

SEQ ID NO: 428543 - DNA, 1290 bp, Serratia marcescens
atggctcttaacgaaggtcaaatgatcacctatgcggtagacgagattgtcgaaaccgtagaaaacctgacgccaatggcgcaaaagaccaacaaatacgcccctgcggcgccatctatgcagcgctccggcaacaccttctggctgccagttgagcaggaagcacctacccaaagcggctgggacctgaccgacaaagccactggcgtactggaattgtccgtgaagtgcaacatgggcgacccggacaacgactttttccaactgcgcgccgacgatctgcgtgatgaacgctcttatcgccgccgcatccaggcgtcagccaaaaagctggcaaacaacgtcgaaaaggcgattgcgcagcaggcggttgatatgggctcgttggttgtcactaacccgcagccgatcggcactgccaccggtagtggttgggatttcgtcgcggatgcagaagagatcatgtttgctcgcgaactcaatcgcgatgcgggtctgtcttacttcttcaaccccggtgactataagcgcgcaggtcatgacctgatcaaccgtgatattttcggccgcatccctgaagatgcctataaaaatggcagcattcagcggcaagtagctggtttcgatgacgtgttgcgctctcctaaactgccaaccttggcggcgtccacggcgaccgggttgaccgtatccggagcgcaaaagttcaaaccagaagcgtggcgcctggatgccgacggcaacaaggaaaacgtcgataaccgcgtagctaccgttactttgagcgcaggaactggcttgaagcgcggcgacaagatcagctttgctggcgtgaagtatctgtcgcagatggctaaaaacgtgctgactcacgacgccactttcaccgtggttgcagtgaacggtgccaacgtgacaatcgcacctaagccaatcgcgctggatgataccgcgttgacccccgaagagcgcgcctatgcgaacgtaaacacctcgctagccaacaccatggctgtgaatgttctgaacgtgaaaaccgcggaaacgaacgtgttctgggcggatgattccatccgcttggtatcgcaaccgatcccggcgaatcacgaactgttcgcgggtatgaaaacccagtcgttcgccatccctggcgtcggtatcaacggcattttcgctacacagggcgatatctcgaccttaaccggcaagtgccgtatcgcactgtggtactccgcatgtgcggtacgaccggaagcgatcggcgtcggtctggccaaccagaccgcttaa

SEQ ID NO: 428544 - DNA, 276 bp, Serratia marcescens
atgtcccagatgatttacaaacgcggcggcgacacgctggtgtgggggctgaaagcccacgtaaaagtgattgagaccgacgaactggaagcccacctggcggaaggctggctggatcacccgtcaaaactgtttgagccagagccagagccagagccagagccagagccagagccagagccagagccagagccagagccagagccagagccagagccgattaagaagcagcgtaaaggcaaaaacccgtctgaaaacgcagacgaattcgtttaa

SEQ ID NO: 428545 - DNA, 504 bp, Serratia marcescens
atgaacctgaccacaaaaggcgatctggtgctcgccgcgctgcgaaaaatcggcatcgcctccaacgccacgctgaccgacgtcgaaccgcaatctgttgaagatggcgtgaatgacctcgaaatgatgatggccgagtggcgcgaggacccggcagcgggcattgatatcggatatcagtttgctgccgacggcgagccggcggtggatggcgacgaccacggactgaaaacagcgcatctcagcgcggtgtatcacaacctggcgctgcgcatcgcgcccgattacgagatcgagccgctggccaaagtagtgaccgccgcgcgctatggcaaagagttgctggttaagtcctccgcgctgacgcgcgcgaaaaaagtctatcgcgaagccggctacccgaaccggatgcctatcggctccggtaaccggatcccgacctacaacggccaccactacttccatcgcaaaggagacgacgatgccgactcttccactggctaa

SEQ ID NO: 428546 - DNA, 1422 bp, Serratia marcescens
atgccgactcttccactggctaaaggcctcggtaaggactaccgcaacgccgattatgtcgacctgctgccggtcaatatgctggcgacgccgaaagaagtgctgaacgccgccggttatcttcgctcattccctggggtggcgaaaaaagcagacgtggcgggcacttctcgcggggtgcagttcaacaaggctgaaaatatcgtgtatcgcgttgcgggcggcaagctgtacaaaggcgctggtgagcgcggctacgtttctggcaatgcacgcgtcagcatggcccacagcgcgaccagccaggcagtggccgctaacggaacgatgacactgtatcgctacgacggaacgaacaagaccctgcagaattggcctgaacagatcggcgacgtgacttacgcccaatatgatatcggcagcgtacgcgatatttgccgcgcacgcggtcgctacgtttgggtaaaagacgggacgcagactttcggagttaccgatctcgaggacgaatcgcacccagaccggtttcgtccgttctacagcgccgagagtcaacccgacggcattctcggctgcgggatctggcgcgatttcgtcgtgatgtttggcagcagcacaattgaatatttctcgctgacaggcgccactgacaccgcgtcagcgatctacgtcgcgcagccgtcactcatggtgcagaaggggatcgcaggcacgcattgcaaaaccgagtttgcagattctttcgcgtttatcagccaccagtctacgggggcgccgtcgatttaccttatcaacagcgggcagcctacgacgatcgcgacagccactgtggagaaagtgctgcgcagctatacggctgaagaactggcaaccggcgtgcttgaaactgttcgctttgacggtcacgaactgcttatcgtccacttgcctcggcacgtgttgtgctacgacgcggccgccagccagaacggcgcgcagtggtgcattctcaaaacagggctgttcgacgatgtgcatcgcgcgatcgactacgtgttcgagggtaaccagatcaccgccggcgacaagctggagccggttgtcggcgctctgcagttcgattcctcggcgcagtacgacaagcagactgagcacctgctgttcactcccatgttcaaagccaacaatgctcgcgtgttcgacttcgaactcgaagcggcgacaggggtttcgcagtacgcggaacgactgtttatctcctcgactgccgacggctcgaactacggccgggagcagatgatcggcgccaatgcgccgtttgcctacgataaacgcgtgctgtggcgccgaatggggcgggtgcggaagaacatcggttttaaagtgcgcgtgatcacccgctcaccggtaaccctgagcgactgctcggtgaggattgaatag

SEQ ID NO: 428547 - DNA, 828 bp, Serratia marcescens
gtggcagacgacaatctcagaaaacccgtcacggttcagatgacgcgaatcgacgcaacgctgctaccgcccatcttctcacagccttatcgactgtatgtcgttcagcaaggcaccgatctgggcaacgtcgccgggaaagcgaacgaagctggtcagggtgcatatgacgctcagcagaaaaacgacgagcaggacctggtgctggcgaatcacgaaacgcgacttgaggcggcggaggcgacgctcgtcaaccatgagcagcgcattaccgcagcagaagccacgttagcagatcacgaactgcgcatcactactgccgaggctgaacttgctgatcacgagacacgcatctcagccaatgaagcagaattggcggaccacgaaacgcgaattacgcaaaacaccaacgatatatcggcgttagacacccggatggataccgccgaaagcgacatcaataccctggaaaccaactcggtatcgaaggctgtttcaacgagccagtcggtgcaggctaccggcgggtcgttcctcgtgggcaacgtcgcaacgcctaccacggataaattgcaggttggtggcaacgttaatatcagcgggtcgtacaaagtggcggggctgtcagtgcttggcgcgcgccaaaccggctggactgccgcgaccggtacagcgaacaaaggggcgttcaacgctgaccagtcgttcaccgtcggcgccacctattcgcaagcagaagttcaggccttggccgacgcgtttaaagctgcgtgccagcgtattaaagcgctggaggacatggcgcgcactcacgggatgattaactga

SEQ ID NO: 428548 - DNA, 462 bp, Serratia marcescens
atggaaattaaattaatcgacaacccggtgcggttgcaggcatttctgaacgaccaggcgaataccggcaacattgtcgacgatggcgatcactacttcattaagcccgatgcggtctacctcggtatttatgagggggtaatgttggtcggtgtgcacgaggtgcgcacgttctggcaaagcgttgtcgagtgccatgccatctacgatccggggtttcgcggtaagtatgcgctggagggccaccggcttttctgccgctggctcctggcaaattcgccattcacgaacagcatcaccatggtgccagattcaacaaaatacggtcgagcgatcatccgtctcctgggcgcaacacgcgtggggcacctgaaggatgcttatctcagcgatgggcagccagttggcgtcacgctgtatcagctcacacgttcgcagtatgaggacatgcaaaaatgctaa

SEQ ID NO: 428549 - DNA, 675 bp, Serratia marcescens
atgctaattttccagctcatgaacaaagtccgtgatcgcgcagtgtactgcaaaggcggcgataacggcgccggcgcggcggccgatgctaatcgggaggctactgcgctgcagcgcgagatgtggcaaacgaacatgcagaacctcgcgccattcacgccgctggcgcagcagtatgtcggccaactgcaaaacctctcatcgctgggtggccagcagcaggcgctgaacgaatattacaactccggccagttcaaagacctgtcgaatcaggcccgctatcagcaattggcgtccgctgaagcaaccggcgggttaggctcgactgctacaagtaacggcttggcgacgatcgcccctatgctggggcagaattggctcaccgggcagatgaacaactaccagaacctcgccaacattggtctgggtgcgctgcaggggcaggccaatgccggtcaatcctacgcaaacaacaccggccagttgcttcaacagaatgcggcgcttgcggcagcgaacgctaatcggccgtcaggcttgcagctggggattggcggactggctggcggcgccatgtcaggcgcagctttggggagtgtggtgcctgggctaggcactggccttggcgccgcaattggcggaggtctggggctcttaggggggattggattctga

SEQ ID NO: 428550 - DNA, 1353 bp, Serratia marcescens
atggctacctggaaccagaatatcaactccggcggtttcctcgccggtattggtgcgcagaatgagaacgcaccgcaggccagcgatgcaaacaccgcgctgagcctgatccgagacaacaacgaccgcgagcgagcaggggagaacaatctcggcgtgcaattggctggcgctgcgggctccttggctaacacctggaagcaggcagaccagcagcagcgccagaaggctttccagcaggattacgccaatgcttatgcgtcgggcgatcgtggcgcgatgcgtgggctggtcgccaaataccccgaacagttcgaggctgtgcgcaacggtatgggcttcgtcgatgaagatcagcgtaacaccgtcggcaacctggcggcgtcggcgcggctggcgtcgcaaagccctgaagcaatggggcagtggctgcaaaaaaacgccggcgatctgacgcgggtcggcgtaaatccttccgatgtggcgcagatgtaccagcagaatccggccggtttcggccagttcgtggaccatctcgggatcgcttcgctcggcccggataaatatttcgacctccaggctaatagcgccaagttgcagcagactggccaaatcgcacaggcaaacctgaatctggggcagcagcgcctgcagcagcaggcagcctatcagcaggggcagttaaatcaaggccagcagcagctgaacctgaccgcccagaagaaccaggcggacaacgccaacaagcagttggaactaagtttgaaggcaggcgagaatagcgcgaaatctcaggctacgcagcaggcggccgtgcagaaaatgcaggattacgtcggcgcccaccaaagcaacgccaacaacgtggccagcatgtacgacacggtcaaccaggtgaaaagcataaagcccgaagtgttcgaccgtgtgttcggctttggcggcacagtcaactcgcggatccccggcacggagtcggccgatgcgtggtctaaaatcgagcagatgcaggggcaggcgcgtttgatgggggttatcgggatgaaaggcaccggcccggtttcggactccgaaggtcaggcggctgctcgggcatttctggccattaaccagaacatgtcgcctaatgctgctcgagccgcgatcgataactggcaaaaggtgctccagcggcagacgtcatatctgcagaagcagcagccaatgatcgatacgtaccagcaaaaaatcgacacgttcaatgctgggcaggctggcggcaccactgcagccccgcgagccgggtataccgaggggggctatacgttcatcggcggtgacccgagtaatcctaacagctggagaaagaactaa

SEQ ID NO: 428551 - DNA, 2637 bp, Serratia marcescens
atggcaggcccttgggagaaatatcagagcacgccggcggccacttcaacttcagaggggccgtggtctaaataccagcagcaggccgaacagtcgccaccgcaaacaggtggcgatattgtttctgcggctgagcagcgtttcgggcttccagcgggcctactcagcgcggtgatcagtaaggagagcagtggcaactcgaaggctatcagtccgaaaggcgccatcggtttggggcaggtgatgcccgatacggcacgaggtatgggctatgaccctgaagagctaaaacgcaacccggcgctgcaggttgaggccgccggccggtatctgaaacagatgctcgacgcgcacggcaacgtcaccgacgctttggccgcctataactgggggccaggcaacgtgcagaaatttatgcgtggtgaaaaaacgcaaattccagcagagacggtgaactacgtcaccgatccccgcttcgcgcagtggacgcagccagccgcgcagccgggcggtgaaggtgagctagcccagctatcacagcaggcggcacaaccgtgggcacaggcggcgccagagccaacttttgcggagaaccttgagcaggccgggcggggcttggcgcaaagtgctgtgaacgtcgccaatatccctggacaggtggttaacaccgcgctcggcgctgcgggcgtaccggccgaagaccaggttatgcagttgcgactgccggaaagcatgcggccgacagacccttacgcgcagttgggggcggagatcggcccgtaccttatccctggcctcggcgctgaacgtactgcggcggcgttggcttctacggccggagctgggcgtgcagaacgggtagcaacgcaagcggcgaacatgctggcggaaaacctccccggtgcgattgcgcagtccacccagaataacgacctgtcgagcaaccttgctaccggtctggctggcagcgtgatcgggcgcggattgctggccgccggtgggcgcgctgcgggcgctattcgcaatgctgcgcagcgtgaagggtctgcgggagcggcagccacagcaacgccagagcaggcagcacagggcgccgcaatgccacctgagcaggccaatcccctggaggattctgtccgcaatatggctaaccagcgcaggcccgatttggcgtcttctctggacagtgttaatccgcagcctgagcgggacattttgcaatctgcaagtcgattaggcgttgatgacaaacttctgccgtcgcatttctcaggtaatcagcaatatcgagcggttgagcaggctcttaagtctcgaaaaggatccgcgcttcgagttcaggaagatgatgcaattaatgcgctggcaaagagaactggagagctgatcgatgacgctgctggcactcccgatgctttagccgcggggagcaagttttatactgaaatgcagggtcgtatgggggcgttggaacgtcgtagcgatcagctctatgctcgcgtagataacgctatgccacccggtaaacctgttgctgctgacaacaccgcactgcatttggaaaaagaagcggatagcttggggggatgggagaacttagacgccattgagcagagggtgtttaaggcggtaaatccaggggataacggaaccctgacatatgccaacctcaataagcagcgtcgtttggtagggcaggctcttttcaaaaagagtggcccttataaggatgctgacgaggcggcattgtcccgcctttatgcaaacctttcggaagaccagaaggtagcattagagggacttggtgcgcgccgagatttcgaagtggctcagcgactcgtgcaaatgcgcaaaacgttggaagatcaagatctcgctcttagaggcggaaacctcaccggtgatgtggggcaccgagctaccggcgctttgcagaacatgtctaaaggcgacgggaaagccttccgtgaactgatgaacaacgtaccttcgcgcaatatgaaatatgaaattatcgccaccggcatgcgagatatgctctccgccggtaagaggggggcggatttcaaccctggaggttttgcggactggtggcaaaacatgaaagcgagtgggcagctcaggctgcttgcgcagcatgccccgcgtgagttgatgactggacttgccgatgtttacaacgtggcgcggggtatccagcgggctaaaagggatgaaataaccacgggggctcttaatgagtttgttaatcgttttaatcgagtcacccaagggcacgaactggccgcaaaatatgcccagcgcgtaggtgtagtggcgggcgctaaaggtggtgctctgggatctctgatcggggattcaatcggggcaaaaatagcggagaaagccaggctttccggcggggcgggctcagcagatgccgccgagaagctgattgcctccccggaataccaacaggcttttaaaagtgctaaacctgcggcgaaagcgcaggccgccgatatcgacagcgctgctcgtcggtcgtcttcatgggcggattttatcgcctcattgcctgaagccgatcgcaaaactattgcacgaatcggtttgcttggatggctatcggcaaggagagacgaacggaaatactag

SEQ ID NO: 428552 - DNA, 804 bp, Serratia marcescens
atgacagctcaactcactttcaattctcaagtcctcgaaaccgtcagccacgataaccggctgtggttcacctctgctacgctcgccaaggcgctggaatattcccgcggtgataaaatcacgcagatctacaaccgcagcaaagacgagttcaccccttgcatgacaatgactgtcgagaacctcaatttgaggttgtcggagaaatcaaagagttacggtaatctccagaccaaaactcgcattttctctctgcgcggtgctcacctgatcgcgatgctggccaacacgccagtcgcaaaagcgttccgcaagtgggtgctggatctgatcgaccgcgaagccgacgttaccacccctccggcgaagtatcaggagcaggacagcgccaagctgccggctgggatttacttccagggcggcaagtataacccctacagggcgtcggccaccatcgacggcaaatacatccacctcggagtataccccacggtagaggatgcgctactggctcgccatgagtatcttcgacagcaccacgtaaaagcggtgatgaaaaacaacgccgatatcgtcgggctgcccaacgtgaatgcacgcattctgctgacggtcgagaatggacaggttacccgttcgaagatcatgcaggaagacgcgatcaccgccacgccggagaatctgccggaggtgctcaaagagcacgggcaaaccaccctgacggtgcagcattttcagcggattattgaggcctgcgttgccgccatcgcccagaaatgtaatgttcctgcgctggtaaaataa

SEQ ID NO: 428553 - DNA, 2022 bp, Serratia marcescens
atggctgacaccattatcccgaatgtcgttgtttcgatgccatcacaactttttacgctcgcacgctcgttcaaggcagcggcgaacggccggatctacatcggtaaaatcgacacagatccgacaatccccgagaaccagatccaggtctatctcgagaacgaagatggcacgcacgtgcctattgcacagccaatcatcatcaacagcggcggctatccggtgtatggggggcagatcgcaaaatttgtgactgtgcagggccattcaatggccgtttacgatgcgttcggtgtgcagcaattctatttccctaatgtgctgaaatacgaccccgatcagttcaaacaaatcatcgagggtaaaaatggtttagatgcaattgggcgatatgagtcaatggctgaactaaggtctttctcaccactaagagcggggcaaagagtatttctcgctcaatattatgcggatagaaaaaacctgggcggggggatattcgtttcagttgctgatactacaacggcggaagatggagggtttacaaatattagggtaaatcctgcgtatattcttcagcgtgatactaaaaacgacgaagtacacatcttggacggcggcggaaatccaacagccgggttcgataacgcacctgtatttcaacgttacttcgataaggttttgggccgacctctaaagttgactcggggtgtatttgaatgcaagacaggtataattataccagctaataaggcccactccgtcatatttgatggtgctatggaaggggattgtatcttgcagttctcattcacccccggtgatttgtcaacctcagcgataaagctgaatgggagtgtagctaattacacgtattcaggtctgaatatgagaggatttaaggtgatcggtgatggttctgtgactgcgagcggcggagcgcggcacgggctggaaatcagatatctcgcatatcctcaattccgtaatttacaggttgcgggcttcaaaggctccggtcttctgttagaccgtgttcaagatggttttttcgataatataaacatccagcgctgcggccattcaaccggggattatacggtattagctgacgtaacggacaataataaaacagactatgcaccgcttgaaataatgtctactcagtcgggtgatgagtcaaacatgttgcgctttgaaggtcttcagatagaaaataataattgctgtccgtatgttcgggtgcgcggcgggattggtcatagattcagaaatattcattctgagcaccgtgtcgggattatggcctctggcaagaacggaacatggttgcagatgagaactgccgatatatctacatacgatatacaggcatcgcaatttgagtgggcttttgaaaccaatgggtacgggtcgctagctgcaacaaattgggggcgttctggcggcattcgtaacgttacttctggtacgttagttagatggagattatcgaatagcaattttgataaagccattatgggaactggtgttcgcgtcgatgctataaactgctcattcggtgatgttgtatggaattttcaaagccatctatcatcatttacttcatgtcaattcggtaattggactggggattcaccggaaggtggtgcaggacgtggggtaagttttgttaattgtgacttcgcgtcatttaatgctaactcaaacaactttttattcactggcggtaggacttcaggaaacttcacatatcgcccactaagcggagtcggacagatcattcatcatgatattggaggtacgtccgatattagagcatcgttcggtcttacgtatatacctggcccaactcagcataaaattatctatgcaaacaccgccgcgccagttacagactttgggaatatcccctacggctcaatctggcacaacatggcagcgtcagcaaatggagatgttgtcgaatggatacgagtaaacaggggaactggatgggcggttttgtctaagatccaaagttaa

SEQ ID NO: 428554 - DNA, 348 bp, Serratia marcescens
ttgatcaaccgcatcgccgcgctgtacggcatcgagctgggctacttcagccgcattcgtctgttccggctggtgctgttgaacatcgccttcgccggcgcttccgagctggtgcgcgaagtaggcatggactggatgtcgcaggatctggcggcgcggctgtcggcgcgcgcggcgcagggcatcggcgccgggttgttgaccgcgcggctgggcatcaaggcgatggagctgtgccgcccgctgccgtggctggaaggggaaaagccgaagcttggcgatttccgcagccagctgatcggccagttgaaagacacgctgaaaaagagcgacggcaaggccaaatga

SEQ ID NO: 428555 - DNA, 1254 bp, Serratia marcescens
atgtcaccgataaaaaataccggacgcctgctggcgcactctattcttgccagcgcattattattacccaccctgctccacgctgcagataaaataacattacgctatgccgtttgggacagaaaccaattacctgccgaacaggagatcgccaaacgctttgaacaggccaatccggatataaaaatagaaatagaattaacgccctctgcgcaatatttcgttaaattggattctgccgccgccggcggcgtggcgccggatatattctggatcaatatgccttattttgtgcaatacgccaaaaacggcattatggaaccgctggcgccttatattaaggacagcggccttcagctggacgacgtggtcgccagttcggtgaaagcctaccagtacgacggccaacagacggccattccgcgcgacgtcgactccatcgccgtgtggtacaacaaaaaactgttcgatcaggccggcgtcagctaccccaccagcgactggagctgggacgatctgaaaaacaaagccaccgccctgaaaagcgggctgaaaggcgccgccttcccgctggtgatggatctcagcatcgacggccaggacagctatatgaacctgctgttccaaaacggcaatcacatcgtaccgaaagacggccaacccaccgacatcgccaacgacaaatccatctgggtctaccagcagctgcagggcatgatgaaagacggcctgatgccgagcgcccagcaaatgagcgaagtcaaaaccgagaacatcttccagtccaaccgcgccgcgatggtctatgccggttcctggctggcggcgccgttcgccaacaacccgctgatcaacgatcacatcggcgtggtaatgatgccgaaaattgaacgccagtccggcgtagcgcacagcctggccttcgccatgtcggccaaaagcgcccacaaacaggccgcctggaaatatatcgccttcatgagcagcgaagcctcgcaggcggagctggccaaggtggtgatcccggccaacaagacggcggccaaggtctgggcgcagcagatccagaaagtcgacgtctcgccttatatccagacccttgaagtgacccaggcttaccccaccgccggcaccaatacgccgaaatggcagaacatgtggatcgccagcctgaagaaaatctttatgggcgcggacgccaagcaggaaatggacaagtcggtcaagaagatcgcgcgcgtcatggagcagtaa

SEQ ID NO: 428556 - DNA, 714 bp, Serratia marcescens
gtggagcacagcgataacggactgtttatcaaacgggagcgttttgaagttctggcgattctgcgtgaaatttgcaaacaacgcacgccgctgcgcgtagaaaatcagcagcaccggtttcaaagtctgttattgagcgtcgggccggacaatatcgtgtttagcggtgaggaagccgcgagcgccatcgacggcgcctgcaccatcgtgattgaaagcaacgacgccaaaatcgagttttccgtcggccaggcggagctgaccgaacatcagggcgtccaggcctgctcgacccgtctgccgcaggagctggtttacattcagcgccgtcgccagttccgcatcaccacgccgcactggcgtcaattcttctgcaccggcgaatacccggacggtacgccttatgagctgcggatccacgatctgtccgccggcggcgtcggtttgcgcttcgacggcccgctgccggaattcttccagccgggtttgcagttcaagaaagcgctgctggatctgggcagctacggcagcttcaaggtcaacatggagctggtggtggtcaacgacgatcaggaaactgacgacaacgatcaggtggtacacttctcgcgcctgtcatgccgcttcctcaagctggggctggcgatggagcgcaaaatccagagcgcggtgttcgccttcgagctggatttcaacaaaaagaaaaaacgctga

SEQ ID NO: 428557 - DNA, 1428 bp, Serratia marcescens
atgaacatctttctcaatgatctggtgacgctgaacaaggtcattttggacaacgcgcgcgaacagtttcccgacgccgaagccccccgtctgcgctaccgcgccgcgcccgcgccggtagccgacgaactgcaggccgatgtttgtaccgaagtcgtctcgggagagacgcgctatcgcatcgccaccagcagtgacggtacgcgctggcatatgacggtggatttcgcgctcagccgcgccgttcagcaggtgccctacgtggtgctgaccttcagcactttcggcaaggttgaagaaatgatcttcgaacaggttttgctggacctcccaccgacccgctaccgcgcccagctcgacctggaccgcctggaacagcgtgacgcgctgctgcgagcgctgtcggattatgactcgcaaaccacgctggtggtcgccatcgtcaccgataacgggctcctcaacaccatcacctcgccgaaagtcttctacttcgccgagaactactatccctatatctatcagggcatcctgccgccgccgccgcgcctgcagctgatcctcacgccgctggccttcgggcatctgtggtacaactactatcaggactatgtacgaaaaaactatctttattacctgccggatactttcctgctggcgaccaacgccgccgacgacgacaaaccgatgctgtctatctcgttttctgcagcgccgcacgcaacctcgctcaacgatgtcgaggtgacgttcgactatttcctgtcacccaaggtcaatcaggcacgcatcggcgacgccaccgcacagttcacgcagatgcaaccggacggcaagctggcgccgttcgccaacgcggacaccctgacgctgctgctggggctcccggacggcaaaacggaggaaaaaaacgcgctgatcaatctgcagagcggcatcgtggattcattcacgctgcccgccagccaatatggattgatttgggatgccttcttcgatcggtcgccgcaaaacctgctgctcaaggggtatctggcggtgcaattcaccggcttcaacccggataatctgcccgtggcgctggcgctggacgccaaataccagaacaggctgccggatttcatcaagcaatccgcaccggcggacatcaataagaccgtggaattccgcagcgatgccggcgcctacgatcccgccgggccgcggccgatcaagcgcatgctggtcagcatcgacaatcagaccattgagctggacaaggagcaccccgttcaatcggttaacgtgaagatttccgtgctggaactgatcctgcatccggacaagaagctggtgtatcactacgatttgcaaattatctacgtcgacggcggcaaaaagtcctcctacgacaatacgtccagcttcgagattatttacgtcccctga

SEQ ID NO: 428558 - DNA, 1911 bp, Serratia marcescens
atgatcgatcgcaacgcagtgttaccctcggcatggaacgccctggtcaacgccctgtgcaaggaagcgccctatttgcaaaacacgctggccccggacgtcgcccgcttcagccggacgaaggcgacgcccggcggtttgtccgtcgcgtttaccaccagcctgctcggttataacggcagcccgctggagttcaccgtgtcgtcggccaaaccgcaggggctcgcctgcacgctggatccctttttaccgcgctatgcgcagcgccgcagcgccggcgcctttgcccgacactgtgaggcgctcaccgcggccccgctcgccgatcccgccaacagcctggaggcggtgcgacgtatgcaatgtgcaagcgttcagccgctgcgtttcggtgcctggctggggcgaaaatacgccccggacgccatcaaaaccaaggtctacgttgaaacccccgcggacatggcggccgcacccgatggcttgcaagggccgctcaccgccgaggcccgccgcgcggcgggattgatgctgctgatggtggggtattacccggaatctgccgactctccgcgcgaatattactaccagtggcacagtgcgcggatcacgcgtgacgatatcctcgccgtcatgcggctgttcgagggagaaagccgtttttccgccctgatgccgctgctggaccgcgcgctgcggcagcaggacaggcgggacttccccccgaccacctacggattcagtctgggatacgcgccggacggcaatctggagagttttacgctgttcgccatggcggcaagttttttcggcgacaaccgccacgttttcgacggcatcaccgcgctgctggcgcccgatggccaagccatgccgctgcttaaccgcgcggtgagcgaacaggttccgttgcagtacaacgtcgtcggcttttcctgcgatcgccagggcaatcacagcgtcagctgcacgttcagcccgcaaaacgcgcatttcgaaatcctgccatgcaaagcgcgcgaaacggcaccgcttgtgccattgccgttggcggagctgttggcgcagcagtgtgccagcggcgcctttccctctcatgtcagaacgccggatggccgctggcacaaggatgaaaatgcttttgtcaccgcccaggtgctgcgcacgctggattataccgcccagaccgcgccccatattgagctggcgctcgactttttgctcggttgcgagagccgcccgcaccacttccatttttggcctgccggcaagcaccccgcctggatggcgggccagcggatcgacgctgacattgacgataccgccattatcactgagctcttgtatcgatttcatcggcgctcgttggcgcaagccagacagacgctggcgcagatgcaggcttatcaggtacagcgcgtcgaacggcggctgcagacgacgccctatccctgggccgagtgttacgcctttcacacctggatgaaagacgacggcgatatcacgcaactggactgctgcgtgaataccaacgcgctgattttaatccatgcgttgaccgccgctcacggcagcccgccgccggcctatccgcgcattatccaaatgctgaatcaggcggtgagctggagcgacggcgattacaaccgcctcaacgcgttaacgccctattatgcccacccgcatgagtggctgagtacgctggaatacgccaggcggcaaggggtgccgcagctttcaccggcgatcgatgcgctggccgcctggcgcttgccggcgaccaacgacgaaagcccgctctatcgccgtcacgacggtcattttctttggacttccgcctgcctgaaccagttcagacatctggcacgcctttcttccctggaggatcgctatgaacatctttctcaatga

SEQ ID NO: 428559 - DNA, 1659 bp, Serratia marcescens
atgttattactcagagccaaaaccgccaccatcaacaacatcaccttcttcgccgacgattcagacgataaccagttctggtatctgcccggtgatatccacattgcgcagaagtcgggcgaaccggtgttttcgctgatcaaatacaccggcgacgccagcgatccgcaagggggatacatcaacttcgaggtcaatacggcgatcgacgaagcggtgttgaaccgtgccttcaacgactatctgcgcaaactgaacgttgatcccaagaatgcccgcaaggcccaggtgccgtatgataaaggcacggtgaacttcttcgtgctcgacgcgggtgccaccaacggtgagctgatcagcgccccttgccccagcctgttcggcaacaacagcgccattttcagcgccaagctgacgccgtcccaggcggtgatcctcgaagccgcgttcacccaggccaaggcgccggccgccgtcgcctataacctcagcttcaccggcatcacgccggcgctgaaggtcgaagtgaccgcacagttcgaaagcatctacaaagaattcgatctgaaattcggcgccaacattcccattccggttgagacgccggccagcttctggctgggcttcgacagcgtcatcaaaaaactgcagcaggatcagaaactggtgatcaaggtcaccgaaagcatgccgggcgacgaagaggccaaagagaaagagtgggcactgcagttcgtcaaggaagagatcctgaaaagctttttcagcgccacgctcaaacctaacgacgacagcaacccgcaggcgaaatccgccagcgacgccattctggattcgctgatcgccagcgacaagaaagaaggcgaagaagccggcaaaggcggcctgttccccagcgcttcgctggagatcaagctggtgcggatcgaggaaaccaaaagcctgaacttcaactacacctcgtcgaaagccctcagccagtccgccgtgccgcaaaacttcatcggcagcgatatcctgcacgcccaaaaaaccgcgccctactttattcaggtcaacgtcaacgatccgttcttccaacagctggatttgaccgtgctcgggccggacagcttcgaggagtacggtatcaaggccgccaccttcaacatccgttacaacaaccaggtttataccggcgcgcctttcaccaacgatgacgggacatggaccaaacgcattgcccgcagcagcgataagaacgagctgttccatatcaccagcgaattcgcgttcaaatccgcagcctcctcgggctgggaaggcagcagtagctatcagccgcagtccaaatcggcctcgaccctgttgaacatggatcccggctcggtgctgtctttcaacgagatcagtatcttcctcgaccgcaaattctcgtgggaaaactgtaaccaggtcatggtggagctgagctatcaggacgacaaaggaagccgcaagaccaagaaatatacctttacgcaaggcgcgcacgagagccaaacgttcaaataccgctgtctgacggagaagccctgggcggtcaattacacactgatctacttcctggttggcggagaaaccgtcgaacgcagcggcagcgaaaacccgccggcgatcgtcatccccaacctggtttag

SEQ ID NO: 428560 - DNA, 1827 bp, Serratia marcescens
atgcgcgatcaggtaatcatgcaagacatctgttttattcgagcggacccggatcggcccgtgtattactactgtgccgccgcgccgagcgtgcaggtcaccgcaggcaatcaacccgatgtccaactgcaaattttcagaaacctcaaccaaccggacgatctttactacgccacgctgtcgttgcagacccagctggccagttcgcccgacgcggcgcaacgcgccgccgacgccagcccggatataccgcgcgatgcgatcttattgccgctgcaggcgatcgcctgcagcgcgacgctgaatatccccgatcttatccccgggcagaccagcaaaacctcgctgagcgaccagcaatattgctacctgtccgccaaactggacgacgacgacgatatcctgctgctggcaagcctgatgcgcacgccggcctcgacgccgatcgccgtcagttacaaaatcgactacctgcagcaactgccgccggccaccttcgagctggaagccaactgggaccaggtttaccgttacctgcagcgctcgataggctttaacctgctgatctttagcgtcggtatcgagcagacatccgcccagttgatcagcgagaaaatcgtcaccgtcaaagtcagggacaccgatcccgacggccatatggcgcaggcggccgccgaactgacgcagatcctcaccagccagttcttcacgccggttatcgccaacgaaccgcagcagacaagccccaaagccggcttttatctacaacaggtctcggttgaaaacatcgatcaacgccgcctgagcggcaagatcagcgaaaccaccgtcgtgcagcgttcgctctatccgcaggccctgttcgcccagttggtcaacggcacggactatcaggccgatcgcgcgatcgtcaaacgcgatctgcaggatgactttttcgcctatcgcgaggtgcgggttagcctgctgtcggatgcgcttgacgccaatatcctgctggtgacggcccggttgcgctatggctcaaacagccgacagctgaaatttacccgcgacgacttcgggcccaaaccgtttaaggaacccagcctgatcgacccgaaaacgggaaaaatgctgtggccggtcgagtatgacttcaccgtgtacttcaaccagtcgataggcggcgtgacttcggtcagctccggcagcctgcaaacggagatgagcgaggtctttctggacgtcgagtcgctctacggccgctatgatttcgcgatcgaagcggcgcaacagtttgactggcagcgctatcaatccgtgctggtcacgctgcgctatcgccaccggcaacagccgaacagcagcgtgtcgcgcagtttccaacttgaccagaccagtccgcgagcccactacccggtcatgctgccggagccggacgaataccaattcgacgtcgacaaaacctacagtgccgccgtcaactcaccgcatatctccgccgagctgcaagaaccgaccggtcaggacgtctacctgttctcgaccctgtatcgccagcgcgtgctgacgctgtcggccgacatggactggcgccgggtggaaatggtcatcgtttccgccagctacgcctgcacgccggcggaaacgctgcagcaggtgtttcaatttaccgaatccgatgccgccccgcgctgtttcagcgccgatcagcttgatccggagcagatgagcgtcgatctggatatctggtttacctatcaacccggcgaaggcggcgatcggcccgaaaacgtgcagtgctcgaccgacgccaacgctctcgatctcgccaccctcagttaa

SEQ ID NO: 428561 - DNA, 2157 bp, Serratia marcescens
atgttaaccaccgctttgcagcaatcgataaaaatcgacgtcaccgagtatttgggcgtcaaggaatacgcgtatacctgctacggcgacagcgacagcaaggatatcttctatgtggtgccggagatcccggtgtttgccaaacgggataccaatacgccgagctttatgttttacaaataccgcagcgaagatacgcaaggcggctacgcgcaattcaccgtgcagctgccgcagccgaatgcggaaatgaaagaccgcatccgcctgcagctgtataacggccttggcagaaaagatggcccgctggataaaaaatccaagctcattgtcgactacatcaaggcaaaacaggcctatgaagcggacccggaaaacaacaccaagaagaccgcgatggaccaggcgcagaagaataccggcctgagcgatgaacagcttaaccggtttgtcgcgctctacgacggcaacaagggcgacgatcaattcctcagcgaactgatgccggcggacgctgcaaaaatcgaactgatgcagccgcgctacacctcggcgcaggccatgttgatcctcgacggcaacgataagttctatcgccagatcccaacgccgctgtccccctccggcctcggcgacaacaataccgtgttcagcctgtcgctgaccggggaaggcgccacgctgtttgaacaggtgctgaaaggcaccgataaaaacgccagcgtcggcgtgcgcttcgacctctccctggatgcctccatgtcggcggccaaagtgatcgtcacctacaacagcgagcaggccaagtccgtagcgcaaaccatcaactaccacacctggtcggccgacgagaaaaagatcgagcaggagttttacgccaaggaagcgatcaaggtggacgtgcggatcgggttgacggcgcaagagatgggcatggaacccgccgcctatgataaatggaaagaaagtctgcggaactgggggcaacagcaggtcgagcagatcctgagcagccaaaccggcatcgacatgagtctcaatttgctgaacgacgccggcagcttcgaaaaattccagtccaaaatctcgcaaactctgagcttcacccgcgaatatgaagagaacgccgtggtgtcctccaccatttacccgcaaactcagctgccgtcgatacgctcaatcgtcggcgaagccgatttggatcagtacttcaaagagtacgatctccacgacccgttctatcagtacatccagccggagttcttcgtcaccgaagacatggccaagtatgacatcgccaatatcgtggtcaccgcgatatacgacgacgatctcaagagcacgctgacctttacgccgaaggatccggggccgaagaaaaccgacaagtggtttatcaaacccgagctcggccgcgcctaccgttatcattacaccgtcaacttcaccggcatgcaggccaggccttacctgtctggggacatccaggtcaaagacgatctggtggtcaccatcaacgcggcgcaaagcggcatcgtctacgcagatatctccaccctgctcaacccgctgggctgggaggtcttcagccaggtcgtggtcaagacccagtacgaagacaaagagcacagcgtgccgctcaagcaatacacccaggtgatcagcgacaagaacccgccggtgccgtttatttatccgatcggcaccaacgtggaaaagccgctttattattcggccgactactatgcgctggacggcgacagcctgacctacctcccgccgggcgtggaaagcaacccgcagctgcccggctatggcgaaacgcgcggcaatcagatcctgatcgccaacgccctgccgaagcagcagaaatacaccatcatcttcaaaccgtcgcaaaaagacgtttcgctgatcaccttcgagatgacggtgaactacccgaaatgggacttctcgcaaacgcagcccattgcgttaaccgagttcgacaccaagtcactcacgcagtacctgacattcaacctgatgcagcaagagaaaggcaacgagccgcagatcagctacaccgccacggtctattacggcgataaccaggagaaaaccgtcaccaagccgatcacgggcaccagcaccatcgtggtcgtgaccttctga

SEQ ID NO: 428562 - DNA, 1431 bp, Serratia marcescens
atgaccgacgaattggatccgcaacgtacgttgcaaaacttctttcttcttgaccgcgcgctggcgtttcacgaccaaacgcgccccagcggctgttacacctacggcagctatacgccgcaggtggtgcaggaaacgccggccggcaagatcagctcgctgcatttgctgaccagccccggcggcggcctggcgaccttcattgcaccgaagctgccggtcgacagggctgcgatcgaggactatatccgccgccatttcgtccccgctccggaaaccatcaccctggagcaggaggagatccagcaatcgctgtggctgcacttcgcgcagcggccggctgctgccgcctacagcgtcgaatttgaacagtccaaaatggcgttgacccatgaggagtctggccggctggcgggcgcgatccagggaacaaaagaccaggtctattttctcacccgcagccgattcagcgtcgacagccgcgtcaatgcccgtttgcaggccgattgggtcgcgtttgtcaccctggccttcaacgagcaggcgcggcaaccggaagcgatcgccaggctgctgaaccaacaaatcgacgccggcgtcgtcattgtgcaagtgcagttcgacaatgcgccttcagaacagacgcaagctcgcgttcgccaggcgttggtaaacaccgcctcactgctgatcgccaacacgctacgcaatatctcgtcgccagaacaaatccccaacaagctgaattaccagatcgaatacgacgacaccgtgccccagcgctatctgctggagcagcaacgcgacattgccgaactgctgaatcggctgccggccgacggcatcatctcctttaccgctacgcccctgccggaacccagcaggccggataagccgatcgagcctcaacgctgcaccgtcagcctgggatttgatccgaaaggcttcaatatcatggcgatagagctgcgctgggcagatcaacagacgccgatggcatggcccagcttcccgccagtgacgctggaaacgacagcggcggtgagcgatatcgcactcaaggtgaccttcgccgattacaccagtttcgagagccggctggcgtggcagaacgccatcgcgctgacgccgcaggatgtgggtttctatagcctgctgttcgacgccgagtctctgaagtccgaattcaaaacgatctccggcagcgccagctatctcccggcgggccagggcaagaaacaaaacttcaccttcgccttttccgccgcgcagtggcaggccacctggtggatcaacgcccatgccgccggcctcaacggccgggtggactatcgctggcaagggaaaacggcggcgctattccccaaaaactacgactccggccccctgcaggccaccaccggccccatcaaactgcaataccacaagtga

SEQ ID NO: 428563 - DNA, 1755 bp, Serratia marcescens
atgtatgaaggctaccccgacttccagcgcattattatctgcgatgatcaacgtttcgtcgccgcgtatcggcaaaacgacgcctattatttatatccgcaggcgctcagcattctggcggccgacccgttggctttctcgctggatatcgtgcgcagctacagtaccgaaagcctctacggctggctgaatttcaccacgcaattgcagttcgccggtgaacaaagcctgcaggtattcaagcaacagtatccggattgtgcggtgaaggcgctgccggtcttgccgggcagcctgggattcgacgtgcccatcgactaccacagcgaactgtacggccggcactacgacaccacctggtattcggcacagtgcagtcaattcatcattctgctcaatgcggcaagcactcagttgatcgagcgcaccctgctcgatgagacgataggcttcaacgcgcgtctggacggtttcgtcgaaggcgtatcgccgcgtctggcctaccgggtggaatttgatgcccgtgcgctgatcctggccctggccgccggcgtggaaggtgcccatgccgtgggcgataccgggattgtctttccctacgacgggctaaccctctacctcagccgcaacctcacccacttgccgctcgacatcgacccaccgccaccggctaacgatccggccggggatctgttgctcagccaggctttgctcgaccggctatacaacctgtacggtgcgccgtctgccggccccgccgccggcaatgtggcgcagatccttctgacgccgcccccgcataccggccggacccggtgcgatttggccaatgtcgcgctgactcagcggccactttgcttcacgttggatccgttcgccgccgcgcagcagatcgccaaagtttcgcccgataccattatccatcgtaccaccgcaccgccgctgccggcgggagagcgagagatcaacgtcttttacgcctacccgctggggctgcaatccggcgttacgatcgatattcagctgaccgtaccgcccggcaatatctacccgatcgagcaaacgcaaacgctggcgctgcgccccgaccgcacctggttaaccttcaagtttcacaacagcgcgctggatgcacagccgtttttctaccagatccgcgtgaattacccgcaagacggcgtttaccgcacgttgcccggcgaacaacgtcgctgcgacgaggataacctggtactggattacgccgcgctgccttgccgcttcctgaccctttatctcgacccaacgttcgcccagcaaagccgacttggcggcccctattactccgccgactggcgccaaacgtgggcgctcagcgcatcggcgccctatttcagcgcaccgatcctgggcgacccgacttttgccgaggcgaccgcctattcgctttccggcgacggcgccgtcccgttacccgccccgatcgtgcaaaacgccaccatcggcgcctacagttttccgcagttcggcgcacagcaggcgacgatcaccgttcggctgccgccgcagtcgctcagcgccgtactgagttttcagccgcaggacagcgagcgcaccagcgaccgcacttttacgcattcgcagccgagcttcgtctacaaatggaacgtcacctccattttcgccgccggcttccgctacaagactcccactggcccctggtcgccttatgtcaccggcgaccaaacgatcgatatcaagggtgatacaccatga

SEQ ID NO: 428564 - DNA, 1608 bp, Serratia marcescens
atgctcgcaaaagattatacgtcagatgagaaacgcatcgtaaaaaacgttatcgaccgatacgagaacagcggcgtatttcttatcgagccaggcgatccggttttaaccgaattttatgatattcaattaaaactggccggcgtcaccgccgccgccgcaccgcaattcacccagctctggcagcagacgaaacgcgtcaaacgggtcgcaggccggatgagcgaggccaacaccagcggcgctcagccggtgtacagcatcgtcaggctggattccaccgacggtaaacgttatcaaaccgacgccatcggctctctgccggttcaggcgaccaatgtgacgcaaaccctcggcctgttcgacggcggcgccgataacgtcggcaaggtggaatacaaaagcgactacgtttacacggcggactgcaccatcggtgccagcggtgactatccgcaaagccagaccggcggcagctttccggttacggtgatctataccttcgcgcaaacggtcggccagcaaaccgtttacggcgccgaaatcgtcacgacgcaaagctacccgaaagaaatgatcaacgattccccgaggaatctgtataaccagcgcatgatcaagatttgcctgacgcgtgacgatggcgactgtgattatcgcaccggctacgatcaggacggcacggttaaagtgccgataaaaggcaacatcacctattttggcaatattgatctcagcaatggcaagccggtcaacgccagcaataccatttatcttatccgcacccgtgccggcggcgatccgatcaccccttacggcggctataatatttttaattctgccgcaacccgaatcagcggaaataacatcacctgggatcttgactggctgaaattcaaccgcgtcgattttgaatccggtgagatggtttattacgtttttaaaattacgcttgatgtcgaaggccgcagcatcgccgcctttattactaacgcgcccaaagaaagcgatccggatcgccgcctgctcaataccgtacaaatcaaaccgatgcagattatttatggctgcctggcagaggatacgttgattttaatgcaggatgggacagaaaagccgataaatgccctcacggcagatgaattcgttatttgcggcaataaccaccccagacgcattgagaatatcaccacggggcaggagcagcattacattgatattaccgcccgcgaccaggcggcacgtgaatatcgcataaaagccagcctggggcaccctttcgtcaccgcaaacggtatttgtctcgcccgtgaattgacctcaggcatgcgtcttaaaactcggcacggtgagtgcgaaattaccgccctctctctccagtccggtgagttaaccgtttgtaacctgcaactcagcgctgactctccgctgcaaaaaacgcaatgcgccctcagtactttttatgctaacggcgtgctggtcggtgacgcgctggttcaacacctctatgaagacgaatatcaccaacgccctaaaaacgtgctgaaaacgctgcctgccgagtggcaccaggattaccacaatatgatcaatgcagcggaagaataa

SEQ ID NO: 428565 - DNA, 525 bp, Serratia marcescens
atgcctattaaaaagtatgtcattcttgatagcgcgcccaaagctgtcggcaattccgattttattctattagggttaaagaacgaaggttttgccagaggttgcccgatgttatttggcggcaccgccgatgctaaagatggcccggtagatggaaaaaactttgcgttgaatgtaataaaaagagaaacctgggaagaaaccaatcaaaatatcggcgtggaacaggtggtaagatatcaggtttaccccaatgacatcagcgtttataccagtaaagacttcactttcaccgggaaagtggccattggcggtgagtttgcctggattcggaaagtgagcaaaggcaaaataaaagcctattttaaaaacaaacccgctgccactaaagacatgtttgctcaagagctttatgcaatgacgctggatgtcgatattgaacccaccgatgcggaattcgaacagtatttatcttcagattgcctgagcgccatttacgcttactgtaaagaaacctgcaaataa

SEQ ID NO: 428566 - DNA, 1431 bp, Serratia marcescens
atgcttaatggaataaaaccgctgtgcctgactctcttgctgttgctgtcagcctgtcacagcgcgtcggtcagaccgccacctcacgccgccgtggcgtctgcccctatcgatccaaccaagtcgctttttccgttggacaattattcgcagtctgtcgataaatggctgcctcccggcccgctgcggcaggtcgccgtgctggatgacgctgcgcagcaacgtcatttttctgccctcaaatcccactattttggcatggggccgaatgaggagtccccctggaatccgcattacatcgcttccgtcttgagccgtgaagcggaaagccaccgtgatgccgcaatggataaatatcttggaaatgacagcgtttcctggggggaaaacttcagggctcacgctgagcgctggaaacagcaagtcaggaataatgcgtctgtcggcattgacaaggcttatcattcttcggccagaggtattgcgattagggaaacgctggtcaggatgttgccgacagacgatccggcttatgacgatccgcgtctggcagggcaaggttatccctttgataatttgcaggactcttctatccgccccggtacaccggtatacgttgtggcggaaagccgcgataaacgctggaaatacgtcatatcgcctacggtgatcggctgggtgcatagcgaagatatcgcggcggcggatcggcggtttgtcagcgaatggctggtgctggcagggaaaaatttgggggcattcattcagcagccggtgtcggtacaagagggggagctgttttattttacggcgcgtcatggcacggttctgccattttaccgccatcggcagggcgtttttagcgtcgccgtgccggtacgccgggaggatggtcgcgcgcaaattcgccggatcgatttaaaggagggggagtttgccgccatgccgtggcgaatgacgccagaccatcttgccacgctgatgcgttcgatgagcggcaggccctacggctgggggaatgataacttcaataatgactgctcttctgaactgcgcagcctgttgatgcctttcggggtgtttcttcccaggaattccgccgcgcagatagaggcggcaagccgagtggtcgatctcagtcaggcgaacacggatgagcggctgcgctatctcaaggagcatggcaagccgttcaccacgctggtctacattccgggccatatcatgctgtatatcggcaatgcggcgattaacggccggagtgtcccgatgacgtaccaaaatatctggggcctgcgcccggcagattcaaaaagccgcagcattatcggcggcgcagtctttttcccgcttctggctacctacccggaggatcctgagctgacctcgctggcgggcaaggcgcagttcaaactgggttttattgagtaa

SEQ ID NO: 428567 - DNA, 753 bp, Serratia marcescens
atgaatacgtttattacaggcggatggagccagtctctgactggccaacctctcaaagagttcgatgtcatgatgtatggcatggtcaccaaccttgatggattgaccacgggcacatcagcgcatccaggatggagcccggaaaagcaaaacaaacccgatactctccccggttttaaaggaaagacgctctgggtttatggcggcggcggatgctccccacagcaaaagccggcaaatgaggatgaagtgttgaggatcgtcgaagccacggtagaccggggctgggacggcgtcgattttgatgacgaatgcaatatgaacaccgaacgggtcatcgaagccatgaaacggctaaaagaggcccgaaaagagaccagcctgggttttattgccggctattcctacaatcatcccaatacggaaaatggtaaaaagctcaacgagaaagtcagaaaaatcatcctgtcaggccagtgcgatcgctttattcattactgctatgccgcagcgatgtggagcgattacgatattgtcgccaatgtcatcccggcattaaaacaatcgttggccaacggtgccgagaataaaaaatgcattctggccctgacgacccggggattgaccgactggaatttaaattactttatcgatcaggttctggattttaatcttggcggattgtttatttggaattacgccaacctgacggatgaacataataaaatcatcaaaaaccggctaggcaattaa

SEQ ID NO: 428568 - DNA, 1320 bp, Serratia marcescens
atgtcagaccttcacccaacgcaggcggcgcactcgcccggcgaggaaattttagcggtcaacgcggtcagccatgactatgacaaggcacatggcgagctgctgatcctcgacggggtcaatctgtcgctgcgggcgggcgagatcgtcgggttgctgggccgctccggctcgggcaaatcgacgctgctgcgcatcatcgccggcctggttacccccaccgccgggacggtgaactacctggggcagccgctgaacggccccgccaaaggcgtcgccatggtgtttcaaaccttcgcgctgttcccctggctgacggtgctgcaaaacgttgaggccggcctcgaggcgctgggcgtcgcccctgccgaacggcgcgagcgggcattggcggccatcgatcttatcggcctggacggcttcgaaaacgcctacccgcgcgagctttccggcggcatgcgccagcgcgtaggctttgcgcgcgcgttggtggtggatccgacgctgctgctgatggatgagccgttctcggcgctggatgtgttgaccgccgaaacgctgcgtaccgacctgctggatctgtggaccgaggggcgaatgccgatcaaatcggtgctgatcgtcacgcacaacatcgaggaagcagtcttcatgtgcgatcgcattctgctgctctcttccaaccccggccgggtgatcgccgaaatcaaggtgccgttcagccacccgcgcaaccggctggatccgcagttccgccgcctggtggacgatgtgtacgccaagatgaccgcccgcccgaccgacggcaacgtcaagaaagggctgaagctcggcacccggctgccgcacgtgtccaccaacctgatcgccggcctgatcgaaaccctggccgccgcgccctatttcggccgtgccgacatgccggagatcgccctctcgctgcatctggaggtcgatgagctgttccccatcgccgaagtgctgcagtcgctgggcttcgccgacgtgcgtgaaggcgacatcttcctgacgccgccggcgcgcgctttcgccgacggcgacgttcaggcgcgcaaagtgctgttcgcggagcatctgctgcgctatgtgccgctggccgcgctgatcaaaaacgtgctggacgaacggcctgggcaccgcgcgccgcgcgtgcgtttcgagcaagagctggaggattcgctgtcggacagcgccgccaaagagacgctggatacggtgatcaactggggccgttacggcgaaatcttctcctacaacgatcaaacggcctttttcagcctggaagacgtcgagttttaa

SEQ ID NO: 428569 - DNA, 546 bp, Serratia marcescens
atgccaactatccccgcaccgcgcagcgccctgctgattatcgacatgcaagtcggcctgttcgcctcgccggacgatccgccgttcgccgccgaaacccttctggcgaagaccaatgcgttgattcgcgccgcacgcgtggcgaatgcgctcgtagtgtttattcgccacaccggcccgacaggttcgcctatcgccgcaaacagtccgcggtggcaagttcaccccgatctcgacaccgatgcggaaaccgactggttcatcgataaaacccatcccagctgtttttaccagactggcctggctgagcggcttaagcaagccggcatcggtcggttggtgatttcgggaatgaaaacgcaatactgcgtagacaccgcgtgtcggcgcggtgcagagttgggatttgacatggtgttggccgccgacgcccatagctgttcagacacggcggaactcggtgccgaagccattatccgtcaccataaccagaccctgtcggggccattcgtgacgctggcattggcggaagaggtgaaattctaa

SEQ ID NO: 428570 - DNA, 1584 bp, Serratia marcescens
atgtcaaacctgagtacccacgccgcgcagaccgcgcggcgttattctgttatcccccgtcatcagcggccgggggcgatcgtagtggccagcgccgtgctgctgtcgctgctggcgctgttgccgctgggattcgttatcggcgtggcgtttgaaaccggctggcaaacggtcaacgctctggttttccgcccgcgcgtggcggaactgctgttgaacaccctgctgttggtggtgctgacgctgccgatctgcgccgtgctgggcgtggccctggcctggttgaccgagcgcaccacgctgccgggccgccgtctctgggcggtactggccaccgcgccgctggcggtgccggcctttgtgcaaagctatgcctggatcagcctggtgccgtcgatgcacggcctgggcgccggggtcttcatctcggtgctcgcctatttcccgtttatttacctaccggccgccgccgtgctgcgccgtctggatcccggtatcgaagacgtcgccacctcgctcggttcccggccgctggcggtctttttccgcgtggtgctgccgcagctgaagctggcggtctggggcggttccctgctgatcgcattgcacctgctggcggagtatggcctgtatgccatgatccgcttcgataccttcaccaccgcgatcttcgatcagttccagtcgaccttcaacggcccggcggccaacatgctggccggcgtattggtattgtgctgcctcgggttactgctgcttgaggctctcagccgcggccgcgcgcgctatgcccgcgtcggttccggcagcgcccgcagccaaacgccgcgtcgcctttcgctgccgctcgccgcgctggcgctgctgctgccgatttcgctgaccgcgctggcgctgggcgtgcctttcattaccctggcccgctggctgtggctggggggattcgaggtgtggcgcaacgccgagctgtggcctgcgctgtggcaaacgctgtcgctgtccggcgtcggcgcgttgctgatcacgctgtgcgccattccgatggcctggctgtcggtacgctatccggcccggctgtaccgcgtgctggaaggctgtaactacgtgaccagctcgctgcccggcatcgtggtggcgctggccctggtgaccatcaccattcacagcttccggccgatttaccaaaccgaaatcaccctgttgctggcgtatttgctgatgtttatgccgcgggcgctgatcaacctgcgcgccggcatcgcacaggcgccggtggaattggaaaacgtggcgcgtagcctcggcaaatcgccggcgcaggcgctgtggagcactacgctgcggttggcggcgccgggtgccgcggcgggcgcggcgctggtgttcctggcgatcgccaatgaactgaccgccacgctgttgctggcgccgaacggcacccgcacgctggccaccggattttgggcgctgaccagcgagatagactacgtcgccgccgcgccttatgcgctgattatggtggcgctgtcattgccgctcacctggcttctttattctcaatctaaacgcacggcgggactatga

SEQ ID NO: 428571 - DNA, 573 bp, Serratia marcescens
atgagcaataccggtgagacattaatcaatgccatcgtcagcaataattctctgatggcaataaataattgccctggcgtccccgcccaaatgagccgggccgtttatggcaaaacgcaggacgatagcggggccggaaccacgatcgaaaataaccgtgacatgcaaaagaatatcaatatcgcgctggggttctctggggcgaactcggaaaccgccgtttggcatttcatgattggcccgcccgtccaccattttgtggtgatcccctggtaccagcatacggcgccgcacggacgggtttacaccgtatttatggcctacgagaaccggtattcggttggcggctatgttcaacatacgccgccggcgccttctgcggtgaaaggctaccgtaccgtctggagcgtgaccgacctggggcagatgtttagcgatttgttgaccagcgccacggcgtggcaaacctatttcggtgcggtgggcgcagcgcaggccaataaaataacctattggaaatataaggtaacgtctttagattccgccgtggccaacgtcaataaataccgctaa

SEQ ID NO: 428572 - DNA, 348 bp, Serratia marcescens
atgaaccatgaatccacggcggactgttccgccaacggctacattattgaagtttcaagttttaaactgccggcctcactcagccctgaagcgtttgccgtattggacaagcgtgtagaagaggaatttatctcaaaccagaacgggttcatttcgcgtgactcaggcatcagcgtagacaatgaacctcgctgggtgaacattgtaaaatgggagacgctgttggatgcggatgaaaacatctaccaatttacgcgggcttccgcgccggcgtccgtcaaagaatatctggcgagtatcggcgctgagccggtggaattaaaacgctatcagcataccggcgcgtaa

SEQ ID NO: 428573 - DNA, 8511 bp, Serratia marcescens
atgtcagaaacgctttctttgccggatactcaggtcgagtatcgggagtatccgctggttgcagcgcaaccggggatctggatcgccgaccaaatcgcgctgcgccgcaacggcttcgccgtggcgcactacaccgaactgcacggcgctatcgatcgttcgtcgttggagcgcgccatccgtcaagggctggccgaagcggatacggttcaggcgcgattctttgaggcgcaggacggccagccggtgcagcgtttgccgctgatagccgaccccgcacgcgtgcaggcgccggagtggctcgatttcagcgcacggccggacgccgaacaggcggcgctggcgctgatgaacgacgatctggcgcaggatctgccggcagacggcgagcggccgctttatcgccatatggtgatccgcgtcagcgccgatcgctggttctggtaccagcgctttcatcatctgaccctggacggcttcagcttcgaagccatcacccgccggatcgccgatctctatcgcgcgttgcgccacgggctggcgccggcggcctcgccgtttaccccgttcggcaaggtggtggaagagtttcagcaatggcaaacgtcgcccgcacgtgagcgggcggccgaattctggcgccagcatctgcgcgatttgccgtcgccgctgtcgttatcgacggaaaaccgggaggttgaaccgggcgcccggccgctcaaacaggcgctggtgctgcctgaatcgctgtttgacgaagcgcggcgcgatgatgcgctgcagtcgctgcaaccggccgatatcgtcacggcggcgctggcgatgtatctggcgcgcatgagcggcgaaacccgcttctcaatcggttttcctttcatgcgccggatggggtcgcaggcgctggcggcggtcggcccggtggtcaacgtgctgccgctgctgctgaacgtgacgccggatctgtcgctggcggacgtctgccaggccaccgtggcggagatcaagcaggcgcgccgccatcaacgctatgaggcggagcagatcaaacgcgatctcggcctggtcggcggccatcaggaactgtatggcccggtggtcaacgtcaaggtttaccacggcgccttgtcgttcgacggtcaggcggccgtcacccatacgctggcgatggggccggtcgacgatctggagtttgagatcggttttcgaagcggcgtgctgacgctgtctttggtcgccaacccggccaaatactcgccgcgcaccttgcatcatcacgcggagcgcatcggccattggctgcagcagctggcgcggcagccgcatcaaccgcacggtcaactggcgttgatcggcgaaggggagctgcgtcaactcgcggcctgggggcgtggcgcagagctggcgccgccggcgggcatggtctcgatcatggatgcgttccaacgccaggttgagcgccagcccgaggcgttggcggtggcctgcggcgacgtgcgcctcagctaccggcagctttccgaacgggtgatgcagctggggcgagtgctgatcgaaagcggcatcggcgccgaagacgtggtcgccatcggcattccgcgctcggtggacacgctggtcgcgctgttcggcgtgctggccagcggcgcagcctatatgccgctcgatctggactatccgcgtgaacgtttggcgctgatgtgcgacgacgcgcggccggtgatgttgctgacccaccgcgccacgcgggccaacatgccggatctgccgcaggtattgtgcctggacgacgctccgtgcctggcgcgctgcgcggccgccgaggccacgccgataacggatgccgagcggcgcgtgccgctgagcgaggcgcatctcgcctacatgatttacacctccggctcgaccggcaaacccaagggcgtcatgtccacccaccgcgggctgctgaacctgttcctgtcgcaccaggcctctctgttcggcccggcgatcgaaaaattccaggctcgccacgcgcgccgcttgcgcgccggccataccgcctcgttttctttcgactcctcctgggaaccgctgttctgcatgatgatgggcagcgaactggttatcttcgatgaggagctgcgccgcgacccctgggcgctgctggaacaaacccaacagacgccgatcgatctgctggacatcacgccgtcgttcttctcgcaactggtggactgcggcctgctgaaggggcagtttccgctgccgtcgttcgtgatgatcggcggcgaggcggcgacgccgacgctgtggaacctgatgcagcagcatccggaggtggagatccacaactattacggcccgtcagaatacaccgtcgataccctcggcgcgccggtgacggccgcagaccagccggtgatcggccgtcccctcgccaatacctcagtttggctgctcgacagccgcctgcagccggtgccgatcggcgcggcgggcgagctgtacatttccggcaaaggcattgcacgcggttacctgcggcgtccggatctgacggcggcgcgctttgtcgccaacccgttcgccgaaggcgaggtgatgtaccgcagcggcgatctgatgcgctggagtgcggagggccagctggtgttcattggccggaccgatcaccaaatcaaggtgcgcggcttccgcgtcgagctgggggaggtggaaagcgccttggccgccttgccggacgtggggcgagcggtggtgatcgccgagccgatcggcgccacctatcgcctgatcggctactgctcggtgcaggatgacgtgcgccgcgcctcgccggcgctgcaaaacgagctgctggggcagctggcacagcgtctgccggattatatggtgccggcgatcctggtggtgatgccggagctgccgctcaacgtcaacggcaagattgaccgccaggcgctgcccaaaccgcaggagacgctggcgcaaagcattcgcgaaccggccaccgagcaggaaaggctgatttgccgcgcgatggccaacttattggggatggagcgcgtcggcgccgacgacgatttctttgcgctcggcggcgacagcatctcggcgatggggctgggcaccgccctgcggcgcaacggttatctgctgcggccgcgcgagatcttcgcgctgcacacccccgcgcgcatggcgcaggcgatgcagccgctggccgtagactctcaggcctcacgcagcgtgcagcaaggcccgatcgacgggctgccgatcctgcactggttcaccgagacgggcgatatgcatcgccgcttcgcgcacggcgttttcctgcgcgtgcctgccgagctgcagccgcaacagctgcgtgatgcgttggaccagctgcgtacggcccacccggcgctgggcgccaggatccgcgatggccagttggtggttgaagacgccgctagcgctgagctcatgcaggttcaggccgtatccggcgaactggagccggcggcggaacaggctttcgacgccgcactcgagcatctcgatccggcggcgggcgccatgatgcaggcgatcctgttgcagcgcgacgggcagagcctggggctggtgctggcgatccaccacctggtggtcgacggcgtttcctggcgcatcctgctcgaggagctgcggcaagtggccgacagcgccatgcaggggcagccgctcacgctgccgccggaagaaacctcgctctatgagtggtccgcgcgtttacgcgccgacgtggaacgccgggaaaccgagctgccgttctggcggcaaatgctggcggacggcgtgccgcgtttgggccggcgcgcgctggaaccgcagaccgatcgcatcgcctcggtgagcgagcggcgcacgctgctcgacagccggttgaccgccgcgctgctcggcacattgccgcaggattatcgcgcccaggttgaagagatcatgctgtgcgcgctggctcaggcctgccgccgccgtttccaggccgcttcgctgcgtttctctctggagtcgcacggccgcgccgaactggacgacggcctcgatttggcccgcaccgtcggctggctgacggcggagtatccgctgcgcatcgaactgcatgacgccgagcacaatgaggccgtgcgcgcggtgaaacgggcgacgcgagcggtggccgatcgcggcgtcggttacggccagctgcgttatctgcatccgcagcgtgacgatctggcggcgctggcgcagcgcaacgccccggagattttattcaactacctcgggcgcttcagccaggatgaggggcactggacgccgcagcgcagccaaacccgcttccgcgacgccttcgccgtggcgcaggatgcgcagcaggcgccgtcttacgggctggaagtgaacatctttgtcgaggaacggcgcgacggcgcctgcctggcgatcaactggagctggctggagggaattttcagcgagagcgacattgcgcagctgcacagcggcatcgagcaagcggtgcgttcactgtgcgaatttgccgaacggcatcccgaacgcgcggcggcgacgttggtggcggccgagatcgcccagccgggcgccgatgatgaggcggtgcgcgcctgggagcgggagtgcgggccgttaaccgcggcgctgccgctgttgccgctgcaacacggcctgctgttccatgcgcagacggcgcagcagggcggcagctataactcgctgacgcgcctgagcctctgcggcgaactggacgcgcatcaacttcagcaggcgctggatgcggtgatccgccgccatccgcaattggccgcccgatttaaccgcgagggcgagccgctgcagctgataccgcagcaaagccattggccgctggacagccactcgctgccgccgctgacggaagaacaagaagcgcaggcactgcaccggctggagcagcaggaactgcagcgcgatctgttcaaccagcccggcgcgatgctgcatgcgctgtgggtcaaacacggcgatagcgaacgctacacgctgttccttaacgcgcaccacctgatcgtcgacggttggtcgacgccggtggtgctcaacgatctgatgctggccctgcgtgaaggcgagcaggcgttgccgccgctgcgttcgaactatgccgatatcgtgcgccgcctgaccgcgcgggatgccgaagcctcgcgccgcctgtggcgcgagacgctgcaggacgtgcgcccgacattgctgttcggtgaaacgcaggacgaacgcgtgcatgagctggaaatgacgctgccgccggccgaggaaaggcgcttgctgaccctgtgccgcgaacgcgggttgacgctcaataccgtaatgcagggcatttgggcattgcagctggccagctgttgcggccagcaggacgtggtgttcggctcgccggtttccggccgttttggccagatagaagggatcgaggaacacgtcggcctgttcagcaacacgctgccggtgcgggttcgtctgcagcacgatcgttcgttgacggagcagttgaccgacctgcagcatcggcagattgaactgctggagcacgatgatttggggttgggggaaattcagcacctggccggggcgggcacgctgttcgatacgctgttggtggtggagaactacccggacaacgacgctctgttgggcggcacaggatcgctgcgctgcgacgccatccgcaacaaaggctatacccactatccgctgacgctgctggtgctgccgggcgaacgtctgcgcctgctgatggagtaccgcgcctcggtgccgcagcctgagcgcttcgccgcgcggctgatggcgctgctgcaacagtggatcgcccagccggatctgccgctgccgcgctggcagttgcaaaccccgcaggagcaggcgctgatcgcggcggtcaaccgcaccgggcaggcggtggcggacaccaccttgcatcaggcgatcgccgatcaagcgcggcgcacgccggaacgcatcgcgctgcaggatgccgggcacagcctcagctaccgtgacatgcagcgccaggccgcgctgctggccgagcggctgacggcggccggcattcagccgggggatatcgtcgcggtggcgttgccgcgctccgtgcgcctcagcctggcgctgacggcgattgtgcagaccggcgccgcctggttgccgctggacaccggctacccggacgagcggctggcctacatggtggaggacgccaaaccgcggctgattatcaccgaaaacgcgttggatgcccgcttcgccgcgctggcgccgacgctgctgttcgatgcactggacgagagcgggcgcgaaccggcgccgcgccaaccggcgtggaacggcgattatcccgcctacgtgctgtatacctccggctctaccgggcggccgaaaggcgtggtggtgaaccaccgggcgatcgtcaaccgcctgttctggatgcagcacgagtatgcgctcgatgcgcaggacgtggtattgcagaaaacgccgtgcagcttcgacgtttccgtctgggaattcttctggccgctgatggtcggcgcacgcctggtgatggcgccgccggaggcgcaccgcgatccgcaggcgctgacgacgttgatcgacgactatggcgtgaccacgctgcatttcgttccgtccatgttggctatctgggtggaggcgctgaacgaacgggcgccacagcgcgccgccgccagcctgaaacgcgtgttctgcagcggcgaagcgctgtcgtgtgaactggcttcccgctatcaggcgttggttaccgcgccgctgcacaacctgtacggcccgacggaggcggcggtcgatgtcacctaccaaccggcgtccggcgcggcattggcggcggtaaacggcgccggcgtgccgatcggcaaaccggtctggaacacccagctgagcattcttgacgccatgctgcggccggtgcccgtcggctgcgccggcgatctttacctgcgcggcattcagctggccgatggctatctgcatcggccggggctgacggcgcagcggtttgtcgccgatcccgccggcaatggcgcgcgcatgtatcgcaccggcgatatcgcccgctggctggaagacggcagcgtcgagtatttggggcgcagcgacgatcagctgaagatccgcggccaacgcatcgagctgggcgaaatcgagcaggcgctgctggcgcagccgggggtagcgcaagcggcggtgcacgccatcgagctgggcgagggcgcgacggggctgggcggcgccgatatgcgccagctggtcgcctggctgatcgcccaaccgagcgtgacgctggataccgccgagctgcatcaggcgctggagcagcgtttgccggcgcacatgatgccggtcagctatgtcatgaccgaccgcttcccgctcagcgccagcggcaagctggatcgcaaggcgttgccacggccgcagctggccctgcaagccgggcgtgcgccgcagggcgacagcgaacgcctgctggcggcgctgttcggggaactgctggggcgcgagacggtgtatgccgacgacgacttcttcgcgctgggcggccattcgctgctggcgatgcgtctggcggctgagctgcgtcggcgcgtcccgcggccattgagcgtcgggcagatcatgttcgcccgcagcctggagaagatggcacacctgctcgatgacgcgcaggcggccaactcggccgagagccgcggcgtcggcgaatgcctgcagctgcgggccggccaaggcccggcgctgttctgcctgcatccggcttccggtttcgcctggcagtactcggggctgagccgttatctgccggggagctaccccatcatcgggctgcagtcgccaagaccggacggcgccatcgccacctgcgaggatatcgagcagatggtcgatcgtcatctcgctaatctgcgccgcctgcagccacaggggccttactacctgctgggctattcgctcggcggcacgctggcgcattcgatggccgcgcgcctgcagcagcagggcgaagaggtggcgttccttgggatgctggatacctatccgccggaaggccaggattggaccggccccagcgaggaggaggcgcagaaagaggtggcgcaggagcaggccgagtttatggcggaagatcatggcgatccggcgctgatggcggagaaggcggcgatgttcgacagcatcgtcgccaactaccgcgacgcggtgcgcattctgtcccaggcgcgcagccggcgtttccacggcacggcaacgctgtttgtcgccgaccagacgctgccgccggagatggatatcgacgccgtgtgggcaccgtatctggatgggctgatctgccatcaccagcgctgcgaacacgcggacattctgtcgccggcttcgctggagacgctcggcccgctattgcacgagctgctgacgcggcaatacgggttggtataa

SEQ ID NO: 428574 - DNA, 753 bp, Serratia marcescens
ttgacccattttgcacagtggattagccaaatttcagatgataaaacgatttctataaatggaaaccaacgctttcctttagatagcacagttaaatcaattgcttgtgccaatgtcctggcaaaggttgatgcaaagaagctttcattaaatcattctatggtagtgactgaaaaaaatattgtgacctattcacccgttgctaaagattatatgaacaagccatttacgcttgagcaagcttgcaaagcggccaatgaatacagtgataatacagcagctaattttgctattttttcgggtggaggaccagaagctctgaccgaatttatgagatctataggagatacggttactcgctctgaccgatatgagccagaattgacggtcaatcccgtggatgatttgcgagatacaacgactcctgatgcgatgagcaagagtatcaagaaaattttgaccggcgaagttctcagcgatgcatcaaaagcgcaattgaaagaatggatggtcaataacaaagtcgctgataatatgcttagagcgtctcttcctaaaggatggaaaatcgccgataggtcaggtgcaagtgattatggtgtcagagggataacgtcgatggtctggtcaaataatcatgatcctgtattcatcagcatctatgtgagaaaagcggatacctctttggatgaacgctcagcggtgatccgtactttaggttcgcatatatttgacgaataccttagccactaa

SEQ ID NO: 428575 - DNA, 513 bp, Serratia marcescens
atgagagcacatcgagatagaaagaaaaaactctatagaagagaaagcgtgacatccagagggcccatagccagcggtggtgagtaccgctgggaacggcatagcaaacagctggatgatgagcagttgccgctgcgtgaaagcatgcatgggcggatacaacatggcatggattacacgccgctatttcaatttttgctcagtaaagtgggccaaccctggagtgaagtgcacagcgaagcggttagtcggttggataaagaagcacctattttttacctggtggcgctgcaccgtaaaaactggcagagctatgtctgctgtggtgagtcgagctattacagcgggctatgcatagatgagcacgggatactgcagaaagtgaacccggcattcaccgcagaagatgtgccggtgagatgccgctgttgtacctatacgttcaacggggaactggtgcccgtcacggaaaaaaactggcaaaaaccctatgagaaggaatcctgggaatag

SEQ ID NO: 428576 - DNA, 540 bp, Serratia marcescens
atgaaatgctcggtttacatcgccaccagcgtggacggcttcatcgccggagcggacggcgacatcgactggctgctgcggcccgagtacgcggtttcattgctcaacgggctaagctatgaggcgtttatcgccgacatcgacgcgctggtgatggggcgccatacctatgagaaagtccgcgcctttcccgagtggccctatggcgaactgccggtggtggtgctgtcgacgcagccgcccgcacaacaagataccgggcacgttcgctggatgactggcgaaccggcggccatcgtggcgcagctggccgatcaaggctgccgtcacctgtatatcgacggcggccagaccgtccagcgcttcctgcaggccgggttgatcgacgagctgactatcacgcgcgtgccgctgctgttgggcggcggcattcccttgttcggcaccgatggtccggagcagcgcctgcgcctgctcgccgtcactccctcggacaacggcttcgtgcaagaacgctacgcggttcagcgcgcgtcgtaa

SEQ ID NO: 428577 - DNA, 201 bp, Serratia marcescens
atgaagttatcaaatctgatgctgctcacagcgattttagccaccaccgttagcctccctctcaccgttaatgctaccgaacgcccggcaggcaactgctcaagaatttactcaccggtaccttatatcaccaaagaaggtaaaactattcaggcacccaatgcttgcgtagcgaaatggtgggcaacccaagggaaataa

SEQ ID NO: 428578 - DNA, 1224 bp, Serratia marcescens
atgaacggaagacagatgtcctctgataacgccagcgagcaaacgcacgtcaatcacgccctattgcaattcattctcatcctattgtcaggtttggggccaacctcattccaaattttcctgccttcagtgcctagcctggttaaatactttgaaacaacacctgcgaccgccaacctgacagtctctctatcgatgatcagttttgcccttgcttgtctggtatatggaagattggctgatcgactgggacgcagaacaatattactgttaggcatggcgatcctgattattggtagcttcatttgtttatcggcgcagtccattgaagccgtaattttgggccgtattattcaaccggcgggcggggcggccggcgttattgcggcgcgaattatcgtcatggatatctatcacagcgaaaaagcggcaaatgtcatgtcgaaactggtcgcttctatgatgatatcgcctctactgggcgtgccattgggtggtttattaacggataactttggttggcgttccaatttcattctgatcggcgctattgcagtcatcgtgtttattatcatcttgttcagtctccccgaaacccgcaaagcgcaaactggcgtagaagcaggcaaaagcaatctgttccatgactatgggcagttggcgaaaaacgccacctttctcggcaatgcctttcaatttggtttcgctcagtcggcctttatggcctttatggctgccgcacccatcgtgctgacgcagaccttccaactttccgcctctggcgccagtttactgctattgatggtgtctggcagcgccattatcggtaacttgtcggccagccgtttaccgcaaagtctgtcgctacggcgccgtttgctgttgggcagcatcatcggctttattttcagcttgctcgctctgacgctaagcctgataaacatctggtcgattcccgcactggtcatcccaacgatggtattcagtattttctacggcatcaccagcccggcagcgcaggccggtgccattggtgcgatcaagcctctggcgggcaccgcggcaggattgagcatgttcatcagtatgcttctcgcaagcgttgccacgcagtttattgccgagtttaatagcggaactcccctggttattacttttagcctggccttattggcgttgctctcgttaattgccgcaattgtcacgctaaaaaaatctgaataa

SEQ ID NO: 428579 - DNA, 783 bp, Serratia marcescens
atgggtaatcattttatccgtgagctgtctgcatcacggccgtcggccataaatttaatttgctttgctcatgccggtgggggtaccagccgatatcgtacctggcatgccgaattacaggaatatgccaatattcttattcccgttattcccggcagagaagaacgttttattgaacctgccttttccacgctggagcaagtggtcgatgacgtattcgctcgtattaaaccctatctcgatgcgccgctggtgttggctggcatcagctacggcggcctgctggcctatgagatggcaacgcggctggaacagcatggtgcctgcgttcacgcgctattgatcgccagccagaggtctccccactatcacaaaactcgacaaaactggcatcagatgtcggcggaaaagctgatcgattgcctggtcaaactgggtggcatcaacgcacaggatgccgcgacaccggaattttatgagctttttctgtcaaccatccgcgcagatttggaggcgagtgacggctatgcaccaacgggtaaagccccgttgacatgtccaatacacgtttgccacggcttgcacgaccaggtgatcgatcgccaggcaactcgcggctggctagacgttaccgccaataccgtcgaatggcgcgaatttaatgctggccatttcttatttgacgaacaaaaagatatttggttgcaagacgtgaaaaacgtactcgccagattatctcggcacatgccgccgacatcccaggggaatcatgctcatgcctga

SEQ ID NO: 428580 - DNA, 7596 bp, Serratia marcescens
atgctcatgcctgaattagaaaaaactctcgacaatgaatttaccggcatcgaactggccgtcataggaatggccgggcgttttcccggggcaggagacatcgacgcttactggaataatctctgtcaggagatcgattccgttacttggcacgctgattttgcgccgcaagcctccacggacggttcctggcacgtccccgcaggctacctgctaaccgatgtcgatcaattcgacgcaaaatttttcgctatgtcgccaaaagaggcggcgatcactgacccacagcaacgcctgctacttgagtgcgcgtgggaagcgttggaaaacgccggctatgccgccacatgtcaccaacaaaacgtcggtgtctatgtcagcagcggtcccagcgggtattggttgcataatctcgcgaacaataggcagctttgcgccaccaccagcaaaatgcaattgctgattggcaatgacaaggattacgcggccaaccgcatctcctacaaactcgatttgaaaggcccgagcatcgtcgttcaatctgcctgttccagttcattgctggccgtacacactgcaggccagtccctgctggcaggagagtgtgatatcgccctggccggtggtatctcactggaatacccggctgaagaaggctatcggtatgaaccgggcagcattctctcacaggacgggcattgcaaaccgttcagcgaacatgccagcggcacagtgcgcgggaatggcggagggatcgtggtattaaaacgcctggatgatgcgatcaacgatcgggatcatatttatgccatcgtccgcggctctgcaaccaacaatgacggcgcacaaaaagtgggatatgccgcccccagcgtcgaaggccaaacccgtgttatccaaatggcgcacgctgttgctaacgtgacgcccgacgctatcggatacgttgaaacccatggcacggccaccagcttgggcgatccgatagaaatcgccgcgctggcggccgcttttggcgacgactgtccagccgcaagctgtaagatcggttcggtcaaatccaatataggccatcttgacgccggtgccggtattgccggatttatcaagaccgcgctaagcctttatcacgattatattcccgctacgctgcattaccggacgcccaaccccgccatccatttcgccggtaccccgtttaccgtgacgagtaaaggaacttcctgggaaggaagctcgccacgcagggcgggagtcagcgccttcggcatcggcggctctaatgtccatgtcgtcatggagcaacccccggtttccaccgtctcccctgccgcagaatccgccacctgcgcattacgcttctcggccaaaaaccaggtcgccttgcgcgcgacaatgcagcaactagcccattatttacgcaaccataccgaggcatctctcgccgatgtcgcctattcgttggcgacaggtcgaaaagcgtttcccgtgcgcgccgccataacggccgacagtgtggaagaggccatcgcgcagctggaaaccgagcgagccaaaaccatgtgcttcggagaagcctgcgacgcgccgatgaaaatagcgtttatgtttcctggccagggaacacaatatcagggtatgggagccaacctgtatcacaccggcgacatcttcacccaagagttcgatcggctggcgcagctgttccaaccgtttatcgaccacgacttacgctcactgttgttcaacaaggcgcaggacaatgacgaattgctggcgcaaacccggctttcgcaaccggcgattttcgccgtcgaatatgcgctggcgaaacattggctggcttccggcctgatccccgaaggcatgataggacacagcatcggcgaatatgtcgcagcctgcctcgccggcgtttttacgcttgaagatgccgtcaaggtcgtttcggcacgcggccgcttgatgcaaagcatggatcacggcgagatgttggccgtcatgtctgatgaggcaagcctgcactctcggctaccctccgccctatccatcgcggccgtcaatcggccggcgttgaccgtcatctctggccccgcccatgttatggacacgtttcgccggtcattggagcgcgagggcatcagttgccgagcccttgaaacctctcatgctttccattcggccatgatggaaccttgcttgcaggcttttggtgacgtgctggctcaggtccccctgacaccgccgcgtcagcgctttatctccaatctcagcggaacatggatcactgatgaagaggcgacggcccctgattattgggtgcgtcatctgcgtggcaccgtgcgttttgccgatgggttggcaacgcttatcgatcaacacgccttcctgttgttcgagtgcgggccaggcacctcattgagccaagctgcgcgcgccattggcgccggccgcaaagatgtcaacgccatcccgttgctatcgcccgagcacacgggattaagtggcccggcgtcacttctgcgcatccaggagcagcgctggtgttacggccagacgataccccactcatcgcggggcaacaaaattccgctgccgacttaccgctttgatcgcgcccgtcactgggtcgaccctgaaccgcaaaccactaacgcggtgccggccatcagcgccgtcgacaacgaaaatgcgcctgaacaggcgaaaccggcgaacaccctggcggaaaaactgacgcagctgtggagcgaagcgctgggagtcgcgcatattgagccgaaagaaaacttcttcgacctcggtggcgattccattctcagcatccagattgctaaccgcgcgcgtacgctggggttgcattttggccccggagacatcctcgaatttccgacggtggaaagcttgctcgccgcttgggagagccgtgcagggcaacgcgacgcagcggcgcaaccggaagaagatctggccagcatttatgcaagcgccttggaaatccgtccggacgaggcgttcttgccgttcccacttaccgatattcaacacgcatattgggttggacgtaacgcgggcaataactcgggcaatgttgcagcgcatgcctatgaagagtttgaatgcgccgatctggatcttgcacgtctagaacaggcactcaacgccttgatcgctcaacacgatatgcttagagccgtcatgacgcacgacggcatgcagcgcgttctcccccacgtcccccgatatatcattgacactaacgattttagtcagttgaaacctaaggacgccgtggctcagttaacggcgctcagggagcagaaatctcatcagctgatgccctgtgatcaatggccgctgtttgatatttccgcctcgcgattgcccgatggcaccgtacggctgcacgtcagcttcgatctgctgattatggacgcctggagcattacgttattctggcgcgaactggaggagcgttattaccacgccgattatcagcccgaatcggtggccatcacattcagagattacgtgctggccgaacagcgcctggagcagagcgccgcctatcagcgcgctcgcgactattggcttaaacgcgtcgacactttcccttctgccccgtccctgccgcagcgaatcgctccgcaaagcctggagcatcgccgcttcattcgccgggaaacgacgatacctaacgccgtctggcgcaaactgaaagacgccgccgcacgccagggcctcacgccgtccaccatattgctcaccgcctatacggagatattggctaactggagcgaaacaccacatttttgcctgaatctgccggctttcaatcgtctggaggtgcatccacaggtcgatcaggtgatgggggatttcacctcggttctgctgttcgaagccgatctgcggcaggaggagacctttactcaacgcgcaaaaaaaacgcaaaaacgcctctgggacgatctttctgccttgcagtacagcggcgtaaaaatgttgcgagacattgcggaaaaaagcgccgaacggccaaccatgccctatgtctttaccagcctgatcttcccgtccgccgatgataaaccgattgtgagccggctcggtaaattggtggaagggatatcgcaaacgccacacgtatggctcgactgccaggtttacgaagaaaaaggcaatctcctcatcaactgggatgcggtcgacggccttttcgatcctgacatgcttgacaccatgtttatggactatcgcgcattgctgatgcgtttgcccaaagaagaagccatctggcatgaaaacaattggcgcgatgctctggctcaacgcgtcaacagcggcgccatcgccgaagccaatcgtacggccgtcgcctttgacgaaagttgcttgcatcagggtttcttggcctatgcaaacaagaagccgtcggcgcccgctatcctgggggaaaccgtcctcacctatgcggatttggcgaatatctccgcccatgtggcgctgtcgctgaccaagcaggcgctccagcccggtgcacgcgtagccgtagtcgcagaaaaaggctggcagcaagtcgccgctgtgttaggtattttgcgcgccggttgcgtctatgttccacttgatccaaacctaccgaaggggcgtatgcaggcgcttttgagcgaggccgacattcgagtcgcactaacgacgcccgccagcgacgggcgcgttgagtggccggcaaccgtcgcgcatctgcccatcactgaagcgatgaatgcattcacggacgaatggcgcgatggcgagatcgacgcggcatcgccagcttacattatctttacttcaggcacgaccggtaagcccaaaggggtcattgtcacccatgccgccgccgctaacaccgttatcgatatcaattcgcgtttcgctatcggcgaggacgatcgcgtgttggcactttcctcactctctttcgatctgtcggtttacgacattttcgggccactgacgcgcggcgcggccatcgtgatgccgaaagatgagcttgccaaagatcctgcgcactgggaaacctgcgtgcagaaataccgggtcaccgtctggaactcggtgccggccttggttgaactcttggtcaatcatctgtccgccaatcaaagcgaaacgctgaggagcatcaggctggtcatgatgagcggcgattggatcaacgttgctttaccggagaaaattcaccgcgcaatgccaaacgccctgcgcgtcagccttggcggcgccaccgaagccgccatttggtccattttccacctcatccaggatatcgatccgacgatgaccagcattccttatggcaaggctttggcaaaccaacgtttctatgttttggacacccatcttcgccaccggcccgaaggcgttgcgggcgagctttatatcgccggcaaagggctggccgccggctacctgaacaatcccgcagaaacggcagcgcgctttatcacccacccgcaaagcgacgagcgattatacaaaaccggcgatctgggacgctggttgcctgacggcaccatcgaatttttggggcgcagagacaatcaactaaagatcaatggattccgtattgaaaccggtgaaatagagcgcgccgccggtaaacacccgggagtcgatcgctgtgtggttcgtcttcaccgccaggacggctcagcgctgctactcgcctatctttgcccgaggcaagatgccacgctcgacgaaatgcagcttcatcgtcattttgccgaacaactgccggactacatggtgccaagcgtcattataatcctgccgacgttgccgctgtcagccaatggcaaagtcgatatttcacagctgccgacgccgcaactgtcacgccatagcggtgaatttatcgctccggcggacgatatcgagcgtcgtctctgccggcttggccagaatattttgggtggcgaggcgttgagcgttacccaagatctgtttaaatccgggattgactcacgccgtctcaccgatttggtgacccaaattcgccgagaatttaccccggcattcccgcttcgcgccgcctttgaaacgcccaacatgcggggcattgctgaagccgtcaggaatgcgctggatgtggagcgcaccgaggacgaactgccgcctatcgtcaaggtaccggccatgtcccgctggccgctttcctccgcccaacagcggctgtggttccatgatcagcttcatccgggaaactgcacctacaacctggtggaacctttcgaactgaacggcttgcttaatgtggatgccttgtcccaggccctgcgaatctttgtcgccagacattcggtgctgacatgccgcattctcgacgatagggctgacgcctatatgtccccgtcgctggagacctcatttcagctgcagttggaagaggcgttcgacatcccctctcacgagcgagagggctacatgcagcgcgcacttgcggccgcggcgacacgcccgttcgatacccgttgcggcgatatgttcagagccagcctcatcgcattctccgcacagtgtcacctcctgatcatcgccgtgcatcacatcgtatgggatggctggtccactgccattatggcgggtgagatcagcgagatatataacgctctcgtcgcagggaggacacctgccgaatcgtccgacaggctcaatttccttgacgtcgcgcaatgggagcaaacgcaatgcgcatcccggacctttaacacccaattggattactgggtcaatcagctcggcgataatctgccggtgctggctttgccgacaacgcctgtcgataccggccgtctgaccgctaccggcgcgcgtcatcctttccatttaagcgcgacgctcaccgcacgcttcgatgcactctgcgccaaactgggtgtcacgcctttcatggggtatatgaccgcctggcagttgctgctgcattggtggtgtcaacaagacgacatcgtggtgggaacggcggcaggccatcgttcccgtcccgaactcgccggcgtcatcggatttatggtgaacagcctcgccatccgcactcgcttccaacgccatgacgtctttgcagatctgtgcctgcgcgtcaaacaaacctgtctggatgcctaccggcatcaggatctgccgttcgatcaaatcgtcaacgcgctgcgaccgaagcgaaaaatgtcgcagtcggcgccgatttaccgctcgtggttcgtcttgcatgacgtagcgaccccaccatggacgttatcaggcattaaggccaccttgctcgatgcggaatttctgctggacgtgcacgacataaaactgtcgctggttaccatacagggtgcaatggaaggcgggctggattaccgcacagccttgtttacacccgacgtaatcgcaaatcttgccgtcgcctttacgcagttaatcgagaaggtttctgaggacatgacgatcgccttgccggaaataaaaggctatctcgatgcacaacaaccaaaagtcgataacgcatcagcctgttcagacgaactgccctcttgggacttttcggttaatcgccgcaaataa

SEQ ID NO: 428581 - DNA, 5022 bp, Serratia marcescens
atgcaaagcatgaaaggtattggaccggaaaaccagacgcaatcccatacgctgcacgcagccgtcttcactcaggcgatggcaacgccactacgcccggccgtgatcgacgaaagcggcataatggactatcaatgcttacggcatgctgcgttgagtatcgcacagcaattgtccgcgcttaatctggcgaaagaaacggccgtcggcgtctatcttccgcgcgatcgctatatccccgccagcttattgggcatcatggcggcggattgcgcttatctgccgctcgatcccaagcatccccaggcacgcaccgaactgttgctggagatcgcccaggccaaatacgtcattacaacagcggcgctagcgagcaggctgcccgacgccattacgcccgttttcatcgacgaaagcgtgcgccccgaggcagccatactgcagcgaaacgcctgcgccacccaactggcttactttatctttacttccggttccaccggcgttcccaaaggggtgatgatcgaacacggcaacgccctgtcgcttatcgattgggcccaccaaacctatactgacgaacaactgtcgcaggtcgcttgtggcacgtcgatcaccttcgatctctccgtctttgaaatctttgctccgcttactcagggcgggtgcgtgcatatgctggcagatcccctagcgttattacagtggcacaagcgtgacgatattacgctgttcaataccgtaccttcggtcatcaacgagatagttaaaatcggcgagttgccatcccatttgccgattatcaacttagccggggaaccgctgccgatgcacctggtgcatacgctcaggcggcaatgcccgacggcaaaaatctttaatctctatggtccctcggaagatacgacctactccaccggcggtgaagttttggcctcagacccgcatcccaccatcggcacgccactgacgggccgacgctgttacctgcttgacgcggaaggcaacgccgtagcgccaggagaaacgggggaaatctacgtggccggccctggcgtcgctcgcggttactaccatcgcccagaactcaacgacgccttcctgcccgaccccgccggccccaaaggggcgcgaatgtaccgtacaggcgattatggcaagcagcttgaagatgggcgcctgctctacctcggccgtcgcgacgaccaggtcaagatccgcggccatcgtatcgaaatcggtgagattgacgccctgctccgtcggcatcccggtgtgcgagaagtggcggtggtggtggtcgaatcagcgaacaagggcaaatctttacgctgcgcgctggaactgcactctccggcggatcgtcatgccattatcgcctggactgcaacccaactgccggtctacatgctaccggcggagtggatgaccttcgatgaacttccccgtttgcctaacggaaaaattgacagaggcgccttaagacactgccgaatgcaacatgaaaatcgtgcgggccaagcgcctgaaggcgccacagagctatcgttggctggactttggcgccagctgctggactgtgctgacgtctatcgcgccgatacgttcttcggtctcggcgggcattctttactgctcgcccgactggctcatgagatcaaaaagcagttttctgctgaccttgcgatagaacagctcctggctgccgatacgctctcacatcaggcacggcttattgaacaatggacgaaaaacgccgatgcgccgccgtgcgtcggccatacgcgacaaatcactctcgaagcaccctgttcgccctcgcaatcgagaatgtggatgctggaaaaactgttgcccggctcgcctcgctacaacattcccaccgcttttcaaatcgtggggccactggatctgagccgtctttccaacgcggcggaacaagtcgtgatgcaacatgccatcttgcgtacgcgctatgcagaaggcgcgcagggcctgcggcaatgcatcgcccaaacctacccgccggtggtccatcatgaaaacctgtgtgagtgggatgaaaaagcagcctgggaacaggcctggaaccgcgcgaatgccttcgctcgcacggcgttcgatctgaccggagaaatcccgttcaaggtgctggccctcaagatcaagcaagacctgcatctggtggtggtgctgacgcaccacatcgccgttgacggctccatggacatcttgctggccgaactctccgcggcctatgagaatacgacctcggatacctctcctgcgcccctcagttaccaagactattgccactggctgacacactgtgaaagccggcaaaccgaggctctggcttattggcaacgacagctggccgaaccaccggccgccccgcaacttccctgcgatcgaccgctgccgcgccaggagcgggggcaaggtcgccagttaagcgtctccattccagaagataaattcatcgcgatctctcagctttgccgccgacacgaagtctctctgttccacgggttactggcgctgacctgggcttatttggggcgcctggcggataccgacgatgtcctgttgaccgcaccgctacatacgcgaaacaaccacgattttgccgcaactatcggcaatttcgtcaatacggttattttgcgcggcgatatgcggcaccagccgcgcgtcggtgaattattgcgtcaggccaggcaatgtacccaggaagccatgcagttcggccaggttccttatgaaacggtgatcgataacgtcaaaggactacgcaccgccaatggcgcgccggcgctcaacgtcatgctatcactgcagcaagaacagccactgtggacgatgagggataccggctccagccacctgcccatcgacttgttgaccagccgtttcagcctgggcttctttttccgtctcagcaacggcggccttgagctgaatctcgaatacgacacggaacgctttaccgatgccgcggttcagcgcctgatcggccattggttcacgctgatgagtgcagcgctcgcaaacgatgaggccgtcgtcaataccctgcctttgctctctgacgatgagcgccgcaacatgctcgacggctggaatgccacgcaatgcgattatgccggcgatcggctggttcatcagctgttcgaagcgcaagtcagtcaggtacctcaccacatcgcgctatgcaatgcgcggaaccagatgagttacgctgagttggatgcgcgtgccaatcgtttggcccattatttgctggcccagggattcgacgccggcgcacgcatcgctatcctgtgcgatcgcagcccggcgatggtcatcaccatgttggctattctgaaagcgggctgtgtttatgtgcctttcgatcccgccagccctcccgctcgttttcaagcgatgatccgtatcgccggcatcaccggtatcgcaactgacgcgctgtttgccgataccgccgccgccttgattgcacaagcgcctacctcgttggcgcacgtgcacgtcgcaataagcgaggacctctcctggccttcgattcccgtggagagccgcatcacatcggatgcgctggcttacatcatctttacatcaggaacgaccggcgatcccaaggcggtcgccgtcaggcataaaccggtaatcaatctgatcgagtgggtaaacaagaccttcaccgtgaacgccagcgacaagtcgctgttcgtcacgtcactggccttcgacctgtccgtctacgatctgctgggcatgcttgccgcaggcggaacgattcgcctcgccgaccgagatgaaaccagagatccgagtacactggccaacatcgtctgtgcagagggcatcaccttctggaactcagcgcccatcgcgctcgatcaatgcgagtcctatttcccgtcgtacccgattcccacattacgcctggccttcttgtccggtgactggatccccgtatcgctgccggacaagctgcgtaaaacgttccccaacctgcagctggtcggcttgggcggcgccactgaagccgtcatttggtccaacttctttatcatcgagcgggtagcgccggagcagagcagcatcccttacggcaaaccgattcaaaatgctcgctactacatactggataagcaactgcagcccgttcctatcgcggtcgagggcgacctgtttatcggcggcgaggtattggccgaaggttacttcggcgatcaagagaaaacggtgcgcagttatctgcccgatccatatggcctgacgccaaccgccagaatgtatcgaaccggcgatagagcccgattctctccggatggcaccatcgaattcctgggacggcaagatacgcagataaaaatcaatggataccgcattgaaacgggcgaaatcgaagctgcgctactcacacaacccggcgtaaacggcgcttgcgtcgtgattaaaggtgagcgtcatcgcctctggctgtgcgcctatatcgtcagcgaggaacacaatcaggaggcgattgcacggctacgcgccaatctgcgcaccaaattacccgaatacatgatccccgccgtattcacctgtctgtcagcatttcctttaactgccaatggcaaattggataaacagcggctcccggagccaacaacgatgaacggtgccggcgatcggcacgcccccccgtcaggacgctatgagatgacgatcgccgatatctggaaggacgaacttaactgcgaggcactgaacgctacggataacttttttgatctcggcggcaactccgccagcttgataaggacacacaaaacgctggagaacgcgctgaatcgcacgatccccatcgtcacgctctttcagtacaccactttgcgcagcctcgccgagtggctggccggtcacatagagaacgatgcagcgggcgcgtctcaggcaaccgcacagcggctctccggccgacaacgtctaatgcaacaaagaaaacaacgaatcaccgccaacgactga

SEQ ID NO: 428582 - DNA, 576 bp, Serratia marcescens
atggatgcagatgccaagcttatcgcgcaataccagccgcagctggtgaagttgggcgcacataaagtggctcatttagatgagccactaatgaatcatttaatacgaacacaccatcttctcagggaaatggaatgtgacgagacgatatgcttatccggattatttcacggcgcatacggcacacagggattacatactgatgagattggtgacattccgtcatctcaaagggaaattgtcagagccagtatcggcgaaagcgccgaacagctggtttatcacttctctgtcatgagttacgaatcattgagtaaaagcttccgtaatatcctcaaaccggaaggacaaccttgtctgaaggatcgtaggaacggccgaacactcaacgtttcattaggtcatttccaagcattgttagccttaaaactggcggacgtgctggcacacacccctacgcagaaatatcacacctgcctaaatctgccggcggaatacggcatgttttgggagttagtcgcggaatatctaggtgaaaaacccttgtccatttggaacaaaaccattaacgggtaa

SEQ ID NO: 428583 - DNA, 3093 bp, Serratia marcescens
atggtattaccagagaataactgggaagggtttcccctgtcttttcaacagcaacagctgattaagcaaaatactcgaaatagcccgaaatatttcaccgcaacgtattctctgtcaggatctttggaccctaaccgtttaatcacggccttgtccacgctgattactgaacatgagattttgcgaacgtccttcagaaacgtgttgggagaacacagcgatgtgctgatggtcatcaatgaaccctatcagcccgagctgattatggcggacggtgagccttctgacgttaacccgttcaacgagggagaagcggcatcggcatgcgtaagccccgtagctacagcacggccactcaaagccgcgctttaccgcatgacagccgaccgacatacgctggtgatttcactgcccgccgccagcctggactatgtttccgccgacgcgatgatggcggtgctgagccgcctctatgccggtgaggctggcgcgtcgtcccccatcgtacaatacgtcgattttgcccaatggcagcgtgaggatttcatcccgcaaaccgccgttgctcatgtcgagcccaactcttctttgcgcctgccgctcgagttcaagtccgacagccaggataggcaatgccgccccataacgctggcgagggaaacacaatctcagctacaagcgctggcaacaggtaacgcattgtcccttcgcgctctgctttacgcttgttggagcgctgcgttatggcgcatagcggaatatcccgaccgtgttgcgctcagcacaaaccttgccggccgcccttttgcggaacttcagcaggctttgggtcgcttcgaatatgcagtgcatacgatcgtgcagcccaacgctgacatgacgttgctgcagttcgctgaacattgtcagcaagcgctgcgactgagcgagcaacaagacggccgccagccgggtgatgcgcattcagccggcgagatcggctatcaattcttcaatgcggcgtcggcaatcgaaacgcccctgctacattgggaaaaccgtaccgccatccctgtaccggaacactgcaaattatctctgcaggtgaatgccggtgaacgcctccaccttgagttgcagatacagcaaggcgtcttcgatgcggcagggatcgcaacgattgaacaagcgttccgcgccacgctgcaggcgctgctcaagacaccgcaggccatgctcgatcgctttccgcttatgactgacgatgaaacacgcattctgattgaaagcactcataacgcgctgtcgtcatcgccagccctcggttgttggtaccatactttcagccgccaggcggcgcagactcccgatgcgccggcgttaaagtacaactcgcgaatttggcgctacgccgagctggatgccttcaccaatcagttggctcgccatttgctgaacaatggggtggaacagggcgcagcggtcggcctgatgcttgaacgcagcgatctggcgctggcagctatcatcgccatccacaaagccggagcctgctatgtccctttcgaccctcaactgccccagcagcgggtggagaccattctgaagcaaaccaggccggcactgatgcttgtcgctcaaacgcaacatcgccaggcaaagctcaccctccccgtgatggcgctggatgcacagtggaatgacattggcgtgctggatgactccgcgctgccattcaccgcgtctgccgacagcctcgcttatgtgctctacacctccggctctaccggagagccaaaaggcgtcaagatcgctcatcatcaattgcagaactatgtgtccggcattattgagcgtgcggaactgggtgcagcgctcacctatctctccattggccccatcaccaccgacttgggcaataccaccctgttccccgcactggtcaccggtggctgcatcgacatctcaccgttcacacacgccgaggatattcaggagcaaattcgctatatggagcaaagcgagtatgacgtcctcaaattgaccccttctcatatggcatctctattcgcgctggcggacgcgccagcgcgcctgatgcctggcaaggccttattgctggggggcgaagtgttgagctgggggatgtggcgcctgttcaacgattttgcgaacggttgtcgcatctacaaccattatgggccaaccgaaacctgcgtgggcgccattgcgcagcaggtagcgtcggataaatacgccaggctggcttccaccgttcccctcggtacccccttgccgcatgcccgctgctatgtcgtcgacccgcatggcgcattgcttcccatcggcgtcgcgggtgagttatatattggcggcgaaacggtcgcttgtggctacgtgcagagcgctgaagatcaacgtccccgttttatcgccgatccctggagcccgcgctccaatgcccggctttaccgttcaggggataaagttcgccggcttcccgatggcagcctggagttccttggccgtatcgaccgtcagttgaaaatccgcggattccgggtagaaccggccgaaatagaaagaacgctgcgcaaacatgcggaagttttggacagctgcgtcgttgaacaaggcgaatccggcagcgcgcatctgttggcttacgtggtcctacaaagcggcgacaacggcaatgccgattggttgcgtgagcatctcgccgcttacctgccggatttcatgatcccctcacaaatcgtgtcgctctcccgcttcccgttaaaccacaacggcaaagtcgatcaccgcatgctaccggcaccggatacacttatcgccgccaacgccgatgactatgtcgcgccgcaaagcgaaacggaaaaaagtgtcgcggccattttccaggagttgctgctggccaaccgtgtaggcatacacgacgacttcttcgacatcggtgggcattcgcttatcgccacaaagttggtcgctcaaatccgttccaccttcgatattccgttcaatctgcgcagcgtgtttatggatgcgaccgtagccggcctcagccgcaacattgataagcaacgtcactctcaggaactggcaatatga

SEQ ID NO: 428584 - DNA, 1008 bp, Serratia marcescens
atgaacgaaacaacaagcggtttattcgcccgacggcgccagagccaaggcgtatccatcaccagtctggtcaccgcgtcaccactgacccatgccggcgctaaaggtgtcatgttgcgcccggtgctagccaacctatccgcccccgagtggggacaaaacagctgggattatatcgccagtctgttagccgaatctggcgccgttttgcttcgtggcttcaaggtcgcggatgtcgcggcttttcgcgcttttgtgcaaacgtcggcaggcgcattgttgggatacacccaccgctccacgccgcggagcaatatcagcgaagggatatacacttcgaccgagtatccggccgaccaacatattccccaacacaatgagatgtcctacacccgcagttggcccaagcggctgttcttccactgcgccgtcaaaccaggcgctcaggggcagactccgcttgccgacagtcagggtgtctatgcgcgcctgccggaagacctgcgcgcgcgttttgaagcccatggcgtgatgtacgtgcgcaattttggacagggtttggatctcagctggcagcaggtattccaaacggaaaatcaggcggaggttgaggcttattgccaagcgaacgacatccaatgccaatggttgggggaaggacgcctgcgcacacgccaaatttgtcaggcgacccttgcccacccgcgaacgggggcggggatctggtttaatcaggcgcatctgttccatatcagcaatctgccggcggaagcagaacgtgagttaagacgcgaattcgccgagcatgagctgccgcgcaatgctctgtttggcgacggcagtcccatcccgtcaaccgacctgacgctgattcgacaagcctatcaacaagaagaaatcctgttcgactgggaacagggcgacattctaattttggataacgaaaccatttcccacggccggcgaccatttacgccgccgcgtaacatcatggtggcaatgacatga

SEQ ID NO: 428585 - DNA, 1284 bp, Serratia marcescens
atgagcgaatcaggttcatttaaagatgtacgtcgtgaagtggcgtacgcttatgaaaaggtgaagttttttaaaactcacatggaaatgtcgggcctacggcccgacgacattaaaaccctggcggactttaaacgcatccccgtcacacgcaaactgcactatcggcgcaactatccgtcaggggtgttagctgccggatttacgctgaccgggccgcatgtgatgcgctttcaaagttcggggacctcaggagagcgcttgaacagcgcgatcctttcctatgacctggcgcggcgacaggcaaccagcatgggcgttaatgcaaacttcaacgcgctgtggcgccctggtgcccggccgcgcatttgccgctatgccccgcctaactgctccgacgtagagtgcggcatcggtctgacgaccatggaggaacgcacgctggccgacggcacgctggtcttgcctgtcgctcacgacttattggcgaccccagccaggatgatcaagcaagcgctggacgaaatcgccgcctacgatccggaaattttggtggtggacccgacgcatttagcctttttaactcgagaggcagccaaattgggacgcactatcgtcaccactaacaagctgcatatcgtttgtggctatacccatttgacgcaggttgcacgacgtcaaattcggcacttcttcggtgacggaacaccaatcggcaacatgctgggcatgtcggaactgggttacctcggtttcgaatgccaccacggctgtttgcacatcaacaaccaagactttttcctggagtttttaagcggggagctggaatcggccttggatgaagtcggtgagttggtcatttccaccattgatgacagcttgctaccgcgcattcgttacgccaccggcgacctgtaccgcctgtcgtcagaaccctgcacctgtggcgccactttgccggtagtcaacatcgaagggcgcgccacccacaacgtcatcggtaaaaacggggcgatagtgacgcctgccgaggtcgatctggcggtgaccgattgcccaagaatagatttatataagttggaacaagacgagctcgggaatcttcgttttcgctatatcctcaatcaagcatcatcgtctgagctattcgcattgcaacaacgcatcagcgcactttgccaaacccgcgacatcattttcgaagccgtggattacatcgcctgcgaacgcagcggaaaattccaatcctgcatttccagatataacggggcatctcatccatga

SEQ ID NO: 428586 - DNA, 1221 bp, Serratia marcescens
atgacgaatcattttattgaccgcagtcagttccctgcgctgatgcaggaaatagacggacggcctctcaactatctcgacagcgccgcgacgaccctaaagccgcgcgtcatgattgatgccgtaacggagtattacagccagaacggcgccaatatccatcgcggcaaacaccgtctctccgacgaagcctccaatgcctatgaagccgcgcgcctctcagtagcggactacatcagcgcacaggccaacgaagtcgtgtttacccacaatacgacccatgcgctgaacatcgtggcgcaaggattggcgctgagaaaatcggatctggttatcgctggcatcgattcacatcattcccaactattgccctggcggcaagtagccaccctgaggttcatccaaaccgatgatcagggcaggatcgatttggatcatttccagacgctgctcgcgcaacgaccgaaagtggtcgccctgacgcactgctccaatgtcaccggcgttgtgcatcccattgagcagatgatcgcgatgatccgcacacaaagcgatgccgttattgtgctggacgccgcacagtctctcccgcacggccgtctcaacctccatacgctgggcgccgactttgtcgccttctccgcacacaaaatgctgggcccaaccgggttgggctttttgtacgcgaaccagcatcgcctcgatgcacttaaaccactgcaattcggtggcggtacggttgactgggtggatgccgatagccaggtcaatcgtcgggcgccctatcatctcgaggccggcacgccggcgattgcctccgtcatcggcgccggcgcgacttttcgtctgttagccggcttcgatgagacgacacggcgtgaacacgacaaaggtttggtcaacgcgctgctttccggggcggcctctcgcccttatctcaaacttgtcggccccgctgacggtgaaaaccgccatgccataggcgctttcaagttctcgagctgcgtttcggtcggagaaatcgcccgcttgctcagcgacgcctacggcatcatgtgccgcagcggttacctgtgcgcgcaacctttcgtcggcactctggccggtggagagatcctgcgcgcatccgcctatttatacaacacgacggctgatatcgatgccctgtatcaggcccttgatgacctggcggagtgcatggggctgcccacggtaaactga

SEQ ID NO: 428587 - DNA, 768 bp, Serratia marcescens
atgcgattgatgaactatgccatttttccgaacctgacgttctctgaccccttctgggtacagctccggcaagaggcaaaagccttggccgaaagagaaggggtgatgagcaaactcctgcagcaaggagtattgcagcatgccaccttcaacgaggcgctcgcaaaccgcctggccttgaaactggccaatgacgatatcgatgcaacgagcctgagaaacgttgttgaacaaacgctgcaacgcgcgcccgacattgtcgacgccgcattggcggatatgcgcgcggtttacgaacgcgatcccgcctgccacagtacgatacagatattttttttcttcaagggattcatcgcattgcaagcctatcgtgtctcacatgcgctgtatcagcaccagcaccgtgaaatggcctatcacatccaaagccgggtatcagaactcttctgtatcgatatccatccggccgccaagctgggcaaaggcatcatgctcgaccatgctcacgcgattgtcatcggtgaaacggcgacggtgggcgacaacgtctccctgctgcattcggtgacgctgggaggaacaggaaaagccggcggcgatcgccatcccaaggtgggtaatggcgccgttatcggcgccggagccaaaatattgggtaatgtgcggatcggcgacagttgctgtgttgccgccggcgccgttgtgctcaaggacattccgccatcggccacggcagtgggcattcccgcccggattgtcggcctctaa

SEQ ID NO: 428588 - DNA, 1755 bp, Serratia marcescens
atgaatatcggttctgatcgtgctaccgcgtttgctgttatctcgagttttgaggctttaagagcctatgtgcccgcgcaagcgggagtcagggttacgcttaatgcgtggaaggacggtgggatatacggtggcggtgatttcatctctgttgctggtgtaaaagccgatgatggcggccacgttgcgcaaacgaccggattttattgggaaaggattgccggcacggttaatctttatgattacgggatagaagctacggatagaacgacatcaaattatattgatgtcaccgtcagcttgcaggcggctataaacaaagcgattgaaaagaaatgcactctggtgagcgagtttcccaaagcgggctcgtatgcccaagtgggcttatttatttcgtcttctatcaatattagtgggctgacttgtttatctggagccctgcatttattcattaaatcttcatcatttactccaaagactgatgtcgggttaaaattgccttgggtcgtgctcaatcagaatggtcagtatgacggaaaaggtttagtgtatggaacgactcagggtaatcaggatctggataccatcacgatttacaatatggatggttacacgggtaaagagattaatggtcaactgcacacgctttcaggttccagagttcaatttctctcttcaatgcacatgaatggcgcaggcgtctattttgcttctacgtttgataacgtatttaatgacgtcagggcactgttctgtggcaatgagacgatgttcggtatcgactttaccagttaccccgctgcaaccggatcgacgtttgatgagtctaatgccaatacgatccactctttaatggctcatgactgtagagagaaagcttggcgagtatcaggctcaaaaaattggctggccaaagttcatgaagaaggcacgttagtcaccaaggcaactgttgaaactcccaactctgccgaaaaaagaaacggatatggctatatgaatagctacttttcctccgtcggtggcggtgccggcgtgattaatatctatgcctctaaaaatagcacggttgagcatgttcatactttcggtgcaacggcaactgctgtcgggaatgtttcgtcaaccgcgaatgtgtcaattatacctggtgatcccgctccgaatgggggggctatagggacagtctttgccaaagacattgtggttatggctaatgcccgcgtcaatttagattctgtcagaacggtagggggagtagatattcgtgacgataactcatcagtatccagaggcaatattgcgggtaacctacagctctcttctgccgccaagattttgaatagttacatcggtggcgatgtaatttctacgtcgatgccaagactcaccaattgcgacctgcaaaagagctttaccggcggcggaagcctgcaaaatacgagagtcgttggtgatgtcacaacggtcgatgcattacgcttggttttgattgatgtctctttagcgacgctgatggtcaccgggaagggggttttgttggatgtgcaagggggcaactttaaccggattacctttgttgacggcgttacggggcgatggataattttcccgtcacccagggtgaatgtgacggtagataattggttgcctcccacctctgccgctggttacggattattcactatcaacccactgtcgaacaagatttacacgacgcgtagcggagtgtgggtcgattataaaacgtaa

SEQ ID NO: 428589 - DNA, 363 bp, Serratia marcescens
gtgacattgaaaaatatcgccgcagcggtcttggcctccctgctgctctccggctgccagcacgccgccaaatcggcccctgacgccgccgcccaacgcgaccagctgtcgtcgctggtcggcgccggcttgtttttgagagagcgttgcaatcgcgccgacatcccggccgacgataagctcacggcggcggcgctgcaggaagcagagaaaaaagggtggtcgccggcgctcaatcgcgcccagttgcttgctgcaggtcaacgcgtcgccgcacagctggcggccgacgccacgccgctgcaggagaagtgcagcgaattcaatcggtcactggcgccctttctagcccagctccgttag

SEQ ID NO: 428590 - DNA, 612 bp, Serratia marcescens
atgaagcgcgctttgcaacgcggctttacgctggtggaaatgctgctggccatcgccctgttcgccatgctgtcgctcaccgccctggcggtcttcaggggcgtgctgaaaaacgacgaaattacccagcgcaaatcgacgcagctgacccagctgcaacgggcgctggcgatcgtcgagcgcgattttgctcatgcacaggcgcgtgcgccgatcggtgataaacgcaggccggcggcgccggaattcgcggtgctgcagacggcggagggggaagacgtggattttcagctgttgctgatccgaagcggctggtcgaatccgcaggaccggctgccgcgtgccacgcaggagcgggtggcctatcgccatcggcaggggcggctggagcgcctcagttacccgaatttgagcagcccgcaggcgacggcgcgcagcgtgctgttgctgcctgaggtgacgcggttccgcctgcgtttttaccggcaaggcgaatggttgacggcctggcgagccggcgggctgctgccgcaggcggtggagatcaccgtcgaaacccccgcgttaggggaaatacggcgcatcatcgcgctgccctcggcgaggccatga

SEQ ID NO: 428591 - DNA, 579 bp, Serratia marcescens
atgaggcgcatacgcggctttacgctgctggagatcatgctggtattgctgctgctgggggtgaccagcggcctggtgatgctgagttttccggcggatgagaaagcgttggcacggcagggggagcggctgaaccattggttgaatgccctcgccgagcgggccgagcgcgaaggggtgagttatggcgtggcgttcggcagcggcggttggcgcagcgttgccgctgcggggcaggcgagccgggaggcatacgccctgccggacggcatcgcgctgtggctgagcgttgaagggcaaaccgtcgcgctcgatgacgcggcggcgtggccgccgcaggtgtggctgtatccggggggcgaaaccacggcgttcagcgtagtgctgtcgcaagggcggtgcctgtggcgattgcaggcgcccggttacttcgtatttgaaacgacggacattcgttgcgatgacgcggaaaatgagacgccagcagggcatgacgctgctggaagtgatggtggccttgatgatcttcgccatcggttgcctggcgctgatcaacagcaccggcggccaggtgcgtag

SEQ ID NO: 428592 - DNA, 723 bp, Serratia marcescens
atgaaaaccctttaccgcacgttggccttggccattgcgatggccggggcggcgcagccggccttcgccgcgccggctgcgtcgcagccacatactcagacgcagcaggcgtctggccctttgcagctgttggatcgcaacaactcggtactgttgttggttgaccatcagatcggcctgatcaccggcgtgcgtgatatggacagcgcgacgctgaagcataacgtcgtggcgctcgccaaagcggcccaggtgatggggatcccggtggtcgtgacgtcgaccggtgccaacggtccgttcgggccgatcattccggagctcaaggctgcgttgccgggtgtgaaaattatcgatcgccacagcgtcaacgcctgggacgatgcaaacgtgcgcaaagcggtcgaggccaccggccgcaaaaagatcgtgatcgccggcgtatcgctggaagtgtgtgccgggttcccggcgatcactgccaaagtggcggggtacgacacctatgtggtgatcgatgcctccggcactttcaaccagtccaagcatgaagcggggatggctcggctgattcaggccggagtgatcccgacggattacggtacggtgggagtagagtggctgggggataatggcgatgccaaagccggtgaactgtacggggcgctggatatgccggcgacgaccttggtgaaccagctgttccaggccaagggcaaatag

SEQ ID NO: 428593 - DNA, 921 bp, Serratia marcescens
atgtctgtttttccgctcgatctcaacgccatgtattttttcacccaggtcgttgagcacaaaggatttaccgctgccggcaaagcgctgggcatccccacctctcgcctgagtcgccaggtggcgcaattggaacgccaactcaacctgcggttgctgcaaagaacctcgcggcgtctccaactcaccgacgtcggccacgaggtctatcagcactgcgtcgcaatgatgcagcaagcgcatcaggcccagcaggcggccttgcgcacgctggcggaaccgaacggtaccgtacgcttcagcgtgtcaccgctgctggcggacgaagtgatcgcatctattttgccgacgttcatggcgcgcttcccccgagtgaacgtggaaacgcacgtcactgcccgacgggtagatctgttggaagaagggctggacttcaccctccgcggacttggcatcgccaacgaggccgcagggctcattcaacggcggctcggcaccgccaaatggctgctggccgccagcccggcatggctggcgcgacacggcgcccccgcaacgccacagcagctgagcgatatgtcctgcctgctttacccgccacagcaaggcgcgccgggctggcggctctacgggccggaaaacgccgtgattaacgtgcccttctcgccccggttaagcagcgataatttgcaggtcatcctgcatgccgcccttgatggacaaggcatttgcggtatcccctactacgcctgccgccaggcgctcgcgcgcggggatttacaagaggtgctcagcgggtggcatccacaaaatggcgagctggtgctgctttacccatcacggcgtggtgtgccaccggcggtaaaagcgctgatcgaatttttttgccgggaaataccgccgctgctagacaaccgctaa

SEQ ID NO: 428594 - DNA, 534 bp, Serratia marcescens
atgaaaatcgttacaggcattatccttacctctgtagccgccttcagcggcgcggcttacgcggccgatgcgcagcctaccaccggcagcgcggcggtgacgctggaacacgtgcacgccgtgatggaaaacggcagcccggcgccacagcacgacgccgcctgcaaaaaagaactttccatgccggaatcgaaatatatgggcatgaaggttaaaaccgattacaccattaacagcagcaccatgatgatgtcggccaaatcgatgttcccatcaccggattccatgaagcccatggagctgacggtcgatctctccgcgttgggcctggctgatgtgtatgccttcggcgcctttaaaccggccgcactgccgcaggcctatatttatttcaccatcgacaaggattttaaaaatccggtcagtacctttatgatcatcaaccaaggcaagcaatataactgcgtaatctccagctcgaataaaatgatgagcaaagagatgcgcggcaagatgatgatgaaaaaacagtag

SEQ ID NO: 428595 - DNA, 1275 bp, Serratia marcescens
gtgtttcgccaggaagcgatcgataatcagaaaatgaaatggcgtggccgggcgctcctacttcctggcattcccttttggctcacggcagggctctgcctgttttttctcattgcttttctcaccttcgtggtcgccggtacctatacccggcggatcaatgtgaccggcgagatcagcacctatccccgcgcggccaacgtttactccacggttcaaggggtagtggtcaaacaatttgtcaccgaagggcaggtgatcaccgccggagcgcccatttaccagattgacgtcagcaaaagcacacgtagtggtgtagtcagcgataaccagcaacgggatatcgatggccagttggcacgcattgcgcaaattatcagccgactggaaagcagcaagcaggccacgctcactatgctggaaaaacagaaggcgcaatataccgccgcgttctcacgctcaaccgacatccttcggcgtgctcaggaagggatacgcatcatgaaggagaacatggagaactaccgacactatcagaccaagggactgatcaacaaggatcagctcaccaaccaggtggcgctgtattaccagcagcagaacaacttgctgggcctatccggccagaacgaacagaatgcactgcagatcaccgcgctggaaagccagatccatacccaggccgccaacttcgacaaccagatctaccagatggagctgcagcgctacgagctgcagaaggagcggctcaacatcgatgccggtggagcgatcatcgttcgtgcgctggccgatggccgcatcgattctctgagcgtcacggttggccagatggtcaacgtgggtgacagtctgctgcaagtgatcccccacgacatcgatcactacgccctggtgctgtgggtacctaacgatgccatcccctacattgctgccggtgacaaggtcaatgtacgttatgacgccttcccggcggaaaagttcggccagtttgccggtacggtgtccgtcatctccaaagccccggcctcaccgcaggaaatgctgacctatcagggggcgcccaaagcggcgctgaccgccgccgtgccgtactacaaggtgattgtcattccggaaaaacaggccattgcctatgacggtaaacgtctgagcctggaaaacggcatgaaagcgcaaagcaccctgtttctggaaaaaaggaggatttatcaatggatgctgtcgccgttctacgacatgaaacacagcgcgacggggccggtcaatgagtaa

SEQ ID NO: 428596 - DNA, 2115 bp, Serratia marcescens
atgagtaagcctgcattcaaacagctggtcagccaactggatctgcggctacgtcaccgggttcccatggtgcaccagaccgagtcgtcggaatgcgggctggcctgtctggcgatgatatgcggttactacggaaaaaacatcgacctgatcgcgctgcgccagcagttcaacctgtcaacccgcggtgcaacactggttggactgaccggtatcgccgagcaactagggttgagcacccgtcccctgtctctggatctggacgaactcaacgcgctgaaactgccctgcattctgcactgggaattcaaccatttcgtggtgctggtcagcgtcaacggtcaccgcgcggtgctgcatgatccggcgcgcggacgccgggtcataagcctgacggaactgtcgcacagtttcaccggcgtagcgcttgaggcctggcccggcagcgaattcaccgccgacagcattcgccaccgcattcatcttcgcacgctgattggcagcgtacacgggctcaagggggcgctcggcaaaatcttttgcctgtctctggtgttcgaaaccatcaacctggtgatgcccatcggcacgcagctggtgatggatcacgctattcctgccggggatcgcgggttactgacgctcatctgcgtggggctgatgctgttcatcctgttgcgagctgccattggcatggtgcgcgcctggtccggactggtcatgtcgacgctcatcaacgtgcagtggcaatccggtctgtttacccacctgttgcgcctgccgctcggttactttgaacggcgtaagctgggtgacattcagtcacgcttcagttcactggatacgctgcgcagcactttcaccaccagtattgtcggcgccatcatggacggtatcatggtgattggcgtgctggtgatgatggtgctatatggtggctggttgacctgggtggtgatcgcgttcaccgcgctttatgtgctgatgcgcctgctgacttacgggtattatcgccagctgtccgaagaggcgctggtgagaaatgcccgcgcaggttcctattttatggagacgctgtacggtatcgccaccgtcaagatgcagggcatggcggaacgccgcatcgctcactggctaaatcttgaaatcgacagcatcaataccggtatccggatcacccggatggacatgctgtttggcgggatcaacaccttcgtggcggcctgtgaccaggttgttattctgtggttgggagccagtctggttattgataatcaaatgactatcggcatgttcgtcgcgttcggtgcttttcggggccagttctccgatcgtatcgggtctctgacggcgtttctactgcagctgcgcatgatgagccttcataacgaacgaattgccgatattgccctgcatccacgggaagatcgcaagcctgacctcccatatatctcgggaatgcaaccgatggggttgtctacccatgccctgagctaccggtacgacagccagtcaccggcggtctttgatgccttggacatcaacgttgcaccgggagaaagcgtggccatcgtgggcccgtccggggcaggcaagaccacgctgatgaaggtgttgtgcgggctgtttcctcctgattcagggaaggttgaggtgaacggcgtcgatattcggcagctcggcatcaacaactaccacaagatgatcgcctgcgtgatgcaggacgacaaactgttctctggctcaatccgggaaaatatttgcgggttcgtggacgaggtagatgacgcctggatggaaacctgtgctcgtgccagctatctgcatgaagtgatcatgaaaatgcctatggggtatgaaaccctgatcggcgaactgggggaaggattatccggcggacagaagcaacgcctgtttattgcccgggctatttataagaaaccggcgattttgttcctggacgaggcgaccagtgcgctggacaaggacagtgaagcgaaggtgaatcaggcgattaaggcactcagcattacacgggtgattattgcccaccgcgaaaccaccattgcctcggccgatcgcgtcatcgttctgacccacaaggcggatcaatga

SEQ ID NO: 428597 - DNA, 651 bp, Serratia marcescens
atgaataaatcacgctttgcatttacgctggcctgttttgcgctggttcttctcatggtgggcctgaccttttacccctggtttctgagcgataacgccgcgtttgtgcaaacaggtctggtgttacccgttctatatctcctcgagttcggcctcatcgtcccgttatatgtggccttttttagcaaagagcatggtatgggcatgggaaaaattaacgggcggttaatgattgcgttcacggtattcattctgctgctccaatacctaggcgcctatattttggggattaggaaagcagaaagctggatgaccgaacaagaagcggtaagggggggcgtattttgggcgaacaccatcctgttggtctttctcgttcccatttacgaggaaatggtattcagagggtgccttttcagtgggttgttgcaggtattcaaaggcagtatctattggtctgcgctcacgacgtcagttgtttttgccattctgcatactcagtattcggatatacgcacgctagtgatcctgacgctggtgtcactacttttgattgctgcacgcattttatcgaggggagtggctatgccggtattgctgcatatgctgatgaatggtttcatcatggcgaccagctattacttttcatag

SEQ ID NO: 428598 - DNA, 573 bp, Serratia marcescens
atgtttctggtgcaggaaattttggggataaccgtgatggtggcggccgagtcaacaacaatggtggcagcaatcgtggtcacgattctgggcgtgatgcagcccaagcggcagctgcggcgaccggaggcgttatcggagggatgctcactggaccgggggcaccattgggcgctattgtgggtaccgttgtcggtggtgttcttggcggagccggttttgatgccgcatggaatgccactcacagcaacaacggtggtaacgaccgtggtgcctttggcggtgacagcaacaaaaacagtgttaatggacagtgccactggtaatgcggtgatggccggggatatctcccggccactcgaaggaggagctcatttcgctatgaagaaatttatccgagttttttttctttttctattttgtcttaccgtggtcaatgttattcaaagcgctgaacttaaagggcttttagtgataaaaaacctgtgctactctgtcgttatagcgctaggctatgtctttgtgaccagtgaatggtggaaaaaaaatgtgctgaaactcaggaaagactga

SEQ ID NO: 428599 - DNA, 2199 bp, Serratia marcescens
atgccgaccaagcgtctttcatcatccgcggccaagcagggccgcacccccgtcagcgcgttagcgatcaccgtcgctgcggcgttgggcacgctggcgatgccggctttttccgccgacgccaagccggccgccaaggaagacacgattaccgttgtgggcggtagcaataccgcccagcaggaaagcgcctgggggccggtcggcacctatgtcgccaaacgcagcgccaccggcaccaaaaccgatacgccgatcgagaagaacccgcagtctgtttccgtggtgacgcgtgaagagatggatatgcgtcagccggatacggtgaagggcgcgctggcctatgcgccgggcgtatttgccagccgcggcagctccacgacctatgatgcggtggcgatccgcggcttcccggccaccaacaccacccagtatctggatgggttgcggttgctgggcgacaactacagcgaagcgtccatcgatccttatttcctcgagcgcgccgagctgctgcgcggcccggtctcggtgctgtacggcaaaagcaacccgggtggtttggtctcgatggtcagcaagcggccaaccaccgagccgctgcgcgaaatccagttcaaaatgggcaccgataacctgttccagaccggtttcgatttcagcgacgcgctggacgatcagggtatctattcttaccgcctgaccggcctggcgaaagacagcgattcgcagcagaacatgagcaaagagaagcgctatgcgatcgcgccgtcctttagctggcgtccggatgacaaaaccaacttcacgctgttggccaacattcaaaacgatccctataccggttattacggctggctgccgaagcagggcacgctgattccgctgccgaacggcggtaagctgccgaccgatttcaacgaaggcgaagccagcaactacacctcccgcaaacagcggatgatcggctacagcttcgaacatgccttcagcgatacctgggcggtgcgccagaatctgcgctatatgcagctggaaaccgacatgaagagcatctatggcagcggcgtttctgcggcgacgccgacgacgattaatcgcgcctatgtccagtcgaaagaacacctgaacaatttctctgtggatacccaggcgcaggcgaaggtgaaaaccggcgatatcgaccacacgctgttgttcggcgtggactacatgcgcatgcgtaacgatatcaatgccgcatttggctctgcggacggtctgagcatgaccaatccgcaatacgggaatgacgcggtcaatatcaacttcccctaccattacctgaaccgtcaggaacaaaccggcctgtatgtgcaggagcaaggggagtggaaccagtggctgttgacgctgggcgggcgctatgactgggcgaagacttccgcttataaccgcgatgcgagttcgacgagccagcagaccgatcgccagttcacctggcgcggcggcctcaactacttgttcgacaacggcgtgacgccgtatttcagctacagcgaatcgtttgaaccgaatctgggcacgacgcaagggggtagcaccttcaagccgtcgatcggcaagcagtatgaagccggcgtgaaatacgtgccgaaggatcgcccaatcgtgctgaccggcgccctgtatcagctgaccaagaacaacaacctgacgccggacccgagcaatgcacagttcagcgtgcagagcggcgaaatccgttcacgcggcgtggagctggaagccaaggcggcgttgaatgccaacgtcaacctgatcgcctcctatacctataccgatgcgaagtacaccaaggacaacacctatcagggcaaaccgaccgtcgaggtgccgaaacacatggcttcgctgtgggcggattacaccttccacgaaacggcggtgagcggcctgacgctgggttccggcgtgcgttacgtcggctccagctcgagcttcaacagcgataattccgccttcaaggtgccggactacacgctggtggacgctaccattaaatacgatctggcgcgctttggcctgccgggctcgtccgtgggcgtcaacatcaacaacctgttcgacaagacctacgtgtcgagctgctaccgcgactacgcctgctactggggcgcagaacgccaggtggtcgccaccgcaaccttccgtttctaa

SEQ ID NO: 428600 - DNA, 1185 bp, Serratia marcescens
atgacgttaagtctggcacaactccgcgctgacacgccagggactgagcatgttattcattttaacaatgcaggagcaagcttaatgcctgtcccggttatacaggctgtgcatgaacactatttaaaagaaattaccctcggtgggtatgaagccgcagagagtgagcgccaatggcttagtgatatatatggttatctggcgaaaatgatccaggcaaagcctgcagatatcgcgcttgtggaaaatgctacccgggcctgggacatcgcattctactctcttcccttgcgccctggagatatcatcctgacttcgaccactgaatatgcaggtaattatataccttacctgcaacgacaaaaacgtgatggcattcagatcaacattctggaagcggatgaggagggggctgtttgtctgaagcaattacaacatgcccttggcaaccctcgggtcagattaatcagcctcccaatactgggaactcatgggggaccaatacagccggtagaaaaaatgggcgcccttgctcgtgatgctggcgtgtggtttttccttgatgcttgccagggtattggacatttacaacttgatgtccaaaaaattgggtgccacgtgttaacagcctcagggcgtaaatacctgcgagctccacgcggtacgggttttttatggatggacagcaccctgagttcgaatattgaaccggtgtggcttgatcaccatgctgcaagacttatagatgagcagagttatcatattagcgagggagcccgacgattcgaatgctgggaggcaaatatcgctgacaggcttggcctgggggctgccgcgaaatatgcgctttcgttagggcaagataaagtaacgcaaagaatttttaagttggctaagcaacttcgcttaggcctgaaatgtataacgcacgttcagttacaggataaaggagataatctatcaggaatagttacatttacagttaaaaataaaacagctgaatctgttaaggaatacctatcggctcaaccacgtcgaattaatgtctcatgttctcgatttagttcgacattcattgacatgcgaaatcgtgggctggagtcagtcgttcgtgcatccgttcatgcgtataacagtgaagatgagatagatatcttacttaatgcccttgaaaatttcaggtga

SEQ ID NO: 428601 - DNA, 1161 bp, Serratia marcescens
atgatattacgacttgtgctctttattgtattgttaacctcatcagttgctcatgctgaacagacggtgacgcctgtaaccgatctccttggccgaaccgttaacatcaaattaccggtacagcgtgtcatccttggggaagggcgccaactgtatctggtcgcaatgcttgataaagaaaatcctgccaagaggatagtggcctggcggaaagatttaatacagtcagatccggcaacatggcagcagtaccggcaacagtttccacaactggagaaaatcccgacatttggaggcagcgagcaagggaccttcgatatcgaacaggctattaatttgaaacctgacgtcatcatcatgaatatggatgcgcgaaatgccattgttgactcagggtatgaagccgcacttgccagtgcgggtatcccaattgtctatgtggattttcggtatgaccctattgcacatattcctcctacagtgaaactatttggcgagttatttggtcaatcggaacgctctgaagcctatttaaagtttcgcgatagtgagttacaacgcgtcatatccaggactttaaaattacagaagccattgccaaaggtatttttagaacgtcttggaggttattcagaagaatgctgtatgacctttggaaaggggagttttgggcgttttgttaaattagccggaggagacaatatcgcagccaatcttgctcccggttcattttttacgctaaatcctgaaaaggtgatagctgcaaatcctgatgtcgtcatactcaccagcgggaattttcaggccttcgttcctggcggaaggtggatccctctcggaccgggcgtcaatatcgaggagtccaggcgtaagctggcatggttcaccacccgtccagcttatgcagatagcactgcccgccgtaatagcgcatttttcgccatctggcatcagttctacaacagcccgtatgacgttattgccatccagcaactcgccagatggatacatccacaattattcgcggacctggcccctgatgacacattccgtcgtatgcatcaggaatttcttcccgttccgtatcaatccgggtatatggtaagcctgaaaaaagaggagaataaccatgacgttaagtctggcacaactccgcgctga

SEQ ID NO: 428602 - DNA, 1227 bp, Serratia marcescens
atgcgcgtaacgggcagtgtgacttttattgtccagtttctgtttctcgtgcaactgctttcgatgggagcgatggaaatgagcggccctttttggccgcttcatatcgaaagcatgacgtccacagaactactgagcatcgctggcacaggggtgtatatagcaccgatgcttggcgttatgctaaccagcacattctgggggcgggtaggcgacaaaacgggcaataaagtcatgatgatccgcgcactgatgggcctggcattaacgcaacttgggcttgctttcgccaatgacgtctggctggtgcttattttacgttttttacagggtacctgtgcgggttatattgcgccggcgcaggcctatggtattgcaatggtgccagcggcacagcgtacgagactttttgcctggttgcaggtgtcgaccaacgcaggctctttggcaggggcgattatcgggggagccattctcgatctactgagtttcttctggataaacgtcagcgcattcattatttgtacgctatgtgcactgattgttcttttcatattacctgctgatgctcctcatggagtctcgtctacttcagctgttcattcaaaagataagaaaaggactccaactggaatcaacaatggcgtcattgttggcttactgacggttcttggcttgttattaatgagccgcatgattacgcaaacgcctttttctctttatgtcagcacggtgttcaatgcccctaattggctaacaggattagcttatggattacaggctacgggagtgattgtatcagcgtctctctgggcaagatggtttgaagcgcacgatatagccagcacgctctaccgaatggtggggatcatcatgggatgtatcctggtaacactgctgctggctacagtaagggaaaccagctggtttatcgggctttattttttatggggaattctccttggcgcaaccacgcctgtgcttaccgcattaatttcgcgcacaacagccgaaggtatgcaagggtatatattgggggtggtccagagcatcagccagttcgcctccatcataggtattgctttggggggcgtagtccttctctggccggggttgtcagcgttgtttctttgcgttgtggtcatgtattccatgactttaatgattacgttaaaaatcagccgttcttcaagggaattcaacaagaaaataggttatgaaaaatga

SEQ ID NO: 428603 - DNA, 1158 bp, Serratia marcescens
atgttctcaggcgagaagttaagggtaacaatatgtggggccggccgtacgggccaccttgctgccattttattcagtcaaaatcccgcagttgcagtaactctttacactagccggccagaaactgtcaccgcatatcaaggcagtggcgctcagttgcatgcgatcatgcctgacgcaaatgtcataaaagcctctgccgtcaggatgacggcgtcagtcgatgaagcctgcgccgctgcagatctcattatcattactgccccaagccatgtacgcgaaagcgtgcttcaaagcatcgcgccagcgctgccccggcataagcaggtcttcgtcggagccattcccggttttggcggatttgactggctggcagaaaaagcatttggaggcttatcgaatattgttatatggggcatgaaagatgtcccccatattgcgtttgatcttgtacccggaaaaagtgtcaggatagggggggagaaatcacagttgtacgtggctgttcatcgccgggaaacacctgagaataccgatattctgcttgattatctgaggcagctttatgaggctcccgtcactctgctttctaattatctggagattacccttacaccaggaaatccaatcatgcacagttccgtcatttatggcctcatcggcccatgggggcagtggcacgggcatgctttcaatcatattccgtgttggtggagtgattgccctgaactcggtgcttatttccttgctcgctgtgatgaggaaaatcaggccttatgtaaagctgccgaactttcactgggtatcgatctcagctctgtgcagccattgcagcaggaaatagtcgaggcatacggtgactcaatttctgaccccagaacactcctcagtattttacgaacgaataaggcctatgaggggatcccgctgcctctgatccgcgaagggcgatccgacacttttatttttgacaaaaaccatcgggtctttcgggaagatattggctgcggtttaagcctgctggttttaatcggccagaggctcaaggtgccaacaccatatatagaagaaatctattactggtgttgcgagtatatgggagggaagattgcccgctccccgatccccgccgattggccaacgataaggagggaatga

SEQ ID NO: 428604 - DNA, 1014 bp, Serratia marcescens
atgatcttcagaaaagtaactgatttgattggcaatactcccgtcattcaattaccgctggcgcaatctgactctcgtctttatatcaaagtggagaagaacaatcctggcgggagcatgaaagatcgcatggccagaaatatgattgttgcggcgctgaaatcagggcggatccaaccaggtgggacgattgttgaatcatcatcaggaaatacggggatcggcctggccattgcggctatcgaatttgggcttaaatttattgcagtggtggaccatcatgccgctcaggataaaattaccatcatgcgagctctgggagcagatattcgttacgttaagggtaattatggtgaaaatgaagtcgcggttgtggaacgacagcgtatggcggctgaaattgcaggtgaaatacccggcgcagttttcatgaaccaatcagataatgcggccaatgccggtggatatgcagacctggtgcgtgaaattatctgccagattggcaaagtcgacgcgtggattggatgtgttggcactggcggttcgatgacagggatagcgcatggcctcaaggttcataatccggatacagttacgatcgcggtagagccagaaggctctatcgtatttggcaagccaggaaaaccctattatcaatcagggaccggcacaccggaaggagacaccgtcggattagttctggattacagctgcattgattatggtgaacaggtttccgacgtctgcgcttttgaaactgcacgctatcttgcgcgccgtttcgggctgcttgttggcggttctaccggtggtgcaatatataaagcgttggaatttatcaataatggaacgattcgggggaatgtggctctcgttattgcagatggcggtgaaaaatatctaaatacgatcttcaatgaggagtggctcaaagaacgggatcttctctccgagcaagtctgggagcaacttgatggctggtttgcactctcttctgttcaggagggagaataa

SEQ ID NO: 428605 - DNA, 1401 bp, Serratia marcescens
atggcttcgctgttaaatacctattgccgggaaaccacttcatggcgggtaagccctgccagagaattacccccctatgtggatcctgttattgcccgatggttagagacgtcccctgatactcttgttcgcttatcagaaatttacggttctccgctcaatattgtttggccgcataccgtggagaataatttcaatgcgatggctgctattacggcgggatttggtattgaagcgaaattttattatggcgttaaagtcaataaatcacagtcgttattacaggctgccgtcgctgccggaacaggggctgatgtatccagcctgcatgagctcaacgatgctatccgcgctggatgcagaggcaccgatttgtgtgccaccggtcctgcaaaaacaatacgttttttgcaggagttaattctgcagggggcgcggattgtcgtggattcagtcgaggaaatggacgatctcatggaagtagctaaatgctggaaaagcccgacaggccgaatcagtatactactgcgccttcgccccgcgttcagccataccagccgttttggtatgtcatccagtgaagtgagtgccgtgcttcagaaactcgagacctgtaatccattaaaaatcgatggcttccatttccatcttagtggctactcgcccgtatccagggttaacgctttttttgacacattaccgttgattgcctgcgcccgtagtcttggccattccccatgcattatcgatatcgggggagggttgcccgttcagtatgtagaggggaattgctataaggcatggctatcctcacagacgcaggaaaactatcgtactcgacgggtcccggatgctttctatccctatggtggtgatataaacgctgagcactggctcactcagtttcttggcggtgcgggccctgtgggtaaaagagtctgcgatgcattaatcgatgaaggattaacgctgtgtgtcgagcccggaagaagtctggccaaccagagcgccataagtgtttttcgtgtatgtcgagtccggcctcacggtgattccggatacgttatttttgtcgagggaagtagcttcagtgcatgcgaaacgtggtttaactctgaattcttaagcgatccgcttcatattcgtcagaattctcatgagccatctcctgctgcgaaagcatggattgcgggtcatagttgccttgacgaggacgttataactaaccgtctgattgcattcaagcacctgcctgaaccgggcgacttgctgatatttgccaataccgctggttaccaaatggatttactggaaaaccagttccaccggcacccgctccccacaagactgaccgctgtcatgagctcgcgccaaaacctcatttttaccgttgacaattaa

SEQ ID NO: 428606 - DNA, 2112 bp, Serratia marcescens
atggttatgaatcgtagaaagaagtttctggttttggctgttgtagaaattttaattccttatattgcgaacgcggaagataccgttgtcgttaccgccgacagtgctgttacacaaactgaagatgaactatccaaacaagccaacattggcttattaggaagtaaagtcattcatgatacgccattcagtatcaagggatatacctcgcgatacattgaagacaggcaggctaaatctctcggcgatgttataaaaaatgattcatccgtgcgggttacctctccttcaggcgggatcctggattctttcatgatccgtggattccctattggtgaaggcaataccggtgaagtggcactcaatggtgtctatggtgtggcaccaaattatcaattattgccgcaatatctcgaacgaatagagttactgaaggggccgggcgcggggctctatgggatgtccccgaatggaggggttggcggtgtcatcaacgcagtgactaaaagggctacagctcaggatattaaacgactcaccaccacctgggagtccaacaaccaactcggtgcatacgtcgatgtcggtaaattgtgggttaccccggacggtgaggtgtggggaatccgttttaacggtggcggtagtggtggcgatttggcactcgacaatgcctataaaaatacggcattaggcgcgcttgctctcgattatgggaacggaggggtgagggcttcccttgacctgcttgatcaatatcagcgagtcaaatccccaaatcgccccttcactgtcgctgcaggcattgatgttccggatgctcctgatggtaagacaaacatcgcacaaaaggggatgtggtggaaaatccgggatcagggggcattgctacacacagaatacgatattaatgacaacgtgaccgtttttgcgaatgcaggcggtgggcgctcgatggtttcacgcatatcagagcaaacccctaatattattaacgacaaaggggatgtcgtctcgacgattactaatttccgctttaaggtgaatcgttatactttagaagctggcgcaagaagttatttttcaaccggttccattgatcatcaggcgacgctgcaggtcagttattaccatgatcgcctcgcaatcgccagcacttgggggcaaacggtagattccaatatttattccccgtcagacgttgatgtcaccctgccttctgcgccagccagagtatcaaaaacctcctccagccagttaagtggtctcgcgcttgcagacacaatgaccgtactggatggacgtgttgacatcacgccaggcgtgcgtctccaaagggttcgtgccgataacttcgccgctaatggcgatcgttcatccacctatgatgactctgccgtcactccgatgcttggcctggtttaccgtccctggaaacccgtttcgctgtatgccaactacattgaggggctcagcaaaggtgatgttgcccctggtacggcacaaaacgcaggtcaggtgatgcgtccataccgatcgcgtcaatacgaagtgggcattaaatacgatgaggcgggaatccaaaacagtcttgctcttttccagatcacgaagccgagtggtgcaatcgacagtagcaatacattcaattccaatagcgagcagcggaaccgaggaattgaactgaatatctcccataaacctcttgataatttgcgaatgtcaggaagcctttccctgattgatgctgagctcaccaaatctccctccaccggcgttcgtggtaacaaacccgttggcgtctccccggtacaagcaaacgcgggtgtggaatatgacctccctgtcctacggggattgtccctgaacagtcatgttaattacagcgggaagcagtacgtcaatcaggcgaatacgcagtctatccgttcttggacaacggtagatatgggggctgcctataaaacgcgtgtgtacggtacaccggcaactttccgctttgatgttcagaacgtgttagatcgccattattgggctggcgtggcgtcatacagcaccattgcgcagggagcgccacgcaccttccttgcatcggtaaccattgatttctga

SEQ ID NO: 428607 - DNA, 1860 bp, Serratia marcescens
atgatggagctggcagaggagaatggctttgcgagacaggcactttcaacacaacctgatttttcggctcgtaacgcactctctcgaataattcgttgtcttttttcggaaaaactacttgatgaaaagaaacttgagattttcgatgataaaagtagggttaattaccgcctctctgatggagaatatacccttcggctaaatctaacggcggtttttccggcgaatagtgttattaatcgtggtgatattatcctcgaggcagccgacgggagcaaaacaccgattctgtcacatgaacaactgatcgacgtcctgaaaaatgaatttagtttcagcccttcggctgagggtatagctaaattcaataaagatgttgctaacagtatccataatgaccggctggccagagcgcatcggtcaaaatggcggaatagcattactaaagacatggagaaagagggggagtcttattttgttaaatggataagacgccatcacagtttgagagagggggcgactctcctggaccagtggggatctctggaaggccacccttattatcctacctggaagtcccggcctggattaaacgatgaagacatcgaggccctgtccgccgaatttggagcccgagtcattcttcgcatgggagccatacaggccgacatggtttattgcgagaagatgcctcatgttcaggatacccatcaatggctgtcatcggcctttcctggcgtctggagtgaatggtgcgcctggctcgaaagtcaacatcacaaccctcaagaatggctgcccattccccttcacccctggcatcttgaacattgggtcttgggtcatttcgccaaagaaatagacgaaggcattcttttgccatttggtcccgaaattgaaaccgcaccctcaatgtcgttcagaactatgcttccgacggccccggcattgccttttataaaattgcccgttgccatatggatgaccagtgagatgcgtagcctccaggctaaatccattcacatggggccgcgtattagtacgattattgaggatatcctggatgtggagcagggttttgacggcaaactcgactttttccgggaagatgccgcatggcacttccgtcataaagatcgtatggatgacgctgagggtaagtttctctccgtcgtgtttcgtagtacggatgcgtggaaaagaaacgataattcattggctatcacggttgcatcgctatttaccgccctcccgcataaatccgatccccttatcagtgagctgattgccttgtcaggatacacgcctgagacatggtttcgtcattacacccggatcatactgaaaccggtcttggctatgtatttgatttatggcgtggcgcttgaagcacaccaacaaaatacgcaggttttatttgatgattccggccgcgctgtggccatgcttatccgtgacttcggcgatggccgcagctgggccccggcactccgtaagcaaggttatgaactcaagccttatatctggcctggcattttacccacggtgtttgaagatgatattgaacccgtcagaaccttcgtcgtggatgcttgccttgtcagtcatttacatgaaatcgccctttgcctgactcacttctattgcatccaagataaccgtatgtggaaagttattggcgaagaacttgaccgtgtatttaaagaacttcacccaaggctagatgacagcttctggcatcaggaacgcgagcattttatgaaccatccctggtatacccgctcattaatgagcatgcatttacaacaatatactgattatcgacttcagcacggccttaataatcctttagctgattga

SEQ ID NO: 428608 - DNA, 825 bp, Serratia marcescens
atgagtatagagattagctatttgtttatccctgctaataaagaggtaatgttttcgaaggcgttggccagtggtaccgatgcgatcattattgatcttgaagatgctgttcatccgaacgaaaagccccttgggcgtgataacgttctgagttggctacataaaattaataagagtagcgttaaaaccggaatatatatccggataaatcatccaaacgacaaggaatttgatgacgacatcagtttactcaattcattaaataagccattgattacgggtgtgatggtgccaaaactggaatgcagtgaaacgataaaccatttgaagtcgaggcttaatgccggaatatcaaggctaccctttatcggcatcatagaaacggcgcgaggattgtatcactgtgagagtatagcctgtagcggtgtggtcagattagcgttcggctctttagattattcgcacgatattaattgtctgcaaacacctgaggcacttctctatgcgagaagtcgtatcgtggtggcttcacggcttgccaacctaccgccccctattgattgcgtcacccccgaattttgtacgcccgaaacgttgttaacggattgctgccatgcccgatctcttggattcagtgcgaaattatgtattcatccggatcaagtcgatgtggttgccaaagcatttagccctactgaggaacaaattaaatgggctgaagaagtgttaaaacagtccagagagagttatgcattccagatcggaggttcgatggtagatttacctttaataaaacaggcggcccgtttaatggacaataaataa

SEQ ID NO: 428609 - DNA, 615 bp, Serratia marcescens
atgcagactgctatgcaaagcaatccccccgaaattacactatcagcactgagccatctggccttttgtgctcttgttgggctgggtattgctcgccaggaaggcgttgccagtacgccgttgactgaacatctgtttttggttcgttggttggctacggctcaaaaacaaaagcggtttccaaaatgtgttgccattgatattgcactcctgcttgagcagggacggagaaaaggccccgccagcaagctgcgtgaaaaactgcaatacctgtggcgatcctgcactgaccccctcatcacccaatcggacttatttcgactcacctatgttaccgagaaactgagagagcaaggttggaaaaacttcatcatggacagccacatctggaaagatgaacgcttttctgcatcttctgcacccaatgagttttacacggaagaaaatacgttaagagcagcgttctccgataatggtgagttaaccaatactttagagttacgcatcattggagatgttgaatcactcttggcgctaatggcccaatcagctatttctgcaaagctgattgagagaggcgagctcttccatcgggtcgtgctgtttccccaataa

SEQ ID NO: 428610 - DNA, 216 bp, Serratia marcescens
atgccggtaattaaagtacgtgaaaacgagccatttgacgttgctctgcgtcgtttcaaacgctcttgcgaaaaagcgggtgttttagctgaagttcgtcgtcgtgagttttatgaaaaaccaactaccgaacgtaaacgcgctaaagcttctgctgtgaaacgtcacgcgaagaaactggctcgcgaaaacgcacgccgcactcgtctgtattaa

SEQ ID NO: 428611 - DNA, 11475 bp, Serratia marcescens
atgaacaaacaaactgatgtgaagagtggggaattccgttcgggtgctcaggccgcggcggagaaagtcgaactgcatgaaatgactatcgcccagcgtgaactctggctgggggaaaacatttccaaagagttgtcgttcaatatctggggctatgggcaggttgacgggcctctcgacgttaagctgctgcggcaagccatcgatgcaatcgtggaagaaacgccggctctgcaagcgcattttgtggaaaaagacggtgagctttatcaataccgcgcgccacgcacccatgagccgctgttcacactcgatctcagtaaggaacccgatcccctgcaggcggccagacgctggatggtggcggatgcggcgctgccgcgccgcgccacgggagaggaaccttttagtttttatgtgattacgctcgctccgcagcgctatgtcctctatcggcgtttccaccatatgatcaccgacggccgcagtgccgaggaagtgatgcggcgcatcgcggcttactataacgcgctggcgtccggcggcgtcatccctgaattcgccaactgcaatttctctctgctttatgaaaacgacatcaaataccgcgactcctcacgcttttcttccgatcaggctttttggcgggaatatactgccgctgcgccgcagagtttgtcgcgtagagccatattgaccccggacgccgcgatgaaccgcaacacgcagctgctggaaaaagaggcattggatcagctgcagcaacaagccgacaatatcggcgtacaccgcgcacatatattggccgccgccgtagcattatgtttctacagcctgaccggcagtgaatatcttaatttcagcatgccggtgaccgggacgagagaacgaaacagtattggtatgacctctaacgttgtccctttgattatcaaggttgaaccccagctgagcctggccgaatttatccaaaaggttgcggccgaaatagcaaaagtggttcgccatcaattatatcgtggggaggacattcggcgtgacaatggcgcgacggattccgcctggtttggcccttcaattaacattgtttctttcgaccacggcgatcctttctggggatgccgcacccgttggtattatggcgggaatattccgtccggcgatctacagattatgctgtatgaagaccagcaggcgaatgagctggacgtcactttttctgacgccgcttatgcaaattcattaggcgatctggatgttttgcagcgccgtttccagtttattttacgggcgctaaacgcatcaacggcggggacgatcgaggcgttggatcggcaagtggcggcgctggcggatgccgaggccggcggcagcttttacaccaaccgtcggcaaccgcctgccggcggcatcattcgttgggatcgcccggctgaggcgctgcagcgcctggtgagctcgctgagccatggcgcgggatgcgcggcgaagatactgctggcggagcgcgtgttgggcgtgacggcgctgcaggcggtgagcgatgagcggcaggccgagcccggtaccctgctgcacgtcgaggccgacggctgggtgattgccgcgaaccccggcgtggtgcgcgtcgggccgttcttgcgtgccgacggatcggttcagccaggcgatgcgctggcgcaggcctgcggcctgtctgtcggctcggtcttgccgacgattaacgctgccgaagcctcgctgttaggcgcggcgtatggcgccagcgccgatagcgccgctttttggcaaccgcgcctgacgcgttattatccggcgccgttcccgccggggcctggccgccaggcggagcttcccgcacgctggcaggcgacggcctggcagcgcctggaaaaaattgccggtgagcaggtgctggcggcagcaaccctttatctggcgcgcatgtgcaatgaaaccgattttcagctggggtggatcaccccggacgatcggaattggggacgttgggctcacctgggcgcgcgcgtgctgccgctgcaggtctctgttgatcacaccagcaatttccagcaggcgttggccgcgctggaacaggaatatagccagctgcgcgctcatgccgattatcatcccgcgttgctgacgcgcgatgcggacctgcgagcgcctcagacttggccgacggcggtatcgatcgtcagccggcgctcggcgcaggggttgcagcctgaagacgagggggttgccgccatcatggcttccggctcgcgcgcggtattgcaaatctgcaaggctgacggcgctttccgttgggtctacgacgccgcctccgtggctgacgaacagatattgcgtgcgacgcaacatctgctgatgctgctcaacgatgcggtgagggcgggttctcatcgtcgcaccgtcggcgaactcagtctggtttccgaggaagagcgcgcgcagttgctgcagggcctcaaccataccgtcgcttcacactcgccggcggtttgtctgcaccggttgttcgaagcacaggtcagacggacgccggaggcgatcgcggtgacgtatggcgatgacagcctgacctacgcggaattgaatacccaggcgaaccgttgggcccatcggctggtacagcttggcgtgcagccggacagcctggtggcgctgtgtgccgggcgcgggctgccgatgctggtcgggctgctggggatcctcaaagccggcggcgcctatgtgccgctggatcccgcttatagcggcgagcggctacagtacatcctggcggactcagcgccggtactgctgttggcggatgagctcggccgacaagcgctgggtgactgcgaggtgccggtgctggcgctggaacagccactgacgggggaaagcgacgatctgcaggacgtcggggtgcgcccggcgcacctggcgtatgtgatttatacctccggctcgaccggcaaacccaaaggggtgatggtggagcaccggcaggtcgcgcggttgttcagcgcgacgaacgcctggttcaacttcagcgccgccgacaggtggtgcctgttccactcattcgccttcgacttctccgtctgggagatctggggcgcctggctgtatggcggccagctgttcatcgtaccgcaggcgatcgcccgctcggcgccggatttttatcatttcgtctgccgcagcggcatcacggtattgaaccagacgccgagcgccttcaaagcctttatccaggctcaggcgcacagcgaagcgcgccagcagctacgcgagatcgtgtttggtggcgaaatgctgaagccttccgatcttgcgccgtggtttgctcgtccagagaaccggcagacgcggttgatcaacatgtacggtatcaccgagaccacggtgcatgtgacttatcggccgctgtcggcgcaggacacggcgatcaccaccagtccgatcggcagccgcatcccggatttgcgcttgtatctgctgggcgccgacggcgaaccggtgccgatgggggcgatcggcgaactgtacgtcggcggcgaaggggtggcgcggggttacctgaaccggcccgaattgacggcggaacgctttctcgatgatcctttcaaccgggcgccgggtgcgcgcatgtatcgtaccggcgatctggcgcgctatctgccgggtggcgatatcgaatacctggggcgcaatgaccagcaggtaaaaatccgcggtttccgtatcgaatgcggcgaggtggaggcacaactgagtaccgatccgcgcgtgcgcagcgtagccgtggacgcgattggcgatggcgacgggggcaagcgactggtggcgtgggtggttccggcaccggaagccgaacgcgctacgctggcgaccgggctgcgccagcatctgcaggcgcggctaccggattatatggtaccggtggcttacgtttggctggaggcgttgccgctgaccggcaacggcaaattggacaagcgggctctgccggtgccgcaggtcgacgcctatgtgcgtgaagcctatgcgccgccgcagggcgaggcggaaaacctgctggcggcaatctggcgtgagctgctgggcgtagagcgcgtcggtcgctatgaccacttcttcgaactgggcgggcattcgctgatggcggtgcgcctggctaaccgcgtgcaacaggccggatggcagttaccgttgcaggcgctgttcgccagcccggtactgcacgtgctggcgcaggcgctggaagttgcgccggctcaggaaccgctgccgatactgccggtggcgcgcgacggcgaattgcccctgtcgttcgcccagcaacgcctgtggttcctgacccagttggaggggatgagcgaaacctaccatatccccctggcgctgcggttgcacggccggttggaccggcaggcgctgcaacatagtctggatgcgctctatgcgcgtcacgaatcgctgcgtagccggttcatcacccgggaagatcggccacaggtgcagattttgccggcaaacgggctgccgcttgcgttccacgatctgcgacgtcaccccgcgcaagccgacacgctgtgccgtcaggcggccactcaaccgttcgatttgacgcaggggccgctggtgcgcgccgcgctgatccgcctggcggatgaggagcacctgttcctgctcacctgtcatcacatcgtctccgacggttggtcgaccggcattctgctgcgtgaactgggggcgttgtacggcgctttccgtcgcggcgatgccgatccgctgccgctgccgacgctgcaatacccggattacgccgcctggcagcgtcgctatctgacgccggagcggctggcggcgcaggcgcaatactggcgcgaaacgctgagcgatgcgccggcgctgctgacgctgccgaccgaccgaccgcgtccgacggtgcagtctttcagcggcggggaggtgccgatcgcgatcgacgccgagctgacgcaggcgctgcggcagttcagccgacagcatggcggcacgctgttcatgacggtgctggcggcctggagcctggtgctggcgcgcatggccgggcagcaggagctggtgatcggcacgccggaggccaaccgtggccggctggaaaccgaatcgctggtcggcttcttcgtcagcacgctggcgctgcgcatcgatcttcgcgacgatccggatctgccgacgctgatcgcgcggatccgccacacggtgctggcggcacgggaaaatcgcgatctgccgttcgagcaggtggtggagctggtcaatccgccgcgccacctgggctataccccgctgttccaggtgatgctggcctggcaggacggctcggtgcgcgatatctcgctgcctgggctgcaggccgagagtgccgagttgggctatcagatcgccaagtatgatttgacgctcgatctggcggagcgcgacgagcaaatcagcggtacgctgaacttcgccaccgcgctgttcgaccgcgctaccgccgagcgttacggcgtttacctggtgcaggtgttgcgggcgatggcgacaaatgctacgcagcctgcgtcgcatctcgagctgctgccggctgccgagcgcgaactgttgttgtacggctggaaccgaaccgcggaagtttatccggcgcagagcagtgcccacgtcctgtttgaacagtgggcgcagcgcacgccggacgccgttgcggtggtgaacgatcgggacagcctgagctatgcccaattgaacgcccacgccaaccaactggcgcaccaactcatcgcacagggcgtgcgcccgggcgatcgcgtggccacgtcgctcgaacgcagcgtttctctggtcatcgcccagttggcgatcctcaaggcgggggccgcttatgtgccgctcgatccgcacctgcccgttgcgcggcaggcgtggatcatcggcgacagcggggcgtcgttgatcctgtgcgatcgcgatctcgaccgcgagatagccggcgagatcgcatgcctgcgtatcgatcggctgcggcagaatccgacccacgatccggcggtgcctcgcgccggcgacgcaccggcctacgtcatgtatacctcgggctcgaccggtacgcctaaaggcgtcatggtgacgcatcaaggcatcctccggctggcgatcaacaaccgttttgcgtcgtttgaacgcggcgatcgcttcgctttcgccgccaatccggcgtttgacgccagcacgctggaaatgtggggagccctgttgaatggcgccagtctggcaatcattgcgccggaagtgttgacggaagccgaggcgttggcggcggcgctggtgcggcaagggattaacgtcttgttcctgaccacctcgttgtttaaccaatatgtccatagcatcgccgcgacgctggcgcagttgaaatatctgctgagcggcggtgaagcggcggatccgcacgcctttgcccgcatgctgaaagaggctgggccggtgcggctgatcaacggttatgggccgaccgagtgtacggtgtttgccacgacggccacgatcgagcgggtggatccctggcagcgtttgcctatcgggcggccgatcggcaatacccggatttatctgctggatgcgcacgggcaaccggtaccgctcggcgcgaccggcgagatctacatcgccggccccggggtggcgctgggttatctcaaccgcgcagagttaacggcagagcgattcctggcagatccgtttaacccaggcgagcggatgtaccgcaccggcgatctggcgcgctatctgccggacggcaatatcgactacctggggcgcaacgatcggcaggtgaaaattcgtggcttccgcatcgaatgcggtgagatcgaggcgcgagtggccggtcacccggcggtgcgcgaagcggtggtggatgtcctcggcgaagcggacactaagcggttggtggcctgggtggtgccggaggctgacgcggatcgccagacgttggcggtgacgctgcgacagtatctggcggggatgttgccggagtttatgctgccggcggcctgggtggcgctggatacgctaccgctgacgccgaacggcaaactggatcggcgcgcgctgcctgagccgcaggaggacgcctacgtgcgtgaggtttacgccgaacctgaaggcgaactggaaacgctgctggcggggatctggcgcgagctgctgggccttgagcgggtcgggcgccacgataacttcttcgaattgggcggccactcgctgctggcggtgaagttgatggcgcagctgcgccgtgtcgggctgagcgccggggtgcaaacgctgttcaccgcgccgacgctgtcaacgctggcgcagacgttggtcacgcagcaagaagtgagcgtgccggccaacggtatcctaccgggctgcgtagccattacgccggagatgttgccgctggcgacgctgagccagccggagatcgacgcggtggtggcgcaggtgccgggcggcgtggccaacgtacaggacatctacgccttgtcgccgctgcaggaggggattttgttccaccatctgctggcggaacggggcgacccgtaccagctgtccgcggtgctgcgtttcgacagccgtgcgcgcctggacgcctggctggcggcgatgcagcaggtgatcgatcgccatgacattctgcgcaccgcgttcatcacgcagggcgtgtcatcgccggtgcaggtggtgtggcgcaaggccgagttgtcgctgcgagaactgcggctcaatccggcggagggcgagatcggttcgcggctgacggcgttgtttgatccgcgccgcgtgcggcctgacctgacgcgcgcaccgttgctgagctttgtcgccgcacagggggaagaaggcagttggtgcgtgctccagcagtggcatcacctgatcggcgaccactcgaccctggcggtgatgcaggaggagatcaacctgatcctggccgggcgcggggacgaactggccaaggcgccgccgttccgcaacgcggtggcgcaggcaaggctcggcgtcagcaaggccgaacacgaacagttcttccgcactatgctggcggatatcgatgaaccgtcgttgccgttcggcctgagcgacgtgcatggcgaagggcgggatatctcgacggcgcacctggccttaccgcatgcgctcaaccaacagctgcggcggcaggcgcggcggctgggcgtcagcctggccagcctgtgccacctggcctgggcgcaggtgttggcgcgcgctaccggccgcgatgaggtggtgttcggcaccgtattgttgggccgcatgcaggccggagacggggcggaacgggcgctcggattgtttatcaatactctgccgctacggctggatgtcaacgaggtcggcgcggaatcggcggtgttgcaggcgcacatccggctgagcgggctgctggcccatgagcatgcgccgctggcgttggcgcagcgctgcagcggcgttgccgcgggcacgccgctgttcagtgccctgctgaactaccggcataacagcggcgaggacaccgcattgccgaccggcgtgacgctgctcgatagccaggaacgcaccaactatccgttcgtgctgtcggtcgaggatggaggtgattcgctgggcctgacggcgcaggtcaggcagccgattgaagcgcagcgcgtgtgcggctatatggcgcaggcgttgagcgcattggcgcaggcattggagcaggcgcctcagacaccggtctgcgaactggaggtgatgccggatgaagagtatgcgctgcagctgtgccgctggaatcatacggcggaagcttacccggcggatacctgcgtgcacgaactgtttgaacagcaggcgcggcagacgccgcaggccatcgctttgattcaggatgcgcaacggctcagctacgcacagttgaatgcgcgcgccaaccggttggcgcatcggctgattgagcgcggcgtacaaccgggcgaccgggtcgcggtgcggctggcgcgcagcatcgaactggtctgcgcccaattggcggtaatcaaggccggggcggcgtatgtccctatcgatccgcaactgccggccgcgcgtcaggcgtggatcgccgatgacagcggcgcctgcctgatgctgacggacgccgtcggcgacgaaggcattccgcagctgacggtcgaggatcgcgaagctgaaggtcatgtcggtaacccggcgttgcgcgtgtcgagcggcgcgacggcctacatcatgtatacctccggctcgaccggtacgccgaaaggcgtcatgacgccgcaccaggggatcacgcgtctggtgcgcaacaaccgctacgccgcctttgacgccgacgaccgcatcgcctttgccgccaacccggcgtttgatgccagcacgatggaggtttgggccgctctgttgaatggcggtgcgctggtggtgatcgcgccggaagtgatgatggaggccgagcgtctggcggccgaactgcaacgccatcgcatcaccacgctgttcttgaccaccgcgctgttcaatcagtatgtgcacagcatcagcggcgcactggcgcagttgaaatatctgattagcggaggggagaaagaggatccgggcgcttatgcgcggctgttgcaagagcgggggccggtgtacctgatccatgcctatgggccgacggagaccaccacctttgcgacaacggcacgtatcgagcgggctgaaggggaggcgcgcttgccgattgggaaaccgatcggcaatacccgcgcttacttgctggacgcccgcgggcgcccggtgccgatgggggcggtgggggaattgcacatcggcggcgtgggggtggcgttgggctacctgaaccgaccggaactgacggcacagcgcttcctgagcgatccgttcaatccggtcggtggcggccgcatgtatcgcaccggcgatctggcgcgttatttgccggacggcagtcttgaataccaggggcgatgcgatcagcagatcaagctgcgcgggttccgcatcgaaccgggcgagattgaggtgcagctggcggcgagcccgtgggtgcgggaagcggtggtgcaggtttgttcgacggaacatcatccgcgcctggtcgcctggatcgtaccgacggccgacgctgaccgcagcgtgttgcagggacagctacgggcctatctgagcgaacgtttgccggagtacatggtgccgtcggcttatgtctggctggatgcgctgccgttgaccgccaacggcaagctggatcggcgcgccttgccggagccggagcgcgcggcagtcggcactcgggagtatgcggcgcctcagggggagaccgaaacgacgctggcgcgggtatggtgtgagctgctcgagattggccagatagggcgtcacgacaatttcttcgagctcggtggccattcgctgctggcggtgcgtctttccagccagctgcgtcagcaaggcatcaccttgccggtacaggcgatcttcaaccatccgatattggccgagctggccgagcggatagatcgtcgcaccgccgaggctccgctgcgtaaagcggtgccggctcgcagcagcggcagccggccgccgctgttcttcgtcccgaccggctttggcgaccactcctacgtgtttgaattggccaaggagatcgacgagaccttcccggtctacgccgtgccgtggccggcggtggaggagaagccggccaccatgtccgatatggccgccagcgccgtggcgttgattcgcgaagtgcagccgcaggggccataccatctggcggggtactcttccggcggggtgttggcctatgccatcgccgagcagctgcaatcggccggggaagcggtcgctttcctggggttgatcgacacgttgcggccggtggcggcgatgcacagcccggtccagctgttgctgaactgggtggagtcaacgcaggaaaggccggatccgcagttctgtcagcagttggccgagctgccgttgccggaggcgattgcggccgtgcaacgcgccgggatcaagactcagcgtgaggaagtggccgacgaggcggcgctctggcagcagcggcaccactacgccaaactggtggaagcgaccttggtgcagcccgcatcgctgaaaatccatctgttcaaggcgaagcaggagcaggtttccgtcaattcgcagaacgcacagttccaggcgtattggcagaagatcaagcaggcgggatattgccgcgaagacgcttccgcgttgggatgggataagctgctgccgccggcgaccgtccgcgtcagccaggtcaacggcgaccatgtgtcgatgatggagcatccggttcatcggcgtgagctggggcaacacttcaatctggcgttgcgcgagctcggacaggcgtaa

SEQ ID NO: 428612 - DNA, 1875 bp, Serratia marcescens
atgagtaattcgaactctatgcgtgcttatattgtttctcacactctcaatttattcccaagttcggtgaggttggagctactgtcggatactaaattgtgcgaagagctagggttacaaacagatgcgactattagttttggtgataaagagtatgcctttgctagaagcgctctttttaaggctattcgcagtgtttttgataatatcgaggaggaattttcattggaagatactaatcataatgtgtggttattacgtaatcttcccggtgaacgttcaggcttttctctaaccaatggggatgtgcagattgttaatgatagtttttggccacttttaggagatatcgacagacggttaagcatatttgaaacagttgcgaaaaatcgttggctctcgaaagaggacattgaatactggagagctgagctttcagcggaggctgttagtgacgatgatgtacctgacttgttacttgatttggatttatctccaatccgcattaagaagttactaaagagtgagtttcaaagaccgccaaataacgtatcgacactggttccgaatgacattcgttattatgaacgacttgtcggaaagtatcgtggcagtaaaaacattgaggacttttgtaataatgagtttaaccaatatttcgacagtagaatagaaaatggactgactgataatgatctattggtttgtatgcataaatcaatatcaagagttgtttcaacagggagcgttgacgaagctttgtatcaatctctcgcaaagagggcaattgaaacctgtcatccaatacttttggtttcttgctttgaaattggggttttgaaattttccaattcattagatactactcttaaggctcttttcgagagtatttcatctgtaaaaatactggaaaatctacgtcttttttgctctatgactgtttttgttgatggagagctggcgcgactacagatattcagagataagccaccattctacaggcgcctcgcttcttttgcccagtcagccttaattgttgaagctgcattggaagaaagtgttgcttttgacaaagtagaacaatgggcctctcaacagagggggctttatttttactgtcaaagttttattgatctaatagaagaaccaagatggttaccaacatatttaacagcagaacaatttattaatgagttatatggtcgggtaaatatcgcatgtcaaaatgctgctaaaaatgaggcgattaagtgtttgcaagaagagctaatgagtagttcaaaattcaatatgaattggtttttacctgggccattggaaggtaactctgttccagctgaagttcccggtgaaatatcgaatttgctggctgagcaagttagttgtgaggtttcattagcatcgtttagagttttgatgaattctgcacttttctggaaaattgatgagaaacatttagagcgtacagtttcactattagaaagtgcacagcacaaattagccgaagcaaacgacaaggactcagtttatcaggtgcttaatggtctggcacaagttgcttgtatgactcgaagtgaaaaaattgcttcatcagttatgatcttaagccgactatatcgtgattatattgatgtagattctgagccagaaaactatctttcgctaggtttagttgcagctgctgcctttgaggataaaaatgactgggctgaatttatagggcaatggtgcacagaattggcatatctaccaattaacgaagacgctatatttagaatagaagtaatgctcgaaaggctttgtatcctagagccttatttgtatcacacttgttcaaaagccctagacatatttaagatgctgagtagaaagtaa

SEQ ID NO: 428613 - DNA, 1518 bp, Serratia marcescens
atgctaacccatctatttgattgctttgtgaaaatagttattccacattcgtttatgcagtggttgtttgaagagaagcagaaagttgcttttcaccagccgagccaaattgaaaaggcaaaatattttgagcggttggtatctgatggaagaatttccgtttttcatcctaaaaagatcaacaatccggagttggtgctagatgtaggtgaagagcttgcatatatgcttgaagaggcgcatacaagtcctacaaatgagcagcaggcattggtggtgtgttcctgccctgtgtataaggtcggtggctctttcaggcaggaggaagctgacctttcttcattccatcacagtcttatttcatgttcacaattaatcaaaaagctcgaagacctggctgtaatcactgaagctcagcgtgttaaagccttaaattacctgcaccaacacgaaaaagagtggcctactgatttagaggtagctcgcggagcaaaattatttctagattcactgtcaattacctatttggttaccgttgatatgctcgacaagctcagcgaggccggattcgaagtgtatgtattcaagggagagcgtgataggtatagatcgttgataaactacgattcaaccatcgagctggcagattcgaaaatagaaaacataaggaagctattttctagtgggcttacatctgggaaagtgatccttgccgaaatgccgttaaataaagaccaagtggcagcttctaagaacaattatgccaagccaacagaagagctttttgagacgcttaaaatgtgcgatgcagctttgatagatgatcgatttatgaataagcatcaaaatattacatttgatgaaaaaacagtaccaatttatacatcattagattttattgagacgctacaccataagggacttatctctcaagaacagaagcttgaagcaaggacattacttcgggagtttggattagcgtttgttggaatttccgacgaagagcttgaatatcacctaaatcactcagtaatgtcagatggtgagtttaagccaactaaacagctaagaatgataagagaaaatctgtttttgatcaggattagtggtttggttcaactcccaagagatgcccagtggctccatgaaacgatgaagacaattgcaaaagcaataagagctcagtggtccgacgatattcttcccgaagtaagccgcgctaaatcctgctggttgtatgagcttatggggtatagggaatgggcccaatctcataaaataaggggaaatgaagggatggcctatttaggtgaggctttgtcgattcattctgtactgatgtcgccggagcaattgtcagacaagcaaaagaatagctataaagcatggttggatgagtttgttttagggcccttgaaggacaatgatccgtggagttttaagtctgtaattgattcgatgaagcagcaaattaaaaatatcgctagtaatccactggagatagatcaggatgagtaa

SEQ ID NO: 428614 - DNA, 1944 bp, Serratia marcescens; identical to SEQ ID NO: 332988

SEQ ID NO: 428615 - DNA, 969 bp, Serratia marcescens; identical to SEQ ID NO: 332989

SEQ ID NO: 428616 - DNA, 816 bp, Serratia marcescens
atgtgccagaaggacggcctggctgaattgttgatttctgcattagcagaagcgtcaaacaatctgccacaattaaccacgttaaagataacgacgttaaacttcactctttcctgcaacgctggtttgcctttctggacagatcgcttattgggggccctcatgcatgacgccaccagccagttttcccatttcaggcttgctatcgcgcccggagtgccatcctcttgcctcacaacgcttcttgccctacagcgcgcggaggaaccagaagtcaccatcacgttctttgagacctcagccgatgatctgttgacgggccttgaggaaggccgctacgacgctggaatgacgcttcggaacgctggtgctccggccgtgaaaagccaaccgctctgggtggagaacgtggctgttgcagtgccgctggggtcccccttagttgcccaggcgaagatcacgcttgccgagcttctggactatccggtgtttcgctggccggcggaggcttgcctactgctggatcagcgactgtcctttcttccgttgagccagcagagcattcagcacgtgacttcgttcgagatgatggcgctttgggtgaccgctggctacggagtggggctctccgcgcaatcgcgcattgagcgtgcccatgcgtgggggatcactatgcgaccgctttcagacggcccctacgagatcgtgacatatctgcagcggccccacggacgagccaatgttgtttctgagcggttcgagcacagggcaatgttggttgccagggacagggcggcttgctcgaataccccatag

SEQ ID NO: 428617 - DNA, 891 bp, Serratia marcescens
atggagctgcgccatcttcgctgcttcgtagttcttgctgaggagctacatttcacgcgggcggctgagcgcctgcatatcgaacaaccaccgctatcacgagccatcaaggaacttgaggacgagttgggcgtagtgctcttcgaccgaaaccgacgaggaacagttctaacggcggcgggcgcggtcttcttgcaagatgttcgccgtctattcacagtgctggaacaggctcgtgaaaatgccaaggctgtggcatcgggcttgcgcggtagcctgcgcatcgctgtatcagatggggctatcgatccacggctgtcggcatttctggctcgttgccgcgccgaggagccggagatcgaaatacgcttgtcagaagtgcctctggcagagcaagtgcgtggcttgcgttcgggcgacttcatgatcgggttcgcgcacacgggcgatgtcggcgacggtatcgctgccgaaccaatctggcacgacccgctggtgattgcggtgccagctcgtcactcattgctcacctacaaggaggtgccacttcaagaacttcaaggccatccacttgtcctgtgcgacccgcaggtatgcgagggctattgccgcgaactcaagcggctgctcaacacgttggagcacaagctgaatgttgtcgaggaagtgtcctcgctggacatgatgctcacgttggtcggcgccggctacggcatcggcttcatgacggcgaccaagattcccatctcccaacggccggatgtggtgatccgccccttggcgatggattctgccgtgatcaccacctacctgcttcggcccgacggcggcaatttatcggcttcggtggagcgatttatcgttcgccttcgcgactcttcggacggttga

SEQ ID NO: 428618 - DNA, 279 bp, Serratia marcescens; identical to SEQ ID NO: 337736

SEQ ID NO: 428619 - DNA, 1215 bp, Serratia marcescens
atgactccgaccggtaaccgaatcgtgactttcgagaagcccttggaaatgaaggtcaacaccttcaaatttccagagctgataacccctcaagggaaaagcgcaccccatggcgctatcctcaaaatagttaccacaaatatctgtggcagcgaccttcacatttatcgcggttcgtttgctgttcccaagggaatgaccatgggccatgaaatgaccggcgaagtgatcgaagtgggatcagacgtcgaagtcgtgaagaagggcgacatcgtttccgttcccttcaatgtggggtgtgggcgttgctacaactgcaagcatatgcgctccgatgtatgcgagaacaccaaccccgaaatcgactgcggagcctacgggttcaacctcggtggctggacgggggggcaaggtgattatctcttcgtaccgtatgcggatttcaatctccttcgcttccctgacaaggatgccgccatggaaaaaatccgcgacctgacccttctctctgacgtattacccacagctttccatgggttcgctggcccagactggccagccgcgccggcctacgtcgtcggcgaaaacatcctgatcttcggtgccgggccggtcggcagagcgggtgccgcctgcgccagacttctgggtgcaggcgccatcatcgttgccgattacattcaagagcggctggaccttctcaagccacacggcgtggaaaccatcaacctttccgacggcgtgccgatcgaggagcatctcgaacgcattaccgggcacagggaggtggatcgcgtcatcgactatgttggtgtggactgccgcgggtttggcgcggaggctgacaagatcgtggagagcgctgttaccaacgcaatgctcaaatatgtccgcttcggcggaatgaccagtacggtcggtgtgtactgcgcaaacccgatctcgaaagacccgaaagccaagaaaggccatatggatctggaatggtccaacgcctggatcaagtcgccgcgaatgtcggctggtcaatctccgacggccaactacaaccacgcgttaatgcgggcgatactgaacgatcgcatgccttacctttcgccgatgatgaacactaagttcatcaagctcgaagacgcgcccgccgcgtacaaagagttcgacgcgggttctgcatacaagtacgtcatcgacccgcatggttcagtgcggcattaa

SEQ ID NO: 428620 - DNA, 816 bp, Serratia marcescens
atgggtgtcgagatcgtgcgtcatggccgacgctatgacggcctcacttctgaagggatgcgcgtactgtcttgggctcagcagatgtatgacgactgcaaagggctggagcgagaactctccgcactacggcgaggtatagaggggcaattccggctagggatactcccaggaactgccggtgtagcgcccacattaagcatcgcccttgctgaaaaaacacccttacttcaacaatcagttctggtttccggcgcttcttccctgctacaggcgattcgagaaaacaatttggatatcgcactcatgcatttggaggatatcccaggggaagacttcgatactcaccttctgtaccgtgaacgcattttcctttttcacgccgcgagaacacagcaaccccgaagcacaacgtgggaccatgttctcaatagacaactctgcgtgctgaactcggcagtacctgaacccattcaagataggctgatgcaatgtaccgcgcagactattcgcactgattcaattgacgtgctatcggcacacgtggcgacaggaaaatattcggcagttcttccgcaatctctcgccggccaactcgcgcacattccaaatctccacgcaatcgcaatcaatggaccaatgtcgcactcaaatgtcggattcgttgctgggaaaaatgcgttcgaggcaccgtcatcgcgtgcattgctcgaaatggtgcacacccccgaactcgccgccactcttcaatccgttatatcgatccatcgtcggttccagcccaaagcagactcatctcaaagccccctgaaatag

SEQ ID NO: 428621 - DNA, 261 bp, Serratia marcescens
atggaatatgaacatctaccagcacttgctccaaccaaagacatgttcgaggaatataaaataaaagggggagattgggatatctacgccagtaaatttctggatttaatgtcgtcccgaaagattgagtcaatcgataaagaaaagattgataacagttgcctgctttgcagcgaagacaagccccatcactgccatcggaggctagtggccgagtaccttgcaggcaaatggccgaatgttgagatcgtgcatctttag

SEQ ID NO: 428622 - DNA, 1272 bp, Serratia marcescens; identical to SEQ ID NO: 337686

SEQ ID NO: 428623 - DNA, 1977 bp, Serratia marcescens
atgtcaaccggtatgtttattctgcactccaactatacgccggcgggggaccagccagaggcgatagcgcgcctgctgtcggacatagaagaaggtgcgacgcaccagacgctgaaaggtatcaccggctcaggtaagaccttcaccatggccaatgtgattcatcgtctgaagcggcctacgttgatcttggctcctaacaagacgttgaccgcgcagctttatggtgaaatgaagcacttctttcctgagaacgcggtcgagtacttcgtttcctactacgattattttcagcccgaaatctatatgccgggcaccgatcgtttcattccaaaggactcggccatcaatgaccaccttgagcgcctgcgcctgtccacgaccaaatccttgattgagcgtcgtgacgtgatcgtcgtcgcttcggtgtcttcaatctacggcctgggtgatccagatgcataccgagcgctacagatcgctctgtcccctggggtcaaactaaaccagagagagctaattcgtcgcttggctttgctgcaatatgatcgcacggagcgcactctcaagcgtgcaacgttccgcgtccaaggtgatgtgattgacattttccccgctgattccgagtacagggcggttcgggtggaactgttggatgacactgttgcgtctgtccaatggatggaccctgttaccggcaagacgttgggagagatagaccattatttggtttcgccaaaaacgcttttcgcgccgcccacgaacaaaatagattctgcatccaaaaagatactcgctgatatggaagagcgggttgccgagctgaacaggaataatcgcttggtcgaggcaatcaggctgtacgagcggatcacgcatgacgtggaaatgatgcgcgaggtcggctattgctcggggatggagaattattcctgctacttcagcgaccgagacgcagcttctcctccgatcacgttgctggattatttgccgaaagacgggctgctgttcgtcgatgaatctcatgtcatggtgccacagatatccgcaatgtaccggggggatcaggcgcgcaaggacacgctgatcgattacgggttccgtttgccttcatcgaagaacaaccggccattgaactttgacgagttcgagaaggtcaagcctcagaccatctttgtttccgctactccgggcgactacgagctgagggtgtcgaaaggcagggttgtcgaacaggttatcaggccaacgggactgcttgaccccaaggttgaagtgcggaaagcggatggatacatagatgacctgcttgccgaaatatcgaagtgcgtgaagagaaagaatcgagtgcttgtgactacgctgacgaaggtcagtgcagaagagctaacggatttcttgacggacaacgggattcgagcgcgctacatgcattcggacataaaagcggaggatcgtgttgagatcatcaatggcctgcgcgcaggagagttcgatgttttgattgggattagtcttttgcgcgaagggctggatattccagaggcatcattggttgccattctcgatgcagaccgtgcagggttcttgcgttcggcccatgcgctcattcagatgatcggtcgagtcgctcggaatgaaaacggcaaggcgatcttgtacgccgacgcggtgacgccggcgatgaagcaggcgatcgatgagaccaataggcgcaggcagcttcaaattgcctttaacgaggaaaatgggatttctccagcctcgtctgtgcgaaaactagcaggggaagagacgaatacggaggagcccaccgttcattccgaggctttctgcgagaacttgtccgacctttgcgatcagatcactgccaaggaacagcagctactcgaatttaccgataccggtgacgagcagcgcgtcgaagacattcgtcgtcagttggatgggttgtaccggcaattcatttacatctaa

SEQ ID NO: 428624 - DNA, 906 bp, Serratia marcescens
atgaacaaagaaatggaactactgcgcatctttcgggtggcggccgaaagcagcagttttcgcgatgcggccgtccggctggggacttctccgcaaggtgtaacccgtgccatccagcaactggagcaacactacggcgaggtgttgtttcatcgaagcacgcgccaggtgcgcatcaccgccttcggcgaagggctgctagaccaagtgcgccccgcattggagcggttcgaggatctgtggcgaacgcctagctccgaccagcaggcctctctgtccggtacggttcgcatcaccgcaccgcacagcttgggcaccagagcggtgctaccggcactggagcgcgtggccgcgcgtcatcccggcatcacgctggatgtgcgcctgtccgatcgcatcagcaatacggttgacgaagggattgacgtcgggatcagggtcggattcatgcgcgatagccgcttcgtcgcacgcaaggccgccgacatgagactccccatcgttgccgctccgcgcctgatcaagaaagtgggcgtacctgcaaacatcgatgcgctaagcagcctgccagttaccgtggccttggatatcaataccggccgtccctggccttggcacttcaaggcgggacgccagtggacacctaccgcacccactctcgtcgccgacaatgccgacatggaaatgggagcggcgctggccgggatcgcgttcgcgcaactggcggactacatggccgccccctacattgccagcgggaagctcgtgcgagtgctggagaacgaagaacctccggcatgggggttgtacgtctatcggcctcagcgtggccccattccgggaagggttcgagcggtatttgatgaaatgctggtcgccgttggatcgttgccagctttgcgctga

SEQ ID NO: 428625 - DNA, 408 bp, Serratia marcescens; identical to SEQ ID NO: 292052

SEQ ID NO: 428626 - DNA, 609 bp, Serratia marcescens
atgaccagcgacgtgcaggtgctggttcgtcgtggcccggacattgccgaatggttcgatgccgtggcaggcctgcgggcgagcgtcttccgcagctttccttacctgtacgagggcgacaccgaatacgagaagcactacctcgccatgtacgcccgttcggcagacagcctgctggtactcgcgctcgctgatgatgtggtcgtgggtgcgtccacggggttgccgctcggcgatgcggagccggccttccatgtgccgttcgccgatcgaggaatcccggtggaggcagtgttttactgtggcgaatcagtcctgctcccggccttccggggccttggcctgggccatcgcttctttgacgagcgcgaagcgcatgcccgttcgttgggcggcatgcagtgggcatcgttcgcgtcggtggatcgtgcagacgacgatctccggcgtccttccaactaccgcagtaatgaccccttctggacccgtcgcggctacgtgcggcagtcggacatgaaggttacgctgccctggaagcaggtgggtgagccgagcgaaaccgagcagacgctcacgatgtggctgcactccctggagaacgcgaaatga

SEQ ID NO: 428627 - DNA, 891 bp, Serratia marcescens
atgaaagtagcagttgcgaaatactcagtgggtcagcccgcgggcttcgaggcatttgctgcgcggcagcggctggttctggaggaggcgcgccgtggcggggcggaactggccgtgttgcccgagtatctatccctcgaactggctgcaacgttcgagcctggcatccgccatgatttcaacgcctctctggccgcgctgcaggccttgcagcctgcgtggctggcactgtatgccgacctgtcgcgcgagttgtgcatgaccattcaggccggtacgtttttgacccaggttggattggaccgctaccgcaaccgggcttggtggtttgcgcctgacggcacacgcgactaccaagacaaattgcagttgacggggttcgagaaagacgccggcgtcatcgagggtggcgacgaactgaaggtgttcgatttgaaaggcgtgcgtgccggcatcgctgtttgctatgacagtgagtttccattgcccgtgcgagcccagcgagaggcgggagtgcgcctgctgctggtcccgagctgtaccgacacccaagcaggtgcaacccgggtccgtgtgggctgcatggcgcgggcactggagaaccgaatgttcatcgcgcaggccgtgacgaccggagctgctgactggagcccggcgctggacacgaatactggcgaggccacgatctatgcacccatggatcgcggattcccggaggatggcattctcgcgacgacttgcggcacgcagacatgggcgattgctgatctggacgttgaagccctcgaacgaaaccaggaacaggcccaggttgcggtcgatcgtgactgggacggccagatgttgcctgcactgaggaaggctcggtactcgggtcgtcaggtcgcctag

SEQ ID NO: 428628 - DNA, 276 bp, Serratia marcescens
atgccacacagcccggaagaaaagaagcaagccctgacgcgcatccggcgcatcaaaggtcaggtagcgactcttgagcaagcgctcgatgcaggtgcggaatgccctgcaattcttcagcagcttgcggccgttcgtggggcagtcaacggattgatggcaaccgttctggagagctatctgcgggaagagtttcccagtagcgaaatcaggagcgattcgcagaacaagtcctttgacgagaccatctctatcgtccgctcctatctgcggtag

SEQ ID NO: 428629 - DNA, 1110 bp, Serratia marcescens
atgaaatcacgtgcagcagttgccttcgggccaggaaagccgctggaaatcgtcgagatcgacgtcgagccgccgcgcaagggcgaggtgctcatcaagatcacgaacaccggcgtttgccataccgacgccttcaccctgtcgggcgacgaccccgaaggtctcttcccggtcgtgctgggtcatgaaggtgcgggtatcgtcgtggaggtgggtgaaggtgtgaccagcgtgaagcctggcgatcacgtcattcccctctataccgccgagtgcggcgagtgcctgttctgcaagtccggcaagaccaacctgtgtgtcgcggtgcgcgccacccagggcaagggcgtgatgcccgatggcaccacccgcttcagctacaacggccagccgatctaccactacatgggctgctcgaccttcagcgaatacacggtggtggccgaagtctcgctggccaagatcaacccggacgccaatcccgagcatgtctgcctgctgggttgcggtgtgaccaccggcatcggcgctgttcacaacacggccaaggttcagccgggtgactctgtggccatcttcggcctcggcggcatcgggctcgctgcgattcagggggcacgccaggccaaggcaggtcgcatcatcgccatcgacaccaatccagcgaagttcgagctggctcgtaccttcggcgcgaccgaatgcctcaacccgaaggacttcgacaagccgattcacgaggttctcatcgagatgaccggttggggtgtcgatcacaccttcgagtgcatcggcaacgtcaacgtgatgcgctcggcactagaagcagcacatcgtggctggggccagtcgatcgtcatcggcgtggctggtgcaggcaaggaaatttcgacgcgcccgttccagttgatcaccggtcgcacctggaagggctcggctttcggcggggtcaagggccgcactcaacttcccggcatggtggaggacgcaatgaaaggcgagatcgatctcgccccgttcgtcacccacaccatgggcctcgacgacatcaacaaggccttcgacctgatgcatgaaggcaagtcgattcgcacggtgatccactactga

SEQ ID NO: 428630 - DNA, 399 bp, Serratia marcescens
atgtccactcctgtcatttctggcgatggcatcttttcgcacatttttatcggcgctgccgaccttcagaagtcggtcgcgttctacgacgccgctctgggtgctcttggcatcaagaacctcggtcctttcaacaacggatgggtacttttcggtcgcgaaaagccggctttcatcatcgcccgtccgggcaatggtgaagcgccctccagcaacggcgtgacgatcggctttgcggccgccactcccgccgaagtggatgccttccatgctgccggccttgccgcaggcggcaccgacgagggccagcctggcgcacgtggtcacctgccgggtgcctatgcggcctacctgcgtgatccggcgggcaacaaggtctgctcgtacaccttcgtctga

SEQ ID NO: 428631 - DNA, 1335 bp, Serratia marcescens
atgcaagagccggccaacatcaatgcgacgaccgtacaacccgccccgaccgccaccgtgtacggcatgccggcctatgccgatcgtgctgcggccgtgggtgaagtgcatgcgcgcccgcatctgttgattcaggccccccgcggcatattgcagctcgctttcatgaccgaaggcgatcaggccagggatcagatggcgatgagtgagttgtctcatcgcttcggcgttgccgagcccgaccacgctacgccgcttcacggcatgacatgggatgagggagacctgcactgtgaaaagcacaccgagttctcaacgtatctctggtgcgcttcgctggattccgagacgggagagccgtgcggcgaaaatccgttcaagcatggatttgttcctcccggcccggtcgtatccggcatccgtttgagacttcttccatggacgccggaaacggagaaggaggccgatcgcttcgatcctgccagcctgtgctactcgctggtggagaacggctctgccgccatcctcaccgacttccgacaggatgaggatggcctgacgcagatcctcgtccttgcccgcgatttgaccccggcgcgggcgggtgcgctggctcaacgtctgctggagatcgagacctaccgtaccttggcgttgctgtccttgccgttgacgcggtcgatgacgtcggagctgcggcgcatggagtcgcgccttgcggcgatcaccgacgagatgtgtacgagcttggtggaacggcgcgacagcgacgtgctgctgtccgaattgaccggcctggctgccgaactggaagctggcgttgcggcgaatctctatcgcttcggcgccagtcgtgcctactacgagatcgtcgaggaaaggctggcagcgctttcggaagaggccgtatccgggtactgcacctgggcggatttcctgcagcgtcgcatcgctcccgccatgcggacatgccaatccgtaaaggagcgccagaccaagctctccgacaagctgacccgggccatcgcgttgctgcgttcctggatcgacgtcgagcttgaacgccagaaccgcgatctgcttgcgtcgatgaacaaccgggccaagatgcaattgcgccttcagcaaaccgtcgaaggcctgtcggtcgcggcaatttcttattacgtcgtgagtcttctcggctatttgctcaagggcattccgatggttcacgacagcgtggcgccggtgatggcggttctggtgcctgcggtgatgctgacgatctggtggatcgtgcgcaggatcagacacgcccacggcgacacggcagcggaagagaaatcttcctga

SEQ ID NO: 428632 - DNA, 831 bp, Serratia marcescens
atggaacgcatcgaacatcacgccagctttgatggttggcaggacgtttatcagcatgaatccacgacgctcggttgcacgatgaaggtcggcgtctatctgcctccgcaggcacagcacggcaaggtgccggtgctgtactggctttcaggcctcacctgcaccgagcagaacttcatcaccaaggccgccgtccagcgctacgcggccgaacatggcattgccgtcgtcgcgcccgatagcagtgctcgcggcgaaggcgttgccgacgatcctgcctatgacctcggacagggggcgggtttctacgtcaacgccacacaggaaccctgggctgcgaatcatcggatgtacgactacgtcgtgcaggaattgccggcgctgatcgaggcccactttcccgtgacagcggagcggagcatcagcggccattccatgggaggacacggcgctctggtcatcgccctgcgcaacccgggccgttatcgaagcgtctcggccttctcgcccatcgtcgcccccacccaggttccctgggggcacaaggccttcgaggcgtacctgggcagcgatcgggaagtgtggaagcagtacgacaccgtggagctgattcgcaccgtgcaggagcgtttgccgttgctggttgatcagggcttgggcgacgagttcctggagagccagcttcagcccgacctgctgcgcaaagcctgcgacgagacggggcacccgctcacgttgaatctgcgcccaggctacgaccacagctactacttcattgccagcttcattggcgagcatatggcacaccacgcatcggcgctgaaacgctga

SEQ ID NO: 428633 - DNA, 1308 bp, Serratia marcescens
atgacaaagacctccaaaaaccgacatcacgtcgtcattatcggagcgggcttcggcgggatcgaggttgccaaccagcttgctggtgtcgaggtcgatgtgacgatcatcgatcggcgcaatcatcacctgttccaacccttgctttaccaggtcgcaggtgcgtcactttcgacatccgagatcgcctggcctattcgctatctcttccgaaatcgcccggaagtgaacaccttgatggcggaagtggaaggtatcgaccaggacgcgcgtcaggtcattctcaacaatggaatgcggcaaacctacgacacgctcgtgctcgcgacaggtgctacccatgcctacttcggacacgacgaatggggggctttcgcgccggggttgaagacgctggaagatgccacgaccattcggggccgaatcctcgcggctttcgaggaagctgagcgcacgagcgatcctcagcagcgtgccgcgctgcagacgttcgtcatcatcggtggtggtcccaccggggttgaattggccggaaccatcgccgagctggcacgagacacgctggcgcgtgacttccgctcgatcgacccgagcacatcgcgggttgtactgatcgaggctggcccgcgtctgttgtcggtctttccagaggatctttcggcctatacgcgccaggcactcgaaaaactcggggtcgaggtcgtgctgggtactccggtcaccgaatgctcggccgacggcgtggtgtatggcggcaagcccctttcggccaagaccatcgtctgggccgccggagtccaggcgtctcccgcggctcgctggttgggcgctgcgtctgatcgtgctggtcgagtggtcgttggccctgacctgacggtggccggtcgcccggaggtcttcgccatcggcgatacagcctcgtgcaccatggccgatgggaagcccgtgccgggcatcgccccggccgccaaacagcaagggaagtacgtcgctaacctgattggacggcgtttgaagggcaagcccgctgacgggcctttcaaataccggcatcaggggaacctggccaccatcggccgcagcctggcggtgattgacatggggcgggtgaagctgcgtggtgcctttgcgtggtggatctggaagctggcgcacatctactttctgatcggcacgcgaaatcgtctcagtgtcgctttgagctgggtatggaaccacagcatcggctaccgcggctctcgcatcatcatgcatgcgattgccgacaaagagcccacggcgttggataaatccggctctctggattga

SEQ ID NO: 428634 - DNA, 1314 bp, Serratia marcescens
ttgaccgatctattcacgacaaagcccaagcctcccttggccgaactcctgcggcccaagacgctggacgaattcgtcgggcaacggcacttgctcggccccggcaagccgctgcgtctcgcgttcgaggcgggcaagttgcactcgttcatcctctgggggccgccaggcgtgggcaagaccaccctagggcgcctggccgccagtgcgaccgacagccgattcatcgccatctcggccgtgctggccggggtgaaggacatccggcaagccatcgacgaggcccaggccgaactggacaaccatggtcgatcgacggtgcttttcgtcgatgagatccatcgcttcaacaaggcgcagcaggatgccctgctgccccatgtcgagtcggggctcctgaccctggtgggggggacgaccgagcatccggggttggcggtcaattccgcactgctctcgcgcgcgcaggtctataccctcgaaccgctgtccagcgacgaactgaaccaactctacgaacgcgcactgccgcatctccagggcgtcacgttggacgcggacgcgctggatctgctcaagggctttgccgatggcgatggcaggcgcttcctcaatctgcttgagcaggtgacgaatgcggcgtcgggcgctggcaagaccgtggtcgatggccagtccgccaagctgtccaccagtccatcgctgcgcaggttcgacaagggcggtgacgagttctactggcagctctcagccttccacaagtcgctacggggctccgaccctgatgcggccctgtattggctggcccgcatccttgacggtagcggcgacgtcagccaggtgacccgccgcatggtggtagtggccagcgaagacatcggcaatgccgacccgcaggcgctgcaactggcgctcaatgccgcgctggcttatgagaggctgggttcccccgaaggcgaaataccgattgcccacgcggcgacctaccttgctgccgcccccaagtcgaacgctgcctatgccgcctggaacaaggcgaagaccttcgtcaagaacagcggctccctgcctgtgcctctccatcttcgcaatgcgccgacgaagctgatgcagcagatggggtatcacgaaggctaccgctacgctcctgacgagcccaacggctacgccgctgggcaaagctactttcccgagggcgtggcgcggccgggctggtatcagccaacggacagaggtgttgagcgcaggctgggagaatggcttacttggctgcgctcgctggatgatgggacgctgccagaggcggacgcctga

SEQ ID NO: 428635 - DNA, 1866 bp, Serratia marcescens
atgccagcctcttcttttggtgagtcctcggcgcatatcagacggagacgcgttgcccactatctacgcacggagtctggcgctgcggtgctgctggtgatcgtcacggttgtggcgctcgtgtgggcgaactcgccgctatctaacgcctatttcgagttgtggcacctagacgtcgggttcaacttcgggccactgcgcctacacatggatctgcatcactgggtcaacgacggcctgatggtcgtcttcttcttcctgatcggactggaggtgcgtcaggagttcgcccacggatcgctccgtgaccgcagccgtgcccgcctcgccctgatcgcgggggtcacgggagtcgtgcttcccgcgctggtgtatgtcctgatcgtgaaactagccggaagtgagggcctgcacgggtggggtgcggtggtcggcaccgatacggcgttcatgctgggcaccttggcgatcgtcggcccgcggctatcgggtcagttgcgcgtgttcctgctcaccctgaccgtggtcgatgacttcctcgcagtgtccatcatcggcatcgtctatagcgaggagatccggatcgtcccgttgcttatcgccctcgccagcctcgttggattgtggttgttggggcgcacccgccagtggcgggcgacgccgtatgtgttgatcgtgatcgtgctgtggttcgcaaccgtgtattccggcatccatgcctccctcgccgggatggccgcggggctgctgatccccgcctatgcgacgcaacgtcacggggtcgttgcggcaagacagttgttccgtgacttctggcagtcgccgagtgccgcatcggcccgcgcggtggactgcgggctgtcccggggtatctcggtgaacgagcgattgcacgagttcctgcggctgccgacggcgctgctgatcgtgccgatcttcgccttggcgaacgccggggtggacgtgcgtggcgggctgctcgccgaggcctttggctcgccagtcacgtggggcgtcatcgcagggctcgtgctcggcaagctcttgggcatcgggctcaccacgctcgtcgccgtccgtctcggcctgggccggctgcccgagggcgtcggggtggggagcgtgttcggtggggcggcgctgtccgggatcggcttcaccgtgtcgctgctgatcatcgggctcgcgttcggcacgacctccgacctgggccgccaggcgacggtcggcgtgctcgtgtcgatggtgttcgccacgttgctcgggtggctgatcttcaaggtcgccgcccagcggtggggtgagaagaccgctgacctgccgatggtgcttgagccgccggtcgatccggagatcgatcacatccgcgggccggaggacgcccagctcacactcgtcgagtacgtggacttcgagtgcgcgtactgtgcgcacgccaccggttcgtgggacgatcttcgcgcccacttcggtgacgacctgcggtatgtggtgcgccatctgccgcaccacccgcacgggccgattgccgcgcgggcgtccgaggcagcggcgaaccaggggatgttctggccgtggctggacttcgtgttcacccgtcagcatgcgctggagcgcgagcatctgatcggctacgccgccgagcttgggctcgacgtcgaacggttcatcgcggatctcgacagccctgcggtgatcgagcgtgtcgagcgcgacctcgccagtgcggtcgccagcggtgcgcacgccacgccgacgttcttcgtcgagggtcgtcgtctgcgcggcagctacgacgcccgcactgtcaccgcagtgctcgaagccagccgccgcggcacccgaactcaggaagtcccgtcctga

SEQ ID NO: 428636 - DNA, 2601 bp, Serratia marcescens
atggtggaagtgcgcggtgcgcgcgagaacaacctcaaggaggtggacgtctccatcccgcgtaacgcgctggtggtgttctcgggtgtctccggctccggcaagtcctcgctggccttcggcaccatctatgccgaggcccagcgacgctacttcgagtcggtggccccctatgcgcggcgactgatcgagcaggccggcgtgccggacgtcgatgcgatcgacggcctgccgccggcggtggcgctgcagcagcagcggggctccagcaacgcgcgttcctccgtgggcagtgtgaccaccttgtccagcctggtgcggatgatgtattcgcgcgccggcgcctatccggccaaccagccgatgctgtacgccgaggatttttcgcccaacacgccgcagggagcgtgcccgacctgctacggcctgggccatgtgtacgaggtgaccgaggccatcatggtgcccgatccctccctgagcatccgcgagcgggcgatcgcctcctggccccccgcctggcaaggccagaacctgcgcgacatcctggtcagcatgggctacgacgttgaccgaccgtggaaggacctgccgaagaaggatcgcgactggattctgttcaccgaggaaacaccgacggtgccggtgtacgccggcttcacgcccgccgaaacccgcgccgcgctcaagcgcaagatggagccgagctacatgggcaccttcaccggcgccaggcgctacgtgctgcacacctttgccaacacccagagcgcgttgatgagaaagcgcgtgtcccggttcatggagggcaaaccgtgccccacctgccacggcaagcggctcaagcccgaggcgctgtcggtcaccttcgccggcgtggacatcggcgcgttcatgcagatgccgctggaccagttggcggccttgctcgaacccatcgcccagggcgatttccgcgcccatgcagcgggggcggctacggacaaggaagcgacccgacgcgaccgtgccgaacgcgcggcctccggccgcgccgtccatgcggtatcgcccgacgtgcgccgcacctcggcgctatcggaagaaaagcgcctcgccgcgcagcgcctggccggtggcgtgatggcacgcctgcgccaactgcgtgggctgggcctgggctacctgacgctggaccgggccacgccgacgctttcggccggcgagttgcagcgcctgcggctggccacgcaattgagttccctgctgttcggtgtcgtgtacgtgctcgacgagccctccgcgggcctgcacccctccgatagccaggccctgtacgacgcgctcgaccggctgcgcgacgccggcaactcggtgttcgtggtggagcacgacttggacctgatgcgccgcgcgcaatggctggtggatgtcgggccggatgctggggagcgtggcggccgcgtgctctacagcggcgagccggatggcctgcgcaagattgccgaatcgcgtactgcacgctacctgttcgatgagatccccgcgccgggaagccgggcacgcgaagcgaccggctggctggagctgcaggacattcaccgccacaacctgcatggcgtgaatgcgcgcattccgctgggcgtgctgacggccgtcaccggcatctccggctcgggcaagtccagcctcgtcgcgcaggccctgccggagctggtgctgctgcacctgggccacgagccggaagacgatgtagccgaaagcgccaccagcgaagggccggcagtgatcgaagcgaccggcggccatctggcgggcgacgtggacgccgtacagcgtctggtgcaggtggaccagaaaccgatcgggcgcacgccgcggtcgaacctggccacctacacgggcctgttcgaccatgtgcgcaagctgttcgctgccacgcccgatgctcgacgccgccgctatgatgccggacggttctcgttcaacgtcgccaaggggcgctgcgagacttgcgagggcgagggtttcgttagcgtggaactgctgttcatgcccagcgtgtacgcgccgtgcccgacctgccatggcgcgcgctacaacgaggccacgctgaaggtgcagtggaacgggcgcaacatcgccgaggtgctgcagatgaccgtggacgaggccagcgaattcttcgcgggtgaagacgcggtggcaaggcccctgcaacttctgcgcgacatcggactgggctatctgcgcctgggacaaccagccactgagctttccggtggcgaggcgcagcgcatcaagctggcgaccgagcttcagcgcagccagcgcggccgaagcctgtacgtgctcgacgagccgactaccgggctgcatgcgtcggacgccgaccggctgctggtgcagttgcagcgcctggtcgatgccggcaataccgtagtgatgatcgaacacgatatgcgcgcggtggcccaggccgattgggtgatcgacgtggggcctggtgcaggcgctgccggcggcagcatcgtggtggcgggctcccctcagcaggtggcccgaacgtctggcagcagaaccgctccgttccttgcacaggagttggcgcgggccgagtag

SEQ ID NO: 428637 - DNA, 1845 bp, Serratia marcescens
atgctctttctgttccagcggaaacgacctccggtcgctgccgctccgtcgccagcgcccgccctcgatctcccgaaagggctgctgcggcccgagtcggccgcatcgctgctggccacgccgcgccggcagaagctgctggaatacatctggcagcgcacctccctctcgcgcaagcagttcgtcaccctgtaccgcacgccgctggaacgatatgccgagctggtccagcaatttcccgcttccgaaagccaccatcacgcttacccgggcggcatgctcgaccacggcctggaaatcgtcgcctacagcctgaagctgcgccagtcccatctgctgcccatcggtgccagccccgaggaccaggcggcgcagtccgaggcctggaccgccgccgtcgcctacgcggcactactgcacgacatcggcaagatcgctgtcgatctgcacgtcgaactcgccgacggcaacacctggcatccctggcacgggccgctgctccagccgtaccgcttccgctatcgtgaggatcgtgaataccgcttgcatagtgctgcaacaggtctgctctaccgccaactgctcgatcggcacgtcttggactggctcagtggctacccggcgctatgggccccgctgctctacgtcttggccggacagtacgagcatgccggggtcctgggcgagcttgtcgtgcaggctgatcgcgcttctgtggctcaggagctgggtggtgatccggcccgcgtcatggcagcacccaagcacgcactgcaacgcaagctgctcgacgggctgcgttatctgctcaaggaagagttgaagctgaaccagccggaagcctccgatggctggctcaccgaggatggtttgtggctggtgagcaagacggtttcggacaaactgcgcgcacacctcctgtctcaggggatcgatggcattcctgcgaacaacaccgccgtgttcaacgtgctgcaagaccacggcatgctccagcccacctcggacggcaaagcggtctggcgcgcgaccgtgaccagcacgaccggctggtcccattcgttcaccctgttgcgtctcgctcccgcgctgatctgggagtctggcgagcgaccagcacctttcgcgggcacggtagagatcgacgcgacgcccgcggaaaacgacgcctgcatgtcggctcccgcgcctaccgtctcggtgaacccagcgcagggaggtcaagagcctccgatttgggagggcgacagcaccaccatcgtttcaccgcccgcagcccagcccgtgcccgacgtcatggaggatttgctcgcgatggtgggcttgggtgagtcggccggcgttggccaggatgccgaggagttcctccacacccccgcgccagcaacagccgcgacgtccattccatcgcctgcacctgcacccgcgcctacgcctgggtcatcggcaacgaagccatccggggaacagttcatggtttggctgaagcagggaatcgcctcacgacggctcatcatcaacgacgcgaaggcactcgtgcatacggtgaatgagacggcctacctggtcagcccgggtgtgttccaacgctatgcgcaggagcatcccgaagtggccgcactcgccaagcaggagaatcaacaggattggcagtgggtgcagaagcgcttcgagaagctgcagctacatcgaaagcagcccaatggcctgaacatttggacctgtgaagtcacgggcccgaggaagtcccgccgactgcatggctacctcctcgaagatgggtccttggcactcgccgaaataccgcccaacaatccctatcttgctctgactcaggaaggatga

SEQ ID NO: 428638 - DNA, 318 bp, Serratia marcescens; identical to SEQ ID NO: 332946

SEQ ID NO: 428639 - DNA, 459 bp, Serratia marcescens; identical to SEQ ID NO: 332945

SEQ ID NO: 428640 - DNA, 378 bp, Serratia marcescens; identical to SEQ ID NO: 332944

SEQ ID NO: 428641 - DNA, 360 bp, Serratia marcescens; identical to SEQ ID NO: 332942

SEQ ID NO: 428642 - DNA, 447 bp, Serratia marcescens; identical to SEQ ID NO: 332939

SEQ ID NO: 428643 - DNA, 495 bp, Serratia marcescens; identical to SEQ ID NO: 332938

SEQ ID NO: 428644 - DNA, 765 bp, Serratia marcescens; identical to SEQ ID NO: 332937

SEQ ID NO: 428645 - DNA, 903 bp, Serratia marcescens; identical to SEQ ID NO: 332927

SEQ ID NO: 428646 - DNA, 675 bp, Serratia marcescens; identical to SEQ ID NO: 332926

SEQ ID NO: 428647 - DNA, 1053 bp, Serratia marcescens; identical to SEQ ID NO: 332925

SEQ ID NO: 428648 - DNA, 2625 bp, Serratia marcescens; identical to SEQ ID NO: 332924

SEQ ID NO: 428649 - DNA, 549 bp, Serratia marcescens; identical to SEQ ID NO: 332921

SEQ ID NO: 428650 - DNA, 651 bp, Serratia marcescens; identical to SEQ ID NO: 332918

SEQ ID NO: 428651 - DNA, 1785 bp, Serratia marcescens; identical to SEQ ID NO: 332916

SEQ ID NO: 428652 - DNA, 1815 bp, Serratia marcescens; identical to SEQ ID NO: 332915

SEQ ID NO: 428653 - DNA, 780 bp, Serratia marcescens; identical to SEQ ID NO: 332914

SEQ ID NO: 428654 - DNA, 306 bp, Serratia marcescens; identical to SEQ ID NO: 332913

SEQ ID NO: 428655 - DNA, 321 bp, Serratia marcescens; identical to SEQ ID NO: 357909

SEQ ID NO: 428656 - DNA, 342 bp, Serratia marcescens; identical to SEQ ID NO: 332910

SEQ ID NO: 428657 - DNA, 690 bp, Serratia marcescens; identical to SEQ ID NO: 332909

SEQ ID NO: 428658 - DNA, 738 bp, Serratia marcescens; identical to SEQ ID NO: 332905

SEQ ID NO: 428659 - DNA, 441 bp, Serratia marcescens; identical to SEQ ID NO: 332901

SEQ ID NO: 428660 - DNA, 357 bp, Serratia marcescens
atgcggaccctcggattgatcctccgggaagataaccggtcgtggatccgcgcacttactgatgtcaaggggatatacctgctgaccgatgaggaaggcgggaagctgtatgtgggtaaggcggatggctcggagggggtatggggccgctggatgagctacctccgaaccgggcatggcggcaatgccggcttgaaggaggcattcggcgatctcgcgggcccgcggttagatcagatcaaattttccgtgcttgaggtcatggggttggactgcgaagagggggagattgaccggcgtgaggcgcactggaaacgggtattgctgacgcgccgctttggtcataaccggaactga

SEQ ID NO: 428661 - DNA, 792 bp, Serratia marcescens
atgatagatgagagcgcgaaagcgatagtcgaaaagctcgctgttccggtttatgaagatgctctgagcccttttgctaaagaattatcaaagggattagtctctattgccagaatggtaaattcgggagttttcctggtagaagacagtgttcatgcggtgacaagcgtcttgcggatgactgctgagaatctggcattattaccgcccaagcaaatttcattcgatcggccaagggttgctcttcaggctctgaatgaggcaaaatttgcaataaatgaagatgaaatacagcgtcttttttcaaatctaatatcggcaagcttggacaagaaaacttcgaggattgctcatccagcgtacatcgaaataatcaagcaactccaaccggatgaagccaacatccttcggtttatgtttaataaagaaaaccatagaaaaggtcatgcaccaacgattgatatagtccaacaagattcggaggatagtaacttaacgatcacatcaactacaccggaagtaaatctaatttgtgaagatgctggttgcgataaccccgaaaactcagttatgtatttcttcaacttaaaacggttgggcctgctaactccaacatcaggaacttctttcccaaaggaagagcatgaaagaattttctcatcagagaaagtaaaagaaatatgtagtgtaaattcgcatctagatagggtttcttataaaagcgggcaatatagttttacaggctttggccgaggctttgtcgattcgtgtgtcggcagacatagcatttaa

SEQ ID NO: 428662 - DNA, 2979 bp, Serratia marcescens
atggcacctagcgtattggattattttacccaacaagtttcccgttatccggaaaaacttgccgtcgtcggcaataataaacacctgacctaccgtcaattggatgaagccagcagcgcactgtgcgcgctgttgctacgacggggcgtggcgcccggcagctatgtgccgctcgtcacgctgcgcacgccggaaatgctgatcggcatgttggcgatcgtcaaagccggcgcaggctatattcccatcgatgcgcgttacccggaaaaaagaatacaggatatcgttacgcaaagcggttcccctttaatactcgccagcaacgcgacaattgcgttatcggaagataatttcagcgaagacgttatttatattgataatatatcaatttcgccacaggaaaatataacgttaatctctccgcctcccgatgccatcgtttatctcattttcacttcaggcaccaccggcaaaccgaaaggtgtgctgatcgaacatcagtcgctgctgaatttaattctctggcataacaagcaattcgctatggatgccgaaagtcgttctacgctgatcgccggcttgagtttcgacgtcgcgcaatgggagatctggtcgcctctgaccagcggcggcacattgtatctgccgccggaagacgctcgcctgcagccggaagtgctgctggcctattttgccgaacagggtatcactcacgccagcctgcccgcagtgctggtcgccgacgtggtcggcgcgccgcagccggccaatctggcgctgcggtatctgttcagctcgggggaaaaacttcatccggtcgatctgcgcggcatcgattatcccttgatcgattactacggcccgacagaagccaccatattcgtcacctgcaaccaggtggcttgcgccacgcaaaatctgcccgccagcattgggcggcccatcggcgataccgaaatatttatcctcgatgaccgactgcagcccgtgatcggcgatcgccccggcgagctgtatatcagcggtcgttgcctggcacgcggctacctgaacaatccggcgttgacggccgaacgcttcatcaccccgcctcacttcgctgggttacgtctgtatcgcagcggcgatcgggctcgttggctggcggatggccgcattcaatatctgggccgtatcgacgatcaggtcaaaatccgcggcaatcgcattgaactgggcgaaatcgaaaacgccatgttgcaggttgcgggcgttcgtaaagcggtggccgccgtggcgatggcagatgatccgctgggcaagaaaatcgtggcgtttctgatcgcggagagtgacggcgaaagcgtgatcgcacgcgtccgacagaaactgaaagaaacgctgcccagcgcatttctgcccgccgattatcgtttactgcaacacatgccgctgaacaacaacggcaagatagacaaagcggctctgttggcgcattaccaaccggtcagcgccggcgttgcgcagccgctgaccgccgaccagcgcatcgtcgccgatctatggcgctcattgctgaaggtggaacagcccgcaaccgacgatgattttttctcgctgggcggccattcgctgttggcggccaagctgatggcggcactggccaaggcgtttgccgtcgagacctcggtgcacgacatttatgaatatcccactctgggtgccctggcgcaggcgctggcacaacgcaaagaccggcaaccgacacagcggcaaggcgaagcgcgcaccttgcaggatgatgtgtatttgccgccggatctcgtcatcgatccgacgttcgatacgcggcaaatcagcgcaccgcgtgccattttgctgaccggcgccaccggcttcgtcggcgcacatctgttggccgatttgctacgcaccaccgatgccgagctgtactgtctggtgcgcgacggcgccaaactgccgccgagacagcggctggaggcggtgctgcagcgctaccggatcgcgctgaacgccagccagcacgcgcgcattcatatggtgcctggcaacgtcgcggaacacgacttttcgctgacgcctgcggcctacagggcgttaagccgagatatcgacctggtttaccattcggccagcgcggtgaattttatccagccttacgcctatatgaagcgcgacaacgtgcagggcctgcgggaaatcattcgcttcgcggcgcatagccgcaccaagccgctgatgctgctgtcgaccatctccgtttacagctgggggcatctacacaccggcaaacgggtgatgcgggaaaacgacgatatcgatcaaaacctgccggcggtcagccgcgatatcggctacgtgcgcagcaaatgggtgatggagaaaatcgccgatctggcggcgaaacagggcctgccgctgatgaccttccgcctgggctacgccacctgccacagccgcaccggcgtcaacgccgattaccaatggtgggggcggctggtgaaaacctgcatcagcagcggcacggtgccggatttacgggagatgcgcgaagggttaaccacggtggattacatgacccaggccatcgcccacgtctctcgcaacccgcaggcgctggggcagaaattcaacctgatccatcaaggtgacaataatctgacgctgcgtgaatttttcagcctgctggagcgcgagttcggttatcgctttcgccctctgcccttcgcacagtggcgggcccaatgggaaaacgacagcgacgcgccgctgtacccgctgctcagcctgttcaaggatcctatggtggacgaactatcgacggtggaactctatcaagacacctatcggtgggactgcagcaacctgcaacgcttcctgcagggcagcggtatcgatgagccgcgcttcacccgccagctgctgctgaattacctgcagcacgccatcgggtatgcgccgctgtcgctacgggcgtaa

SEQ ID NO: 428663 - DNA, 522 bp, Serratia marcescens
atggagccacaacaggaagggagcacgcgggcgttaacgccgggcgaagtcaatctggcgcgttcggtgtttggcagcaccattttctatcagagtgtgttggttcactgcgacagctacctgccgtttgggctacagaatcagtacacggcgatgagcccgaatggggagttgtattttcgcagggctttataccgacctgattttacggtgcatcatttggcacagcacctgtttatccacgagatggcacatgtttggcagcatcaaagaggcatgtgggtgcgtacccgtgggcttctcagttgggcggtgagctatcaatatcggctcgatcggttgctgttgcgtgagtatagtatggaacagcaagcatcgataattgcagactatttctatctcaagaagtttggcgttagcgattttatcggtttatacggtaggaattactcagggatagtagacagaagtacattgtcaaaatttcaacccataatcagaagcgcagggctgccactatga

SEQ ID NO: 428664 - DNA, 3135 bp, Serratia marcescens
atgctgagtgaagacgatttagaacagcaaagcctgcagtggtttgctgaactgggttgggaggtattacatggcccggatatcgcgcccgacggtgataatccgctgcgtgcttcgttccacgatgtgtttttgcgcccgttattgctggaacagctgcaaaaaattaatccacatctcccggttgccgtgctggatgaggtgatattgcgtatcgcccatgcacaaagcccagacctaatcgtcagtaacaaagccttccatcacctgctgctcgacggcgtgccggtacagtacaagcaggacgataacgttatccacgataaagcactgttgatggattttaaccatccgaagaataatcgctttacggtgctaaatcaggtagccatccaggggacgaagcaggtacgtcgcccagatgtcatctgctatatcaacgggttgccgatggcagtgattgaactgaaaagtcccgttgatgccaatgccgatatctgggctgcattcaatcagctacagacctataaaaacgaactcagcgatttgtttatctgcaatgaagcactggtagtcagcgacggctataacgcccgcattggttcccttaccgcgaacgaagaacgtttcctgccatggaaaacgttgaccaatgaagatgacaagcctctgtttgagtggcaacttgaaacggtagttaaaggattctttaaccgtgaattgctactcgactatattcgctacttcatcctgtttgaaaacgacggcaaacgactgattaaaaagattgccgcttatcatcaattccatgccgtgcgagaagcggtggcagcgacaattgtggcctctaccggcaaacacttgccgctacgcagcaacatcacgccaggcagtaaaaaagcgggcgtagtttggcatactcaaggttctgggaagagtatttcaatgtgctgctatgccgggaagctgctgcaacaggcagaaatgaacaacccgaccatcgtggtagtgaccgaccgtaacgatctcgacggacaactttatgccacgttctgccaggcgcaagatttgcttaagcaggaaccgttgcaggcgaacgaccgcgaccaactccgcgagatgctcaatgcccgtgaatcaggcggaattatttttaccaccgtacaaaaatttgccccgctggacggcgaaaaaactcacccagcactcaatctacgcagcaatatcgtcgtcatttccgatgaggcgcaccgcagtcaatatggccttaatgccacgttggatcgcgaaacaggcgtttataagtacggttacgccaaacatatgcgcgatgcattacccaatgcatcgtttatgggctttaccggaacacctgtatcttccgaagataaagatactcgcgcggtatttggtgattacgtctctatctacgatattcaggatgcggtggaagatggcgcaaccgtgcctatctactatgaatcacgtctggtaaaactcgaccttaaccacgaagagctggaaacgctctctgagcaagttgatgagctggtcgaagacgaagagaccgatcagaaagagaaaactaaaggcgactggagccgcctggaaaaacttgtaggttctgaaccgcgtatcaatcaggtggctgccgatctggttcagcattttgaggcccgtaatgccacaatgaatggcaaagcgatgattgttgccatgagccgtgaaatctgcgtgaaactgtataattcattggtcaccttacgtccggaatggcacagcgatgatgttgagaagggtgaaatcaaaatcatcatgaccggctcagcctccgataataaattcctgcagccgcacatctacaataagcagaccaaaaaacgccttgaagcgcgctttaaagatctcaacgatccgctaaaactggtgattgtgcgcgatatgtggcttaccgggtttgatgccccctgctgccataccatgtatatcgacaagccaatgcgcggacataacctaatgcaggccattgcacgcgttaaccgagtctttaaagacaaacctggcgggttggtggtcgattacatcgggattgctaacgagctgaagcaagctttgaaaacctataccgattcaaaaggtaaggggcagaccactatcgatgctcatgaagctttcgctattctgcttgaaaagctggatgtgattcacggcatgtttgccaaaacaccaaccgctgccgggtttgattacactggttttgaagaagtaccccaacggtttttactcaaagctgcagattacgtgctgggcctcgatgatgttaaaaaacgcttttttgatgtcgtactggcaatgaacaaagcctggtcactgtgcagtacgctggatgaagccaaaccattgcaaaaagagatagcgtttctgtcagcggtgaaagtggcgattatcaagctgacgacaaccgacaagaaattcagccagtcagagaaaaacacgctgctcggtaaaatccttgataacgctattattgcgaccggggtggatgatgtgtttgcactggcggggttgggaaaacccaatatcggcttactttcagaagagtttttagaagaagtgcgtgaaatgcctcagcgtaatctggccgttgaattgctagagaaattgttgaacgacggcattcatgctcgtacaaaaaataacgtagtacaggagaaaaagtattcagatcgccttagggccgtattgcttaagtacaataaccgcgcaatagaaactgcacaggtaattgaagagcttatacagatggctaaagagttccaagaagccatggcacgcgacgatgctctaggtctcaatccggatgagatcgcgttctacgatgcattagcagaaaacgaaagtgctgtgcgtgaactaggtgacgaaacgctcaaaaaactggcaattgaagttaccttgaaactgcggcagtccactacggtagactggcaagtacgagaaagtgtgcgtgccagactgcgtattttggtaagacaaacactgcgtaaatataaatatcctccggataaaaccgcaggcgccgttgagcttattttgaaacaagccgaggttgtttcgaatagttggacgatttaa

SEQ ID NO: 428665 - DNA, 1182 bp, Serratia marcescens
atgtataaaattgaccgccctaacaatacccttcaatcattgctcgaagtttcttttagcagcctcggctttcgtgagcgcgatcatttgcaagaatggttggcaaaaaatccgcaggcgctgaccaagaaagatgacaaagaagacgaactgctgattatccagaaagagtttgcaggtttcgacgataccaaagagagactcgacctgctggctcttgataaaaaaggcaatctggtgatcatcgagaacaagcttgatgattctgggcgcgacgtggtgtggcaagcactgaaatatgccggatactgcgctaatctgcgtcaggaaagcgtggttgaaatctttcagatgtatctcgatctttatgatccgaatgaaaaacgtcaagcggctgatatcattgcggagtttatgggatgggaaagcctgaaagaaggggtgctcaaccgtaaaggtactcagcgcgtcatcatggtagcagccaatttccgcaaagaggtcaccaataccgcactgtggttgatgcaatttggtattagggcgcagtgcttcaaggtgacaccctaccgtttcggcgatgatgtttttgtcgatattcgccaggtgatcccaacgccggaagcagaatcgtacatgatcggcatggcacaaaaagaggcggaagaacaatctacttccagcagcagtgagctgcaacagcgacattatctgcgccgcgaattctgggcgatggcactggaaaaattccgtaccagcccatgctcattgtttaacaacagagcaccatccaccgaccactggcttgcagctggctccgggttaagtggagtgccttttgaactaattttttcgcaaaaagatgctcgtgtgcagcttaatatttcccgcggagatgcgcttgaaaacacctggctttttgaacgtctgaaggaacgcaaaacgcatattgaatcgctatttggtgaaccactcgactggcgactgctaccagagaggaaaagctgtcagattgtctgctcaaaaatatttgatggcgggaataaagcactctggcccaccattattgactggatgacggatggcatgaaccgcctagaaaaagcgatccgcccgagcttattagaactggcgattgagcttaagcaaacagggttaattaccgagggagaggaagagtaa

SEQ ID NO: 428666 - DNA, 1392 bp, Serratia marcescens
atgagttctaattgggctgagaattatttatccgatttaagcgatgagattactgttggttatgtaggatctatgactcatgagtatgctgattcgggaatcccttttcttcggtcaaaaaacatttccaattatgaaatagtatgggatgacataagatatatatcatctacattccataataaaatcaaaaagtcagttttacgccccggtgatgttgccgtcgtccgcacagggaaacccggaacttcatgcgttatcccgaatgaattatcagaggggaattgttccgacttggtcattattcgggttgatgaaaacaaactatgccctcactacttgtgctattacttgaactctattgctgtgcatcagataaatgcacagattgttggtgcagttcagcagcattttaatgttggctcggcaaagaatttgaaaattaaaacaccatctctattcattcaaaagagaatatctttttttcttcaatgcctcgataataaaataaagttaaataaattaaccaaccaaaccctcgaacatatggcgcaagctctgttcaaaagctggtttgtcgattttgaaccggtaaaagccaaaatcgcggtattggaatcgggtggttcgcaggaagaggcgatgcttgctgccatgacggcgatttccgggaaagatgttgatgcgctgatggtgtttgagcatgaacatccagagcaatatgctgagttaaaagctacggcagagctgtttccgtctgcgatacagaatagtgagttgggggagattcctgagggatggtgtcatgggcccttgagcgacattgctacttttgccaacggtaaagtcgatgtttgctctctgacgcctgaaacgtatatttctactgaaaatatgctggaaaatcgggctggtatttctacagcctcctcactgccctcagtaaatagcgttcctgaatttagatgtagacacgttctaatttccaatattcgtccttattttaagaaaatttggttggctcgtttcaagggaggacgttcggcggatgtactagcctttgaagcacgagattcagtcaatgtagaatatgtttacaaccttctttatcaagaggttttctttaatttcatgatgcttacctctaaaggtgtgaaaatgcctcggggtgataaaaaagccataatggactggcagtgcgtacatcctgataagaaaatttcaaacgctttttcaaaagcagttggtgaatattattcattcattgaaattaacaatgcgcagaataaaacgttaacccaactccgtgacacccttctccccaaactcctctccggtgaaatcactctgccggaagtcgagcaggctataggtgaggtggaaaatgtataa

SEQ ID NO: 428667 - DNA, 1710 bp, Serratia marcescens
atgaataacaacgagcagcttttcttaaacgagctggataacaaattttggaaggccgccgacaagctgcgtgccaatatggatgccgccaactacaagcatgtagtcctgggactgatctttctaaaatatgtttccgatgccttcgaggctcgccagcaggagctgatcactttattccgcgatgttggcaacccggacaacatctatgccatgtcacgcgacgattacgattctgatgaagagtacgctcaagcgatccaggaagaactagaggtcgaagattactacaccgagaaaaacgtcttctgggtacccaaagccgcacgctgggaaacgctgaaaaacaaagccatgctgccgaccgggacggtattatgggtcgataagaccacaggccaagaaattaaactgcgatcggtctcttggcttatcgacaatgcgctggatgaaattgaaaaaaccaacccaaaactgaaaggtattttgaaccgcatcagccaattccaactgggcaatgaggttttgactggcctcatcaacaccttctccgactcaaacttcagcaaaccagaatataacggcgagaagctaagcttaaaaagcaaagatattcttggacacgtttacgaatatttcctcggccagtttgcactggcggaaggcaaacaaggcggccagtactacacaccaaaaagtatcgttacgctgattgtcgaaatgctgcagccgtataacgggcgcgtgtatgacccggcaatgggttccggtgggttcttcgtctctagcgatcgttttattgaagaacacgcgggtgaaaaaaattacaacgctgctgaacagaagcgcaatatctccgtctatggccaggagtctaacccgaccacctggaaactggcagcgatgaacatggcgatccgtggaatcgactttaacttcggtacgaaaaacgccgataccctgctggacgatcagcacccggatctgcgcgccgacttcgtgatggctaacccgccgttcaacatgaaagagtggtggaacgcaaagctggaaaacgacgtgcgctggaagtacggtacaccgccgcagggcaacgccaactttgcgtggatacagcacatgatccatcatctggcgccaaaaggctcaatggcgctgctgctggccaacggttcgatgagctccaacaccaataacgaaggcgaaatccgtcgtaacctgatcgaagccgatctggtggagtgtatggtggcgctgccgagccaattgtttactaacacccaaatcccagcctgtatctggttcctgaccaaagataagtctggcggcaacggcaaagcacaccgcaaaggcgaagtgctgtttattgatgcccgccagattggctatatgaaagaccgcgtgctgcgtgatttcacccgcgaggatatctccaaaattgccgacacgttccacggctggcaggcagataaggactatgaaaacgaagctgggttctgcttctctgcaacgctggaagatatccagaaaaacgactttgtgctaacccctgggcgctatgtgggctccgccgagcaggaagaggataatgagccgtttgctgaaaaaatggcacgactgacggcgcagcttcaaactcagatggaagagagtgcgaaactggaaacgcagattaaggtgaatctgggggggctgggttatgagttctaa

SEQ ID NO: 428668 - DNA, 918 bp, Serratia marcescens
atgtcagtacctacctacgaccaattcatcgagccagtgcttcgctttttggcaaccaagcccgaaggcgcacttgctcgagatgtgcaagatgcagcagcagacatactcaacctaaacgaagaacaacgagcagaaaccattgccagcggccaattggtttataagaaccgtaccggctgggctcacgatcgtttgaaacgtgccgggctctcgcacagcttatccagaggcaaatggtgcttaaccgccaaaggcatcgattggttaaagcagcatccaaacccgcttactgcagcagaagtagagcatctcgctttggcttataccaacgtcaaacttcaacaaaatagtgatgcagtggatttggatccggttacagaaccccttctcaccgaagcaatgttaacaaatagcccagacgatcgcctggaacaatcaatcaaagagatccgcgaggctgttgcaacggaactgctggagaacctaagccaagtatctccaggccgcttcgaggtcatcgtgctggatgtgctgcatcgcttaggttacggcggccatcgcgatgatttgaagcgtgtcggaggcagcagtgatgcggggattgatggcgtaatttctttagacaagctcggcttagaaaaagtgtatgtacaagccaaacgctggcaaaacaccgtaggccgccctgagttgcatgccttctacggtgcacttgtgggacaaaaggctaaacgaggggtcttcatcacgacctctggctttactaaacatgccgttgcctacgcgcaatcggtagaaggcatggtacttatcgacggtaaccgattggtacatctgatgatggataatgaggtgggtgttagttcaacgttgctgaaggttcctaaactcgatagcgactacttcgaccagtga

SEQ ID NO: 428669 - DNA, 1119 bp, Serratia marcescens
ttggcaactgcaatagaggcgttatcttcaaaagaatccgttttaaaagccatcgaagaatataagaaacttggccgagatgaattcttaaaacaacataaaattaagcgatttaaaaaacacacccttctttataatggcgagaagtacgatatacgaggcattgccgctagagcatacagtgagcagcatggttatccgtttaagggaatcaacaccgatagcggaacggaaaaagccatccaatttctcaaagacctcggttttgagatcgtcgaaacaccgcatccttttgagatactggaaaaagacgaagtttataaacgtaaatacctccacgacctctatggagggcaagaacagggcggaatatcgacacctaaagaattccccgtgatcttcattttcaccggcgagactggcgaaactcatgggtacaaagatggatggtctaacaacgaccacttctcctacacgggagaaggccagaaaggtaacatgcagtttaccaaaggcaataaagatatccgcgaccataaagagaatggtaaggatatacttttatttgaatataacaaaaaacgtacgggcgtgaaatttgctgggctatttgagtgtgattcatggaactacgctgaatgtaaagatacccaagaaaacatgaggcaagggataattttcaatctattccgtgtatcttctgcccaagattctgctcatgagattatctcatcagaagtaggccagaaagaggagagtttagaacagttgcgcgcaaaggctataaagtcttcagagatatcaggccagcgccaacagagcgacagcaaaaaatcctggttcaaacgcagcgaagacgtaaaaaaatacgtgctcaagcgcgccaatggcatctgcgaagcctgcgatcagccggccccattcaagaaaaggaacggcgagccctacctcgaaccccatcacactaaacgcctagccgacgaaggccccgatcatccacagtgggtgggcgccatctgcccaacttgccatcggcggattcatagcggggtagatgggaaagaggtgaataaacagctgatggtgaagttggagttgaaagaggccgctatcggttaa

SEQ ID NO: 428670 - DNA, 321 bp, Serratia marcescens
atgattcacaatcactttagcgagctcagtagcttattcagtatttacttcggtcaggattatgatttgtttactgatgccgaaacggccgagggtgtgattgacggcttcctggagcaaaacggcagtcaggtcatccgcgctatcctcgaggaggctaaagagtttcaggctacttatgcagggcgtataaacgaaggcatggcggagcattttacagatgagtttgtgccggagagctggggtactaccgcggtagcgttctttgccatgttgcaacgaaaagtagagcaaaagctggggcagcttaaacgaatttaa

SEQ ID NO: 428671 - DNA, 417 bp, Serratia marcescens
atgaacagaacgctggccaatacttttttccatctcatccgcgagttgcttcaggatcatagttcgcaatggcagaaatcgctccctgaactcagtaaacagcaatattccattctggccaccgtttcagaaactccgggtattgagcaagtcgagttaatggaggcggcaatcagcagtaaagccgcgctggctgaattactcagccgaatggaagggaaaggtctgttaaagcgtgaagcgggcgagcaggacaagcgccgccgatttatttacctgacgcctgcgggacaggcgctgttcgaagccagccgcccaatcgccgacgcgattgataacaggtaccttgaacgggtcaataaagagcaatatgagtcggcgcttttcgctttacagacgatggtgggaaaaaaataa

SEQ ID NO: 428672 - DNA, 588 bp, Serratia marcescens
atgagattaacgatcgcgatgacgggcgctaccggggcaccgctcggtacggcgcttctccaggccctgaaagatatcgaaggtatagagacgcatttgatcttgagccggtgggccaaaaagaccattgaacttgaaacaaagcacagcgtacgtgacgtgatggcgatggctgatgtcacacacagtgcggccgaccaggccgccacgatctcctcgggttcatttcgcatggatggcatgatcattattccctgcagcatgaaaacgttggcgggaattcgcgcgggttatgccgaggggcttattggccgagcggcggatgtcatgattaaagaagggcggaagctggtgttggttccaagggaaacgccgctgagcgccatccatctggaaaatatgctggcgctctcgaagctgggcgtttcattggtccccccgatgcccgcttattataaccatcccactcatattgatgacgtcaccgatcatattgtcgcacgggttctggaccagtttggccttgattacagccgggcaaaacgctgggctggattaaaaaaagaggtttacagtcaggagggttaa

SEQ ID NO: 428673 - DNA, 1428 bp, Serratia marcescens
atggcttatgacgatcttcgaagttatttggcggcattggataaggccgggcaattactcgacattgccgaggaggttcaggcggaaccggatatcgccgcggcggccaacgccaccggaagaatcggtgagggcgcccccgccattgcattcaggaacattaaaggctttgaacatgcgcatgtggtgatgaacaccctcggctcatggcagaatcacgccatcgcgctgggcctgccgccgaccacgccggtgaaacagcaaatcgatgagtatattcgccgctgggatcatttccctgtctctgcagagcgccgcgataatccgccctgggcgcagaatgaggtcaacggcgaggagattaatctgtttgaaatcctgccgttgtttcgcctaaacgacggcgacggcggtttttatctggataaggcctgcgtcgtttcccgtgatcctgaagatcccgctcatttcggcaagcaaaacgtcggcatttaccgtatggaggtgaagggcaaacgcaagctgggtttgcaaccggtgccgatgcacgacatcgcgctgcatctgcataaagccgaagagcgcggagaggatctgccgattgccattacgctgggcaacgatcccatcattacgctgatgggggcgacgccgttgaaatacgatcagtcggagtatgagatggccggcgccctgcgcgaaagcccctatccgatagcgacggcccctttgaccggcttcgatgtgccgtgggggtctgaagtgatcatcgaaggggtgattgaaggccgcaagcgcgagattgaaggcccgttcggcgaatttacgggccattattccggcggccgcaacatgacggtggtgcgtatcgataaggtttcttaccgaacgcggccgatttttgaatccctgtatctgggcatgccctggacagaaatcgactatctgatggggccggccacctgcgtgccgttgtatcagcagctgaaagccgagtttccggaagtgcaggcggtcaatgcgatgtatacccacgggctgctcgtcatcatttccaccaaaaagcgttacggcggcttcgcgcgcgcggtggggatgcgggcaatgaccacgccgcacggattgggctatgtgaaaatggtgatcatggtcgatgaggatgtcgaccccttcaatctgccgcaggtcatgtgggcgctgtccgccaaggtcaatccggccggcgatctggtgcaattgccgaacatgtccgtgctggaactggatcccggctccagccccgcggggattaccgacaagttgatcatcgacgcgacaacgccggtggctccggatgcgcgtggccactacagtcagccggtcaaggatttacctgagaccgccctgtgggtggataaattaaccgccatgttggctaaccgtccttaa

SEQ ID NO: 428674 - DNA, 228 bp, Serratia marcescens
atgatttgtcctcgttgtgccgataaacagatagacgtcatggcgcattcaccggtcaagggcgtatggacggtataccagtgccagcactgtctttatacctggcggaataccgaacccgcccgcagaacggaacgggagcattatccgcctgagtttcgcatgactcagcaggatatcgataatgcgccggaagtgccggccattcctcctcttttgacgaaatga

SEQ ID NO: 428675 - DNA, 591 bp, Serratia marcescens
atgaataacgaagacgtcgttttgctcgataccgcctggcagccttgcggaacgatgccgaaaaatcaggtgcacacgcatcatacgccgctgcatttggccttttcatgctacctctttaccccagagggcaacgtgctggccacaagacgtgcgttgagtaaaaccgcctggccgggagtttggaccaattccttttgcggccatcccttgccgcaagaggagctggcacaggcggtgatgcgccgtgcccaggttgaactgggcacggaggtggagcagataacgctgctgagcgaagctttcagctatcaggctaccgatgcgtccggcgtgatggaaaatgaagtttgcccggtatttgccgcgcaaataaaaggcgcgctccatcgcaatccggatgaggtcgcggattatgcctgggtcgagctcaatcatttaatggcggcggtaaaattaacgccttttggtttcagcccgtggatggtttcgcaattaaataccgacgcgatagccgcaggtttgaaagaataccgggatgcgataatggtcaagcgttcagcgggcggcgtagggggagggcggcaataa

SEQ ID NO: 428676 - DNA, 303 bp, Serratia marcescens
atgaaagtacttagtcaatatgaagagcagtacgttagcggtggcgatctgaacgcggcctgggatgggttgctggacggcgccatgaccggcgcgctgattgcaggcaaatccgcaggggccggcggctttattgccggcgccgtcggccaactggtcggcaccatcatcggcggcgtcgcaggcggtgtggggctggggctgtatggcctgacccatacgcagcaggaagtggcggactacgcaaaacatttccgcgaaactatcggctccacctcgacctcggtcggcggcagcctgtaa

SEQ ID NO: 428677 - DNA, 360 bp, Serratia marcescens
gtgagcggcgcggcggcagggcggcgccgtttctgccaggcgctcgatctgattgactcaccggcgctgattgcggagtaccagcagcatcatcagcgcatctggccgggcatcaccgcgcatttgcgcgagcacggcattctggacatggagatttaccggttgggcacccggctgttcatgatcgtggaggtcagcgccgatttcgacgccgcgcgttttgacgccgccagcctgaacaaccccgaagtacagcgatgggaagcgctgatgtggcactaccaggccgccaccccctggacgccgcagggcgaaaaatgggtggaaatggcgcggatattttctctgcaacagcaataa

SEQ ID NO: 428678 - DNA, 408 bp, Serratia marcescens
atgtcaaattatcattttttcatgctggtgtcatctgggtttggtcaccgcagtgaaaatgatgcggcggccaaaaaagtgttatatgatattggttatcattatcacttaaagggggttatcatgctcaccgccatgattgccgcgtgtggactgtggggcgtcagctggtgcctcggcgatcgcctggccagcgcctggggcgttttgctgccgtgcgcgctgatgccgctgctggccttgatcgatctgaatatgatgcagctgcgcaccctgattgtgatagcgatgctggcgacgctggtgatgctgttcaacagccggctgcgtcactatctgctgctgccttcctgcatggcgctggcgggcggcctggcggcaatcagcctcaacttcagcttcgcgtaa

SEQ ID NO: 428679 - DNA, 123 bp, Serratia marcescens
atgggcgcgatcaaaataacgccggataacgtcgcgcccggcaacgggccaaagtataacgtgataacgatcggcgcctcaaatggcgcacagggcctcaaggcggccgtcaaaagccgctaa

SEQ ID NO: 428680 - DNA, 588 bp, Serratia marcescens
ttgccacagctgcgccaacacccgcgccagctgtacccgctgctgttcgccgccggacagttggcggtagtcgcgctgcgccagcgccagacaatcggtctgcgccatcacctgttggatcgcctgatgctcgtcgcgtttgccgtgcggcgcccgccccatgctgaccacttcctccacgctgaacggaaacgccagatcgctgtactggcgcatcacggctcggactttggccaactgctgcggcgcccactgttccagcgggcgatcaagcaggcgacattcgccgcagtccggcgtcaaatagccggtcagcaagcgcagcagcgtcgatttgccggcgccgttagggccgataatcgccaccatttcgccgccggcgaggctgagcgaaacgtcgttgatcaagcggcgcgcaccgaggctgtagcgcagctctcgggccgtcaggcaggcggcgttatccaccggttcgctcccgctggcgcatcaccagccacaagaagtaaggaccgccgatcaggctggtcatcaaccccaccggcatttcggccggcgccaccagcgtgcgcgccagcgtatcgctga

SEQ ID NO: 428681 - DNA, 240 bp, Serratia marcescens
atgcgcggggtgatgtttgccgtgattccgtcgccgttattcgccatcgttttttggctgatgacaccgttttgtcagcccgcgttaaaccgcgtttcctccgccaggtggaaacgccaaactccccgcatccgtcctggcgacaggcggatgcgttctccctgcattccttcggtgttaatccgcccgtccaggctctacactacgctgaaacggagggcctatgccgcagttcgataa

SEQ ID NO: 428682 - DNA, 657 bp, Serratia marcescens
ttggcggtggaaatgttgagccgtttcaacagtctcgacggtgatttagccatgccggccgaaattgggattaatttattggcgcctgaacaaaggattgagttatttaatgagcaattgaaacttgcggagcggcacgcgggctggtttaccggtaacagcgtgcagttgaccatcaatatcgaagaaaccatcgtcgaacttattctttccgatccggcattgtgccaatggatcaggcaatatccttttattgcattcgaaatgagtgagagttttccgaatctttcggccgggaagaacaacccgaacgtgcagcgattaagcgaaatgtttacgctgtggctcgatgatttcggttccggtaaagccaccttgaccgcgctgtatgatggtttgtttgactatgtaaagatagacaagcgtttttactggcagctgtttacccatcaggggtatgacgtggtcatcgactcgttgttaaagaatatcaacctgttgtgtaaaggcgtgatcgtcggaggaatagagaaaaaagagtactttaataaactcagatacgccggtgttttaggcctgcaaggttttttatggcccagcgttggtgtggataatctgcaaactttgctggcgaagcccagcgagttcaataattaa

SEQ ID NO: 428683 - DNA, 573 bp, Serratia marcescens
atgatcgagaacaggcctttcttcatctcgccgccgtaccaggtgccgccgatcagctgcatgcgttccgtcaggttgaaggcgacgaagttctccgaatgcagcccttgctgctgccagtccgggttggtgcatttggcgccgttcatcaccacgaagtccggctcgaagtctgccagttcggcgtcgctcgggcgaataaacatgtttttcacgaagtgcgcctgccaggccacctcggtgatgaagcgtactttcaggcgcgtgtcggcgttggcgccgcagaacgcgtccaccacgaacaaacgcttgccggagagctggttgctcaccaaggttttcagatgctgccagacttccgaggagagcggctggttgtcgttcttgccggtgccgttgtccgaccaccagacggtatcgcgcgtggtgtcgtcgcgcacgatgtatttgtccttcggcgaacggccggtgaattcaccggtcgcgacgttgaccgcgcccagctgggtgagggtgccgcgttccagcggcggcaggtcggcgcgggtctcttcggcgaacagtaattcatag

SEQ ID NO: 428684 - DNA, 204 bp, Serratia marcescens
atgaacaaacgtcgtacgaccctcacggtgttggcgctgatcgcgtcgctggggttgtcatccgctccggctctggccgataagggcggcaatggtaacggcaacggtaatggccatggcaacagcggcaataacggcaatcacggtaacaaaggcaataaaaccattatgataacggcgtttatcgtaacgacgacaatctga

SEQ ID NO: 428685 - DNA, 603 bp, Serratia marcescens
atggcttcatgtcatcatcggctcacgatactccgcatgccgatgcttgatactaacaatgtctctggtggttgggtgttaattctgtataagtattcaccggggatctttttgaatacaacgttgattcggctgataatcatccataaggacagggatatgaaaataacgcattcaggctacaaaaccggtatcgcgatactattggcggcgatgaccgcgctgacgttaacggggtgtgccaagagtactgcccccagccaaaacgatacggcaaataaagaggtcgatgatcttttcgccaaccttggagccccaaagacgccggcaccgggaaaagagaaattacattacatgactcaggtgcaagctgagattcaacgccatttaaaagacgccgccacttactcaggccaacgctgtacattgcgtatcacgctggcgccggacggcatgccagtcggtgttcgaactgaaggtggcgatccggatctttgccgtgccgccatgaaggcggttgccgatgcgcgtctgcctaagccgccaacggcagagatccataatgcgttccaaattatcacgttggaatttcgccctcagtga

SEQ ID NO: 428686 - DNA, 1116 bp, Serratia marcescens
atgactgagacatcctctctgactccccttgttgaactgcatgccctgagcaaagcgttcgatggcaaaaccatcattgccgatctcgaactggcgattaaccacggcgaattcctcaccattctcggcccctccggctgtggcaaaaccacggtgctgcgcctgatcgccggtcttgaagacgccgatcggggccgtatcgtgctcgacggccaggacatcaccgccattccggccgaacatcgccacgtcaacaccgtgtttcagagctatgccctgtttccgcacatgtcggtgttcgacaacgtcgccttcggcctgcgtatgcaaaaggtgccggcgtcggaactgacgccgcgcgtcgaagaggcgctgcgcatggtgcagctggatgcgttcgcccagcggcggccgggccagctctccggcggccaacagcagcgcgtggccatcgcccgcgcagtggtcaacaagccgaaggtgctgctgctggacgaatcgctgtcggcgctggactacaagctgcgcaaacagatgcagaacgagctgaaggcgctgcagcgcaagctgggcatcaccttcgtgttcgtcacccacgatcaggaagaagcactgaccatgtcggatcgcatcgtggtgatgcgtgaaggccgcatcgagcaagacggcacgccgcgtgagatctacgaagagccgaagaacctgttcgtcgccagctttatcggcgagatcaacatcttcgacgcggtggtcttgcagcgcctcgatgcgcagcgggtgcgcgccaacgtcgaaggccgcgagtgcgacatctatgccgatctgccggtagagccgggccaaaagctgaaggtgctgctgcgcccggaggatctgcgggtagaagaagtgaacgacagcgcgcagcacgacgggctgatcggctacgtgcgcgagcgcaactacaaaggcatgactctggagtcggtggttgagctggagagcggtaaaacggtgatggtcagcgagttcttcaatgaagacgatccggacgtcgaccactcgctcaaccagaagatggcggtgacctgggttgaaagctgggaggtggtgctggccgatgaagaaatcgcgtaa

SEQ ID NO: 428687 - DNA, 144 bp, Serratia marcescens
atgaagattgcggcgcggataatcatttcgcttctgtgctttgccggcgcggtatttttttattttcaggccaagcaggttttttgccagcaggtctcttttatcctggatccctcctaccgttgcggcacgctgggttggtaa

SEQ ID NO: 428688 - DNA, 795 bp, Serratia marcescens
atgagtttacgccaggcctgcaggacgttatcgctgagcaggacggtgtatttttatcagccagatacccggcgtgatgagccggtgatccgggcgctgactgaactggccgagcgctatccgcgatacggctttaagaagctgttccagctactgcgcaggcagggcaatacctggaaccataaacgcgttcaccggatttactgcctgctgaaactgaattttcgtcgcaagggaaaacagcggctgccggtgcgtaatccggcgatgctggtgacgccagaggcgatgaaccagagctggtccatcgattttatgcacgatgcgctggtgtgcggcagacgcttccggacgttcaacgtggtggatgattttaaccgcgaagcactggcgatcgaaattgacctgagtattccggcgcaacgcgtcgtgagagtgctggacaggatagtggcaaaccgcagctatccgcggaagatgcgtatggataacgggccagaactggtctcactggcactggcgcaatgggccgaagaacatggtgtgttgctggaatttatcaagccgggaaagccgacgcagaatgcgtttatagagcgttttaaccggacatatcggacggagatactagatttttatctgttcagaaccctgaatgaagcgcgggaaattacggagcgctggctgactgaatataacagcgagcggcctcatgaatccctgaacaacctgacgccggaagagtaccggctgatggctgaaaccccggaaatctcaaaaagtgcgtggaactaa

SEQ ID NO: 428689 - DNA, 204 bp, Serratia marcescens
atgcgtaaagcccgatttgccgagcaccagatcatcaccgttctgaagtctgttgaagccggacgtaccgtcaaagatgtctgccgcgaagcgggaatatctgaggcttcgtactataacaggaaagcgaagtatggtggtatggaagcctctgatatcaaaaagatgaaggatcttgaggacgataaccgccgtctcaaatag

SEQ ID NO: 428690 - DNA, 3075 bp, Serratia marcescens
atggctacggaaatgttaaagcttcgtaccctgtcgataccaacccaacgatttactgcttcagttgatattcgtagaatgttacttagccataatgttttgcatgaaactgaagataataaattaacatttgggcatcaaacgttacttgatgtattagttattagtagagcgattcgtcatggattgactttaagtgattttataaaggatctcccaccagtaccttttgttcgcccatctattcgtagctttattgcacagcttgtcaatgaaggaagacaagagtttagaaaacagttacgaacggtacttactggaacttatgcttttcatatacgtcgcctagttgctgagtgttttgctgagcaattacctcaagatgatgattggccaatgttacgtgatttacgtaatacgcatcgagacgtttttcaggttatttatagcaaagcctcacaagttgaatggcattatttttggttaagtaatcttgttccggttttaaaagctatgcgtgatattgatggtatagaaattcatacttaccgtattgcacattggttaaatctagatccatcaggtgttattaatttttggatggaaatattgggatctgattggatagataagtcaaaattgataaataagattgctgtttctatatcgaatataaagaaagatcatgcatatttgatgtctccgctattactggagctatttaaatttccacaggaagaatatagctttttaggcagagcccttgctcgctgtgttgctgcaggggggatcgatgatgcggtgctttgggattacatcattgctgatgttaaagatgaagacatactgacctatcgttttggaaataagcttaagtgccgaccgcacgaatttggtgataaggataatgaattcctttcaaatagaatgattaattctattactttgttagagcaggctatatcgacaattgaacagtggagccaagtacggagttatagatatgaagaaaaaaataattatcgaagtggttttctaaatggaacttctcattatgatgatcgcagaatgagtgattttgagcataaagatagtcaacgtgtcctgatggatgctttagaagttgctattattcatcatgctaatatcaattctgagtggtggcaaaacaatcgtgaacgtttatgctttaatctggaaggatcgcttcgttactttgcattgttagcgtgcattaattctccgctaactaatcttgacatatcctctcgtttgctgtcgaaatcggatttattagagtctgagctttcacatgaactgggcactttagtgcagaaagtttttatccatttgagctcagaatcccaagacgcaatacaggttataatacttgctctttctcagagatatgctgatctccctgagtataggcaatatatgcttaaagatcaggtcaagtttattatttgtataccgtgctatttacgttcgccgtcatgtgtaagtattttagatgaatatagtcgttcaaactggccacttgaacataaaccagatgttaatggatggtgcgggatagtaagagctccgttctcatttgaagtttttaataagattagcaatgaaggcgttctcagtcttcttgagcactataatgggtataggcgagactcatttaacgatatgttaattggtggagaggagcaagtcgctcagcaactgagtgaggcatcttcaagggatccattacgatttttgagtttgttatcttcttactggcaagatataaatgaaaatttccgaaataatattatgaatggtattgcgcgttatttgaattatcgttatggcaaccttcggcaaaataatgactggaaaccgattaatgaacctaatattgatattttagttagcaatactttagatgaactggaacgacattctgtctattggcggcaaaaccgctctgcttccgaagtgctacaagggtgctcacatgtagtaaaagatatcaataatgcggaaagaataacctttttatctattccctatttagccgtggaggaaagagatcctatctcaggagatggtgtcacttttattggtataggtattaatatgattcgagggcatatcgctgatgcccttatggttatggcaataaagttacatgaagaacatatttcttggcctgaattattgttaccgacactacaccaatttgctactaacgagcatcctgcagtgcgagctgtagtattacgccgtttacctcatttacagcatattttacctgaggttggttgggtggtatttgaattaataatgcgaaaaggtagcgaacgactttgggatatggcagaacgttgtctctattatacctatcatcatgagctcgacagagtttccccatggttaaataagattgtatctgaaggtattaaaggcggattgcaagcgtggggaagaatatctgcattggctgtattgtcagaaaaaatagaaagtcgtgattttatcaaacaattaaaagaattaagcgatagtgatgcatgggaaggtgctgtcgatgtttggacgcatcgtgagaattttcaacggcatcaggatttatgtcttgctggtttggatgctgcgttaagtgatgataatcaatattcctcagaattaatagcgtcaatgggtggtatttttagagggaaagagccggttattattttacccatgcaagtgttagagcgttatttttcattagtatttacgagttcagagtcatcgaaaattgatttgttcgattttggctcgtggttaaatattgtttcatgcatagaaccattgtatgcattgagggctacggagatttatcttgaatatgctcgtacaacaaaagtctatttacatgattacaataataatttaatgcagctattgactcgtttatttgcacaagcagaagagcaggaagaatcggatggcggagaaatgctatatcgagtggttgttttgcaagacactatgttggccttgggtgttgatggggtgagtacatggttagaggccgctgagagagcataa

SEQ ID NO: 428691 - DNA, 993 bp, Serratia marcescens
atgaaaataaaatcaacatggcggcctggcagggcgaatattaatatggtgttcactctattttttttggcgttcatttcaccccaagcttactcggtgtgcggcgcaatgtttcacgtaccgccgtctatttcacaaacgggcattacggcatccgttgatgccaaaaacggctcactgctgagcagcgggcatgtcgatttttctgtgaaattatatggtaatactcgtggggatgattgggatctggagtataatcgcggtgattttgttctgcaaccttatacctatctcaccgcaaccaatttcaaatactacggcatgagcgtttataaaacaccgaaagaaggggtcggtattgcaatatcgataaacgattccggggggcttaatgacgtgaatgcgcccaaaaaaaccccggtaaactatattctttacactcacttcaaatattatctggtaaaaataggagacatcacttccggtgtcattcctgagttcaatgcttttgaactgaactatgcctgcctggggataggtaatggaaaaagactcggttctaccccctttctctccacatatatttccgcccaaggctgtcggttaaccacccccgttaagtatgtaaatttgggagagataaatcgaagagcgttctccggaaatggcagcatcgtagggggaacccccttcgacatcacaatcgactgtaattcaaatgccaaggttgacttggaaatcaaagggcaaaccgtcagtggcaacagccaggtattggcaattaatcgttctgaccaggcggccaaaggcgttgggctgctaattctacacaacggaattccttttgccctggggtcaaaaatcaatctattagataccacgcttaccggtcaaaatgtgattcccttcctggcaaaattttaccagacggaggaccagataacgccgggggaagtgaatgctgtcgctcaatttaccttatcgtacagataa

SEQ ID NO: 428692 - DNA, 2475 bp, Serratia marcescens
atgacgatgataaagaaggtttacaataaaacatcggtgctgttcttatgtgttttatcttcatctgcggctttagcggaagagtactttgaaccatcagcattaaacagggattatcagacgactgctgacttatccaaatttaatcatgcgagtcatcagttgcctggtgagtactgggttgatatttatttaaatagcacttttttcggcaaccagaaggtgacattttatcaaacagatggcattttgcagccacgccttcaccgcagagatctggacaattttggcgttcgtgccgatagactcaaaacacagagtgatgacgagatagcctctcgcccgctcaatgagatcattccaggaagtcaggtaacgtttaacttcaatcgtcaaagattagatatcagcattccgcaagcttatattgaaaaccaaccgcgtgattgggtaaatcctacgctttgggacgacggcattcgcgcctttctgatggactatagcttcagcggcaccgagtcatggcaacatgggaatgcaaaaaagggtgacaaccaatatttgaacctgcgcagcggcgcaaatttcggcgcctggcgattgagaaactacgctacctattcaagccagagcagcaccaagtggaaaagcatcaatacctatgccgaacgtagctttagagatagcaaaaaccagctggtgatgggcaacagctcgacctctggtgacgtctttgacagctttcaattccgcggcctgaaactcgccagcgatccctccatgattcctgacagccagagaggatttgctcccacagtgcgaggggtggcgcaaagcagtgccgaggttcttgtaaagcaaaatggctacatcatttatcaaacccatgtacccgcaggcaattttgagatcacggacatctaccccaccacgtcaagcggtgggctacacgttatcatcaaggaggcagatggctcagaacgcagcttctatcaacccttttccgctgtacccatcatgcttcgggaaggaatgaagaagaacgaattaactctgggtgaatatcgcgcagcacaaaacgatcgcccaaattataaatttcttcagcaatcattaatttatggcctccatgacgataaaacgctctatggcggcgccatactttctgaacaacaccagggaatcgcttccggcatcggcagcagcttgcggaatttaggttccgtctctgccgatgttacacacaccaaaagccggctcatgacaggctccacccgctcgggccagcaatatcgcattcagtacgcaaaaaatattgaggcaacaagcaccaacttcacgctggctggttatcgatactcaacgtccggttatctaaatttctcggaactgagcgatatgaacgccaacctggagaaaaagtggctggcgcgtgacgtgaaaaggagcagattggttctgaatattaaccaacccgttcacgactttggcagtttctacctcaacggttatcaacagaactactggcacaacagcaacgttgagagaaatttcctgtttgggttctcaacgagccaaggtagcgttagctacaaccttgcattgagttacaatagcggaccctatacggataaacctgacaagatcgccacgctcaacgttcaggtacccctgaacaaatggcaatcgaacagctgggttaactacaccgccagcaaaagcagccaaggaaaattcaatcagcagttaggtttaagcggaagcgctctggaaaataaccagctcagttataacgtctctgcctcccaaagtaacacaaaatctggaacgtccggcaacagtgccgcttattatcgcggcggatatggtgaaataggtgccggatacagctttgaccgaaatatgcagcgggttaattacagcttacgcggcggcgccgtcgcccatgacaacggtattacattatcgcaatcgctgggcgataccatcgcgttggttaagataccgaacgctcgcaatgtggaagtgattaacagcaccggcgttaccaccgactggcgcgggtatgccgtcgtgccttatatcaatagttatcataaaaaccgcattagtctgaatccacaaagttttggtgatgatattgagatcgcaaagaacagcacaattgtcgtcccgacgaaaggcgccgttgtaaccgctcacttcaaatccaatataggccacagggtgatctttaaattacgtcacaataccgatgagatccccttcggcgccgtcgccacattacaaggtgagaacgaaaaaacaggaattataggaaatgataatagcgtttatatgagcggcatgcccgatacaggaacgatcacggtgcgctgggaaggagagaaaaattgccaaggagattacacgatcggcgatcgagaatcagaatcgaggataaaaacaataaacatggcatgcaagacaggctaa

SEQ ID NO: 428693 - DNA, 681 bp, Serratia marcescens
atgaaaatgagcaggctttatttatccgcgttattttttttgtcatttaacgctgctgcaaacgtagtcctcggcggcacaagaatgatttatgacgaaataaaaaaagaagctaatatttccgtcagcaaccaagatagcagcaaacccgtactcatccaaacctgggtcgagaacttctcctcgcagaataaagatgaggttcctctcattgttacaccaccgttgttcaggctagagccagagcaagagaatattatccgtgttatttactccggcgcagggctgccgcaacataaagaatcaatatattggctgagtgtcagatcaatcccctcaacccaacggtctaaagaaaacaaactacttatcaccgtacaaaatagaattaaaatactttacagacccaaaggactatcaaaaaaagacgcttctgaagcctacaaaaaaatcagattttcattaactggagataaggtggaggcaataaacccaacgccgttttatgtctcattctactcggttgctctgggaggtaaagagctcaaagaggccgacatgatcgcgcctcagagcacaaaggcatggagggctcctcatggaaaactggacagagaaataaaatggcaagccatcaatgactatgggggcgtgaccaaagagatcaaagcatcattatag

SEQ ID NO: 428694 - DNA, 537 bp, Serratia marcescens
atgaacaagttcgtactgaatactttgctgttcgttggcgcacctttcgccatgtcaactattgctgctgctaacgctgcggatggaaccattaacttcaccggcaatgtcaccgaccagacctgtacggtagaaacaagcagcgccaaccaaaccattcctatgggtaacgtaagcgccaaggccttcaaaaatgctggcgataccgccctgccgacaaaattcaacattgctttagccaactgccctgaaactgttaaaaaggcttcggtgaaattcgacggcatctatgcaaaagacaatactgcactgttgtcattgaaccaagaagcaggcgtggcaaccggtattggcattgccctctatgaggctgatggagcaacacaaattccgatggcttcattttcgaatgcgcagagcgtgcaaaaggacatcagtaatgtctttacctacgtagcgaaatatatgtctacctctgacaccgttaccgtcggcccggcgaatgccacgacgcagtttagcatcacctataactga

SEQ ID NO: 428695 - DNA, 1065 bp, Serratia marcescens
atgaaaaaaaataaaaatatcgcaattgttggcggcggtggagtaactgcggtgatgacggcgctggcctgtgcgagaaaaggaatctccgtcgactttttcctggacgagacgaattacgatgagttcagaacatcttttggcaatcactgtttgtggcgaagcgtccatgagaataatcagcgcctgacgcgtttttcctcgcagtcgcaatggatatgggaaaaatttattctgtcatccagcggtgaatatgggagaaaagagaaaatgagccgcgttgtcgagcgcgcagagatcggtcgcctgagcagattgtatgagcagcatggtttaccttatgaggtgaagaattacggtgaagacaatcttcttactttgccttcgtttattgattgcacgaacaaatcgatctttgtcagctatgattccattctgcttaacaccgcagagattttttcctattttcaggatgagttggccttttttactggggtgaatatttttagaaataaaaatatcggtggactgaaccgaattgaaggcggagtgatttttgttgatgagaagaaacggctgtatgatacgatcataaaattcacaaattgctttgaattcaatatggtggagtcatttgatgctatattccccgatgtggatatgattttcaaagattattatctgtcagactctgtttcgcatctgctgcatcctgtattaattacagaaaaggagttcaatatctggattacgccttccgtggatggtgaagtgataagggttgctatggagactcatgttcctcaatccattgaggttatgaagcgtagtctgaatatcgatgcgtatgtggatcgcagaaaaatagatgtcatctctagcgcgttgtttacacatacctcatcatttacctattcagagagtcccagaacggttgttccctgttggacatcaagcgaggatgataagaaaattgtggtcgtggaaagcgttgactcttattataattcatcgccaattatctccgaggagattacgacgctcttaggccgctcaattaactga

SEQ ID NO: 428696 - DNA, 333 bp, Serratia marcescens
atgaagaagattttattaattatggctctgtttattactgggtgtaatactgtaagcagtttgaaagataatactcccattgcttcggggaactcgaaaaaatcggaaaaggcgttcgtctattgtgtgatcgctgagtggaataagcattcatatttgcaaccgatgattactcaaccattaccggatggacattcgctacagtttaacgatccctggcgtggtcccgtattcatccttgatgttgtcagtaatagtgaaggtagcagttatcgcttatatagaagtaaagaaatagatttctatgagcaggctatcacgcaatgtaaatga

SEQ ID NO: 428697 - DNA, 615 bp, Serratia marcescens
atgtcttttatcgatattcctctaagaactgtccggtttcatggtccgatgattcagttgtttggccgggagtttaaataccgggccatgactgttcccaaagccattgatgcaatgaagaacttgttacccggcttcgagcgctacatgctggaggcgcacaaacgcggccttacattttctattttcgttggtaaacgcaatgtcgggcaggatgagctggagctcaccaaagggacggaagagattcaccttgttcccgtcgtgattgggagcaagcgcgctggtttattccaaactattttaggtgtggcattaattggcgcggccatagtgttttcacctgctggcctgggggtcttttcggcaaccggcgggtggacgactatggcttatacaggtgccgcaatggctcttggcggcgtcgtccaaatgctttccccgcaaatgggcgggctacgtatgcggcaaggcccggaaaataaaccgagctatgcctttggcgggccggtcaacaccacggcgcagggcaaccccgtcggcgtgctgtacggcacgcgtgaaattggcggggcgattatctccgcaggcatttataccgaagaccagcaataa

SEQ ID NO: 428698 - DNA, 1164 bp, Serratia marcescens
atggtattaattagcggtgttttgaagggcccttacggcgatcctcgctccggtgtaacgattacaatgcgatcaatgaagacatcgtccacggtgttgaatttggctaagtcgcaatctgtaactgatgatggcggccggtattcgcttaacgtcgagccaggtgcctacgaggtaattgtatctgtctacggtgctcagccagagcgtgtaggtacaatagaggtttataccgattctcttcccggcaccctcaacgatttcctgcgtcggccaggtgaaagtgacatcacgcctgagattgttcaaatcgtcgatcgcctccgagccgatgccgccgcttcagcagcaaaatcagcagcctcagctgctgcggcaaaaatcagcgaacagaacgcagctaatagcgtgaaaccggtgacggatgccggatttggcacaggcccaattcatcgcgcagatgtttacgcacagggcaattcgtcatttttgcatcgattcaatggcacgtcagcaaacgtgcctgcggcggcgcttgggagcgtgttgtctatgccgatggacggaggcccaacgtgtggatatatcgctgtcagttccggtcgcgccgcatggattggcatctctaacttttccggaaaaacggtatcgtgggtatcgttgtggtcatcgggtaacacaaccgttgatgccaatggatttatcaaaaaggcatctccgatcgccaggttgtccagcgcgccggaaaagatgaccgatgactatcttgatggttttacgttgtctggctgtgttgcgctgaatgctgaggctgagggggtatccgctgagcgtgtttcagttggcgtttacaaagtcaccggggcgctaggttttgcggaagagggctggacgatcgaagtaccgcaggacgtgaacggtaaccgcctgtgctttgtggaaaccgccaccgacagcgacggcgtgattacggtgaaaatcagcaaacgtcgttttgacatcgataccgcaacgatcgtggccggcgaggcgatggatatccctgaagggcgctggatcgatctgcgcctcaccatgccggtgcatgaagcggtggaagtgttgccgccggaggcgctggtatcaaacgatgaaacgccatcggaaaccaacgcggcttcataa

SEQ ID NO: 428699 - DNA, 615 bp, Serratia marcescens
atgtcattgaaaatgataggcgaaaacctcacttacctcatgcgcatgcacgggattgacgccagtcgcttgagcagcgaaacagggataggtattgcgaccatcaataatctgaggaaaggggtggggaatcccacgatcgccacgcttgcatccattggtgaatttttcaccgtaaaagtaggggagctgactgacaaggatttaagcgtcacaggggaggccaaacacaatgtgagatcgctgccgctcattagctacagcgatgtagagcgttttctggccaacacgatcagaacggcagatacctatacgacagaagtcgatgacatgacggacgattcgctgtttgtggcagagataacgaataattcactgtcgcctgaattagaccgtggaacgtattgtgtgatctccctcaaggagccattttgtgatggggatatcgtcctggttaagctgaaaaattacccaatatgcttaaggcgagtttttgtttctgacgacgacttgttgtttacaaatatctcattagattcagatagcagcgtgaagtcctatagcgattatgcgatcgtcggtgttctattgaaaacgataaagaggctgaaataa

SEQ ID NO: 428700 - DNA, 489 bp, Serratia marcescens
atggatttatttaacataatgagaaggctaagaaaaatatactctcccagttacctctatacgttagatcgcagtgtgatccgaacggcggatggatattggcttttcaaagagtttggcacccatactttcgtgaaaaaaaactgggcgcaactcatcgagggcgattttctcaggcacgttaacccgaaagacatcgcttttatcgccgagaccgagtctaaaataaaaatcgcctcggccaaactgtcgattcatgaagaaaaaagaaactgtatgtggacgttgaaaaacgacgttgactcgatatcaatatcaggggcggatttcctaaaggatcgcgatcttgtcgacaaaaccgagtccttggatgcgacgaaaatagccttttatgccggggtaaaagaaggcagagcactctctgcctctttgaaaaatgcaaagaaaagcgacaagtctaaaaaaacaatactgacgttgattaaataa

SEQ ID NO: 428701 - DNA, 732 bp, Serratia marcescens
atgaaagtaattcagattagcgacatacatattatgcctaatgaaagcgcgctggcttcgaagcatcttgctaatttcgacagggccattgacttcattaatgccaatgcagataaaatcaatgccgacttaatcattgtgacgggtgacatctctcatgatggcgatatcccctcttatgagcgcttctttaagataatgaaccgcacttccttacctttctattttttcccaggcaaccatgacaacaaaaagaacctggacgatgcagcccataaacagggcggcaactatgatataaactcgtttgaagatgacgaatggcgcatgctcagcatcgactcggtggttgataacgaagatttcggcagggtctcgacgcatgcgctcgacacgcttgaaaaagccatcgccgcaagtggcaataaaaaggtcgccgtcttcttgcatcatcaccctattcctgtaggcaccccgattgttgatagctgtatgttaaacaatgctgaggagctattgagcctctgccaacgattaaacgttaagtttatcggctcaggccatgcgcatacgttattccaaagaaagctgggggaaaccttaatctctgtttccccggcaatttgttcgcaatggaaaaacggcacaagcgatgtcagcagcatagacaactcggctttcagcgtaattacgttcgatgagcatattcacgtcgaaccctggtttatttaa

SEQ ID NO: 428702 - DNA, 663 bp, Serratia marcescens
atgcaaggaaatctcaagctctatggcctttttgttggcctgacggtgaccattatgatcacctgcgacacgttggtttataaggtctttgatatctatggttttaaaataacggccagcggcattgtattctccctgtgtttcttgatctccacattgcttactgaggtttacggctataaattgtcggtcagagcaatatggatcatggtcttctgtcaaagcttatatgtcataatacttaatctctcagccgttattcagccagaaaacaacgatatcgccacgcactattattctttgtaccacgaattctggcgagtcatgatcggtacctgggtgtccgttccggtcgcttatttcgtcaatggcttcattatttcaaagatgaagattatcttctccggcaaatacttctttatccgatatattgttggctccatgtctacgcaggccgccctgttgctgacagcctatccgatcagtctttcaggaaaatacaccttcatggagttggttaacatcataagcacaacctggtcttataaagttgtcgtctccattgtcttgctgccgctcgccatcgccttagtcgagtgggtgaagaagatagaaaacaccgatcactatgattggggcacctcatacaatccatttaagtaa

SEQ ID NO: 428703 - DNA, 1107 bp, Serratia marcescens
atgggttcggtctccgaccgttccaacccgcgggtgttcctgcctgccggcctgatcctggcggcggcggtgatgttgttcatgggcttcgtgccgtgggccacctccagcatcgccatcatgttcgtcctgctgttcctgtgcggctggttccagggcatgggttggccgccgtgcggccgcaccatggtgcactggtggtcgcagaaagaacgcggtggcatcgtttccatctggaactgcgcccacaacgtgggtggcggcctgccgccgctgctgttcctgctgggtatggcctggttcaacgactggcacgcggcgctgtacatgccggccttcggcgccatcctggtggccctgatcgccttcgccctgatgcgcgacaccccgcaatcctgcggcctgccgccgattgaagagtacaaaaacgactatccggacgactacagcgaaaaagacgaagaagagctgaccgccaagcagatcttcatgcagtacatcctgccgaacaagctgctgtggtacatcgcggtcgccaacgtgttcgtctatctgctgcgttacggcattctggactggtcgccgacctacctgaaagaagtgaaacacttcgcgctggacaagtcgtcctgggcctacttcctgtatgaatacgccggtatcccgggcaccctgctgtgcggctggatgtcggacaaagtgttcaaaggcaaccgcggcgccaccggcgtgttcttcatgacgctggtgaccatcgccaccgtggtgttctggatgaacccggccggtaacccgaccgtggacatgatctgtatgctggtcatcggcttcctgatctacggcccggtgatgctgatcggcctgcacgcactggagctggcgccgaagaaagccgccggcaccgccgcgggcttcaccggtctgttcggctacctgggcggctcggttgcggccagcgccatcgtcggttacaccgtggacttcttcggttgggacggcggcttcatggtgatgatcggcggcggcgtgctggcggttatcctgctgctgctgaccatgctgaacgaaaagaaacaccacgcggaaatcgccgccaagcgcggttaa

SEQ ID NO: 428704 - DNA, 732 bp, Serratia marcescens
atgtgcgtccacgccactattgagcctttggcgtgggaaagcgagtttttcgcgctagacagcgcgaaactcggcttctcctcctcggccccggcgcttgccgaagccgacttggcggcttatgccctggtgcaggcaaaaattcccgcgcagcaactggcattggcggatagtctcgccggcttgggatttcgtctggttgagggtgaggtcgatctggtcctggctcttgagcgtgaacgagcggcggaacccggcgacggagccgagacttcccgtctggcaaccgagtccgatatcccggcattgcgtgccgcggcggctcaggcgttcaccgtcagccgctttcgcgcaccttggtatcaacctgatgacagcggccggttttatgctttgtggattgaaaaggccgttttaggcacgttcgatcatcagtgcctgttggctctggacaaccaggggcaacccgaaggctttgtcagcctgcgtgacattggcggccaggaaatgcgtatcggcctgctggcggctttccccggcgtatccggccggggcattggcactcggctgatgacggcggcgatcgccgaatgtcggcgtcaaggtatgcagcgcctgcgggtcgcgacccagataagcaatatcgccgcattacgactctatcaacgacagggtgccgtgattgaaagcaccgcgtactggttatacagaggtagacatgattccatttaa

SEQ ID NO: 428705 - DNA, 360 bp, Serratia marcescens
atgaaaaaacatacgtttgtcgccctcctgctactgtgtttgacgcctgcgctggcgctcggtgccgcaccgtcccccaaagctctcattaaaacggctcccgtttaccctgaacaggccctgttgaaaaacaccaatggcatcgtcaaggtgaaatatgatatcgagcacgacggcacggtcagccatgtgcgtattatgcaggcgaaacccgccgggatctttgacgagccggtgctgactgccatgaaaagctggcgctttgaacgcggtcagccagtgaaggatcgtgaatttacttttaacttcaccaccaaaccgcacaactcagtctatggcaatggggttccgtttcgctga

SEQ ID NO: 428706 - DNA, 273 bp, Serratia marcescens
atgagtattaaattaattgatttgacgaaagatttagtgtcatccaaggtttcacctgaagattttgaatctcgcttttttaagttatggcgagatgagggtaattcaggggtactggcaaaggataacaaggagattagtgggtgtttatacgaaatttttgatctggctgagcggtacacatcagatcctgatcgttcatcaattgaaattgatgaaaaaacgctgaaaaaagaagctgaagtaacattgagaaaatttaaattcatctga

SEQ ID NO: 428707 - DNA, 1293 bp, Serratia marcescens
atgcagcggtttgcgccacttctccatgtattcagcgggcaacgtaacgaagggttgcaacgggaactggacgcgcaggcaagagcgaaagccgaagcagaagcccgaaaggccgaggaagcccgcaaggccgaggaagcccgtaaggccgaggaagcccgtaaggctttgttcgacaaagccggggtgaaacccgctcccgtgtatacaccggcgatggtagcagaagcgaataaggcgctcaaagcgccgggcgctatggtgctgaatcagacgccggggacggcgcagatagcgttggctggagctggagtgtggacagctgccggtaatgtggcaggcagtattaccaactggttcagtaatgcgctgtccaaactgtccgttccggcggtcagtccggggcttcttaaggcatcgatggcgactctttggttccattcaaaacctgctggtcagggtagtgatcaagttccagggcgcgacgttcctgcgctgtttgcgtttccggcgcgggctctggcggatgcgaaggcgatagaggccgggatgaaaaccgtgaatatgccggcgcgtgggagtctggtgaagagcaatgggcaactggcgctgcagctgctgaaaaccggtaacggcggtattccggcggcggtgcaggtgctgacgggggtgcgtgatccgaaaacaggtctggaccgtattaccgttccggcaattgccggtgcaggcgtccctgcgcggaccatcctgattaacccggctcagccgccctcagcgccgtcaaataccggcacaccaccgcctccggtcccagtgacccccgtccatactggcacggaagtgaaaccgatggacaccatcacggtgaccacgacgccggtcgcagaccacaacggactacaggattttatctactggcgtccggacgcggccggaacaggtgtagagccggtgtatgtggtgctgagtgatccgcttgattctggacgatttacacgtaaacaattggatagaaaatacctcaaacatgctagtgattttggggttagtgacacgaagaaaaatcgtgaaacgttgactaagttcagggatgctattgaggcgcatttggcggataaaggaactgtggagaaagggacttaccttcatgaaaaaggatcaaaagtattctttaatccaaaaacaaataacgtcgttattttgaaggaaaatggtgactttatatctgggtggcatttaactgtgggaacaccgcaatatgaggtttacattaaaacggggagtttgagatga

SEQ ID NO: 428708 - DNA, 207 bp, Serratia marcescens
atggagcataaatgggaagttaaatacgatccgtataattataataacggggtggcacctgaacccggattatattggcaaaacggatcttggagttgggaaaatggagaggagaccctgacagtcactgcaattccgatccctgggttggatgaaaaagtcaaagaatgtctggccaataatatttgttttatctgcgaaaagtaa

SEQ ID NO: 428709 - DNA, 1128 bp, Serratia marcescens
atgaaaagggctgttattgccgcattattgagcgtcttgatctctggatgcgggccaaaagcattgtcgcctgaacaaatacagcaggtagccgatttaaagtcagagctggtgagtacggatgccgagattgaaaacgcagctaaacagcaggacatgttaagcggcggcttgattaaatctctggtgatggcgcgactggaaattctgaaaacgaacaaggcgcttattcagcaacgaatcaatgcgatcgagtctggagcaaaggttgaggttgtcacgaaccagacctcgccagatctgaagctggcggaaaaactcaccgctgaattggcaacgctgactcgggaaatatcgaccgctaaacaagaagccgcacaatacgatggtggtctggtggggtcgataaaaaaggcaacgatagccactcaagagcaaagtctggcgatgttgcagcaaaaattgctgtcggcgaaatatggcctggccgtcccgacgatagcccaccatgcaacatcaaccgcttcaaaatccaatcagcaggaagatccggtggcgaaagacgcgttgcttccgcccggcattgggccgtttggcctacaaatggggttaacgaaaaagaacgtcgaggacatgacaggcgttaccttaacggcaataccgaatagtcttaatatttatactacggaggtcgtccccaaaacgtataacgcctttgaaacctacattttgctcatctctcccaaggttggtttatgccgaattcgcgcgcttagcggtgatatcaatacggacagttatgggttggcgttaaagtccaaggtgaaggacattgctgaatcattgaccgctaattatggcaaaggaaaagccactgatgtgctgctgccggggtcgttatggaaagagcctggtgattggatgatagggctgcttaaaaaagaacgctatttcggttttgactgggaagagaaaaaagataaaccgttcaagaacgatttgcaggggattatgcttgaagcgaccgccgtcaatagtgggattgggagcgtttatctgcaatatgattttaaaaatgtcgatgagtgcataaaggaagccaatgacaaggaaaacagtgcactatag

SEQ ID NO: 428710 - DNA, 1350 bp, Serratia marcescens
atgagcccagataccgctcgcatcagcgaaattatcgatcgcgccaggatctcgccttatcaaatcctcatccttaccctgtgtttcctgatcgccctgctggacggcttcgataccgccatcatcggctatatcgctccggcgctgcgtgaagagtggggcctgcaaccctcgcagctttctcccgccttcggcgcggggctgttcggcctgctgatcggcagcctgctgttcgggccgatcgccgacgccatcggccgcaaacgcgtgctgctcgtcgcggtgctggtgtttggcggctgcaccctggcttcggcctatacgcaatcgatagaatccctgaccttgctgcgcttcatcaccggcattggcctcgggggggcgataccgacctgcattaccctcagctcggagtactcaccggcgcgccgccgcatgctgatggtcaccctgagctggagcggctttaccgccgggctggccctgggcggcctgctggccgggcagatcattccggcgttcggctggcgcggcgtgctgctggtcggcggcattgcgccattggcgctgctgccgctgctggcctggcagatgcccgagtcggtacgctttatggctgccaacgccaaacatgccgatcggctgcgccgggtggtcgagcgtatcaccggccggcgttggacgggggtcaccatcgtcgatgacgaacgcccggcacaggccaagtcgccgatctcgcacctgtttatcgaagggcgcgccgtgcgcaccctgctgctgtgggcggcgttcttctgctcgctgttcgtgttctacctgctcaccagctggctgccgacgatcctcaaagacgccggttacgatatcgcccacgcctcgcgcatcggggcgatggtgccgctcggcggcaccctgggcgccatcctgatggcgctgctgatggatcggatcgggccctaccgcgtgctggccgtctcctacctgggcgctgcgctggtgatcggcgcgaccgggtatctgatgggcgacgtctatacgctggccgccgtcgtgttcctgattggcttcggcgtggccggtgcgcaaaacggcctgaacctggtctccgccaccctttacccgaccgctgcccgcgtgaccggcgtcagctgggccatggccaatggccgcttcggttcgatcgtcggctcgatgctcggcgcctggatgatgaccgccgccggatcggcggaagtgttcttcctctggctagcgctgccggcgctgctgggcgcggtcgctatcttcctgctctatcgcctcagcctgcatcgccgcgcaccgctcgccaagccggtcgccggcgcctga

SEQ ID NO: 428711 - DNA, 1836 bp, Serratia marcescens
atggcactctcagatatggctgcccggaacgccaaggcgaccggcaaggcttacaccgtcagcgacatcgacggcctctccctcgcggtctctccgaccggaggtaagacctggcactaccgttactactgggctggcaagcagaagcgcatgtcgctgggcacctatccggaggttggccttcgggaagcgcgcgccctccgcgatgcggcccgcgcgttgctggccaagggcatcaatccccgagcagatcgcaagcagaagcgccaggctgtccgtctggccgacgaacacaccttccaggccgtgttcgacaagtgggtcgagcaccgcaggctcgtcctcaaggaagggcgtcagagcactctgacgcagatccttcgcatctttaaaaaagacatcctgcccacactcgggaaacgccccgtctacgaaattcagcgtccggaccttctggaggtcgtagccaggattgagcgtcggaaggcgctcagcgtggcggagaaggtgcgtacctggttcaggcagatgttccgatacgcgctgatcatcgtgcctggcctgccgcagaacccggcgttcgatctggatgtggtggcgttgccgatgccgcccgttcgtcacaacccgttcctgcgaatggatgagttgccggcaatgctgtcacggctgagaaagtaccatggtcggcttcagacacagctggggcttcgactgctgctcctgaccggcgtgcgtacgggggagcttcggctggcgacacctgatcagtttcatctcgatcagggtctatggatcatccccccggaggttgtgaaacagttgcagcttgagatgcgcaaggagggcaagcggcccggcgacattcctccctacatcgttcctctgtcggcacaggccatggagatcgttcagcacatgctggagcagttcaaacctgctcagcgctacctgttctcacatggctgggacctgaagaagcgcatcagcgagaacacactcaatcaggctctcaagcgcatgggctatacggatcaattgacggggcatggcattcgggcgacgatttcgactgcactgaatgaaatcggctatccgaaagtctgggtagacgcgcagctttcgcattcagatcctgacaaggtgagcgccgcctacaaccatgcggaatacgtggagcagcgccgacgcatgatgcaggattgggctgaccggctcgatctgttcgaacagcatcaggtggaggccgcgagcatgcacctgaccgtccatctggaaggtgttccggaggttcctgatgaagttccagagggggcggaggtcgccattgcacctgcccctatcgtgttggtctcgaagcctggagtcggcatgcctgcgctgccggacacggtgcatcgactgtccgcgatcacggggccgcgtacaccaccggtcttgtcggaaagccagcgcgagcaactggagcggttggatatcttcaattcgccacacctgctttctgcggccgattttgcaaaaatggctggcaagtcgcggcggtggatcagctacgagatcagcggacgcaagatgttggcgctgagcctcggcaacctcggtcagcgcgtcccggattggcacttcacgcccctcaagcacaagctgatacaggcggttctcaagttcgcgcgtgatgcggactcgtgggagatctaccgcgcgctttctgggccgcacgatgacttcaaggggcttgcccccatcgaagcggtgaccgcagagaacctgcacgaagtcgttatggtggtgtgtttttcgctgaaggacagccaggcgatgcttcggctggcgtag

SEQ ID NO: 428712 - DNA, 657 bp, Serratia marcescens
atgcaatgccagcaaccccctgaatcggtacggatcgccgtctccttcggagccttcaccgcaacattgacgcacctcttggcgaagcagcgcgcagaggagcccggcacggcgatatgccttaccgagactttgttttccgagcaggtcagcggggtgaaggatggtcgttacgatcttggatttgctgtcgcaccgcccgctgaggccaagctgcaaaacgagctgctgtggcatgatgagattgccgtggcggttccagcgctctcaccgctcctggagttcccggaaatcacgctggaaaaggccgtgcagtaccccctggtgctttggtcagcagagcactgtgagccccttagccatcagatcatggaattgttgagctcggccacgtcgaaactcaacgtggtcgaccacgcgaaatctttcgaactgatggccgttctggtcgctgcgggctacggaatcggcttcgcgggaaaatcacgcatcgatacggcacgaaagcttggcatcgtgatgcggccgctggcgggatcgccgaacgatctgagcacgtatttgctacgcgctcaaaacgcgccttcaccattcaccgaacggctgatcgagcgagcgcgcaagctcgatcagtctcgatcagtcggtatcacttag

SEQ ID NO: 428713 - DNA, 249 bp, Serratia marcescens
atggcggtaaaggcgttgaggacggagcgcggaacggcccaggaggcactgggaaacatggccggaatcgaacgcgcgcacatgggcagaatcgagcggggtgagcacatgcccaccctggcgctgatcctgcgcattgcagatgcgctggaatgcagcgcggctctgcttatcgaagagacagagaagtgcctgaagcttgttcgcgccggcgtcatggcgaatgaaggacaggccgatcgcgtttga

SEQ ID NO: 428714 - DNA, 1860 bp, Serratia marcescens
atgttcgcgctgttccaacgaaaacgacccgtgcaggccgctaccacagcgcccgccactgcaacaaaggccaaagggctgatgcgaccggaaccggccgcatcgctgctggccaccgcgcgccggcagaagctgctggagcacatatggcagcgaacatcactctcgcgtcagcaattcgcagtgctgtacctcggcccgttggaacggtacgccgagttggtccaacagtttccagcgtcggaatcgcaccaccacgcctatcccggcggcctgcttgaccacgggcttgagatcgtcgcctacgcactcaagctgcgacagtcccaccttctcccagccggggcgacaccggaagatcaagccgcgcaggccgaggcctggacagccgctacagcctatgcggcgctgctgcatgacatcggcaaaattgcagtcgatctgcacgtcgagatgaacgacggcagtttgtggcacccctggcatggaccgttgcagcatccataccgctttcgctatcggaaggatcgcgagtaccgcctgcacaacgccgcgagtggattgctttacaactgcgtgctcgatcgcgagatcctggactggctcagcagctaccccgaactgtgggcggcgctgctttatgtcctggccggccagcatgagcacgccggagtattgggcgaactggtcacgaatgccgatcgggcttccgtggcgcaggaactcggcggagatcccgccaaggcgatggctgcaccgaagcatacattgcagcgcaaattgttggaggggcttcgctacctgctcaaggaagagttaaagctgaatcaaccacaggcctcggacggttggctgacgcaggatgccttgtggcttgtttccaagactgtctcggacaagctgcgcgcacatttgctgtctcagggcatcgagggtattccggccaacaacacggccgtcttcaatatcctgcaggaccacggcatgctccaggccacgccggatgacaaggctatctggaaagcggtcgtcaccagcgacactggctggacccacacgttcactctgcttcggcttgcaccagcattgatatgggaaggcagtgaacgcccgccggcgtttcagggaaccgtggaagtggtgcaggatgacacctctacggcggatgcatcccccgcttcaccaaacgttgcggagcagcctttgccgtccaccggctcggcagctgctccagcgctctccgctcctggacctggtacgcaggcggccagcgtggatggcgtcgatgcgttgctcgatctgctcgggacaccggacgtgacgctgccgtcgaccacagcatctccgaacgaaccaactgagacaggcaccacgcaggatcaggagcctgagctgccgcctgccgctccttcaactgccgaagtgaaaaacgaaactcaggtgcctccatctggcgaacacttcatcgcctggctgcgtcagcatatcagcacccgcaagctgattattaacgacgctaaagccctggtgcataccgtctccgataccgtttacctggtcagcccaggattgtttcagcgctacgcacaagagcatcccaaaacggcatttctggcaaaacaggaaaatgttgcggattggcagtggattcagaaagcgttcgaaaagctgcaattgcatcgtaaacaggatagcggcctgaatatctggacttgcgaggtcaccgggccacggaaatcaaggcgattgcatggctatctgttggctgatcccacacgtcttttcgatgaagttccgcctaacaatccatacttgactttggcaacgaccacatcaccaacggcatcaggcgtatattga

SEQ ID NO: 428715 - DNA, 192 bp, Serratia marcescens
atggatcattcagacaacaacagaaccagcattcacgcgcaacgcgcgtatgcgctcatcatgtcgggcgtagcggaatgcgataccgcactggaccagcgcctattgctcgactctctcatctgccagtgtgcggtgttcacccgcattctgggggcgaacgcgaattttttgatctgctggagaagttga

SEQ ID NO: 428716 - DNA, 255 bp, Serratia marcescens
atggcaatgaccacgatgaccatcaggaacattgacgaggggctgaaagcgcgtctgcgcgtgcaagccgctcagcatggccgttcgatggaagatgaggctcgcgacatcttgcgggcggctttatcgaccgagactgcacgcggcaattctttgatcgaggctattcgtgcgcgggtagagccgctaggcgggatcgagctagacctgccggcgcgggatgccattcgtaacccgccggagtttgatgcatga

SEQ ID NO: 428717 - DNA, 420 bp, Serratia marcescens
atgatcgtcctcgacaccaacgttctgtccgagacacttcgcccagctcccgatgcacttgcgctgacctggctggctcagcaacctcgctcagcgctgttcaccacgacagtcacgcgggcggagttgctgtatggcgtgcgcctgctgccggacggccaacgcaaggccgcgctcatggaggcgattcacggcatctttgcttcggatatggccggacaggtgctgggcttcgacaatgacgcatccgatgcctacgccgaaatcgcagcgtcacgcaaactggcgggcaagccgatcagccagttcgacgccatgatcgcggcgatcgcaaagtcgcgaggcgccagcctggcaacccgcaacgtcaaggacttcgtggactgtggcatcacagtgatcgatccgtggaagcgttga

SEQ ID NO: 428718 - DNA, 1518 bp, Serratia marcescens
atgacgctctatacgtccgattatctggagtattacctgacactggttgggtggatcgttcataacggcatctggtcggtcctggtcgccagcggcttgtttgcgctcccgtttatcgcgatcgtcattcaggaatggctgaaagcacgcgcggagggagctgacgagggcaacaagggcgtgctttcctcgatgcggatcgaaaaccgggtgttcgtcgccatcgtggtgatcatgttcgccggcattccgttcatcgatgtggatctcaacaccatcagcttcgatcagtcccgctccagccagtgccaggtgaacgttcccgcgcccagcgatacaggttggggccagtcattcaccacgctcaacaaccagtcggccaaggtgccggtctggtggtttttcatgcactcgatctccaaggctgtcaccggtgccgccgtcgcggcgatcccgtgcggaaccgacctgcggcagatgaggatggacatcgacaacacccgtatcgacgaccccttgctggctcaggaagtgacagatttcgcgctcaattgctacggtcccgcccgagccaagctgttcatgaaccgcccgactctgagcgaagagcagatggcggacgtcagctggatcggctccaattactttgtcgacacgcccggctactacgacacttatcgctcaagcacgcctcgcgagtcatggccgtacgatgacagccgtgatgcggggctgaccgaggtgcctagcggcgccggttacccgaactgccgggaatggtggtcggatggttcaaccggactacgtgcgcgcctgctggctcaggtcgatcccaatctgctttcacgcatggcgaactgggctggcttcatctccaggaccgagctggacgattccgtgatccgcgccatcgcggccccgcggcaacagaaactgaaccagggcgccgtctacaccgactacggcggccagatcgacaagaccttgccgaatgtcgttacccgagccgcgggcgatgtggggatggcggtgggtgccgtggggttcttcccggcgatggacgtcatgcgtcaggctttgcccatggcgttgtcactgctcaagatggcgctggtgatttgcattccgctcgtgctggtgatcggcacctacgacctgaagaccgtggtgaccgtcagcgtgatccagttcgccctgttcttcgtggatttctggttccaattggcaaggtgggtcgactccacgatcctggacgcgctctatggctggggatggggctacaaccgtccgatgacctatttcgacccggtgatggggctgaacaatgcattcggggatctgctgctgaacttcgtgatgggaatgatgttccttgtgctaccaactttttgggttactacgcttacttgggtgggaattcgagctgctggcgtagttgctggattggcaagcgcaacgaaagatgccactgcggctggaggaaaaggacctagcgttatctccagcaagctgaaataa

SEQ ID NO: 428719 - DNA, 351 bp, Serratia marcescens
atgatcccggcctggcttcgcatgcggtggttgttcaatcgccgtgtcggcttcgcgttgctgtggacgatcctgctgcttgttgtggcgatctccatcaacctgattggcatccgtgtgcttggcagtatcgaaggctggcagcgctggatggacgaccatacgggctatttcctggcctggcgtctgctgctttatgcgggcctcgcctggggttggctctggatgcgtaaacgggtcctggctcgcgaacctggtacggaaccacaccagcgcctcatccgtgtcgaaatcgccggcgtggtggctctggccgttctggaaggcagcctgctgctgcagtccacttga

SEQ ID NO: 428720 - DNA, 1404 bp, Serratia marcescens
atgacttcatcctccactctcgcactcagcaagcacttccgccggggcctgcttgtttgcgccctgacggcggcatgctctggtgctgccgcccagacgagtgtcaacgaatatggcctgcagcatcgcggcagcgtcattggcgacgatgtgctgtacagcatcggcggcggacgggcggtatccatgacgggcgcggcaaacatgcgctcgatcggcgtcggcgttggctggaacagcaacctcatttgcggcgacatgagcctcaccaccacgttgcagaaccagttgaacggcatcaccaacgggttccagaccatcatgtcgaatgtgatccagaacgccaccagtgcggtggcttcgctgcctgcgctgatcatccagcgcgctgatcccggtctctataacctgctcaccaacggtgtcctgcaagccaggctcgatttcgaccgctcgaaactcacctgcagggcgatcgcgaacaggatggccgacatggccggtggccagctcggctgggaccagctcgcggaaggcatggcgctcaagaaggcggttgccagcaccgatgcggtttccgcgatcgaggaggcagaaagcagcaagggcaatgaaggcgtgccctgggtcggaggcgacaatgccggcggctcgggccaggcgcctatccgcgtggtcgctgacgtgacgcgcgccggctacaacctggtcaacgggcgcagcgtcgatgacacctcatccatcgattccggcagttgcggcgaccgactggcgtgccagacctggacctctccgcaggctgccgtcacctgggctacgcgtgtgctgggcgagcaggaacaacgcacctgcgagagctgcaccaagacgcagaccacgcccggcgtcggtctgacaccgctcattcaggaagagtacgagaccaagctggagagcttgcaggaactgatctcgggcagcaagtcgatgagcttcgacaacctgcaggcggccagcagcacctcgttgccgattacccgtggcgtgatcgaggcgctgcgtgatgaacccgatcaggacatcctcgcaaggcgtctcgcttccgaggttgcgctcgccagcgtgctggaaaaagcattgctgcttcagcgcacgctgctgaccgggcggatggagccgaatgtggccgcgaacgaaatggcccaggaggcggtcacgcaggagagcaacattctcgaccgcgagatcaacaacctcaagactgagctcgaactgcgccgtgagctggccaacaactccccgatgcagatcatccagcgccacagcacccgggctgcgggttcgcggggtgtgtaccagggcgatcccatccccaatcgcctcgatgaattgcagcgctcgcaatcgggaggaagcaatccatga

SEQ ID NO: 428721 - DNA, 951 bp, Serratia marcescens
atgaagcgcgcccgtcgtctccgcgccgcgatcgcggccctgatgcttggaaccgcatcgtcggccttcgcgctcaacaccgcatcgatcacagcctcggccctatcccccgattgcctcgaataccgggtcgtcgggatctgctactggctcttctgcaccaccttcggctgctcggtgcggacctcggtgaaagttagccattacgtgcccgatgccgtggtttccagctacgccaatactggcgagaacccgtgggtagaagtgcgtgccatgagcatgccgaacaccacggcacaggccggcggcgatggcacaacgaaccaggaccacgaaaacaacctgtcaaagttcaaaaacgctgacgtgatcggtcaccccggcggggctgtcctgggtcagctcgccagtgcttcgggctattcctgcgaaggtgcaggcacggccttcatgccatacctgctgagcacgctcgacacggtggcatggcgctataacgtgccggaggccgtctatccggaagcactgatccctggcatgcgcgagatcggagctcggacctctctcaacctgtggggcgccgtctacccgaggggcggattcctgcatcagaccgacgactacaagagcggtgccgtcgtcgcgcagcgcgccggcgatatcgtcacccgccgcggccagattcacgtctaccagccgctgctcgctaccgcgcgcgacggctactggcccgcaggcgagctcgccgaaggcgacgcctccaccggcaagtggcaggaactcacccccacgatgtccagttcgtgcgccgtctttccccattcgaaccagcgcgtccaggcccagcaaggcgactatgcctgggcgctttggcggccctacagctgctgccagcgccgcggacagaccttcctcggcagcgtcgactttagcggagggagcgcacgatga

SEQ ID NO: 428722 - DNA, 450 bp, Serratia marcescens
atgctcaacccgtttcgcacccaatccgggccgatacgctttccatcggcggtagccagcgccttgtgcgtagcattgggcctggccaatcaggcggccagcgccgcagaagtgaccgttttcaccgaccgatccgtcacgctgacatcggcggataacgccaatgtcgttcacctcgacactgcacaggaaatcgaggccagcctcgcggccgatctgcccgccgatccccatcgtgcccaggccatcgtccagggacgccttcagcagggcggctggcagctgcaacgcgcccttgcttccgcctggcagggcgtggccgatgcctggggcctcagcgtttcaaccgttcctgcagtcgtggtcgaccggcgctacgtcatttacggtgagtcggacgtagcgagggcggaagcccgtatcgaggcataccggagggcgcagccatga

SEQ ID NO: 428723 - DNA, 1113 bp, Serratia marcescens
atgaccaatacgacgacaggccgctaccgcgccaatctgcagggcgaggtggacggcgccgcgatctacactgcgcttgcagagagcgaatccaatcccgacctggccggcgtgttccggcgactggcggctgtggaagcggctcatggcgaattctggaagaaacggatggaggcaaccggggatcacttctcaccccgcccctctcgccgtgcccgattcgtggcctggctggtgcgcaggcatggcgccgccaccctgctgccgatacttgctgccgcggaaaccctgggcagtcggacatacgacgatcagcccgaggcgcgcgcggcggggctcgcccaggacgagcgttctcacgcgctgctgatgcgggaagccgccgggagcggaggactttccggtcccattcttgcgatactggaaggtcgccatcgcggtggcggcaacacccttcgcgccgctgtactgggcgccaacgacggactggtgtccaacctcagcctggtgatgggcgtggcaggcgccgcggcgccgggctcggccatcctgttggcgggcctggccggacttatcgccggcgccggctcgatggccatgggcgagtggctgtcggtgaccagctcgcgggagttctaccgcagccagatcgccatcgaggccgacgaactgtacgagtttccggatgaggaacgcgaggaactgaccctgatctatcaggccaaaggcctgacggagctgcaggcgcgcgcactggccgacaagctgttgggcacaccaggggccgcactggacaccctggcccgcgaggaactcggaatcgaccccgaggggcttggcggctcggcgaccgccgcggccgtatcatccttcatgttgttcgcggctggcgccatcgtcccggtgctgccgttcatgtttctatcgggtataccagcattggtttccagtctggccaccagcggtttagcactcggcctgctgggtgcaggtaccagcctgttcaccgggcgcggcacgctgttctccgccgcccgccaggtcgccatcggactggccgccgccgcggtcacctatggcatcggcgccattttcggcgtgacactcggctaa

SEQ ID NO: 428724 - DNA, 642 bp, Serratia marcescens
atgatcaccatatatcacctgggcgtttcgcagtcggagagagtcgtctggctgtgcgaggagcttggacttgcctatgcgcttcgtcgcttcgagcgcgaccccatgacacggctggccccgcccgaatacaagtccatctcgccaaccagaacgtcaccggtcgtgcgcgatggcgacatcgtgctgagcgaatcgggagccatcatggagtacctcattcaccggcacggtggcggccgcctggcggttgcgccggagcatgcgaactaccccgtgtatctgttctggttccatttcgccaacagttcgctcaccgcgatggagatggccagaatgatgctggtcgcagcgggcgggcgcgatggcgaagggagtcttgcgttcgcggaggagcggatcgataccgccttcgggttggtcgaaaaccaactcgggcgcaccgcccatattgccggcgaagccttcacggccgccgacatcatgctgctatttccgctcaccaccatgcggcatttcatgcccaaggatcttgcaggctatccgaacattctcggctacctgaagcggatcggcgagcgggaagcctaccggcgagccatggccaaggcagaccctggcatgctgcccctgctcgcctga

SEQ ID NO: 428725 - DNA, 753 bp, Serratia marcescens
atgggtacttccaacaacatccaggaccaagtcgtggtcatcaccggcggcagcagcgggctgggcgaagccaccgcgcgccatctcgctgggctgggcgccaaactggtgctgggcgcacgccggcaagaccgactcgacaccatcgtcacagacatcgtcgcggcgggcggtcaggctattgcggtgaagaccgacgtgacccgccgtgacgacctggaggcgctggtcgctgccggcgtcgaaaagttcggtcgcatcgacgtgctgatcaacaacgccggcaccatgccgctggcgccactgaacaagctcaaggtcgatgagtgggaaagcatcatcgacatcaacatcaagggcgtgctctacggcatcgctgcggcgctgccgcgcttcgaggcgcaaggcagcggccacttcatcaacctgtcttcggtggccgggcacaaggtgctgtcgcctatggggacggtctacagcgccagcaagttcgctgtgctcgcgctgtcggaaggcttgcgcgccgaagtcggcagccacatccgcaccacggtgatctcgccgggcgcggtcgataccgacctcaagttccacaccaccgatccggagaccgccaaggggatacaggcgttctacgaggcctcgcagattccagcggacgccgttgcccgagcgatcgcctatgccatcgaacagccggacgaggtggacatcaacgaaattctgctgcggccgaccgcgcaggagctgtga

SEQ ID NO: 428726 - DNA, 495 bp, Serratia marcescens
atgacgacgaagacaggcaggtgcgccgatgaacgcggagtgagcggaactacctcccccaaggaagacgacccgctactgttggatcgtcagatctgctttccgatctatgccgcctcaaacctgctcaccagggtctaccggccggtactggcaccactgggtctgacctattcgcagtacctggtcatgctggtgctgtgggagcgttcgccgatcagtgtcggtgaactgggcgagcaactgcatctggacagcgggacgctgacgccgttgctcaagcgcatggatcgaggcggattcgtcagccggcatcgtgatcccgaggacgagcggcgggtcctgatcacgctgacgccgcacggagccgatctacgccacgctgcgctggctgtcccggagacgctctccaggcaactaggcctcgaaccggaagccattgatggtctgcgcgatgccgtgaaggtgctggtgcgggtgctggccagccagtaa

SEQ ID NO: 428727 - DNA, 426 bp, Serratia marcescens
atgagcgcactgtattccacccgtgtcaccgccaacggcggtcgcaatggcaccgtccgcagcgaggacggcctgctcgacctgcaattgtctcttccgccggcactgggcggcaaaggcggcgcgaccaaccccgagcaactctttgccgccggctatgccgcttgcttcggcaacgcggtcatccacatcactcgcaaccaggacgcgaaaatccgcgacaacgacgtggacgtggtggcccaggtcggcatggagcccaatggcagcggcggtttcgccctgacggtggcgctggaggtgacgctggccggggtcgaccaggccaaggccgaggcgatcgtcgccgaggcgcacaaggtctgcccctactccaatgccacacgcggcaacatcgaggtggcgctgtcggtgcgtacacgctga

SEQ ID NO: 428728 - DNA, 570 bp, Serratia marcescens
atgacggaagaactgcggatctcaccattcgacaagaccttgacctggatctgcctgccgatcaatctgcgcaatgcttccagcctgcaggagccctattggtgcgcatgggaaccggggcgtgaggcggactggatctggccgatgccaacccatccatccgtcatcagcgatcctacgcggttccctttctatcgccatcggatggagttcgaggaattcgttcctgaattcaacgagtggctcgcaagggatgtgcctaccgcctttctggtcggcatccggtccgatgaagcgctcaatcgctttctggcggtcaaacgccgtgccagggtgaagaagcgcgcctggacgccgcctggtacgcatacgccggtccagtggagcgcaaaggaccagccggacagccgcgccgttaccttctttccgatctacgactggcggttcgaggacctctggcggtacgtcgcagatcatggccatgccttcaaccggctctacgatcgcatgcatctggcgggcctgccgttttcgcaaatgcgtatttgccagccttacggagacgactag

SEQ ID NO: 428729 - DNA, 312 bp, Serratia marcescens
atggggttgccgccgactttcgatacctggcggcaatactgtgaattcctgctgcgaagcatgccggggtcgctgcgtcaggtctatcagcgtcgtatcggggtcttcatcgactggtgggagaagcacaactacccgctgtcttcctggcccgatgccggcattcctgagctggaaaaccgcaaggcccaaccctcctggcgtcgtgtcgccctgtcgctgctcaagcaggacatggcgcgctcactgtcctccggtttcgctcgtcaggacatcgacacgctggcgctgatcgaggggcaatcatcatga

SEQ ID NO: 428730 - DNA, 348 bp, Serratia marcescens
atgttccagaacctggcggcgcagttcaccgaacaaaccccggccgcgcgcctcagcgcgcaggtagccttcgcgcaggcgcacgatatcggagcgctgctcgatgctgatgaagcccagaacgcgagcctcgcccttgcggcggacgatgaaccagcggtacagcggcccatcgttgagcggatagcctccgcattcgcgccgcacgcttgggctggcgaagaagtagcccatatgggaaaagaacgccgcctcgccatcggccgagcgtatctgggcgaattcgtattttgcgaagggcttcatgatgattgcccctcgatcagcgccagcgtgtcgatgtcctga

SEQ ID NO: 428731 - DNA, 636 bp, Serratia marcescens
atgccacaagtaatcaacctgacgaaccgggccgaagccctgttcaccgaactggacagcctgccgctggcgaagcgagtcgaagccatcaaccagatccggctgcggctgcacgagcatagcccgttcgccgatgagccggtggactgcgttcaatgggtccggggcgaacaggttgaggccaatgactacaacccgaattccgtcgcgacgccggaaatgaagctgctcgaattgtcgatcgacgccgatggcttcacccagcccatcgtcacgcatcgcgagcaggaagaaagccatgtcgtggtcgatggtttccaccgtcagaagatcggcaagaagcaggggccgatcaggaaacgattgcacggctacctgccggtggtttcgatcagaagcgggcgcgcggcaacggcagaccggatcgccgccaccatccgtcacaaccgcgctcgcggtgtctattccgtgctgccgatgaccgacatcgtggtcaggcttctgcagacaggatggactgagggcgatgtggcccgcgagttgggcatggatgatgatgaggtgttgcggttcaagcaggtgtccggcctgcctggtctgttcaaggaccatgactattcgaagtcatgggattag

SEQ ID NO: 428732 - DNA, 747 bp, Serratia marcescens
atgcaatcttctcttttctctcgttttccccttcgccgcatgctggggcccctgatggctctcgcgctcaccttgttgcttgtggcgacctggtatttgacgagccaatccggctcacctgcaaagaccggtgcgggcaacgccgtctcgcaaagttttcaggcgggaccgccatggcgttacggcaaggccgacgcgcgctttacgctggtgctgtatgccgatctggaatgcccatactgcaagagctactacccgctgctcagggcatgggtcgaccggaatccggaggcgaacctgcaatggcaccatctgccgctccccatgcacgagcccgccgcaacacgacaagcccggctggccgaatgcgcgggagaggccgggggccacgccgcgttctggcaggcggttacctggatctatcaacaaacccgcagcgacggggccggcatacctgaaaacatgcaatacccggcactcaccccggaaatccaggcctgcctggacagcacacgcaccgaggcaatcattcaggcgcaggcgaacgaaggttcgcgtgaaggcgttaccgcgaccccgacgctgaagctcagcgacaaccagagcggccatacacttgtcctgcccggtcccgtcgaaggcgacgcactgttgtcagccctggatttgctatcaagcgatcgcgacaccggccagggaaagaatgccgggacacccgacgacggcgttggcaacgcccccagatag

SEQ ID NO: 428733 - DNA, 981 bp, Serratia marcescens
atgaagcagatgaccttcgccgacgccgagtacgcaggtaagcgcaagcagacccgcaaggagctgttcctgatcgagatggatcgggtggtgccatggaagggcttgattgcgctgatcgagcctcactaccccaagggtgacggtggccggccagcctatccgctgatagcgatgctgcgtgtccatctgatgcagaactggttcggctacagcgacccggcgatggaagaggcgctttatgagaccaccattctgcgccagtttgcgggcttgagcctggagcgcatccctgacgaaacaaccattctcaacttccggcggttgctggaaaaacacgagctggcggcaggaatcttggccgtcatcaatggctacctgggcgaccgcggtctctttctgcggcaaggcacgatcgtcgacgccacgctgatcaacgcaccgagctcgaccaagaacaaggacggcaagcgggacccggagatgcaccagaccaagaagggcaaccagtattactttggcatgaaggcccacatcggcgtcgatgacgaatcgggcctggtgcatagcgtggtaggtacggcggctaacgtggcggacgtcacccaggtcgacaagttgctgcatggcgaggaaaacgtggtctgcgccgatgcgggttataccggcgtcgagaagcgtgccgagcatgatggccgcgaagtgatttggcaggtggcagcacggcgcagcacttacaaaaagctgggcaagagcagcgcgctgtacaaagccagacgcaagatcgagaaatccaaggctcaggtacgggccaaggttgagcacccgtttcgggtgatcaagcggcagttcggttatgtgaagacgcgcttccgtggcttggccaagaatactgcgcaactggtgacgctgttcgcgctgtcgaacctatggatggcacgccgacatttgctgaccaatgcaggagaggtgcgcctgtaa

SEQ ID NO: 428734 - DNA, 828 bp, Serratia marcescens
atgacgccccatccgatacaggacgccgtgctgcgggtcgaccggttgagcgtcgtctatccaggcggcgtgacagccctacgcgatacctcgattgcatttcggcgtggtgagttcaccgtgctgcttggtctctcgggcgcaggcaagtcgaccttgctccgtagtctcaatcgactcgtcacgcccactggcggcagtgtcaccagcgaactcggtgagctcggcagcggctcggccttgcgtcagcatcgtcggcgtaccgccatgatctttcagcaccaccagctaatcgaacgtcaaagcgcactggctaatgtgcttaccggtcggctggcctttcacaacacgctccgctcgctgtttcctctgccgcgtgccgatcaggagattgcgctcagttgcctcgctcgggtcggtctggcagacaaggcgctaagccgggtggacaaactgtccggtggccagcagcagcgggtaggcatcgcgcgtgcgctagcgcaacagccggcgatcattctggccgatgagccggtagccagtctcgacccggccacttcggtccgtgttctcggattgctgcgcgacatctgcaaggaagacggcatcaccgccatcgtttcgctgcatcaactcgaatatgcccgccgcttcgccgatcgcgtcgtcgggctggccgattctcagatcgttttcgatgccgcgccctcggaactcaccgatgcgcagcttgagcgcatctatgcaggccgctctacgactcagccagcgaatgctccggctgaaccacctgtcatgctcgaaccttcactggagatgtcccgatga

SEQ ID NO: 428735 - DNA, 864 bp, Serratia marcescens
atgaaacgcttatccgcgctcttattgacttgcttgctgtccgctgtttcaagtttgtccgccctagcggccgatgccgatccggatgtgctaaaggttgccctgctgccggacgaaaacgcctccgagctgatcaagcgtaaccagccgctgaaggattatctggaagagcatctggacaagaaggtgcagctgatcgtaaccaccgactattcctcgatgattgaggcgatgcgctttggccgtatcgacctggcgtatttcggtccgctgtcctacgtcatggccaaaagcaaaagcgacatcgagcccttcgctgccatggtcatcgacggcaagccgacctatcgctcggtgattatcgccaatgtggcgtcaggcgtgaatgagtatgccgaccttaagggcaagaagatggcctatggtgaccgggcatcgacgtccagccatttgattcccaaaaccgtgcttcttgagacggccgatttgacgggtgggcaggactacgaacaacattttgtgggcacgcatgacgccgttgccgtcaacgtggcgaacggcaacgccgatgcgggtgggctgtcggaggtaattttcaatcacgtagccgaacgtggcctaatcgatccgagcaaggtgaaagtacttggttacagcggcgaatacccccagtacccctgggcgatgcgctcgaacctgagccccgagctgaaaaccaaggtgcgggatgtattcgtcggtatcgacgatcccgaagtgctgcgcaacttcaaggccgaggccttcgcgccaatcaccgacgccgactacgatgtgatccgcaacatgggatcgctgctcggcctcgacttcgccacgatgtga

SEQ ID NO: 428736 - DNA, 828 bp, Serratia marcescens
atgtctactcattacgacgtgcaggcgctgcctgcagagcaacgcgagcacatccttcgaggcttcggcctcggttggtggcgccagctggggcaggtggcgattgtattcggagtggtgctgttggcctgctggtacgtggggctgctcgatgccaccacgctgctgaacgggctgccctccatcgcgaccctggcaggcgaggccatgccgccagacttttcgggctatcgaagctggattcgccccttgatcgacaccttggcgatgagcatcgccggtacggccatcgcagtggtgttctcgctggtggtggccttcgttgcagcgcgcaatacggcgccgcacccccttgtgttcggtgttgcccgggtgctgctcaatgccctgcggtcggtgccggagctgatcatgggcatcatcttcgttgcagccgtagggttcggcgccttgccgggcgtgcttgccctgggtctgcattcggtcggcatggtcggcaagttcttcgccgaggccatcgagcacgtcgacgaagcgccggtggaagccgctcgggcggcgggggctacgccgatgcaagtgctgctgcacgcggttttgccacaggtgacgccgcagttcgccgacgtggcgatctaccgctgggaatacaactttcgcgcctccaccgtgatgggcatggttggtgccggcggtatcggcttcgaactcatgggctcgctgcgcatcatgcagtaccaggaggttgcagcaatcctgctggtcatcctggccatggtcacgctagtagacgccttcagtggcgtgctgcgcaaacgtttcaaatag

SEQ ID NO: 428737 - DNA, 1011 bp, Serratia marcescens
atgctgccgaaactcgttataactcaccgagtacacgatgagatcctgcaactgctggcgccacattgcgagctgatgaccaaccagaccgacagcacgctgacgcgcgaggaaattctgcgccgctgccgcgatgctcaggcgatgatggcgttcatgcccgatcgggtcgatgcagactttcttcaagcctgccctgagctgcgtgtagtcggctgcgcgctcaagggcttcgacaatttcgatgtggacgcctgtactgcccgcggggtctggctgaccttcgtgcctgatctgttgacggtcccgactgccgagctggcgatcggactggcggtggggctggggcggcatctgcgggcagcagatgcgttcgtccgctctggcgagttccagggctggcaaccacagttctacggcacggggctggataacgctacggtcggcatccttggcatgggcgccatcggactggccatggctgatcgcttgcagggatggggcgcgacccttcagtaccacgatgcgaaggctctggatacacaaaccgagcaacggctcggcctgcgccaggtggcgtgcagcgaactcttcgccagctcggacttcatcctgctggcgcttcccttgaatgccgatacccagcatctggtcaacgccgagctgcttgccctcgtacggccgggcgctctgcttgtaaacccctgtcgtggttcggtagtggatgaagccgccgtgctcgcggcgcttgagcgaggccagctcggcgggtatgcggcggatgtattcgaaatggaagactgggctcgcgcggaccggccgcggctgatcgatcctgcgctgctcgcgcatccgaatacgctgttcactccgcacatagggtcggcagtgcgcgcggtgcgcctggagattgaacgttgtgcagcgcagaacatcatccaggtattggcaggtgcgcgcccaatcaacgctgcgaaccgtctgcccaaggccgagcctgccgcatgttga

SEQ ID NO: 428738 - DNA, 870 bp, Serratia marcescens; identical to SEQ ID NO: 181407

SEQ ID NO: 428739 - DNA, 981 bp, Serratia marcescens
atgaagcagatgaccttcgccgacgccgagtacgctggcaagcgcaagcaaacccgcaaggagttgttcctgatcgagatggatcgggtggtgccgtggaagggcttgattgctttgatcgagccacattatccgaagggtgaaggtggccgtccggcctacccgttgatggcgatgctgcgtgtgcatctgctgcagaactggttcggctacagcgatccagcgatggaggaagcgctgtacgaaaccaccatcctgcggcagttcgcggggctgagcctggagcgtatccccgacgaaaccaccatcctcaacttccgtcgcctgctggagaaacacgaactggctgctggcatcctggcagtgatcaatggctacctgggtgaccgtggcctgttgctgcgccaaggcaccatcgtcgatgccacgctgatcaatgcgccgagttcgaccaagaacaaagacggcaagcgcgacccagagatgcaccagaccaagaagggcaaccagtattactttggcatgaaggctcacatcggcgtcgatgacgaatcgggcctggtgcatagcgtggtaggtacggcggctaacgtggcggacgtcacccaggtcgacaagttgctgcatggcgaggaaaacgtggtctgcgccgatgcgggttataccggcgtcgagaagcgtgccgagcatgatggccgcgaagtgatttggcaggtggcagcacggcgcagcacttacaaaaagctgggcaagagcagcgcgctgtacaaagccagacgcaagatcgagaaatccaaggctcaggtacgggccaaggttgagcacccgtttcgggtgatcaagcggcagttcggttatgtgaagacgcgcttccgtggcttggccaagaatactgcgcaactggtgacgctgttcgcgctgtcgaacctatggatggcacgccgacatttgctgaccaatgcaggagaggtgcgcctgtaa

SEQ ID NO: 428740 - DNA, 2112 bp, Serratia marcescens
atgctccatggcagctatgacagcccattagtgctgttctcgttggcggttgccatattggcatcctataccacattggttgttgcaggccgtatcgcgacatcttccgggcgtcccgcccgatggtggttggcaggcggtgcctgcaccatggggatcgggatctggtccatgcacttcattggcatgttggccttcgatctgccgatcgatctcggctacgacttgctgatcacgctgttgtcactcctgttcgcagtcgccgcgtccgcctttgctctctggatcgtcacgcaagaaacgttgacccaccggctacttgccgccggtgccattgttatgggtggcggggtagcgggcatgcattacacgggcatggcgtccatgcggatgatgcctggcatcgtttatgacccgacgctgctcggactgtctgttctcgttgctatttgcgggtctgcagtggcgatatggtgtaagttcgtactgcgccatcgtttcgcgaaggccactctgtttcgcctcctcgcggcgatcgtcatggggctggcgatcgcgggcatgcattacatcggcatggccgccgcgaactttcctgcaggcagcatttgcggcgcggcgcaaggcggtgtgcatgcacactggctcgccctgaccatcattctcgcggtgctggccgtactggccatcgcgctgatcgtctcggtgctcgatcagcgcatggaatcccggacggcattgctggcgaaagaactggcagaagccaatcaggagctgacgtacctcgccctgcacgacaacctcacgaagctccccaatcgcgtcctccttgaggatcgactgaaccaggccatggagcgggcgcgccgcgagaaaagccgcttcgcgctgatgttcatggatctggacggcttcaaggcggtcaacgatgcctacggtcatctgctgggcgatatgctccttgtcgcggcttccggacgcattgtggagaacacccgcggcagtgacaccgttgcgcgcgtcggcggtgatgagttcgtggtcctggctcaggtggacgaaccaaccgatgccggagtgttggccagcaagctggtggcggcgatcggagaaccgtacctggtgaaagggcatgagcttcatgtctcgaccagcatcggcatcgccatctatccgggcaacggcgaaaaccaggacgaactgctgagcaatgccgatgcggcgatgtatcacgtgaaggggaaaggtcgcgacgactactgcttcttcgaggcgtcgatgaccgccaatgcgcacggtcaggtgcaactgctgcaggacttgcgtatggcgctgaagcgcaaccaattggctctctactaccagcccaagttcaccgcgccccacggtccgattaccggcctggaggcgctgctgcgctggatgcatcccgcccatggcatgctcggcccggcgagcttcattccgctggccgagaagacaggtttgatcgtgccgatcggcgagtgggtgctgaacgaggcatgccggcagatggccgcgtggcgggatgaaggacgtgaggactggactatcgcggtcaacctgtctgcggtgcagctcgcgcattcgggtctggtggacgcagtgcgcggcgctctggatcgccatgggctggaaccgcaccggctggtgctggaaatcaccgagtcgaccgccatgcgtgacgtcgatagcagtcaggcgatccttcagaagctgcatgacatcggcgtccgcatctccatcgacgatttcgggacgggctattccagcctgctgtacctcaagcgcttgcccgcaacggaactcaagatcgatcgctgcttcgtacacgaccttgcttgcggcacagaggatgccgccatcgtctcggccatcgtcgccctgggacagacgcttgatcttcgggtcgtagccgaaggcgtggagacggccgagcagcaggaatttctgaccagcctcggctgcgatacgcttcaggggtatctactggcgtatcccatgcaggcggatgaagtgattgccctgccggatatcggcaaggtgtctgatgacaggcccgcggcaccggatgaaatggaactggtctga

SEQ ID NO: 428741 - DNA, 2883 bp, Serratia marcescens
atgggaccgtttttcaaacgccgcgctacggcgacagaggtcaatagcggctcctcgccagatgctccatcggatgcctgggctcgctatcttgcgtcactggaggcacacggaatccctgaacccggcaagcgggacacagccaggcacaggccagcgacactggccgatgagcaggcgctgtacgacgtttcgccgtcctttgccgacctgctgccgtgggtggagtatctgccggaatccaggtgcatgcttctggaggacggtgtttccgtcgcggcatttttcgagttgatgccgatcggcacggaaggacgggaagcatcctggctggctcaggtccgggacgcgctggaaaacgcgctgcaggacagtttcgacgagctggacgagtcaccatgggtggtgcagttgtatgcccaggatgatgccgactggaaccgctatctttccacgcttgaaaactaccttcagccccgggccagggaaagcgagttcacgaagttctatctccgtttcttcggccaccatctgcgcgccgtctcccggcagggagggctgttcgaggaccgcacggtcacgcgcttgccctggcgcgggcagacgcgacgtgtccggctggtcgtctatcggcgcgtcggcaatgcgccggcccggcgcgggcaatcccccgagcaggcgctgaatgtcgtctgcgaacgcctggctggcggcctcgccaatgccggtgtgcaggcgcaccgcctcgatgccgccgcgatccacgcctggttgctgccctggttcaatccaggaccggcgctgctgggtccgacagacgaagaccgcgagcgcttctatcgcctggcttcctatcctgaagacaccgaagaaggcgaactggaacttgccagcggcactgacttcgcgcagcggctgtttttcggccagccgagatccgatgtcgagaacggcctctggttcttcgacggcatgccccatcgaaccatcgtgctcgaccgtttgcgcacgccgccggcaaccggccatctgaccggagaaacccgcaaggggggcgacgccatcaatgccctgttcgaccagatgcccgaagacacgaccatgtgcctcaccctggtgatcacgccgcaggacactctcgaagcccatctgaaccatctggcaaaaaaagcggtcggcgaaaccctggcatcggagcaggcgctcaaggacgtgcaacaggcacgcggtctgatcggcagttcgcacaagctctaccgcgcttcgctggcgttctacctgcgcggccgcgacctggccgatctcgatatgcgcggccttcagctcggcaatgtcctgctcaatgcgggcctgcagcccgtgcgtgaggaagacgaagttgccccgctcaacagctacctgcgctggcttccttgcgtctacgaccccggcaaggacaaacggcagtggtacacgcaactgatgtttgcccagcacgcggccaatctggccccggtctgggggcgcagtcagggaacaggccatcccggcatcaccttcttcaatcgcggcggtggcaccgtcaccttcgatccgctaaaccgcctcgatcggcagatgaatgcgcacctgttcctgttcgggcccaccggctcgggcaagagcgccaccctgaacaacatcctcaaccagatcaccgcgatttatcgcccacggatgttcatcgtggaagcaggcaacagcttcggcctgttcggcgatttcgcggcgcggctgggcctcactgtgcatcgcgtcaagctgtcgcccggcgctggcgtgagcctcgcaccgtttgccgatgcctggcgactggtggatacgccaagccaggtgcagacgctcgatgcggatgcgctggacgacgacgcagcagaagaggaatcggcggaaggcgacgaacagcgtgacgtgctcggggaactggaaatcactgcgcggctcatgatcacaggcggcgaggacaaagaggaagcccgaatgacgcgggccgatcgcagcctgatccgacagtgcattcttgaggccgcacagcgttgcgtgtcggagaagcgcacggtgttgacccgcgacgtgcgcgatgcgttgcgtgagcgcggccgtgattccacgctgcctgaaacccgccgcacgcgcttactggaaatgtcggatgccatggatatgttctgccaagggatcgatggcgagatgttcgaccggcccgggacaccgtggccggaagcggacatcaccatcgtcgacctggcgacgttcgcgcgcgagggctacaacgcgcagctttcgatcgcgtacatcagcctcatcaacacggtcaacaacatcgctgaacgcgatcagtttctcggccgccccatcatcaacgtgacagatgagggccatatcatcaccaagaacccgttgctcgcgccctatgtcgtgaaaatcaccaaaatgtggcgcaagctgggggcctggtactggctagctacacagaacctcgacgacctgccgaaagcggccgagcccatgctcaacatgattgaatggtgggtctgcctcagcatgccccccgacgaggtagagaagatcgcccgtttccgcgaactcaacccgtcacagaaagccctgatgctctcagccaggaaggaggcaggcaagttcacggaaggggtgatcctgtccaagtcgatggaactgctgttccgcgccgtcccgcccagcctgtacctggcgcttgccatgactgagccggaagagaaagcggagcgctaccagctgatgcagcagttcggcatcagcgagctcgatgccgccttcaaggtcgcggaaaaaatcgaccgggcgcgcggcatcaactctttgcccctggacgcattggagtga

SEQ ID NO: 428742 - DNA, 435 bp, Serratia marcescens
atgcacaggatctggattaacggcctggcggtgctggtcattgccgtagcgcttggcggctgctcgaccagcaaggaaaaactgctgccccacgatggtcagaccatgatggacatctggaacgaggaaaccggcggcagcgcccgcggcggtcaggccgcacggcagttgctcgacgccagacaatcgctgcgccgtccgctgaccgaagtcgatgtgaaggccgcacctgcggtcaatgccagctatacccgcacggcgcaaaacgagatctaccggcagttccagcgcctgccgaaccccgatctcaccctgtacgtgtttccgcatctcgcgggcaccgatccggtgccaattcccggctacaccactgtcttcccgctgtaccagcgcgtgcaatacgccatgccgggcgaacggaccgaggactactga

SEQ ID NO: 428743 - DNA, 1434 bp, Serratia marcescens
atgaaaggtaatggcctgctcaagtggctgatgatccctatggcgctgttgctggtctttgtcggcgtgaagctgttttccggcgggggtagccagcccggccgcgatggcggaacacagctcacgccggaagaagccagggcgcttggcatcgaaggcgacacgccgcgggatacggtggcgaccttggtcggccaggtccggcagctgcgtaccgaactgcaaaccgcgctcaccgacaacaagacccagaaagcggagaacgagcgcctgcgccaacgcgagggcgccatcgatcgccgtatccagagtgccctggaaactgagcgcaatcagttgaagaacgaccgcgagcaggtcgccagcgaacgccagcaaactcagggtctgctgcaggatctccaacgccagttcgagaacctgagcaacaagagcggacatgccgatctgccggtcgggctgggactggagcctggtgacggccccggagccgatggcgtgcgctggatcgagccggaagatgcccgcagcgacgacaaaagccgcacccctggcacagccgggaacttcacattcccgaccagtttcggcccggcacagaaaacgctggatacgacgagggatgcagtcgtcgacgccggcagcaaggcaaccggcgtctccacggcgaagcccgtctataccgtacctacgaacgccacgttgatggggtcgatttcgatgacggcgttgatcgggcgtgtgcctgtcgacgggaccgtgaacgatccataccccttcaaggtcctgatcggtccggacaaccttaccgccaatggcatcgatattcccgatgtcgccggtgcggtcgtcagcggaacggcgtcgggcgactggacgctctcctgcgtgcgcgggcaaatccgttcggtcactttcgtgttccatgacggcaccatccgcacggtgcccgaggatggcgagcgtggcggcaaccgccagcagagcaacaacgccaacggcaacagcacgcaggacggcctcggctggatcagcgatccctacggcattccctgcgtgagcggtgaacggcgcagcaatgcccagcagtatctcggcactcaggcactgatcaccgctgccggggcaggtgcggcatcgctgatcaaatccgacaacggcagcgtggcggtagtcgccaacaacaacggctcgctcggcacggtcggcatttccggcaacgaagcgatgggccgcatcctcgccggtggcgtccaggacatgtcgcagtgggtgaacaagctctatggccaggcgttcgcggcggtgtacgtcaaacccggcgccagggtcgcggttcatctcgaacaacccctcaccatcgattacgacccgaaggggcgcaaggtcgatcatcgtctcggaggtgcttctgatgcacaggatctggattaa

SEQ ID NO: 428744 - DNA, 906 bp, Serratia marcescens
atgaaacacgtcctctatctcctctgcatcctggtcaccgcgggactgcccactgcggtccaggcgctggaaatcctgcgctgggagcgactgccgctggctgtgtccctgcatgtggatcgggagcgcgtcgtctttatcgaccgcaacgtccgtgtcggcgtcccggcatcgctggccggccgcctgcgtgtccagagtgccggtggcgcgatctacctgcgtgccagcgaaccgatcgagcccacgcgactgcaattgcaggacgccgatagcggtgcgttgatcctgctggacattgccgccgaagctgcaccggcaggtcaggcaccgctggagcccgtgcgcattgtcgaggccgagggtgcgcccacccgttacggcgacctgacagcggcagcaacggctgacgacgacacgcaggatacggtgtctcgcacagctcgcgagacgccggtgcccgtagtgctgacacgctatgccgcccagaacctctatgcgcccctgcgtactgtcgaaccggtatccggcatcacgcgcgtcaatctgaaacgcaacctgccgctggataccttgttgccgaccctgccggtacgcacccgggcgctcgccgcttggcggctcgatggcctttgggtcacggctgtgcgcctcaccaacacctcgaaacgctggctgtctctcgacccacgcgatctgcaaggcgacttcgtgacgggggccttccagcacaacacgctggggccggccggcacgcccgatgacacgtccgtggtttatctggtgaccaaaggacacggcctggctgaatcgctgctgccaacgatcagtcccgtcaacgcggcgctgaacctgccggagccgaaggcaccgaccgccaagaatggaggccgtcatgaaaggtaa

SEQ ID NO: 428745 - DNA, 693 bp, Serratia marcescens
atgagccggttcaagaacgagatcacccatctgcaggcgcatatcaagaccctgcgcctgggagcgggcgctttgctgctggtggccctggtcatggggatcggctggtggaatgcgccgcgcgacctgaccattcacgtgccgccggacctgcgctcgggcagcaccaggaaatggtgggaagtgccgccagagtcggtttattcgttctcgttttatatctggcagcaactccagcgctggcccgtcaatggcgatgaagactattcccgcaacatccatgtgctatcgccttacttcacgccatcctgccagagcttcctgcgccacgactacgaatatcgccgcacggccggcgagctgcgtcagcgcgtgcgcggtatctacgagatccccggccggggctacggagaagaccccacgctgcgcgtcaaggccgtctcggaccgcgactggatcgtcacgctggatgtgacagcagatgaatattacggctccgaacaggtcaagcgggcgctggtgcgctaccccctcaaggtcgtgcgctcggatgtcgatccggaacgcaacccgttcggtctggccatcgactgctacagcggcgcgccgcagcgcatcaccacccctgaccctgtgcccccgaccggagcgacatccggcggcctcggcggcccattgggagacacgccatga

SEQ ID NO: 428746 - DNA, 402 bp, Serratia marcescens
atgcctgagcatcaggacgtccggcctgacggaacggtagcgttcctgccgcatcgcctcaaccgccatcccgtggtcgttcgcggcctcacggccgatgaactatgggtgtgcgcgggcctgtcgggcgcggccggcctgtcggtgggcattccgatggcgatcatcttctcgatgatcgccatcgcgcccaccgccatcgtgcttggcatcgccgccggcgtctttgccggcggcggcatgttgcgccgccagaaacgcggcaggcccgacacctggctttaccggcagatccaatggtggatcgcacgacggcatccgggcattgcccagttcgtcggcgggggggacctggtgacccgttcgggctactggacaaccaggcggagggccgcctcatga

SEQ ID NO: 428747 - DNA, 366 bp, Serratia marcescens
atgaatccggtttcgcaccccttccgctccgcacgcatcgccgccctggcgtccctgccggcgtttgccatgctgagttcgctcgctcaggcccagggcctgcccacgcttgaagacccgtcgcgcggcacgggctcgggcatcatggatacgctgcgcaactacggctacgacatcgtgatgctgatcgccttgctggtggtcgcatcgatgttcgtcggcgtttgctatcacgcttacggcacctatgccgaaatccacacgggccgcaaaacgtggggccagttcggtctgacagtcgcggtaggcgccgtcctcctggtcgtcggcatctggctgctcaccgaagccaccggcgttctgtga

SEQ ID NO: 428748 - DNA, 234 bp, Serratia marcescens
atgaatgccagccagatcaccgcctttcaggccaacggcggcttcaccccatccgccgtctccgtcgtgctggtcggcgctgtgttcgcggtcctgctgctgtggggcgcgtgggcactgcgtaccgcctatgtcggctggtcggagcagcggatttcccagcgtcagttcctcggcgtcgcggtgcgttttgtcgcgatgtacgtcgtgctgacttttttcctcctctcgtaa

SEQ ID NO: 428749 - DNA, 357 bp, Serratia marcescens
atggcacggtcctaccgcccggcacttgcaaggcgcagcacgctcgcagcactgctgattgtcggcctgtcgacggctctaccggcagtcgcggccgacgacagcactgagaaggagcacctggcggcagtcgttcgccagctggacctgctcgatcgtctcgcgaagcagtccgctgcgaccgcatcgcaggagcgcgcccgctatcacttcgactacacccgcctcacggctgacctgcagcgcatgcggaccggcatcaatgactacctgacgccgcagcgcgcccaaccgcgcgaccccgcggcgttgcagggcgactaccgacaggactccgaacaggagccgaagaaatga

SEQ ID NO: 428750 - DNA, 369 bp, Serratia marcescens
atgaaaacacataaaccagatagtcactccgttgagagtggtaaagtagatgttccattgccgctgcctgtcgagcgtgctatccgcaagctcggcagcgacgtcgcgctggcacgcaggcgccgccggatttcgcaggcctcgctggccgagcgaatgggcgcatccgtgtccaccgtccggcgcatggaaaaaggtgatgtgcgcgtgcccatccacttctttgcccgcgcactgcatgtcttcggtgagatacaggcgctggctggcctgctggatacggcgcgtgacgacatcggcctgacgctgatggacgaaaacctgccccagcgtgtgcgtagcaagccgggcaaatcgggggcgctatga

SEQ ID NO: 428751 - DNA, 1290 bp, Serratia marcescens
atgaaatcggctgtttcgatacgtcagcagattcaggtctgcatcggcaaggcgggcacgccagtcggcaccctcgtctacgtcaagcagggccgccgcgaaaacaccaccttcgcctacgaccagaactggctggcaaacccgaccggcttcaatgtgtccgccgatctcggtcttcacgccgggtatcaaccgcgcagggcaccgtcagcacatgattccgtctttcacttcgcccttgccgatacggctccggacgcatggggacgcagggtcatcgcgcgggaccacgccaggcgccgcaaggacaacgcagcgctcgccccgttgaccgagctggactacctgcttgcggttgacgacttcagtcgggttggcgccttacgtctgcgcgaccaggatggccgctattgtcggacggtggaggacggcaggcgcagcacaccgccgcttctggaactgcaacgcatctacagcgccagccgtgcggtcgagcaaggccaggaaagcaccgaggatctgcgttacctgcagggcaagggcacgtctcttggcggcatgcggcccaagagcactgtggtcgacgaggatggcgcgctggccatcggaaaattcccgagcgtgggggatacgcgcagcgtgacacgcggagaggtgctggccctgtgcctggcgcaacgtgtcggcatcgacgctgcgcctgcccgtatcgtggaactcgacggcataccggtcgcgatcatccgccgcttcgatcgcgatggtgccgacgggcgcataccgtatcagtcggccgcatccctgttgcaggcttcgcgcgaagaggatcgaagctacaccgagatcgcggacgttatccgctcgctgggacatgcgccgaccgccgatgtgcagcaattgtggcggcgcctggtcttcaacctgttgatcaccaatgtggatgaccacctgcagaaccatggttttctgcatgtcgaacgggggctctggcgactggcgccggccttcgacgtcaatcccttccccgacaaggacagggaatccaagacctggctgtcagaagaggatgggccgatcaccgatcttgagatgctgctggcccgaagcgcgtatttttcgttgagcaggagcgatgcactggccgtgctggccgaagtgcatgcagccgttctggattggcggaaggtcgcgctcagtgccgcggtggggttgcgctcgaacgagctggacgatttcgcgcctgccttcgaacatgaacagatgtcgcttgcgaaaacgctgctgggttga

SEQ ID NO: 428752 - DNA, 198 bp, Serratia marcescens
atgctcattctgacgcgccgcgtcggtgaaatcatccgtattggggacgatatcaccgtcaccgtcctgggggtcaaaggccagcaggtgaagttcggaacctctgcgccgaaggacgtgaatgttcacagagaggaaatctatgaccggattcacggcgaaagagtttcggctctttctggaaagaacctctattag

SEQ ID NO: 428753 - DNA, 750 bp, Serratia marcescens
atgagcgatccggccgcgacagtgcaacgccagcagaaccgccagcaggggctgatcgccggcatcatcacgctgccgtttcgcctcttcggcgtactgtgcggctcgctccttctgtgcatcgtcatcgagtgcgtgggcatgcacctgttctggccggaacagggatggcggcacgcacagggaatgctggactacgagctggcgcagctctccggccacttcacccgtagcgctctcgtacaggagccggggcgcactgcccattggctggtcgaacaggcccacgagtggatcttcgtcaaaaccggcctgctggaatggatgcgcaatgcggcgaaccaggccagcgctcccagccatggcgcagcgcgggattttcgctactacatcagccaagcctatgtctgggtggaaagctacctgatcgccgcggcgttcacgaccctggtgttcatcgtgcgcctgatggtaatggtgctcaccttgccgctgttcctgatggcggccttcgtcgggctggtcgacggcctcgtgcgccgcgacatccgccgtttcggcgccggacgcgaatccggcttcatctatcatcgcgccaaagcatcgctgatgccgctggcggtgctgccatgggtcatctacctggcgctcccattgagtgtgagtcccttgctcatcctgttgcccagcgcggtgctgctgggactggcgacggacatcacagccagcagctttaagaagtatttatag

SEQ ID NO: 428754 - DNA, 2166 bp, Serratia marcescens
atggcccagcctcatgcggtggaagtgctgctgcggccagcggtggagctatacaccgttgcggtttgcgccggcgccgcgttggtgtgcatggtggcaccctggtcgctggcgttaagcccgctgctgggcttcgccagcgctatggcattcctcgtgttcggcggcatccgcttgcgcgaggcgatggctatcttgcgataccgccgcaacatccgccgcctgcctcgctatgtcatgaccagccggcaggtgccggtcagtcggcaacgcctgtttatcggccgcggttttcgctgggatcaacgccacactcaccggctgatgcaaacctatcgaccggagtttcggcgctacgtcgaacccacgccgatctaccgccttgcccggcgcgtcgaagagcgtctggagttcgcgccgtttccgctttcaaaactcgctcgggtgattgcatgggacagcccattgaatcccgcgcgacagctgcccccagtgggaggcacgccacgcctgcacggcatcgagccgcacgagatcgacgtcaccctgccgctcggcgaacgcgtcggccactcgcttgtgctgggaaccacccgcgtcggcaaaactcgcctggccgaattattcatcacgcaagacatccgtcggcgcaacgcctccggtgagcatgaggtcgtcatcgtcttcgatccaaagggtgacgcagacctgttgaaacggatgtacgtcgaggccaaacgcgccgggcgtgagggcgaattctatgtgtttcatctcggatggcccgacatttcggcccgctacaacgctgtgggacgcttcggccgcatcagtgaagtggcgacccgcatcgccgggcagctttccggggaaggcaatagcgctgcattccgtgaatttgcatggcggttcgtcaacatcatcgccagggccctggtggagctggggcagcggccggactacctgctgatccagcggcatgtcgtgaacatcgacgcgctgttcatcgaatatgcccaacgctacttcgcaatccatgagccgaaggcctgggagatcatcgttcagttggagggccggatcaacgacaagaacactccacgtcacatgatgggcagggagaagcgcgtggtggcgctcgaacagtatctgtctcaggtgcgcgtgtacgaccccgtgcttgatggcttgcggtcggcagtgcgttatgaccgcacctatttcgacaagatcgtcgcgtcgttgttgccgttgcttgagaagctcaccaccggcaaaaccgcacagctgctcgcccccaactattccgacctgaacgacccgcggccgatcttcgactggatgcagatcatccgcaagagggcggtcgtttacgttggcctggatgccttgtcggatgcagaggttgcggcggcggtcggaaactcgatgttcagcgacctggtatccgtcgctggacacatctacaaattcgggattgatgacggccttcccggcgcggctaccggggtgaaaattcccatcaacgtccacgcggacgaatttaatgaattaatgggcgatgagttcattcccatggtcaacaaaggtggcggcgcgggactccaggtcacggcctatacccaaacgttgagcgatatcgaagcacgcatcggcaaccgcgccaaggctggccaggtcgtcggcaacttcaataatctcttcatgctgcgggtacgcgaaacggccacggcagagctgttgaccaaacagcttcccaaggtcgaggtttacacgacttcgctgatgagcggtgccaccgatagctcggatattcgcggccagacggacttcaccagcaacacccaggatcgcatcaccacgacaagcgtgccgttgatcgaacccgcgcatgtggtgtctctgcccaaaggtcaggcgttcgcattgctggagggcggcaacctgtggaaaatccgcatgccgctcccggctcccgacccagacgaggagatgccgcgggatctacagcaactcgccgggtacatgcgtcagcactacgtcgaagccggcgactggtgggaaaaccagggacttcccggccttcaggatgagcccttgccggacgaccttctcgacggtttccggcacattgccacagctgaagacgaagcggctctgccatga

SEQ ID NO: 428755 - DNA, 552 bp, Serratia marcescens
atgaagcataccttcactgccgttgccgcgaggccgattctttgcgccctgttatgtgccggtggtctgccagccctggcaggccaaccgcctctcgtggtggtcgaggaccatggaggcaggtcggccttgccttattaccaggcgctggacctgccaccacgccagggtcaaccggacccgccgcggatctctgtgccgccgtccgcagacaagaccttcagcgaagccgatatgctgcccgtgcgctcggagcggctgtcgcccggcgatgaacctcgcagggtgatccaggcaccaggcctggcacccgttttcctcatcggtgatgacaaacgctcccgcgcctggctgattgagcgcaaggcggcgctgcacgaaatcagcgccgtcggtctcgtggtcaatgtcggatcggcggagacacttactgggttgcgcaagctggctcccgagctcacgttgtctccggtatcgggtgacgacctcgcgcagcggttgggactgcggcattacccggtcctgatcaccgccaccggcatcgagcagtga

SEQ ID NO: 428756 - DNA, 573 bp, Serratia marcescens
atgaaccgctatgcacgcctgcttgcagttctggccgcctcgatcgccggaaccgcgctctccagggcacaggagataccgcctcctgcctaccaggtcgcggcgcagcgtgcggaaattccgtccccggtgctctatgccgttgcgctgcaggagagcggcttgcggcgtggtggccgactggtcccatggccctggaccctgaacgtcgctggaaccgcccgccgtttcggtagccacgccgaggcatgcaacgggctgaacaaagcgttgcgcgaagtgccgccaacccgcatcgacgcgggactggctcagatcaacctgggttatcagaagcatcgctacagccacccctgtgacctgctcgatccatatcgcaacctcgcgatcgcggccgaaatcctgcgtgaacaacatacgccgggcgaagactggttgctcgcgatcggccgctatcaccgcccggctggcggcgctcccgccgcgcgctaccggcgcagcgtcagccagcacctggcgcgcgtggtcggtccttcccgtgctgacgcttccaccaggaggaataccccatga

SEQ ID NO: 428757 - DNA, 741 bp, Serratia marcescens
atgaaccgcatgatcatttcgcttgccctggctaccaaccttgccgttggcgtcatctcccccgtatcagcacagaacacccgcacgtccacgtcacctgctgtacctgatcaggaacaggcgacaactgcgagcaacagcgaggagaaaaatgctcgcgactgggggctgcgcctggaggaatggacacgttaccgggaggtgatgcgtggtccgctgggcattttttcccccaatctcgatccgcttaccgcgctcggcatcgaggcgcgttcagatgaagagcgccggcgctacgccgaactgcaggttcaggtcgaagcgcggcgtgtcgagaaaacactggcttaccagcgtgcttatgacgctgcctggcaacgcctgcatccgggcatgcagcgcgtcaatctgccgggggccaaccagactttcagcgcaaccggtgtgccgggcgatgcgaaccggttggccgtattcatcaaggacggttgtgcctcatgcggccagcttgtccagcaattgcagacctccggggctgaattcgacctctacatggtcggcagccgccaggatgatgcccgcatccgcgattgggccaagcgcgcccggattgaccccgcccgtgttcgtagcggctccatcaccctcaaccatgatgcaggccgctggttgtcgctgggcctgcaaggggatctgccagccgtcgtgcggcagatcggcggcgaatggcaaaggcaatga

SEQ ID NO: 428758 - DNA, 648 bp, Serratia marcescens
atgaccaccatccccggctctccccgtcggtcgcgggtaccgctgctgcgcgtggccaccatcacctgggtcttgctgatcagcacgggagtggtggtgaatcacgtggcgttgtccaaccttgccaccgaggcaggcggcagcgcacagagcacacaagtcgcagccctggaggcccggctggcagaactgagtcagcagctcgaagcgcagcgtcagcagcccgacatgttgacgaccacgcaattcgagatcgagcgtcaggccatcgagcaatgggcttccaggatcgagcaggccctcggcgaacggctgacggccgagagccttgccccgttgcatagccgcatcgagcaactggaagcccgcctggcgaaagccgctcaggtcgcacccgccccaacccgcgcgcagaaaaaccaggcctccaggcgcaaggcggcggtgcctccattcaaggtcgttggtctcgaaatgcggggcggtgaacgctttttgtcgattcagcccgcgaggggagcttcctcgccactgaccggcgttttgcggcccggtgaatccgaggctggctggcggctggaaaccatcgaagaccgcaccgccgtgttccagaacaacggtcaggttcttcgcgtggtagcgccatag

SEQ ID NO: 428759 - DNA, 585 bp, Serratia marcescens
atgcaaccactcagccactttcatcgccgtctggcgggcggcggcctgctgatcgccgccgtactgatgagcggctgcgcgacgacaacgcctccgcccaaggccgccccgatcgcaaagccggcgatcgcaccgacgaagccgaatccggaattcgtgcccgtcgttcgctatggccgttacacgctggtcgaactggcgccggcatcggcacagcaagacctgttgctgcaggttgtcgatgtctccattcccgacacgcgcagcgcgacagtgggcgatgcactgcatcacgtcttgctgcgttccggctaccaactttgcccggtgggcgacatcaccgcactcaactcattgccgctgccagcatcccactatcggctggggccgatgctgcttcgcgatgccctgctgacgttagcaggtcctgcgtgggatctgaaagtcgatgatggcgctcgccgaatttgcttcaaccgcgctcagcagccgtcatcaagtcagacccaatcccccccgcagtcagccttgaaggctgccgatcatgtcgaaagacgtccgctcacaacggaggtgcggccatga

SEQ ID NO: 428760 - DNA, 129 bp, Serratia marcescens
atggcctccgggttgcagtcgctgaccttccaccgcgacggcgtggtcggcaccaaggtgctggaggccggcggcttctttgacaccgatcgcggcggcggcctggacacccagcgcatggtggtgtga

SEQ ID NO: 428761 - DNA, 606 bp, Serratia marcescens
atgaccaatactacgaacgacgttcgccaacacatcctgactaccgcgcaaagcatcattggcggtaagggcttcagtgccgttggcctgaatgaaatcctccatgcctcgagcgtgcccaagggctcgttctatcattacttcgggtcgaaggaggcgtttggtgaggccttgctggaaaactatttcaccgattacctggctgcgcttgatgccgtgctggctcggtccgacgtgtcggccggggagcgcttgatggcctatttcgagcactggctggagacccaggcaacctgcgatccgaaaggcaagtgcctggcggtcaagctggccgccgaggtcagcgacctttccgaagcgatgcgttccgtcctcgattatgggactgcacgcatcattgcgcgcctgacccgtgccatcgaggctggcgtagcagacggctcccttgcctcgcagccggatgccagcgccatggcgaccacgctgtaccaattgtggctaggggcgagcttgcgcgccaagattacgcgcgaccgcgtacctcttgagtccgcattgaccgctacgcgtgggttgctggggctgcctgctgcggtcggcacctga

SEQ ID NO: 428762 - DNA, 1029 bp, Serratia marcescens
atgactgagatcacccagacccgcatcgtgcttgcctcgcgccctgtgggcgagccgaagccggaagacttccggctggagcaggggccgctgcctcaatccgccgcgggtcaattgctgttggagacgctctatctctcgctcgacccgtacatgcgcgggcggatgagcgatgcaccgtcctacgcgccgccgtgggaactgggcgcggtgccgagcggcggcgcggtgagccgggtggcggtctcgcatcaccccgattttcaacccggcgatctggtgctcggcgataccggctggcagagccacacgttgtccgacgggcatggcctgagcctgctcgaccgcagcctggcgcagccctcgctggcgctgagcgtgctgggcatgccggggttcaccgcctaccacggcctgctgaacatcggccggccgcaagcgggcgagaccgtggtcgtcgcctcggccaccggcgcggtcggctcggtggtcgggcagcttgccaggctcaagggtgcgcgcgccatcggcatcgccggcggggaggagaaatgccgctacgcggtggaagcgctgggctttgacgtctgcctcgaccaccgtgcgcctgacttcgccgagcaactggcggccgccacgccgcagggcatcgacgtctactacgagaacgtcggtggtgcagtgctcgacgccgtgctgccgcgactcaacgtcggcgcccgcgtgccggtgtgcgggctgatcgcgcattacaacgacaccggcctgccgcccagcccggaccgtatgccgcagctgctgggcctggtgctgcgcaagcgcctgctgctccagggcttcatcatcagcgatcactacgccgacggcttcacagccttccagtgcgacatgggcggctgggtcgccgcgggcaaggtcaagctccgcgaggacttcgtcgaggggttggagcgcgcgccgcaggcgctgatcgacctgctggccggtaagcacttcggcaaggtcgtggtgcgcgtggccggcgcctga

SEQ ID NO: 428763 - DNA, 678 bp, Serratia marcescens
atggcaaacattctcgtcgtcctcacctctcacgaccagctcggcgacaccggcaggaagaccggtttctggctggaggaactggccgcaccctactacgccttccacgatgccggcgcgaccctgacactggcctcgcccaggggcggccagccgcctctcgaccccaagagcgacgaacccgacgcccagactgaggccacccgccgcttccagtccgacgccgacgcgatgaaggcgctggccaacacccgcaagctgtccgaagtcgccatcggcgaattcgatgcggtgttctaccccggcggccacggcccgctctgggatctggccgaagaccccgcctcgatcggcctgatcgaggcggcggtcagggccggcaagccggtcggtgcggtctgccacgcgccgggcgtgctgcgccacgccgagggcgtcgacggcaagccgctggtcgccggcaagcgggtgaccggcttcagcaacagcgaggaggaagcggtcggcctgaccgaggtggtgccgttcctggtcgaagacgtgctcaaggccaatggcggccactacagccagggcgccgactgggcctcgcatgtgcagaccgacggcctgctggtcaccggccagaacccggcctcgtccgccgacgccgccaaggccctgctttcccttctgtga

SEQ ID NO: 428764 - DNA, 306 bp, Serratia marcescens
atgtccgcttatgtggttttcctgcgagaacgcaccctcgacgccggcgaacttgacacctacgccaaggaagctccagccgcgcgcgaagggcacgacctgacgccgttggcgttctatgacgatttcgaagtgctggaaggcccgacgatcgagggcggcgtgatcctgcgctttcccgatatgcaggccgcgcgcgcctggtatcacagccccgcctaccaggcggcacgagcgcaccggttcaagggcgcggaataccgcgtggtcctgctcgacggtatcgatgcgccgcctgcggcctga

SEQ ID NO: 428765 - DNA, 831 bp, Serratia marcescens
atgacatcccaacaaattgatcccgccactgcgtggcaggcccgctacggggaggttgccacccgaccgttgccgcccgttcccgccgtcctggcggcgctgctggcgcaccgctcggtgcgcgcctacaccgatcagccggtcgacgacgaggcgcttgaactcgccatcgccgccgcgcaatcggcctccagttcgtccaacctgcagccatggagcgtgatcgccgtgcgcgaccccgcgcggcgggcgcggctggccgagctggcaggcggccagcggcacgtggccgaggccccgctgttcctggcctgggtcgccgactggtcgcggctgcgccggctcggtgccgcgcaaggcgtggcgaccgacggtatcgactacctggagagctacaccgtcggtgtggtcgacaccgcgctggccgcgcagaacgccgtggtcgccttcgaggcccaggggctgggcatcgtctatatcggcggcatgcgcaaccagccggaggcggccgccgccgaactgggcctgccgcaggacagcttcgtggtgttcggcatgtgcgtgggccatcccgatcaggcccgcccggccgagatcaagccgcgcctggcgcaggcggcggtgctgcaccgcgagcactacgacgccgcgggcgaggcggtcgcggtggggcattacgacccgctgatgcgccgcttccagcaggaccagcaacgcgacgaccggccctggtcgcagacgtcattgcagcgcgtcggcagtgccgaagcgttgatgggccgccaccgcctgcgcgaggccctgaacgcgctcggcttcgccctgcgctga

SEQ ID NO: 428766 - DNA, 1392 bp, Serratia marcescens
atggcctacgccaccaccaacccctacaccggcgaagtcgtcaagaccttccccgacgctaccgacgccgaagtctcccaggccatcggcgccgcccatgaagccttcctggcctggcgcgagcgctcgttcgaagagcgcggtgcgatcctgcagcgcgccgccgacctgctgcgcgagaatgccgaggcgcatgcggggctgctgaccctggagatgggcaagatcaccgccgaagcgctggccgaggtcgagctgtccgcgcgcatctttgagtactacgtgaagcacgccgaagccctgctggcaccggagaaattgccggtggccgatccggccgaaggcgacgcgctgctggtgcacgagccgctgggcgtgatcctggcgatcgagccgtggaatttcccctactaccagatcgcccgcatcctggctccgcagctggccgctggcaataccttgttgctcaagcacgccgccaacgtgccgcagagcgcggacgccttcgagaaactgatgctcgacgcgggcttgccgcaaggcgccttcaagaacctctacgccacgcgccagcagatcgagaccatcatcaacgatccgcgcgtgcacggcgtggccttgaccggctcggagggtgccggcgcagtggtcgccgcccaggccggcaaggcgctgaagaagtcgacgctggaactggggggcgccgacgccttcgtggtactggccgacgccgaactggacaagaccgtgaagtgggcggtgttcggtcgccactggaatgccggccaggtctgcgtgtcctccaagcgcatcatcctggtcgaggccatctacgacgagttcctgcgccgctacaccgagggcgtggccgcgctcaaggcgggcgaccccttcgatgcggcaaccaccctggcgccattgtcctcgcagaaagccgccgacgacatcaaggagcagattcgtcaagctgtcgcccacggcgctaccgccactgaggtcggacccaaggtgccgacccaaggcgccttcgtgcagccgaccatcctcaccggcgtgaccccggacaacccagcctactactgggagttcttcgggccggtgtcgctgatctaccgcgccgccgatgaggaagaggcgatcgccatcgccaacgactcgccgttcggcctgggtggctcggtgttcaccgccgacgccaaacatggcgcggaagtcgccaagcgcatctccaccggcatggtgttcgtcaaccacccgaccatggccaaggccgacctgccgttcggcggagtgcgccgctccggctacggccgcgagctgctaggcctgggcctgaaggagttcgtcaaccacaagctgatcgacgtggtcgatatcgacgcgccgttctga

SEQ ID NO: 428767 - DNA, 1125 bp, Serratia marcescens
ttgagcaaccgaagccttttccggcccttgcaactcggcagctacacactgaagaatcgtatcgtgctgccgccgttgacccggcaacgcagcacccagcccggcaatgccgccaatgagctgatggccacttattaccagcagcgcgccggtgccggcctgctgatcagcgagggcacccagatcgagccgcgcggcgagggctatgcctggaccccgggcatctacagcccggcccaggtcgagggctggcgcaaggtcaccgaggccgtacacgccgaaggcgggatcatcttcgcccagctctggcacgtcggtcgcgtctcccacagcgcgctgcagccggggggcgcggcccccgtcgctccctctgcgatcccggccgaccgggtcagcgtgttcatagagactgcccccggcgccggtaccctggtgccgccgtcagtgccgcgcgccctgagcaccgccgaagtcaaggagctggtgcagctctatgcccaggctgcccgcaacgcgctggacgccggcttcgacggcgtggagatccacgccgccaatggctacctggttaaccagttcatctccgcccgtaccaaccagcgcgacgacgagtatggtggctcgctggacaaccgcctgcgttttctgcgcgaggtggtccaggcggtggccggcgtggtcggcccgcagcgcctgggcgtgcgcttctcgccgctgttcaccacgaccgatgaggatcgcgtctacctgggcctggtcgaggacgatccgcacgcgacctacatcgctgccgccagggtgctggaggaggcgggaatcggctatgtctcgatcgccgaggccgactgggacaacgccccggaactgcccgaggactttcgtcgcgacctgcgccagacgttcagcggacgcatcatcgtcgccggtcgctacaccgccgagcgcggcgagcgcctgcttgaggcggggctggccgatctgatcgcctttggtcgcccgttcatcgccaaccctgatctgccggcgcgcatcgcgcacggctggccgctcaatgcgctgaaccccgccaccatgtatggcggcggtacggcaggctacacggattatccggtccacgccggctag

SEQ ID NO: 428768 - DNA, 1053 bp, Serratia marcescens
atggaatacaagacgctggggaacaccggcttgctggtctcttcgctgtgcctgggcacgatgactttcggcgacggccagggcatcttccggcacatcggcagcgccggccaggacgaggccgacgcgatagtcaaggctgccgtcgacggcgggatcaacttcttcgacaccgccgatgcctattcggccggcagcagcgagcaggtgcttggccagtcgctgcgcaacctcggcatcgcccgcaaggatgtggtgctggcgaccaagggctatacccgcaccggccccgggcgcaacgatgtgggcgcttcgcgcggccacatcctcgatgcggtggaggccagcctgcggcgcctgcagaccgatcacatcgacctttaccagatccatgccaacgatccggtcacgcctatcgaggaaaccctgcgcgcgctcgatgacctggtgcgccagggcaaggtccgctacgtcggcgtctccaactggcaggcgtggaagatcgcccgcgcgctgggcgtctccgaagcgcgcaacctggcccgcttcgataccctgcaggcgtactactcgattgccgggcgcgacatcgaacgcgaactcgtaccgctgctgcaggccgagaagatcgggctgctggtgtggagtccactggccggcgggctgctctcgggcaagttcgaccgcgagcaccagaagccggaaggcgcgcgtcgctcggagttcgacttcccgttcgtcgacaaggaacgggcctggaacgtcgtcgaggcgatgaaaccgatagctgcggcgcacggctgcagtgtcgcccgcgtcgcgctggcctggctgctgtcgcggccggtggtgacctcggtgatcgtcggcgcccggcgcctggagcagttgcacgacaatcttgccgccgtcgaactggcgctgagcgaggtggagctgaccgcgcttgatgcggccagcgccttgctgcgcgagtaccccggctgggtgctggaagtgcagaacgcggatcggctcggccccgtggaccgctggtccggcctttcttcctga

SEQ ID NO: 428769 - DNA, 411 bp, Serratia marcescens
atgaagattttctacaagacccgcgccaccgccgtcggcggccgttccggacgcaccacgctggacgatggcagccttgcgctggacatgtccccgcccggttccggcaaggctggcgccaaccccgaacagcttttcgccatgggctacgccgcctgcttcgacaacgcgttgccggtggcggccaagcaattgaagctggcacccaccgccaccaggacctcggtcgaggtcggcatcggccagaccgccgagggcggctatgccctggacatcgacctctacgtggaagtccagggccttagcgaagccgacgcgcacaagctggtggagaccacccaccaggtctgcccgtactccaacgccacccgcggcaacgtcgacgtgcgcctgcacaccagcgtcgcctga

SEQ ID NO: 428770 - DNA, 1056 bp, Serratia marcescens
atgacagtaaaagcctatggcacccacgccgctgacacgccgctggcggcgctcgacattgttcgccgcgagccggggccgcacgacgtcaagatcgacatcgcctactgcggcgtctgccattccgacctgcaccaggcccgcaacgagtgggccaacacgctgtacccctgcgtgcccgggcacgaaatcgtcggccacgtttcggccatcggcagtgcggtgaccaagttcaagatcggcgacacggtcggcgtcggctgcctggtcgacagttgccatcattgcccggcctgcgacgcgggcctggagcagtattgcgagcacggccaggtcttcacctacaatggcccgacgcatgatgcgcccggccacaccctgggcggctattcgcagcagatcgtagtcaaggacgacttcgtcctgaaggtttcgcaccccgaggcgcaactggccgccgtggcgccgctgttgtgcgccggcgtcaccacctggtcgccgttgcgccactggaaggtcggtcctggccagaaagtgggcatcgtgggtatcggcgggcttggccacatgggcatcaagctggcacatgccctgggcgcacacaccgtggccttcaccaccagcgagagcaagcgcgccgctgcgctggaactgggcgccgacgaagtcattgtctcgcgtaacgctgaagagatggcggcgcacgccaacagtttcgacttcatcctcaacacggtcgcagccagccacgacctcgacgccttcactggcctgctcaaactcgacggcaccatgaccctggtcggcgtacccgagcacccgcacccgtcgccgagcatcgccaatctcatcttcaagcgccgcagcatcgccggctcgctgatcggcggcatcgccgagacccaggagatgctcgacttctgcgccgagaaaggcatcgtcgccgagatcgagatgatcgccatccagcagatcaacgacgcctacgagcgcatgctcaagagcgacgtgaagtaccgcttcgtgatcgacagcgcgagcctggccgccgcctga

SEQ ID NO: 428771 - DNA, 1014 bp, Serratia marcescens
atgaaagtcattgtcatacgcgcgcccggcggactcgaccgcctcgaagtacgcgacctgcctgatcccggccagccggggccagggcagatccgagtgaagctacacgccagttcgctcaatttccatgacctgctggtggccaacggcggctttcccgccgccgacgagcgggtgctgctgtccgacgccgccggcgtggtcgaggcggtgggcgaaggcgtcacggaattcaagcccggcgaccacgtggtctccgtcttcttcccgcactgggccgatggcctgccgttcggcagtgttggcaacttccagggcacgcccggcgacggcatcgacggctacgccaccgaggtcgcggtgcgcgcggccaccgatttcaccctggcgccgcgcggctggagccatgccgaggcggcaaccatcaccaccgccgggctgacggcatggcgcgcgctggtggccgacggcccgctcaaggccggcgagagcgtgctggtgctgggcagcggaggggtctcggtggcggcgttgcagatcgccaaggcgatgggcgcgagcgtgattgccacctcctcatcggatgagaagctcgaacgcctgcgcgcgctcggcgccgaccacctgatcaactaccggcagacgccggagtggggcacacgggtgttggagatcaccggtgggcgcggcgtcgatcacgtgctggaggtcggcggcccgggcacgctggcgcagtccatccgcgcggtgcgcgtgggcggccacatcgcgctgatcggcgtgctgaccggacacgccggcgaggtgccgaccaccgtgctgatggcaaagcaggcgcggcttcaaggcctgatcgtcggcagccggcgcctgcaacaggaatacatcgcggcgatggaacagaccggcatccgcccggtgatcgaccgcagcttcccgctggaacagctcgccgaggccttccgcttccaggaaagcggccgccatttcggcaaggtcgtggtggagatctga

SEQ ID NO: 428772 - DNA, 960 bp, Serratia marcescens
atgaaagcagccatctacgaacaacctggaaatccctccgtcctgcatctggccgaggttccggacccggtcgcgggcgacgacgacctgctcatccgcgtcgaggccatcagcattgaaggtggcgatctcatcgggcgccgcagcagcacctcgtccggcccgagcgacatccttggctacgccgccgctggcgaaatcttgcaggtgggtcggtcggtgaccggcttcaaggtcggccagaaggtcacagggttcaatttcaagggatcgcacgccgaactgcgcgccgtgcccgcggcgaccagctggctcgtgccggatggcctcgacatcaaggtcgcggcggcgatcccgtcgggtccgggcaccgccgcctacacgctgcaactgggggcgctcaggtcgggcgagaccgtgctgatccagggcgcggcgggcggcgtggggctggccgccgtccagctcgcggccagggcgggcgcgcgggtcatcggcaccggcacgcgtgcagacacgctggaggaactccgcgcatacgggctctccgacgccatcgtcaccaccgaccagcccgccagcgaccagatccgcgcgctgctcggcggcaacaaggtcgaccttctgatcgacaatatcggcgggccggcgctggtcgatggcctccaggccgtgagggacggcggacgcgccatcatcgtgggcgtgttcggtggccgcaaccagccgatcgacgcggggcatcttctggtccatcggcaaacggtgatcggctgcctgctcggccccgtcatgggcgagcccgaggtccatgcactgatcgacgatctgctccagcaggccctgcgcggcgagatcaaggtgccgatcgacgcgaccttcgcacttgccgacgcggcggccgctcatcgacgggcagaagagcgcggccgcatcggccgcgtggtcatggtgccttga

SEQ ID NO: 428773 - DNA, 663 bp, Serratia marcescens
atgagcaaggtcttcatcatcggcgcggcgggcaaggtcgggagccgcctgacccggctgctggccgcgcgaggccatcggcccatcgcgatgcaccgccacccggatcaggccgacgagcttgccgcgctgggcgcaacgccggtggccggcgacctgaccgggctggacgctgacgcgctggcctcgctgctgtccggcagcgacgcggtggtgttcactgccggcgcgggcggcaagggcgggccgcagcgcaccgatgccatcgacggacgcggtctggaactggccgtcgcggcggcgcaggcggcaggcatccggcgtttcctgctggtatcggcctttcccgaggccggccgcggaaggcacgtctcggataccttcgagaactacatgaaggtgaagaaacaggccgacgtatatctggcgcagagtggtctggactgggtcatcctgcgtccgggcacgctggtggataccgcgggcaccggcaggatcaccgccggaccggcgatcccctatggcgacgtgccgagagacgacgtggcggcgacgctcgccgaactgatcgatcaacccacaatcaaccgggccatcatcgagctgacccagggcactgccccggtacgcgacgcactggccgcgctcgcgcggcaggaatag

SEQ ID NO: 428774 - DNA, 510 bp, Serratia marcescens
atgtcaaaccagctctcgcagaaaccgaccgaggacaccgaggtcacccggatcatcaaccgcctgctcggcacctactggagcgcctatgcacagcaccggatgcatgccgcgctggccgacgcctggggcatcgccgacctcgcccgcaacatggaggcgcatatcgacgacgaaccggtcaccatcgtcgcgctctccaaccggctgctcgacctcggcggcgtgcccgatttcagcatcgccccgcccagcatcggccggacgctgcgcgaggtactggagaacgacctggcattgcagcgccaggcccgccccgcgctgaacgccgccgccgaagccgccgcggccgcccatgatgccacgagccgggtgatgttcgagcggatcctggcggacgaggaagaacatctgtcctggctcgacaccgaactgcaactgctggatctgctcggcgaaccgctgtatgtcgccaatcggctccatccgccgcgcggcgccggacaatag

SEQ ID NO: 428775 - DNA, 603 bp, Serratia marcescens
atgcatgaagaacgggaagaaatgacaagttccatccagccggtcgtactggacgatgcctatcggctgatcacccatggcccgaccattctggtgtcggctcgccatggcggtatcgacaatgtcatggctgcggcctgggcatgcgcgctcgatttctcgcccccgaaactgaccgtggtactggacaagatcacccgcacgcgcgaactgatcgaggccagcggcgcattcgtcatccaggtgccgaccgtcgcgcaggcgcggctggtgcacgaggcgggaacgcgcagcctgcatcaggacccgaacaagctccagaactgcggcgtggaactgctgcgcttcgctggccacgacctgcccttcgtggccggttgctcggcctggctggcgtgcaggctcgttccggaaccgcgcaatcaggacctttacgacctgttcatcggcgaggtcgtcggcgcttgggcggacgagcgggtgttcagcgacggccgctggcactatgagcgcgccgatccggcctggcgcaacctgcaccacgtcgcgggcgggcgcttctatgccacgggggaggcgctggacgtgccgacggcgccgtga

SEQ ID NO: 428776 - DNA, 774 bp, Serratia marcescens
atgaaaacaggtcgtctacaaggaaaagtcgctatcgtcactgggcttggcagcggcatcggccagggctgcgcgttgatgttcgcccgcgagggcgccaaggtggtcagttgcgacatcaatcccgagaccaccgaggcggccctagccaaggcacgcgaggaaggattgcagatcgacagcctgcatccctgcgatctcacccgcccggaggacgtgcagaagctgatcgacctggcggtgcagcgccacggcggcatcgacatcctggtcaacgccgccgcctggacggccttcgcttccatcgaggagatggacttcgagagccagtggaagaacaccatcgccggtgagctggacgtggtgttcctggcctgcaaggcggcctggccgtatctgaagcgcagcggccggggctcgatcatcaatttctcctcggtcaattcctacgaggggatcgcaggcggcggcgcgctggcgcattgcgccggcaagggcggtgtgctggcgctgacccgccaactggcggtggaaggtgggccgcacggcatccgcgccaacaccatcatgccggggctgatcgtcaccgggaacacccggccacggctggagaacgaaccgggattccgccagaccgtggaggccaagcagatgctgggccggctgggacagcccgaggacgtggcatattgcgcgaccttcctggctgcggacgaatccgccttcgtcaccgcctccgactatcgggtcgatggcggcgtcacggcgtggtga

SEQ ID NO: 428777 - DNA, 297 bp, Serratia marcescens
ttgctgtcgcttgcgacggctcccgccttcagccaggaatgcggcaccgatgcttcgacggcgctggagcggtcacagcagatgatcggcaaggccgacgccgacgccaacgcccacctcgaccgcaacgaggccaaggcgaatttcccgattcttcatcgtaatttcgacaccgtggacagcgacaaggactgcaaggtctcggtcgagggagtgcgaagcttcatcaagggccgggccgacaatgccagtgtcaacagccagggacgacgtgcagcgcatccgtcaggtccgtag

SEQ ID NO: 428778 - DNA, 1575 bp, Serratia marcescens
atgctcggcgctcgctacgtcgcgctcggatatgccgacgtgcgtggcggccttggcttgggagtcggcgacggctcgtggctctccacggcctatgcggtgggggacgtcgttggcgtggtgcttggctgctggctggcgaccgccttgtcgctgcgtcgagtgctgttgggaacgacggggctcttcgtgctggcctcggggctgctggcgctcagcccgccctatgccatcctgctcgccgcgcgcggcgcccagggtctggccggtggggcgctgctgcccatggcaatcgtcgcactgttgcgcaccctgccgcctgggcaccgcgcactggcattggcgctctacacctcggcctcgacagtcgccccgcaactggccgccggcatcgccggctggctgctggaccgctggggatggcaggcgctgctgctggccaacctgctgcccggcctgctcgcctgggctgcgggaacctatggcctgccccgcgagcccttgcgcgtgcgcccgctgctgcatacggaccgcttcggattgctgctgctcatcggggggctgggtctgctcgcctgcgcgttcgaccagggcaaccggctcgactggctgcattcgcccctcattcgggcgctgctcgccgctggcgtggtcgcagtttgcgggttcgcctatcacgcggccagcgtgcggcgtgaccggctactcgacgtcgagctgctgtcgaggcgcaacatcctgctgggtgcttgcggtgtagtgccgttcgggctagccgcaatgggctgcggctacgtgattcctcaatacctcgtccaggtccacggctatggccccgctgatctggagccagtgctgtgggatgccgcctggccacaggtgatcagttatggtggcgcagtcctgtgcctggacaggaaatggctgggtgggcctcgccggctgttggcgttaggcttcgtactggtcgcctcggggctgctcctggccggcctgaacatcagtggcacctggctcgccggtggcctgcgtgccgggcagatcctccagggactgggtctgccgctgatcctgctgccgctgttgtatctgtatgtcggtgacctgatgccacgtgaaggggtgcatgcggccttggtgttcaacgtgatgcgcagcctcggcggcacgatcggactggccggaatcacgaccttggaccggctgcgcgagcaggcctggaccagcgccattctgcatcacgcggacactgccgctacggcgttcgcccgtgtcgaatccctcgtggtcgcagccggccccccctcagccgctggcgatcaagctgtgcaccgcctgctcagcaatccgcacctccaggctcagatccttgcccatgccgacacgctgaccgtgctggccatagccatgttggcaggcgcgatactggcgatgtgcatgaggtcctatggctccggacatcccagcgtcaacgaccgccgcaaggccaagcaggcgcgtgcggtcggcgagcctccgttgacagtggtttccagcacgcggcatagacgttcagatcatgctgaatcggaatga

SEQ ID NO: 428779 - DNA, 687 bp, Serratia marcescens
atgccgcccgccaagcggcggcgcatgctgcccgcagatcgtgagaaagagatcgtcgaagaagcagtgcgcttcttcgccgaggtcggtttcgacggcaccctgcgtgaattggcagtgcgcctgggcatcacgcatcagaatctgttccgctatttcccgactaaggaagccttgatcgatcgggtctaccgggaggtctatctcagccgctggcagcctgaatgggaaacgatgctccaacagcccggcaagtcgctggaggcgcggctgaccgacttctacaaagcctacttgcatgcgatcttccgctacgactgggtgaggatcttcgtgttcgcgggcctcaagggcgtcggcatcagccaacgttacctcaccttgatccagacgcgattgatcgagcctctagccatcgaactgcgcagcatgtcctgcgatgcgcaggcaggcaaggccctgtccgcggatgagcttgaggtggcctggggtctgcatggtgagctgttctatctcgccgtgcgccgctgggtctatgacatgccggtcccgggcgacctggatgcgttgatcgagaacaccattgcccgcttcttccatggtgcacctgctgtcatgcgggctgtgcacgaacgggccaatggaacgccgccagcatcaggcaggcgtcattccgattcagcatga

SEQ ID NO: 428780 - DNA, 357 bp, Serratia marcescens
atgaacaccaacacccaagctacgtccgaaatcgtcaacgctcgcctgacgctcgacgtgacctatctgctcaacggagaacccgcatcggaaatgctggaacgcctgcgcggcctgtgcgagcgcactatcggcgaaggcatgttgaccggcgagaccgccgcggaggtggacacctggtcaatcgacgcttcccttccgccctcgacagtcgtcagtgaagcacacgaagccgagatcgccgccttcatggggcagcgtatcgaggacggaaacctcgacgcggaagacatccccgtgcgcatttcgcgttacggcctgatggccccccgaagcattcgtctccgaaatgcgtga

SEQ ID NO: 428781 - DNA, 2274 bp, Serratia marcescens
atgtccctcgatcttgaaaccatccccgattctgccgtgcagggcgatttgcctgaagcagcgtcctcacctctgaccatcagcctcaacgatttcgtttccgaattcggtgacgaactgctggaaagcctcaaccgcgccaatcctccggtctacaccggggaagcgcgcccacatcggcaaggggttctgtcgcgtctcaagcggcagccgttccccgcgcaggccgaagtcatccacgctgtcagcgagttgctggtcgatcgcagcgaacgcgccgcaatcatcaacgcggagatgggaacgggcaaaacgctgatggcaattgccgtcgcggccgtactccatgccgaaggctaccgccgcacgctggtcctgtcgccgccgcacctggtctacaagtggcggcgggaaatcctcgaaaccatccccggtgcaaaggtgtgggtgctcaacggccccgacacgctggtcaagttgctgaagttgcgtgagcaactcggcgtaccggccaccgaccaggagttctttgttcttggcagggtcaggatgcgcatgggcttccactggaagcccgtgttcacccgtcgccgcacgcctgtcggcttcgtcggcgcatgcccgcattgcggtcacgtcatcaccgatctcgatggcgagccgatcaacacgatcgagctcgaggccgaggagtcgcggcgcaagtgcagccattgcgcatctgcgctgtggactttgatgcgcccgcggtctctttcatccaccgaccagtcctcggcagtgatcaaggcgctcaagcgtattcccaccatcggggaggccacggcccagcggctgatgaagaagttcggcgagtcgttcctggtttctctcctgggcgacaacctgttcgagttcatcaacctgatggacgagaacggtgatcttgtcttctccgaccggcaggcccagcgcatggaatgtgcaatggcctccatggaatttggctttggtgaaggtggctatcaagccagtgaattcatcaaacgctatcttccgcagggctttttcgatctcctcgtgtgtgacgaaggccatgagtacaaggggtcgggttccgcacagggacaggcgatgggcgtgcttgccgccaaggctcgcaggaccctgctgctgacgggcacgctgatgggcggctacgcggacgatttgttcgcgctgctgttccggacgctgaccggacggatgatcgaagacggctaccgtccctccaggactggcaacatgacgtcggctgcgatggccttcatgcgcgaacacggcgttttgaaggacatctattccgaaagcaccggcacggcgcacaagacggccaggggcaccaagatcacggtgcgcaccgtcaaagcgcctggcttcgggccgaagggcatcctgcgatgcgtgctgccgttcaccgtgttcctgaaactcagggacattggcggcaacgtgcttcctccctacgaggaggaatttcgtgaggtcgcgatggaggccgatcaggccatcgcttatcgtgacctggccggccgcctcacggcggctctcaaggaagccctgcgtaagcgggacacgacgcttcttggcgtggtcctcaacgtgcttctggcctggccagacacgtgcttccgtcccgagacggtcacgcatccccgcacgcgggaattgctggcgttcacaccgtcgcagttcaacgagctggaaatcacgccgaaagagcgtgaactgatcgacatctgcaaggcagagaaagccgagggccgcaaggtcctggcctataccgtctacaccgggacgcgggacaccacgtcgaggctgaaggttctgctggagcaggaaggcctgaaggtcgcggtgctgcgcgcaagcgtggatacctcacgacgcgaagactggatcgccgagcagctcgaccgtggcattgatgtgctgctgaccaatcccgaactggtcaagacgggcctggatctgctggagttcccaacgattgttttcatgcagtcgggatggaacgtttacacgcttcagcaggcctcgcgccggtcatggcggatcggtcagaagctggccgtgaaggtcatctatctcggctatgcggccacgtcgcaaatgacgtgcctgtcgctgatggccaagaagatcctcgtctcgcagagcacgtcgggagatgtgccggagtccggtctggatgccctcaacacggatggcgattccgtagaagtggcgatggcaaggcaacttgtcgccgcctga

SEQ ID NO: 428782 - DNA, 312 bp, Serratia marcescens
atggcacatgaagcacttttcgttagcgttgtcccgcaaccgcggttcctgaccggacacctggtcatgacctgcggcgtcgatgaactggtccgcgagggccggctcaatccaggcccttatctcgcgcgccatctcggtgccgactggggcgatctggacgacagcgactggcagtccaatgacacagccttgcgcaccggcgaggaccgcctgttttcgtcctaccaggtcgagcctgacctgaaactctggatcatcaccgaatgggatcgcagcgtcaccacgctgctgttgcccgacgaatactga

SEQ ID NO: 428783 - DNA, 306 bp, Serratia marcescens
atgacatccaacgaaaggtccagtaatcaccgccgtttgctgtttccgatcggcgcattgattttcagcgaaggcgtagaccgcatcatgcgggaaggccggctcgatccgatgccttacatccagcgccacatccgtggcgattggggcgatgtgacggatctcaggtggcaggaaaacaatgccgccgtaacgtcaggcaagcccctcggttcgcgctacatcgtcacccgcgaactgaccattcgcatcgtcaccgaagcagaccgcagcgcgacgcatgtcatgctgaggtctgaatcctga

SEQ ID NO: 428784 - DNA, 327 bp, Serratia marcescens
atgtccttcaaactcttcccacgccagcgcaccgcgccgacttccattcctctgttctccagcggtactctgatgctcagcgccagagtgcaatggctggacagcacgggactggttgatccccatcgtttcctgcatcgccacctgcgtggtgattggggcgatctcgatgacaccgaacgacgcgcgaacgatgccgctcttcgctccgaaggcgtcctgacttcgcgctaccaggtgacaccgcggctgtccgtggtggtgaccaccaacgcggaacacagccagaccgtgatccaactgcccgaggataacgaacctctctga

SEQ ID NO: 428785 - DNA, 1107 bp, Serratia marcescens
atggctctcatattccccaggcttgcccgcaattttgcgaaaaacgggtactacccaacagacgaacccacgctggagcgggcgctcaacgcgctggcgccggccgcgggtcaagtcgccatcatcgacccttgcgcgggggaaggcgttgccatcgccgaagctgcgcatgcgcttggccgtgatctggtgtctgcttatgccgtcgaattcgacgaagagcgcgccagacatgcccgagggcttgtcgaccattgcctgcacagcgacctgatggatacgctgatcagccgacagagcttcggactgatgtggctcaatcccccctatggggatctgtccagggatgccgatggcaacattggctaccagggacagggccgcgccaggctggagaagctgttctatcagcgcgtactgccgcttttgcagtacggtggcgtgctcgttttcatcattccgagctacacgctggatgcagaaatggtgggctggctgacacgccatttcaccggactgcgcatctatcgtgcggtcgagcagcagttcaggcaggtggtgatcttcggcacccgttcacgccagcgcgatctggcgagcgatgccaaagccatccgcaaccggctgctgcagatcggatcaggcgatatcgaagcggaagaactgccagtcgaatggccgttcgtcccgtattccgtcccagccacacaggccgagccggaacagttctaccgggtcaccatggagccggagcaattcgcggccgaagttcatcgcctgcaagggctgtggccttcgctcgatacgcatctcggcgcttcgcagcaatcgctgcggccgccggcccgtgccttgtctcactggcatctcgccctggcgctagcagccggtgcgatttcgggtgtcgtgcgctccagatccggcaaggtgatggtcgtcaaaggcgatacccacgaagagaagtccgccgcggtcgaatacaacgaatgcgacgacggctcgatcgccgaaacgcgcatcctcacagacaagttcgtgccggtcattcgcgcatgggacatgacacccggctcccccactcggggagaagtgctgaccatccgctga

SEQ ID NO: 428786 - DNA, 651 bp, Serratia marcescens
atgcccgatacaacatcttcgcaaccgcttcttcgcattgacgaatgccccgacctgatggccgacggctacatcggcgacgaaggcggcaacctgatcttcctgtccgtatgggcacgagatacagccattcagcagtttctggcccgactcacgctgggtcgtgacgacgatggtctggatcagttccacctcatcaccgacgcaggcggctccgtgccggttttcgtcggtaacgtcgacaggctggagaagcgctccacgcgccttttccgccgcacgttgttcggctcgatggtcaacctgtggctcttcgaccaacgctgcgtcaagcccgacaaggctaacgccagcgcgctgacgctgttgcccagggactcaggccaccggcttgatcgcttgtggacactggtacaggaaacctgcccattgccactgctcgatcactggcgcgacatcgtgctggagctcctgacggagcaatccatgctggcacgtcttcccatggcttacgggccactggaagggcatcgcctggcactggatgtccccgtgctcaccaaggcacttggcgatctgatccgtaacggcaccctgagcgccacggcgcatgaactggcttccggcatgcctttacggcgcgtcgcctga

SEQ ID NO: 428787 - DNA, 828 bp, Serratia marcescens
atgcaactcgcatctcgtttcgcatcacgttccccgatactgcgtgcagatcatccactgtcggatgaccagattcgcgcagtcgctccctccatcttcgcggatacaccgcatggaagccgctccgaacggtacagctacataccgacatccgccgttctggcgaaactacgcaatgaagggttcgagcccttcatggtgtgccagacccgcgtgcgtcatgaagaccgtcgcgagttcacgaaacacatgctccgccttcgccatgcaagccagatcaacggcaaagaggcgaatgagataattttgctcaattctcatgatggcaccagcagctaccaaatgctggctggcatgttccgtttcgtgtgccagaacggtctggtgtgcggcgatatcgtcggtgacgttcgtgtgccccacaagggcaatgtcacagaccatgtaatcgaaggcgcctacgaggtcctgagcggattcgaccaggtgcaggactcccgcgaagccatgcgagcgatcacgctcgatgatggcgaggcggaagtcttcgcaaggtcggccctgacgctcaaatatgacagcgaaagcaaggtgctgccgataactgaaagccaggttctggcgacacgccggttcgatgacaatcgcccggatctgtggtcggtgttcaaccgggtacaggaaaacctcgtcaaaggaggtttgtccggccggactgccactggccgtcatcaacgcacgcgcgctgtgcaaggcatcgatcagaacgtccgcctcaatcgcgcgctgtggctgctggccgaaggtctgcggcagctcaaaagctga

SEQ ID NO: 428788 - DNA, 396 bp, Serratia marcescens
atgggttggcttttttcccttcgctcacgtagcgaactgatccatcatctggtgcagtcgcaggattgccaggccgcatatgtcgaaactctggcctatacccttcgcggcaacgtgttgtggtccgtggtcaaagtaacggcgaaagagccgaacaggctcaacctcgctgccggtgaatccttcacctacatcggctgcacgctactgcaacgctaccgcaacgagtggggctacaagtcgatggatgaatccgttcatccctactactacagctgcccgctcagctatctggaacgcgcacccactcaatcgccggaatggcgagcgggtgtacggacgtaccacgatcacaggcgtatagcgcgttcggcatctgccgttccagtcgcctga

SEQ ID NO: 428789 - DNA, 342 bp, Serratia marcescens
atgagtcggcactgcttcgacacgtcccacaagggatttcccatcatcgttgtgctcggctgggatcggccgatgcaatattttttcctgaccatcgaaaagcctgcagagctgatcgatgacgccatgcaggtcgaggatgaccgcttcctgtacagcaacatgcacgagaccgatcctttcggtcatgacctggactactaccgcgaggtcttgcggcattttcagatcatcgtgccggagagcctgttcagagaggtcctgtccgacgccgagaggaatgtcggcaaccgcttcgtcaggcatcaggcagacggttcattcaccgaactagggcgctga

SEQ ID NO: 428790 - DNA, 612 bp, Serratia marcescens
atgattaccctctcgggccagttggccatcaagaccatccacggcaggaatggcgacttcaatgtcggccgcctttcgaccagcattggtgagttcgtcatcaagaatgccgagctggaccagtatgacgaaggcaaatacgacggtgatttcgtcatcaccgaaatcagaccctccacctacaacaccagtgggcggatggtcatcgaaatccgcgcccacctgggcgggatgaccctctcgaacatcgatcgactgagcaaggatgaagcccagcggctgagtccgcaggaggtcgatcccattgatgaggaaacgcaggcacctgcggccgcggccaggcctccagccaggacgaaggcccgcagcacgcgcgatccactggtcgacaccacgccgttcggcagcgaaccagcggctgcatcatcctccaacgcctcggccgaggaagacgatgccgcactgttcggcatgctctggccgttgagcgaaaccgtgaaactcgacgcaaccgtcgaccgccgcgtcctgcgtcagcagcgcgaccggctcgatgcgatgggctatcggtttgaaccactctcccaggactggcacctcgccagcgcctga

SEQ ID NO: 428791 - DNA, 549 bp, Serratia marcescens
atgaccacttctaccgaaaagtcctttttcgacctgcacatcactggcctcggctatctcaatcgcatccgcgaagtgaagccgaagaaaggtgagccgttcctggcctgcgatatcgcagcgctcaatggtccgagcgacgatgtctcgtacgtgcgttttgatacgcgcgtttcgggcaccgatgcccagcacctgatccgtcgctgcatcgatgccgtcgaggcagagaagaaagtgatgatcgggttccgcctgggcgacctgtggaccgacaccttcacctattccaaggggaagcgcgccggtgaacagggtgtcagcctgaaggcccgcctgctgttcgtcagctggatcaagatcgatggcgtcctgaagtacaaggccgaacccaagccggccgagtccgaacaggatgctgcggagcaatccgctgcatctgctcctgctccgcaggaagagccggttccggaagtatccgagccgatcgccgaacctgccgacgaagccgctgatgcgcaagcaccggcactggccgagtcgttctga

SEQ ID NO: 428792 - DNA, 342 bp, Serratia marcescens
atgccagcaatcaccagcagcacatcctcacagcctatcagcgataccggcatctcgtttgatgaatccgcctggcgggctgtctgcgagaaggtcgccgtgcaagcccacaacggctgcggactgtctcacgactactacgtcgaacgcttcagttcggagattgaacgacacgtagatcgactgcccgaatgccaacggacacaagctctgcagatcgcgcaggactgggattacgcaacgcctgccgagaggcaggaaaccgacgactggaatgccgagaacggctactgcacacacggaatcgagctgggatgctgcccggccggttgcggttcataa

SEQ ID NO: 428793 - DNA, 366 bp, Serratia marcescens
atgtcactaagtttcaaaggtgccgacctgcgccccgtgctcgccgaggccgaggcgaacaaatgccgcgtcgtcctggtaaaggaccacggcgtctacttccttgccgagcgaggtgagcgaacaccagaggggcgtcagaagctgctggcctacgccatcggctgcaaccctgacatcgacccgttcgatgattggtgggaacgcgcccgaaccgagttgggtggcgatgatttcgcagagcatttcgaactgcgggacagcgtgttcgcacgcatcctgagcagcgaggacgatctcgaactctccgccacgccgacacaactgttcctgcaagtcgtttcacccacccagggcgacgactga

SEQ ID NO: 428794 - DNA, 219 bp, Serratia marcescens
gtgactttcacggccagcgactcctgggtggtgtattcgcccaacgagtcggccgtcagcgacagtgctggcttctggtccaacgagttcggctgggtccccctcgaccatgcgacgtgtttcacgaccgatgaggcccgtgacgcgatgcttccgatatcggtcggccacgacgcgcggctcgttccctggcttgaggctcaacagttctacggctga

SEQ ID NO: 428795 - DNA, 813 bp, Serratia marcescens
atggaccgttccctcatcaagtccctgatgccttcgctggtcgcaggtcacgtgcctcgtaacgcacgaggcttcaagtatcgcgtattcgatgatcagccgcagatatctgcattcggcttcgccattgatcccgatgccttcgacggcaaagtggtcgcggccggtgacgatgccattgtcgtcaaggtcaagcccaccgagttcgcggtgctcgaccgcaatctggtgtcctctgtcccgaacgaaggggccaaggtgcatgttcaaccctacgcacggcgccggttcgacggcctgcgcgcggacaccccggaagaacgcaccgagatgacgtctgacggcattccctacacggtcaagacgcacgtcctgggctccgcgccggccaagctgcccatccccgagccacagtgcctagaactgggtcagctcatccagcagttggaagaaatgccggcgcccgatggtttccggcgtatcacccacatgctggtcgatgctggtgcccgtgacttcacctgggtcgatccgaagccgtccagcatcatcgagacacctccggcaatcagcttcgcggtttcgaccggaaagttcgagggccgggtgacgatcctctatgaccgcgcaggcgacacctacgtggtggagctgcatcgcgacggcgaattggtcgatcggcacgacgaggtgtatttcgacatgctcggcgaagtgctggagcggctcatcgacgacgggcgctggcgcctgatcgacgtgagcgtgatcgacgccaagcccgcccggcgacgccaggcggtgcttgcgtga

SEQ ID NO: 428796 - DNA, 1026 bp, Serratia marcescens
atggcatcggagaccggaataaagacagcagcgacttctgccgagagaatgctgtggggtgccgtcaggaacatcgtggcagcgaaagacgcactggacgccgcgctgaaatcgccagcctcatcagtccttgttcctcccgagctgcgcaatgctgcaagctccgcgatcgatgtctccgccttcaccagggctgtggtgccgtttctggacctgacgcactcgcttcatccccgacgtgcccgcgtccctctcgatcgtttgctgggtgagtcctggcgttggcgagagccatcatcgccaagccgctccgtcacggcgcttgccgactatctgctggacgatgaccgctctctgcccggcgaccgcgaccaggccattgtgtttgagatcgcgccgctgggattgtggttcgcccacgaaggcaaaaaccgggtccacttcctgcgctccggcggcgcaaccgaaatgcctgcgatggtgacgaccgtggattaccctgcggccgaacggctggctctctaccgtctggcgatctcgggaagggaagagctttggtgcgtactggacgggtgccgggccaggcgcttgttgttgccgcagctcacccacgcactattgacggcctatggcgtggctcccgcgagccgctggccgcaggatctgccttcgcctcatatgatcgccgaggtgcttcagcagcgtttgcctcgcctggagatcggtcaggacgtcgacctggagcagcttcgcatccgtatcctgaaaaatcacgacgaagaagcgttcaccgaactcaatctctttgaaattctggccgcaggcccgctgaaggtgcgatggagatggctcgcctgcgcatgcgtaatatgcctgggcggcctggcattgagcctgatattgccacagccctgggatggccaggcccggcttctgctcgccggcggcgtcggtggatttgtcgcatgcctgctgctcccctggcttcgggttcgccggaaacacctgcgggacgaagatcgctga

SEQ ID NO: 428797 - DNA, 714 bp, Serratia marcescens
atgtcccagacactcaatccttttattcgcggctatcggaatctgcattttgtccgaacactttgcatcagccacgaagacgacagcccgctgatctggcggcctttgcatcccagtcaggcgcatctgcctgacgatcagatcgcacagttcccctgccttctgtccagcgattatgcgctgatcaccgagggccaggaaataccggaagacctggaggcacaatgccagacttccggcctagtacgaacggttgtctacgccattaccggcgatgacttcggccatcccgttcacgtaggcgactgctattctcgggaagctgcgcaggaagtgatccatcggctgagtttcgacaccggattttatagccggtgctgggagatcagcacagcgcatattaccgaggaatctttccactatctggccgagttggcagatatcgccacaccgaccgggttccggttcatcgcattccgcatcccatatagcccggcgatcggcatcaaactgattgcgacaccgtggacagatgaaaacctgttgcacgtggagggcataactgcagagcaattgcggcaggagcatctggaaaaaggtatgccggaagctctggccgacaccattcatctggccgcactggccgatatccgcatcctgatctttgatgctgatgctccggccctagacgacctgcctcaatatgaagagtaa

SEQ ID NO: 428798 - DNA, 675 bp, Serratia marcescens
atggcaaacaactactacgaagcgaccggtcttctgtcgctggagcgcgtgacgcctgtcatcgtcgcgctgttcagcgccttccatctcgacgccaactatccaggcagcggtcgtgcttacatcgccaggattgccgaaaccaacgatccgcaatgggatgatgtgctggaaggtctgactggtctggccgagcagctaggcatttcgccgaatgcagaagcagaggccacaattgtcgttgtcctggaaaaactggccgcacacttccatgccgatcaggacgaatctttcgaaaacctgcttgagcatcattcgttcgaaggagatgcagaccttgaagtcttgttcttcatcgcctcttgcttcgacgatggccataaccttgtctctattcagttcgagggttgctggtattgcagcaaaccgcgactgttcgagtttggtggtcacgcatgcttcatcagccgggagatctccctgttcagcgacacgccccagatgctgagactcgggaaggatctacaccgggtcttgcaggagggaaatatcactgaagcagctgctcgcatcacttttgcaacggcaggttttcttgccggaatccaggattcgaatagccgcaaagcactgcggaaacgcgtggcagaaagcctgctccaaggtcaggactga

SEQ ID NO: 428799 - DNA, 399 bp, Serratia marcescens
atgaacctgagtatttctctccccgaagatgtgatcgatcagatcgcacgtgaggaagcccatttcgtactggcgcccgctgcgttctttcacgcctggaaacgtggcgtggaaatcgccggcgtcgagtggttcggcaacggcacccgcgagggatttctgaatgccaccagtaaatgggatctacggcccaacttgctgctgctcaacgatgccctgggtgtcctgagcggcggacagcggcttttcctttcggcaatggtcagcttctacaacgcccgcgagggtgccgcgatgctcaagcgtatcggcttcgaggggctcgctgatcttggcgggctcgatctggaacgcaggcaggtgatcgcgcagttggtgctcaattacagcggctggtaa

SEQ ID NO: 428800 - DNA, 246 bp, Serratia marcescens
atgtccttcgtgtcccatccccaggccagggtcagcctgcaagccgacgccacaggccgcctggctctgcactggacaggcaaacgccttcccctgcgcgtgctgagaagcgccgccggttattacatcggcacaaccgatgaagaaggtcccgtttcacgcgagtccgtcgagtatttccccagcagtgaagcagccaccacggccctggaaacaggtcagtgggaacagcgttcgcatccctga

SEQ ID NO: 428801 - DNA, 285 bp, Serratia marcescens
atgcctatgcacaatcctccccatccgggggaagccctgcgtgaagacgtgctgcccgccatcaacatgagtgtggcggcgctggccaggcacatcgggtattcgcgggggcaattgtccactgtcctgaatggacatgcggcaatctccgccgatcttgcccatcgcctcgaactcgcaggactcggtagcgctcgccagtatctcgccgagcaggccgcatacgatctttggcaagctgtacaccgggaacaccccccgatcgcccgtctgcagatcgcctga

SEQ ID NO: 428802 - DNA, 558 bp, Serratia marcescens
atgaccattcatcaacagcgcatcaccctgaaaagcctcaaggttgccgacttcgccagcgaggaaacactttgcttcaccgctgtcgtgttgttcgacggcgagcctgtcgccgatgccagtaatgacggccacggtggcatgaccttcgtccgttcccgcgacggcaaacagtcgaagctctccgaagctgagcaatttgccgcaagcctgccggcagtcgtcaccgactatgacgatccccaggatagctcccgcaaattcaccatccagatcacactggattacctggtcgatgaccttgccaacacgatgcacgcggacaaaaaaatccgtgctgccttcaatcgcgacatcggcaacaaggtgctgttcgtcaaggacggcaagttgctgttcctcaagggcgccaagctcaagaccgtcaccgacagacctgcctacttcgccaggctgcgggctgcgcaaaagcagccaatcgtcatcctcgccgagctcgcgcctgatgaggctttcgcactctggaaaaagcacaccggcaacgatgttgcgtcctga

SEQ ID NO: 428803 - DNA, 1569 bp, Serratia marcescens
atgggcactattcgtctcaaaacgaaccagcaccgtctgatttccaatcttcgacatgccttcaatcctcaatccatgctcggcgagctgctgcagaatgcacggcgagccggcgcgaaaaacgtccacatcaccgtggacgacgacgcaatcactgtctgcgacgatggttccggcatcgccgacctgcaatctctcattcacatcgccgaatccggctgggacccggaactacaggcgcgcgagaacgccttcggtatgggcgtgctttcaaccttgtatttttccaggcatctgtcggtgcattcgggcacgcaggcgttcagcgccagcaccgcgaccatcatccgcggcgacggcattgaggtctacgccgaaaagcctcgtatcggcacggagattcgtctcgacggcgtgcaatctccgactgccggcgtcaatctgccggtttgggcggaacagcagctcaagaggttgtgcgaagcctttcctgtgcctgtcttcctcaatggcatggaactggctcgaccactgaccgatccgtcattgccttggcgcgaaacgcctgtcggccggattctgctcaacctggaggcctcgtgcgtccagtggcagtgcttcttgcagggacttcccatagggctttctcccagagcgtcaaaacatcacgtagtagtgttgcgcgacgacatgatcgcccggcttcccgatcggcagcatcttctcaatgaagctgacgagtgtgttcgcatcagggacgcgatcaatcaggcttaccgccaggcattgatcgaaaccagggagcggttgccggccagcgagttcatcgagcactatgccgaaaggtgcctttcctcatccaatgcagacctgctgaacgatatccactttgttccgctggcatggttccgtgactggcacggtgttccccccggatatgtccgcttctgggaacgctatctgcgcaccggcatatcggccagcgaggcattgaacgaggctggcgtctggcgcatcgccaacggcgaggacaatgatgaaactgctgccgaggtctatctgagcgctcgcgaaggctttttgctggaggagacgcggctggatgcggggcactggctgatgtccatggtcagaacgatcgactccgcgcaggtggtgatccagcatgcagccacgctgtatgaagaccgtcacactgtcctggcagacggctcggtctccctggtattggtcgaaggtctatgcgtcagcctggaaggtgagcccggcgagtatccggtagccgcagtgcgcagggccgacacgctctacctcaccacggaggcatattccgtcacccgcctggtctcggactatatctttaatgaccgctacgaggaggccagcgaagaggaggatggccggaccatcagcactttcatcgccgtcggctgctcgcaggaccccgttcacgtcatcggtgccctgcttccggacacgctgcgctacacgccgcagtccaggctggccggtgcgacggtgcggctggtcttcgatgatgaaggaaagttgcagacgatcaccggttga

SEQ ID NO: 428804 - DNA, 1041 bp, Serratia marcescens
atggccggagcctatgaacgggtatccgtcaccgtctgcttcggaggcggcaacaggcaaggaccgatagatacagcggcttgcctgaccgcacggggacacaagtgcgatttcgaggttgaaaccttcgcggcccagtcggtcaccgggcagcggacgcacgccctgaacaccgccaacggcggcaaaggtagcagcgaggacgggaccggacgcggcgtgccaatcgtcacgcataaagcgcctttaccggggatgcctgtcgccttctcccaaaacagccgcaacgaggttcgccttgagggcggtgacgggcaaatcgcgggcgcgctgtcgattggtggtggaaagcctggtcagggatttcctacgatcgcgtacgcgcctggccgatacgccgcaccggaaagtcatgacgggcagcaagcacccatcctgggtttcacggccaaggactacggcgccgacgctctagaaaacctggccccaaccctccgcgcggggggccacgccggaagtcatccgaatgcaggcgtcatgccggcgatcgccttcaaaacgctgcaagcgaccttcaactacgagatatctggcacgctgattagccattacagcaagcggcaggaaaacccggacacgatcctcggcccggatctggtcgcacgctccgccgcggtgcgtgggcgggagggtggcgcaacggccgagttgggcggtgccgtggctgacgccctgcgcgcaagcgacggcggcagcgataagccccacgtcctgcttccctcgctggaggcttatttccatggcgagctgatcccacaagacgaaagtggctgggcgcagtgggcctgctggcgcgtgcggcgcctgatgcctttggaatgcgagcgtcttcaggggatgccagacaactacacgctggtgccatatcgcggcaagccagcagccgacgcaccacgctataaagcgatcggcaattcgatggcggtgccctgcgttgcatggctcgggcagcgtctgcaacaagcattgcagccacggtaa

SEQ ID NO: 428805 - DNA, 1011 bp, Serratia marcescens
atgaaactcatgccagtcggtgtcgacattgccaagaacgtgatgcaggttcactacgtggatatgaatacgggagaaatttttagtaaggcgatcaagcgcgcgaaatttattgagtttttcaccaatcgttcaccctgccttattggcatggaagcctgtggcggcgcacatcactgggcccggcagttgagcagactcggccatcaggtgaaactgatgccgggcgaattcgtcaaggccttcaatatccgtaacaagaatgatacggcagatgctcaggcaatctggcgagccgtgcagcaaccgggcaaagccgttgcggtgaagacggaggatcaacaggccatgcttgccctgcaccggatacgttcgcagttattgaaattccggctgatgcagaccaacgctttacacggtttacttgcagaatatggcgaggtgatgcgtacagggcgtgccagcctcattaaaaatgtccccgatattcttgcccgcctgtccggacgcttaccggcagtgctcatagaaagcctgcgtgaacaactgggtgaagttgaaagaacggatggtcggattgctgacattgaacggcggatacgcgagctgagcagagatgaccccagcgtaaaagcggtcagtgccattcccggcgtgggcttcctgaccgccactgctgcggtcgcgtcaatgggtagcgcggacgcattccgttcaggtcgggagtttgccgcctgggtgggcctcgtcccgaggcaaaccggaaccggcgggaagattcagttgctggggatcagcaagcgaggcgataaatacctgcgcaagctgctgatcaacggtgcgcacagcgtcatacagaatgcccgcgagccgggggcctgggtcaccgacctgctgaagcggcgcccggtgaacgtcgcctccgtggcgctggccaacaaaatggcacgaatcatatgggctgtgctggcacatggcagaccctaccagaaggaaacggctctgtactga

SEQ ID NO: 428806 - DNA, 372 bp, Serratia marcescens
atggcatatccaggaaacgtttactcatccaagtgttcagcccgggatgcgctggcgcttatctcgggcaaatgggtaatgctcatactccctgccctggaagagggtccgattcgcaacggagaattgatgagaaaaatagagggcatctcacaaaaagttcttacccagacgctgcgacagctcgaacgacatggactggtgtccagagtcgactacggtgaaaaacccgcctgcgtggaatacagcctgactggggtggctgagtcacttgtcagcacactcaaagctcttgaccgctgggcagagctaaatttccctgaacttgacgcagcgaggagcaaatacgatctggaaaacgaccgtttttaa

SEQ ID NO: 428807 - DNA, 786 bp, Serratia marcescens
atgaatgtactgattatcactgctcatcctgaagcagactcatttaactcatatctcgcatctaaagccgccagaatttttgaaaaacagggctcacgcgttcattcagtcaatttatacagtgaaaatttcgaaccgtgtgaggggcaaattttttaccctgacaggcaggacgttgaaaggtttgacgccctgcgggagcaaaggcaccactggaacgcgcataagctgcccgaagatgttacgagacatattgaattactgaaaaattcggacctgttactgctgcattttcccttctggtggttcggtatgcctgcaatcctgaaaggctggatggaccgggtatttgtttacggcgggatttatgacagcagccaccgtcatgaaaatggtgtgatgaagggtaaacgggctttactgacagtatccgccggtgcttctgcaaatgcctgcgcgtataacggacgtgatggcgacatgcgtttaatgttatggccacctatacatgcccttcactatataggttacacgatgctcgaaccttacctgatccatggtgttcgcggtggccttgatggattagcgaaagaaaagcagcagcagtttctcaatgaaaaagtaaaagacttcgaaagcaggcttatgaatctcaatgaatggcccattatccccttcaacagagaagaggatttcaatgatgataagacattaaaacctcaggcacctgaattcagcccgttcgttcgacaccatccggataaatggaacgctgattcattttga

SEQ ID NO: 428808 - DNA, 633 bp, Serratia marcescens
atgaaccatcccaaccttcagtacggcagcgtctgcagcggcatcgaggccgtcagcctggcctggcagccgctcggctggcatccggcctggttttcggaaatcgagccgttcccgaacgctgtgcttgcccatcactaccccgatgttccgaatctgggcgacatgacgggtatcgcggaccaggtactcgccggaaccgcaaccgcacccgacattcttgtcggcggcacgccttgccaggctttcagcgttgccggtgcgaggaaaggcctcgccgacccgcgcggcgcgctcaccctgaaatatacggagcttgcaaatgtcatcgatgaaacccgccagcagttgcaccagccaccctctgtcatcgtctgggaaaacgtgcccggcgtcctctccgacaaatccaacgccttcggatgccttttgggcgcactggccggcgaaagccgcgaactgcaaccaccagggaccaaatggacgcacgcaggttgtgtgtctggaccccgccgccgcgtcgcgtggcgagttctcgacgcgcaatatttcggtgtcgcccaacggcgcaagcgcgtgtttcttgtggcaagtggtcgtgatggattcgatcccgcagaggtaatgaaatga

SEQ ID NO: 428809 - DNA, 2022 bp, Serratia marcescens
atgcgactgtatctgtgcgagaagccttcgcaaggcaaggatatcgcccgagtgttgggtgccaggcagcgtggtaacggctgctacaacggacccggtatcgtcgtgacctggtgcatcgggcatctggtcgaagcggcaccaccggaagcatacggggaacagtacaaacgctggtccatcgaacagcttcccattattccagagcgctggcgcagcgaggtcaaggcctcgactgccacgcagttcaagacggtcaagcaactgctcggacaggccaccgaactggtgattgccaccgacgccgaccgcgaaggcgaaatgatcgcccgcgagattatcgacctgtgcggctaccgcggctccattcagcggctgtggttgtccgcgcttaacgatgcgtccatccgtaaggcgctggatgctctgaaaccgtcgagcgagacattgccgatgtactactcggcactcgcccgttcgcgtgcggactggctgatcggtatgaatctcagccgcctgtttacagtgcttggtcgtcaggccggctaccagggcgtgctgtcggttggccgcgtgcagacaccgacgctgaagctggtcgttgaccgcgatcgggagatcgcgcgtttcgtttcagtgccgtactgggctgtcgatgtgcagctgtcccatgcgggccaatcgttttccgccagttgggtgccgcccgaaggctccacggacgatgccggcagatgcttgcaacagtccgtggcgttgcatgcggcagatcaaatacgtgatggccgcaaggcgctggtgcaatcggtggaaaccgagcgcgttcgcgaagctccgccattaccgttcgatctcggcactctacaggaaacctgctccagacagttcggcctcgacgttcaggaaacactggacattgcccaggccctgtatgagacgcacaaggcgacgacctatccgcgcagcgattccggctatctgccggaaagcatgtttgccgaagtgccggcagtgctcgatgccattgttgccaccgatcccagcctgcgcccgttgatcgaccagctcgaccgcaatcagcgttcacgcgcctggaacgacgcgaaagtgacggcgcaccacggcatcattccgacgctggaacccagcaatctttcggccatgtcggagaaggaacgagccgtctatggactgatccgggcgcacttcatcgcgcagttcatgccccaccacgagttcgaccggaccgtcgcgctgttatccgcgagcggccagtcgctgcaggcgaacggcaaacaggtggtcgttccaggctggcggctggcgcttgccgatcggcgtccggtcagccccgagggcgacgaggagcaatctcagcgcagccagatcctgcccgcgctgagcaatggcatccaatgcggcgtcgagcaggtggaattgaaggcgctgaaaacgatgccgcccaagccctatacccagggcgaactggtcaaggccatgaagggtgtcgccaaactggtgacagacccgaggctgaaacagaaactcaaggagaccacggggatcggcaccgaagccacgcgcgccagtatcatcaacggccttctcggccggagctatctgctcaagaaaggccgctccatccgcgcttcggatgccgcattcacgctcattgatgctgtaccttccgccattgccgatcccggcacgaccgccgtgtgggagcaggcgctggacatgattgaagctggccagttgaccctggacacgttcatcgaaaagcagtccatctggatcactcagctgatccagcagtatggcagcaccagactggccatccaggttccggagggtccggcctgtcccgtgtgcggcgctgcaacccggcagcgcaccggcaagaccggcgtcttctggtcatgtagccgttatcccgattgcaagggcaccgtggcgatcgaatcgtccggtggcaaacgtccgcccgcccgcaagcggcgcgcgccccgcaagacgtcctga

SEQ ID NO: 428810 - DNA, 444 bp, Serratia marcescens
atgagcacgcactactacggcgagggcaatatcggttctgcgccagactatcgggagtttccgaatgggaacgacgagccgcgcaggcttcttcgcctgaatgtctatttcgacaacccggttccgaccaaggatgggttcgaggatcgcggtggcttctgggcccccgtggaaatctggcaccgcgatgccgagcactggaaggacctgtacctgaagggcatgcgcgttctggtcgaaggccgcgccgttcgcgacgagtgggaggatgcggaagaaaacgagcgcgtcaccttcaagatcgaggcgcggcggatcggcatccttccttatcgggtcgaggccgtgacgctcggcgcgaagccacaggagatcgagggcgaagcggagacgaagccgaaggagaccagggggcagaaggaaccgaagcagggtaaggcgtaa

SEQ ID NO: 428811 - DNA, 960 bp, Serratia marcescens
atgaacggtcctcccgctgatgctgcgcactggctcgaccgcacccacgccggggattgccgccagttgttgaagcgaatgcacggggacggcgtgcgggtgcagatgtgcgtgaccagcccaccgtacttcggccttcgcagctacctgcaggacggccatccagacaagcacctggagatcgggcgggaggtcacgacccgcgcgtacatccgcgatctggttgaagtattccgcgcggttcgcgaggtgctggtcgatgacggaactttgtggatcgtcatcggcgacacctacgccgcgacccggacatggcaggcaccgagcacccgcggcggccccaaacacgccgctgcccaacagggcgccggaggcatgcgaaccggcgacgggctcaaacccaaggacatgatgggcattccctgggcgcttgctttcgccttgcggcgggacggttggtatctgcgccaggacatcgtgtgggccaagcccaatccgatgccggaaagcgtctctgaccgctgcacccggtcgcatgaatatctgttcctgctcgccaagaatcgccgctactacttcgatcaggacgcgatccgcgaaccctcagtcgattcacgcggccccggcaacacacgcccggtcagcgcaccgcccggcgaacgcgcttccggcagcaacgcaaacctgcgcggcagccttcacaagatcggcgcgcgcagcacccgcaacaggcgggatgtctggaccatcgccagcaaaccattccgcggggggcatttcgcggtgttccccgacacgcttgtgacgccctgcattctcgccggctcccgcatcggcgacaccgtactcgatccattcatgggcagcggcacgaccgccgtggcagcactacgcctgcaacggaatttcatcggctgcgaattgaaccggtcgttcatcgacctgcaacacctgcactga

SEQ ID NO: 428812 - DNA, 531 bp, Serratia marcescens
atgagcgacacgatccgcttcgaagcgctggaacagactgacttccagaagctggaacatgcagcctacctaaaaggccttttgaaaccctttaaaggtaatggggagctcgcgacctgggccagccagagcgcagcgctgcgagacgacctgattggcctggcgcagcgcagggtgctggcacaggcccgcagccaccccttcaacctgctccccgttcaactggcccaacagaacactggcgcaggaacgaccttcctccgttggcgcaacctcgatcgttccagcatgggtgtggcgctgtgggaggaactggttgcgagccccgccacgccggccggcctgattgacgacctccttgcactggaacagcagcgcatcgtgatcaacatgcagatcagcctgtgccacaccattgcccggcaaggtatggaatgcgccagcaagttggcgtccgcgcaggccgttcaccagcgcagggccggcggcgggaccggtactggtccatcgacagacgggccatcctcatga

SEQ ID NO: 428813 - DNA, 822 bp, Serratia marcescens
atggccaacgaaacagaatctctgcaattgaaccttgggtccttgcgcagcgcgatgtcgctgacgctgcacacccaccatgcgtcgcgcatctggcacgggcgcacgccatccgaaggcaagcccggcatcatcggcctcaacggctttgtcgccatcatgaacaagctgaagcgcggagccgagcaggacgacccctattcggactggtggatgctgcgcatcgaggacaagctcagcacgaccagggagcagcttcaaaccctgcgcgagcaggtggaccaggcgctggccgacattccgcaggcgctcagcctcggtgaaaatctcaacgtgcagcccgtcaagctgccgctgttcgtctcctcccagttgggcttcatggcggtctaccttctggccgactatgacgatcttgcccgtcgcctgatcctggcgcatcacaccgccctgatcgatcgcagcacgcttgaacgttggttgggcgaaggtgcgcactccctgcgcagcctgttcagcctggcgcagcagtaccgctactccggcacgaaacgtgacgatttcgcggccaacaacgccgcagcacgcgcagccgtggagaaatatggtgagctgccgcaggacgtgctcgaaggcgagcgccgctcccgcttcgcaccgccgcttattcggcgttcgccactggcctcaatgacaacccggacctcagccccggcagccgtgccggccagcaataccgaacagactgcgccagccgcttccgatgagggggccggcgatgaggcatccgcgtcgtcggacgaagaggatgcctcatcatga

SEQ ID NO: 428814 - DNA, 1191 bp, Serratia marcescens
atggacagcccacgccgatcaagcggtcccgtatcgctgggcgacctcttcgatcaggctcttcagcggatgcaggttcagcaaccgccaccagcacctgtccagacagccccagcccgccagaatgacggtttcattttcagcggcaatcgccatgactccgtgccacgcgccttgctcacggacaatcgcctgacgccgctggaacgcaatgcgtggcaggtattccggttgttgctcaatgacgatggcatcaccgctctaccgacctacgaccagcttgcgccctggctggcctcgatgccatgcgccaccagagcctcacatgaaacggtcgctcgcgccctgaccctgctacggcttacacgctggatcagcctggtaaggcgccggcgcgaccccaggacaggacgcatccagggcaacctttatgtcctgcacgacgaacctctcactccctacgaagccatccaactcgacgtcgattatctggaactggtcagccagtcgctggcccatgccagcaaatccgttcagcgcgtcggcgtccacacgctcagggaaatgatcgacgacccgctgctcagcggacgggaactgccgagccggctgcaggtgatatcgcagcgtctggccgcgcagggatggaccgaagccaggacttatccacagcctggggataattacgattccgaagacggtgaaaccgaccttcttcggaatcgtgacacaccctcttcggaatccgaagtgggcgaaaaaacgcggaaaaccggctcacttcggattccgaagaccgatagtacagtacgtaaagaaaaagaaataaaagaagtacgtacagtaccgcgcgggttgggcatgcttcgtcttcccgagcgcttcatgtcgctcaaggcagaacagcaatcgggcgcactggccgcattgcaaccggtcgatcccgacctgcatcaggctgttctcgatgaatgggatgcccgctgccgcgcgagcagcgtgcgcaatccggccggctacctgtttggcattatccagaaagccatgcgcggcgagttccgtgcgtgggccgggcagaggacgccacccgatgcgaatggcgcaaaacccgagccaccacgacaacccgtagatcctgaagtggcgcaggcccatatcgcccggctccgctcaatgcttcgtttgtcgtag

SEQ ID NO: 428815 - DNA, 474 bp, Serratia marcescens
atgggattcgaggatgaggatctcgatgcgctcaagcatcccgccatggccagcgtgctggccaatgccctggtctcctggtgctctgtgacagtcaatcgggacgtcgtgcaacgcctgctgcaccagtgggacaatgttcaaaaggaaatccatgtcattgaccgcctgttgaccctgggtgccagcactgaactgatcagtcgtttctatgggctgacccatcaggaaatcgctgtacgccgcggcgtcctcgggctccccaagcgcaaggggcgccaccctgtcctcacagaagagcaggattgcgatttatggaatcgctggtcggaaaccgtgaaagagcgcggtgtggcgctgaacgacgaaacggcgatgctcggcatcgccgcagaccttgccgaaagcatggggcttcccatctcagtcatctggagcgccatcggcaggtggatcgatgaagggctggtctga

SEQ ID NO: 428816 - DNA, 1725 bp, Serratia marcescens
atggctgatatctccgaacaggaaatggctgccaagttgatgagcgacgggttcggccgcacaggtccggtggccggcgcattgaccgatccggtcgcagacaccccgatggtcgtaacccttgatgagttgcgtccgtacgagcttgatccgcgccttacccgcaacccactctacgatgaaatcaaggcctcgatccgcgaacgcggcctggacgctccgccgcccatcacccgaaggccgggttcagaccactacatcatccgcaacggcggcaacacccggctggccatattgcgtgaattgtgggccgagaccagggatgagcggttcttccgtatcggttgcctgttccgcccctggcccgagcgcggcgagattgttgccctgaccgggcacctcgcagagaacgaactgcatggcagcctgtcgttcatcgagcgcgccctcggcgtcgagaaagtacgcgagctctatgagcaggaagatggcaagtcgctgtcgcaatcggagcttgcccggcgcctcaaagccgatggctatcctgtgcctcagccccacatcagtcgcatgcaggaggccatccagtacctgctgccggcgatcccgaacgttctttatggagggctggggcgccaccaggtcgagcaactgaccggcttgcggcgggcgggcgccagaatttgggaggcccgcgccgcagccaggcaggtggatgttgatttcgccacactgttccaggacgttcttgccgtcttcgacgggacacccggcaacttcaacatccagcgcgtccaggacgaactgatcggccagatggccgacctgctcggtgtcgtctatgacacgctcgccctcgaaatcgtcgactccgaaaaacgctggcaaattctgaccagtgaacctgtcgcggcaccgacggctacgccttccgtcgcaacgttgccgcagaccgcgccgacgcagctttctccgcccacacccacagcgccgcgaactggtgagacgccagcgccggcaccagagtcccgcacgcagacgaagccagccccggcgcagcctcccgtatctgacgatcagccggaggatgaaaaccaacggtctgcgctgctgcaggagcacatcgtctcccccgcgccaacgaccgatcgcctccagtcgatccagcgccttattgccgaccatactggagaggcgcacaacgacttcgaaagcaacgtccttcaagccattcccgtgcaggtcggcggcctttatccgatctcggacgtatggcacatcgacgctggcctggacgaacccgaacgcttgcgtacgcatattgcgcagttcgcactggaaatcgccagtgaagccggcgtgggagagcatatcgtgccgtccgatgatggcatcggcttctcatgcgcatcccgcatcgaccgtgcggaccctgcaggcgcaatggcgcaccccggcgcaatcctgacttttctgcacgtcctgagtgcgccttatctgtcggccagttcctctccggcgcgtatcgacacttcacgactggctggagatttgggcgtcctgttactgggaatggtaccatcggccataccgtcccggaaccagtcccatgtcctgagcgacaacggcctggtgaaactgttccggctggtccggctcgcgcgccgcctgctggaaatcgaggcaggcatcatgggtggcgacggcgccatgcccgggtcatga

SEQ ID NO: 428817 - DNA, 258 bp, Serratia marcescens
atgtcgaacgtccatgagcttgcacgaggccacaagcaactcctgcctctcattgaatttgcactgagcgaaggatggaccgtttcccgcaccgcaggcggtcatctcaaattcctcaaaccgggattgccgccgatattcacgagttcgacggccagcgatcaccgcgccgggcgcaacgcccgcgccatgttgcgccgcgcgaagcgccagagcgccgaagcccagcctgttggaaaggagaccggccatggctga

SEQ ID NO: 428818 - DNA, 864 bp, Serratia marcescens
atgcaggtgatttctgtcatctctacaaaaggcggggtcggtaaaacgacaatcgccgcaaatctcggtggcttcatcgccgacgccggactgcgggtgctgcttctcgatctcgacatacagcccacgctttcgtcgtactacgagctggctcatcgcgcacccggcggcatctacgagttgctggcattcaacgagcgcgacatttcgcagttggcatctcgtacggccgtcgaacgcctggacgtcattctgtccaacgaccagcatcaccagttgaacaccctgctgttgcatgcaccggatggcagattgcggctgcgcaacctcctgccggcgttcgagccgcactatgacctggttttgattgacacccagggttcccgcagcgtgcttctcgaaatggccgtgctggcatccaggttggcggtttcgccggtcacgcccgaaattctcgccgctcgggaaatgcggcgcggcaccctgcaactcatccaggatatcgccccgtatcgccatctcggcattgaaccgccacccttgcagctgctgatcaatcgggtgccggccgtctcatccaatgcccgcctgatccgacagacattgcggcggatcttccgtgagcagacgggcgtccaggttctggatactgaggtcccggcaatcgaagccttcccgcgagcggcaacgcagagcatgcctgctcatcgcgtcgagtaccggcgtccgacaggcaggattgcccctgccgcactggacatcgttcgggctctggcgaccgagttatgcccgcactggcatgagcgcttcggtctggtcacaggcaagatcgggaggagacattctcatgtcgaacgtccatga

SEQ ID NO: 428819 - DNA, 213 bp, Serratia marcescens
atgtttcaacagaaccccgctccggcaccggagcggcgcatactgcgtcgcgcagaagttgaggcaaagacgggcttcaaacgcgcccacatctacagcctcatgaaagagggcaagtttcccaaggccatgcgacttggcgttcgcgccgtgggctgggattccgccgagatcgaccaatggatcaccgaccgccttaaagagcgcgtctga

SEQ ID NO: 428820 - DNA, 900 bp, Serratia marcescens
atgaggatacgacacctgcactattttctgatcgtcgccgaagagcagagcttcgctcgcgctgcagcaagggtccacatcgaaccctcgccgctgtcgcgcgccatcaaggagctggaaacccagcttggcgtcaggcttctcgaccgcaccaaagggcggatacgactgacctggcctggagaggttttccgtgaagaagcgcgccgcatgcttgctttcatggacaacgcccagacacgcgttaactcggcctcacagggctaccgcggcaggttgcgaataggcctggccgatagcctggcccaaccgcggcttacacgattgctcgcccgttgccgtgaggaagagcctcgtaccgagatccggatcgacgagatgacggtgaacgaaatgctccaggctcttcgtcatgatcagattgacgtcggcttcacggtagatggcgaggccaccaacggatgcgttaaggaaatggtatggaccgagcgtccagcaattgccattcccactcaccatcccttactttccttcgataaggttccccttggcgaagcccttcgttatcccatgattctttaccatccggaacgatgcgcaggtggacataacgtcgttcgtcgctggctcaatgatggcgcattgatctcgccgtctgttgccgagtatgtttcaggtcacgagccgatgatcatgctcgtcgcagcaggatacggcattgggctaggcctggagtcgcagatcgcgctttacagtcatccggatgtcatcatcagaccggttgcagacgaggttcccaatacagcgacgttcatcgtggtgccggagaggcctgtctccagggaactggagcgcttcataaagcgagcacaagaaattggcagaagcggtatcagctga

SEQ ID NO: 428821 - DNA, 2550 bp, Serratia marcescens
atgaataacccgaattgcattggtttaccaggggcgcgatcggttctggccggcctgatatcttgccaaatggcgctgctgagctcgatcggcacggctcatgcgcgcgattatttcaacccggcgctgctggaaattgataatccggcgctgcgcggcgccgatctctcggtgtttgaggagaacagcagccaggcgcccgggaactaccgggtcgatctttaccttaacggcgaacagatcgacagccttgacgtcgagtttcggcttatgccgggagccgacgggaagcaagcgctgcagccttgtttcagcacggaaaaattggcggaactgggcgtgagggtggccatgtttccggcgatggtgcccggggatagctgcgtcaacctggcacagaccattccacaggcctctgcggtattcctgttcaatcagctgaggctgaatttgagcatcccgcaagcggcactgcgcttgaatgcgcgcgactacgtttccccggataaatgggactccggcataccggcgctgttggtcaattacaacttcagcggcgccaataaccagatgcgcgacagcgaacggcaaaacaacaataactattacctcaatctgcgctcgggcatcaactggggcgcctggcgcctgcgtaactattcgatctggaaccattacaccggcggttcttcttcctggcgctcaatcaacacctacctgcagcgcgatatcgttgcgttgcaaagccgcctgaccctgggggacagcacaacgcccagcgatgtgttcgatagcgtgcagttccgtggggggcaattggcctctgaggacgacatcctgccggacagcatgaaagggtactcgccggtggtgcgcgggatcgcgcgtactaatgcgcaaatcgtgatccggcaaaacggctatgtgatttatcaaagctatgtgccgccgggggcatttgaaattaccgatctgtatcccacgggcggcagcggcgacttgaatgtgaacgtgcgtgaggctgacggccaggagcagcattttgtggtgccgtacgccgtggtgccggtattgcagcgcgaagggcgttttaaatacagcctgaccagcgggaaataccgttcatacggcggtggcgttgatgaacgcccgttcagccaggcgaccgggatctacggtcttccgtggggggccacgctgtatggcggcgtgcaggcggccagtaagtatcagtccctggcgctgggttgggggcagaacctgggggcggtgggcgcgctgtctgccgatgtcacccaggcctggaccaagcaggaaacccggccgaaggagcaggggcagtcatggcgtttgcgttacggcaagaacttcattgaaaccggcaccaactttagtctggccagctaccgctattccacgcgcggtttttataacctgcaagaggcgctggagagctacggcggcaacagcgctatctataacgatcacaagaagagtcgcgccgagctgacgatgagccaaagcctgtgggagcaggggggaacgttgtcgctcagcttgtttaacgaagactactgggacgataaccgccgttcgcagtctgtcagcctcagctacaacaacagctgggaggccgtcagttacgggctgaattacaccttcaaccagaacggctacgacagtaacggcaatcgcagcagtattcgtgaccatatcgtagcgttcaacgtcagcgtaccgctcagcaaatggctgccgggcagctatgccacctacagcatgaacgccagccgcaatggcgctaccagcaataaccttgggttgagcggtaccgccttgccgggcaataacctcaactacagcatcaaccagggctataccggcaggggcgtgggggcgaacggcaatattcaggcggactacaaaggcgccctcgccgagtggaacctggggtatggctacgatcgccatcgccggcaggtgaactacggagtacaggggggcgttctggtgcaccaaaacggcgtcacgctgtcgcagccgctgggcgatacggtggcgttggtgcaggcgcccggcgcgtcaggggtggatgtcctgaaccaaaccggggtgagcaccgattggcgcggctatgcggtcgtgccttacctgacgccttaccggcgcaatatcgtcggattggacggtgaatcttttgctgaagatgtcgacatgacgctgagcagccaaacggtgatcccaacccgcggcgccgtggtgcgtgcccgcttcaatccggacgtcggtgcccgcgtgttgctgaccttgctgacgcgcagcggtgacccggtgccgttcggcgccaccgtcagcaatctcaacagcccctctgacaatgccggcatcgtcggcgacggtggccaggtttatctggccggcctggcggagagtgggcagctgcgggtgaagtggggcaatgacgcggctcagcaatgtcaggtcaactatcaattggctaatcagctcgagagcggtgggattcgtctcgttaacgggcagtgtttataa

SEQ ID NO: 428822 - DNA, 528 bp, Serratia marcescens
atggggaaggttattagcggtatcagctgcaaattggcgctggctggcctgttgctcttggccatgccgacagcgcaagccacatcaaaactcgtcattaccggcaacatcaaagcggcgccctgcgaaatcgacggcgcaaacggctcgatttcggtcaatctgggggatgacatttccgccgccgtcctggcgacctccggggcctccagcccttgggtggagttccctttgacgctaaaaaactgtccgagtaccaccacgtcagttgtcgcgaccttcagcgggacggccgctgaggaaagcaccagcttatataaaagcaccggcggttctcgtcgggtccaaattgaattgcaaaacaaccagggagcaaacctgggcaatggcaagagcatgacccagtcagttaatcaggcgacgcatgaagccaaattcaatttgcgggcgcgggcatacagcaccaatggcggttctacgcctggctcgatagagggtgtcctgcaggtcacttttgtctatcagtag

SEQ ID NO: 428823 - DNA, 129 bp, Serratia marcescens
atgagcaacgaagacttgaaacacatcatcgcgcagttattgcaagacgcccagcgcattcagcagcttgaaccgaacgccggaactgctgcgcgtattgaagaagccaaagcagcactggccagctaa

SEQ ID NO: 428824 - DNA, 498 bp, Serratia marcescens
ttggactatgcggcgcctgcagtagaaagcatctgtattgaggatatcgcccaggcactgtcccatgaatgccgctttgccggtcacctgccgaacttctatagcgtggctcagcactcagtgctgtgcagtcaaattgtggcgcctgagtttgccctggaagcgctgatgcacgatgccacagaagcctattgcaaagacatcccggcgcctctcaaacgcatgcttccagattatcagaggatcgaggaccaattcgacgctgtgattcgccaacgcttcggcctgccactacagatggatattgccgtgaagtatgcagacctggtgatgctggctaccgaacgccgggatcttgatatcgatgatggtcaggtatggccaatgttggaaggtgttttcccagcggacatcgtaattaatccggtgatgccgctacaggcgcgggcaatgttcattgctcggtttaatgagctgaccgaatggggagtgctgtga

SEQ ID NO: 428825 - DNA, 786 bp, Serratia marcescens
atggctaaaaactcaactgaggcctacggcgccagcggcaaaaccaacgtgctcaattttgagcccgaacggctgcacctcgtaacggacacagcacaccctctctacgatgagcgtatccacttgccgcttgatgaggcaatggtattgaacatcatggatcagggggtactggagccaatcatcgtttggaaagaccctgaaaccggcctgtcttgcgtggtagatggccgccagcgtgttcgacacaccgtagaagctaacaagcgattggcagctgcaggcaaggatctgctgttcgttcctgccgtaacaaaacgcggctctgctgttcgcatggcccaagcaatgatcagtgccaacgaaattcggcgtgccgataccccgctgggccgagccaagaagatggccgatgcgttggaacgcggccacgatgaagaagatttgtcactgatgtttggcgtcggagtgcagacgatccgcgccacactcaccctactcgatgccactcaggccgttaaagatgcggttgaatctggtgacattaccgttacccaggcgcgccagctggcgaacctcacccccgacgaacagcgcgaaaaagtgaaagaggttgaagcggcaaccgccggcaccaaaggccatgaaaaggcacgccggcagcgccaggtgattggcgatgccaaaccccgcctgaagtcccgaaaagaaatcacgaaagcccttgagggtgcgagcggtgattacgctcaggcactccgctgggtgctgggagacgaagcatga

SEQ ID NO: 428826 - DNA, 555 bp, Serratia marcescens
atgacaaccatcaagcggtttacccctgactataaaatgcatgcagttcgctttgaggctttcgcacgtgaagctgagcacggtgaacttgtccagtttgatgcccaccagcaagtagtgagcgccgtagaggctgagcgcgatgcgctggagcgtcagctttcaatgtcggaagccaaatgcaaagggtatttctctgacgctgcggcggcgctggtgaggtgcgatgcgctggctgtggagaatcaggcgctgaaggatgtgttcggctctggggaggctgttgttaacttcctctccgttgctctacgccataccaagtatgactacattgaccttcctgatgtggccctggcattcaaaatgtcactaccagaaaccccagccacctccgcagcacttgcagctatccaagcgcagggggtggagaagtttgctgacttactcggcgaactatatcaatgcgaaaaggctaacactgctaagggaaaggcgtacaagcatgtcgttttcttggcttgccgattcgtcaacgagctgcgggagggtaaataa

SEQ ID NO: 428827 - DNA, 297 bp, Serratia marcescens
atggcctgtgattgctttgaaaaaacagccgcgttgttcaaggaacgcatttctaaaaaggtcggcgatgcccttggcgagattgaagaggctgcgttcgagaactcactctacaacttcagcggtggcgatcattccccggtagcgatgaattttaaattccgctactaccgcaagcgcaagggcggtggactggcagcaaaccagaccaaagcagatcacctttgcatgatgagctactgccctctctgtgggactaaattcgaaggcgacgaaaagcagctggaggccaaatga

SEQ ID NO: 428828 - DNA, 537 bp, Serratia marcescens
atgaaagagcgcccagtgatgccagcactcgacggtaaaagcattctggatatgtgctgcggctcccgcatgttctggttcgaccgtaccgatccgcgcgtagtgtttggcgatattcgcgatgaatcacatgttctctgtgatggccgcgagctgcatatcaagcctgatgtgctgttggatttccgcgcgctgcctttcaatgacgaacaattcagcttggtggtgttcgatccgccgcaccttgagtttgccggtgaaaccagttggctccgtgctaagtatggagcactcaaccgggagacgtggcgcggcgatctggccaaaggatttagcgaagcatttcgggtactaaagccaatgggcacgctgatattcaagtggaatgaaacgcagattaaaaccagtgaaatcctggcactgacagaccagaaacccgcattcgggcatccgtcaggaaagcgggctaacacccactggattgcgttcttcaaagacagcttcagcgaattggaggtgcgtgatgccagcaaatga

SEQ ID NO: 428829 - DNA, 345 bp, Serratia marcescens
atgccagcaaatgaactgaagccactttcagattggctgctaagcggagaatatctgccggagtttatgcgcgacttccatgaccaaaaagatgtgttcaaggcaatgcaccacgtcatcgtaaacgccgaccaaaacggcaatgcgcgcgatggtcatatctacgttgttgataccttcctttggtacatggctcgctgcggttacaccctgcagagaagccgtaaacaggtcgaatttcgcagtatggacgatgacatcgacaagatgagaagtgctgttcatgaagcttttacaaaagtgatgtctggtgacagcgctagggaggtggagcgtgaacgatga

SEQ ID NO: 428830 - DNA, 255 bp, Serratia marcescens
gtgaacgatgaagtgatcggcataggcagcctgcatggatggacgcgcagccaggtaacgcaggaatactctgcaatcgtgaaagctgccgagcaaggcgggaagtccctggatgagtgggacgcgatgcgggatgtgctctgcaagctctatatcggcaccgactgtgaacaattctcaactctggttcgcctgttcctattcggaagatttgagcgcctgtttgtggctgatatcggggtggatcatggctaa

SEQ ID NO: 428831 - DNA, 186 bp, Serratia marcescens
atgagcacgttaatcggcgtaattcgcattctgattttggtggtggcaatcctgcagatcaaggtggttacagtaactgctaccgggttcggttcgtactttctcgcaggcttactgttcagcctctactgctgggcaatcctgaagcttctggactacctgaaggactacagtcatggacaataa

SEQ ID NO: 428832 - DNA, 462 bp, Serratia marcescens
atggacaataagctgagcgaactgagcaagccggtgatgtactccatcacatacaatggcgtcgttgaggaaattggtggcgattcgcaggggtttgtgcgcgaagaggttcaggcagagttggatagctgggaaaatgggagcgttggaatccctgacggttactcagtatccgcactctactcgcaagagtacgtctccgccctcattcagcgagctgaacgcctcgactcgatactaaccgaatcagtgcaagcactgaaagcggtggagcagcgcaatgcagagctggaagcaaagctggctacgccggtgcggttgccggacgcactcattccggcagttcatgcaagtggtgaaccgttcatgcgccctgagccattcggattttatctgaaccgagacgatgtgattaagaagttgcgcgccgctggcttcaccgtagagggggatgaacagtga

SEQ ID NO: 428833 - DNA, 759 bp, Serratia marcescens
atgacactaacgactgagcagttgagagcgcgcgctgaatcgctgggactggatttcttcatcgaacgacgcgccgggatttgggtgaaagagtggtttgacaatggatgcacctcagcaaccgctgaagaagtcatgatgtggtcaatgctggctaaccgggaggcgcagccggtggggaaggctgaaatcacaaaaattgccgctgaacttgtccgtggggattatctgagcaaattatgggcggaggcggaaaaatcacggcatgttgatactcacagattgcagaacctactcgatgaattgcatgacgtgatgaaggtgaaggcgatagctatcacgcgattgctcaccgccccgccagcgccagcagtgccagacttcaaagcactggctgaggatctggtagagaatcttgtcgattgcggtggagcagatgaagaggcagttgagcaatatctggctttcgctgaaaaagcctgccgcgccgcaatgctggctcaacctgtaagtggcggttacaagttgaactctccggaaattccggatggttggatagcgtgcagtgagcggatgccggatgatgagcaggagtgtttagttcaaacgcactcaggattcagatatgtatcattctacgatgagcataccggcttattttacgatatgcccggaggcaaccaggtggattgcgtcgaacacattctcgtaacccactggatgccattacctgcagcgccggagggtgggaatggctaa

SEQ ID NO: 428834 - DNA, 1011 bp, Serratia marcescens
atgggacgaaaacgcagtaaccctgctgacaactggatgcccccgcgcacatgccgggggagatccgcatatgaattcaagcccaagcttggcggcaccattcgtttgtgtagcttcgactcaacgccggcacaggtatgggcagcgtatgaggaactgatcaacgatcagcagaagaaaaatgatttttcatttcttgttcaacaattcttccaatcagccgacttcatggagttggctttggaaacgcagaaagactaccgaaaatattctatgaaggtcttagctgtgttcggggcgcttgcccctgatgcaatcaagcctgagcacatcaggaaatacatggacaagcgaggcttgaagagccgcactcaagcaaatagagagaaggcttttacttccagggtgttcagatggggatatgagcgggggcttgtgaaggggaacccatgtaagggcgttaagcaattcaaggaaaagacacgaaccagatatgtcacggacactgaatataacgcccttttctctgtggcgccggcggtagttcagattgctatggaaatcgcctttctttgttgctctagacaggctgacattttgaccatgcggaagagccaactaggtgaagaagggatcctcattcagcaaagcaagactggcgttgctcagattaaggcatggggaaagcgcctggaggcggctatctctgcggcaaaagcattgccattaaaaccgggcatgagcagcatctatgtcatccaccaaccatcaggggcaaaatacacccgcgatggatttaacagccgatggatgaaagcaaaaaaggaggctaaagagcgtttccctgaactcgagttcgattttaccttccatgatctgaaggctaaaggtgtttcagatcttgaaggcaacatgtatgaccgccaggcgatcaccggccacaaaaatgtggaacagacagcgaagtatgtgaggaagattgccgtagttcctaccgttggtgagcagtag

SEQ ID NO: 428835 - DNA, 876 bp, Serratia marcescens
atgcaggaagaaaataagacggcgcacgacgccatccgctttaccgctgcggacggctatgtgttgggcggcagctattttcctgcattgggcggtagcaatacgccggtgctgatttgccccgccacaggcgttaaacaagggttctactatgcctttgcacagtggctgagcgagcaggggcatccggtgatggtgttcgattatcggggcgtcggcgtttcactggcggaagcgcatgtccggtactccaaagcccgtaaacaggactggggagagtgtgatatgccggcggcactgaactggctgctggcgaaaacggctgcgcaacaggcgcatgtgatcgggcacagcgctggcgctcagctggcggggttgatgccgaaccaccatgccgtgcgcagcctgacggcggtttccgcttcttctggctatatcggcaatatccgttggccgttcagggcgatggcgatcggcttgatgtggggctatattccgttctcggtacggctgctcggctatgggccggcaaagtggctggggtggggagaggatttacccgccggcgtcgcccggcaatgggccgcttggtgtcggcggccgggctacgtggaaaatgcctttggtacggaaattcaacgtcattactatgccgcattccaggcaccgatcgccgtggttgccgccgccgatgacgtgctggtaacgccgcgcagtatcgctgactggctgcggctgttgcctaacgcgcgacatgccgtccacttgctgcagccggcggaggttgatggtcaggcgatcgggcatatcaacatgttcaggcgcagccgcgctgcgctttggccgcggctaattgctgggatatcggcaaagtga

SEQ ID NO: 428836 - DNA, 771 bp, Serratia marcescens
atgcaccgcattttgtggatcgtcatggtaacgatagggtggtcttggtcagcggaatcgacagccggcgacaccgtcgcgttcaccgttgaaacttacgcgctgcattatccgtatgcgagcccgacagataatcaagccgcgctggccgcgatgattcagggctcgggagtgaccgggcattattggaagcagagcaggcgcttaaagcttacgcgctgcatgaccggcgtgacgtgttacccttcaccgcattttgcggatgacataatagaccatacggtgaccgtgcggccgcagattatacctggcccgtcggaacagcagccgacgcgccttactttcaatctccctgtcagccaccgtggtgcgttgctggatggggtcactttggtgctgcctctgaaacctgtgtggcgccagcccagtgtgcaacaggcgttgcagcgcgcagaggttgccttacctgagtatgcaaaaaaccggcatgctttgagcatgggggcttcggtgtctgtcaatctcgcgctgccgaaaacgccgggggaatttgggcccacgctgaactattgtgcggagatcccgaacccgttgagctggagccactccggggtgctttcgatgagggtcctcgttcagcaggcgtcacgcacaaataggccatggccgtttatcgaaaacccctggacttcggccaatcatggaacgggggagagctgcgcaacctggcggcctgaggtggagaatagctacctgtggcataacgagtaa

SEQ ID NO: 428837 - DNA, 600 bp, Serratia marcescens
atgccgtcacgtctctcgtggcggcatttcttttatccctcaatgccttgcaccgcctccgccctccctttaaggatctcctgtttacccgccgccagagcgcctaaagcgtaccccgtctatatgaatcacgctttctcgctcctcgtcaggccagcgcgaagcaataacctcgctgagagcgccctgggtgatgccacctcggaggccacaaacaaaaacctccgccaaaggcggaggttattccttttatttgacagggagccgcttaagcggtcacagccctgtcttccatggcttctcgccaacctcccagccattgagaccgggcgtccactgatgattggtagggacaatgttccctggaacgccctaaaatacctgcctgataccctctcgaatgcgccctttccagacgatcgcgtttctgtctcttcatgcctcgtttccctcattttggtctggtggaaagaaaacaatggctgctttttgcgcagccacgagttatcaatagcgctaaaagaagagaagatcaatgcgcaaaattcacgccaatgtcatatttgtgagctacgcccgaggaaagtgctaagtggctga

SEQ ID NO: 428838 - DNA, 3438 bp, Serratia marcescens
atgctggctatttttttaccgtcttatccttttcgcggcgtaaaagctccctacctgtgggtgttttatcggttgttgagcactttgcaggaaaaaagcatttttatcaccggcggtgattacttgcgcgagcctgggctatggagtgaacaaggacgctgggagttcgatgtacccacgatgaataatctgggctattcgttgccgactcaggatatatttgatcgacatgagtttgaactactggatgatggcctgtttgctcgattgttgaatgaaacgcacgaaaatccaatggctgcgttcaatgtgtttcttactcagcgcattcccgagttggagtctgagcttaaggggcttttacatgcgaaaataaaatgtggcattgaagggattctcagcatttgtaattgcccttcgctggaacatgttgcgcaagagctggcgattcccgttattcacattgaggtgggccctctacgttcgccgatgtatctgggaaccggttacattgattttcgtggcgtaaatggcaataccgaagcacaggcgcgttatctacctgtcgcacatgattgtcgagttcagctttcaatggctgagctgcatcaattttttgcacaggatgcattgccacagaaagatattgcggaatttgaacttgggttagcgctacaggttgaggatgattcgaatatcattgcctatagcaatggtttcaataacttatctattctctcatatgctcagacgcaatgtcctagcgaaagcatactggttcggccgcatcccggcagtcgctttcagctgcaaaacacagcgtctgaaatcgatcactcatccaatagcctcgagttcttactccgctgtcaacggctcgtaaccatcaactcgagcgtaggtttggaagggttgttgcttgagagagatgttcaaatattgggtgacacttcgtatcgtttcatcgatgaggtcgctgacgaatctgaacgcgtgaacagaatggcgttctatctgttttcttaccttgttccgttcgaactgatgtttgatacggactatctgcattttcgcctgtctaagccggcagaaatcgacatcgtgcggtatcatcttaattattattcagcaggagctgacgagttgaccagtatgaaagggataaccatcggtgagttgatcacggagcatgttaagctggacaataacgttagagccgaaattttccgcgttattgaagagcagaaacagcatattgatgagaaatgccagcagattgaattgctggagcaacgtttgcggttgcagctcgaagaaaatctgcaactgcgagagtcaatgctgcaaacgaaaaatcaacatgagcaaatcatgttgcaaaagcaaagccagcatgaggaagccttgcagcggataaaaatcagtgaagagaacaataataataactgtaagaaggagctgaaacgcgaaatcaacacgttaaattccgcgttgagccaaaaagacggtctgctggaacaacaacatgcttccatggcttcgattcgtaatagcctatcttggaaactgacaatgccagtgagaatggttggtcgtgcattgcgcggcgagtttggggtcattcgcgattttacccgccattattttacacatcgttttatcgctaagaattcattgacagcaaagacatggcgcgcattccgtagccaccctcaaccctatcgcgcattggggcgtaaggctaaaacggcatgttcactgataacgaaaggtcaattctccgagttgatcgctaccctgcgccgggtggcgaaaaatactgctgacgcaccgatgccgttaacgcacatcgatactcagcacattgtgattcttgcttccagacatactctctacgtggctcatcgggtagagaagtctttgaccgacatcgggttgggcgtcacgattattcatgcatactcggctgcagcagacagtggccaaatgcacattgttatttgtccccagatattccctgagttgccgaagaattttgttgcattccagatggaacagtcaattaacccgcgctggttcacgccggagtactttgcaattcttgatcgcgcaatcgcgattttcgattactcgcttaccaacatcgattatttactgcaacatggagtaccctatcaaaaactgttctacatgccggtgtcctcttacgatcgttatgctgagcatttaaagcagggagggtataatcttcaaccgttgaaggatgaagcgccgattgatgtgttgttctatggcgatccaaactgtgagcggcgccagaattacctgcgtgaactctcccagcgctttaatgtgcatatcgcttcggaggtctttggtcaagacctgactcgtcttgttatgcgagcgaagctgatcgttaatattcattattacgaggatgcactgctggaaaccacccgcttgtacgaaacattgtccctgggaacgcctatcgtcagtgaaaccagttcggatattcagcatcatggcatgttgaatgacgtcatcgacttcgctccggtaggcgatattgatgcgatggctgataaaatcgaacgcttgctggctgatgagaaactttatgcccgtcgccggcaagatattgcggcgtttacacgtacagatttgcaatttgatgcttatttcaaacgttatttgctggctaacgatctgattgatttccagacttacaaaaacagtgtcgactttatcccgcacaacgaagtggatattccaaagttgtgtttgtcattgacagaaacaccggtacgcaagcaagcgtttctcagcaaaccgacccatggcttccaggtcatcgaaggcatccgtcatcgtattggctggattggttgcggaatgagttataaatacatgttgtcaacgttggccgaacgctctaccgaaatggccatgatttgtgaagatgacgtattgttcccatttgattttgacattcaactggagaaggtcgtcgggcatttgcgccatactgaatgggactggcatgtgtttgcgggcatcattgcgcacttacatgatgataccgaaattctggctataaaagaaattgatggcatcgaatatgtttatatcaaccgtatgacaagtatggttatgaatatctattctcgccgcggtatcgagcttatcagccaatggaacgagaagaacatcgacgctgaaagcaatactatcgatcgttatctggagtccgcaccaggtttgaccgttgtaacgacattgccgtttatggtcggctatgccgaagatcaacactcaacgttgtggggattcgtaaatactcagtataccgatatgattcgcggcagtgagcggttattggccgaaaaagtggctgcgtttaaggcgcatcagtctgaaacgaccaaggtataa

SEQ ID NO: 428839 - DNA, 1320 bp, Serratia marcescens
atgtcctctaatgaaatagctattgaagtcaagggattaagcaaatgttatcagatttatgatcgcccacgcgatcgtctgaaacagtttttcgctcctaaactacaacgagttgcgcgtcgcgaatctcggcgctattttcgcgagttttgggctttacgagatgtctctttcagcatcaaaaaaggtgaaactgtcggtattatcgggcgtaacggtgctggcaaatcgactttgctgcaaatgatttgcggcacgctaacgccaacggcaggggagatccaggttaacggaagaattgccgctttgctggagttgggtgctggttttaaccctgaattcaccggtcgagacaatgtttaccttaacggttctgttttaggattttcgcgcgaacaagtcgatgctcgctttcaggaaatcattgattttgcagatattggtgagttcatcgaccaaccggtaaaaacctattccagcggcatgtatgttcgattggcctttgccgtccaggcgtgcgtcgaaccggaaatcctgattgtcgatgaagcgctggccgtgggggatattggtttccagtacaagtgctacaagcgcatggaagctcttcgagctaagggcgtcaccattattatggtgacccattccaccggcagtattcttgagtacgctgatcgttgtctggtgatgaatgatggccagctggttggtgatacgcatgatgtattagccgcggtgctcgcgtacgaaaaaggtatgctgttgacccaaaactcgccgaaagaaagaaaacagcgtgcggaatgttctgatgtcaaagatgtagcgacacttcaggccattcaggcggaacagactaatgctgaagtaggggagaaacgctttggcagtgcacgtgcgattattgaaagtttgcagatctacaaatctgacggtacgccattgtcagaaaaacctcttgtgcggtctggcgaagagctaactttagactacaggattttgtcttcggaagtcatcgaagatgtggcgctcggcgtttccatttccaaagctcaagggggggatatctggggcgacagcaacattgccgctggcgttcctatcgttttgaaacccggtgagcagcacatcgtatataaagtcaaactgcctatcaattccggtgattacctggtgcactgtggcttggctcgcgtcggcaagggggaaagggaagaactcgatcagcgtcggccgatgatgaggctgaaattctggtcgtcgcgtgaattgggtggcgttatccatgctccaatacaaatttcgttggacgaggaataa

SEQ ID NO: 428840 - DNA, 834 bp, Serratia marcescens
atgagtaaccctcataaaaataggccgctgacgccgttaggcctccttcgcactttgtgggggttcaagtcgttgattgcgcaaatgaccaagagagaagtcgtcggtcgttataaaggttcaacgatgggcttggcctggtcattcctgaacccattgttcatgctggtcgtttacacctttgttttttcggtggtttttaaggcgcgttggtcagtagggggcgatgagagtcgcacacagttcgccgtgattttatttgtaggtatgattgtgcatggtttcttcgccgaagtgatcaaccgtgcgccgcagattatcttaggaaatgccaactacgttaaaaaagtcgtgtttcctctggagacgctgcccgtgatcagcctatgcgcagccttgtttcactctctgattagcctggttgtcttgttgtgcgccttctttctttttaacggctttttgcactggaccattgtgtttattcctttggttttcctgccactggtgatcttttgcctagggttgggatgggtgctggcatctcttggggtatttatccgagatgtaggccaaaccacggtgattattacaacggtaatgatgtttttgtcaccggtctttttcccgattaccgcgctgccggagaaataccgaatctggattatgcttaatccgcttacgttcattattgaacaagcacgtaacgtattgatttgggggactctgccagattggcaggggctgatggtatataccctggcagctgctgcggtggcgtggttgggttatgtcttcttccagaaaaccagaaaggggtttgcggatgtcctctaa

SEQ ID NO: 428841 - DNA, 849 bp, Serratia marcescens
atggctgtagaccaagaaaaatctcaatttcagatcgttgcatctatcgttttattcaaccacagctatgagcaggtggcgggcaccttgacgtctctcttggccgagcgctgtgttgaaaagattgttttggtcaataatggcggtgccgattgggccgatgctttggaaaatgatcgtatcagctacatctctgctaagggaaatggcgggtttggccacggacataacctggcaatgagccgctacctggactcctgcgagtattttttgatctgtaacccggatatcagttttgagatgggggcattggcgagtttgtatcagttcgccagcgaagggaaacaccagtttgtctctccacggatacattatagcgacggccgttttcagtatagttgtcgtctgttaccgacaccggcaaaccttttgcttcgtcgcttcctgccaaaatggggagctaagatggatattgactacgaactgcaacatgctgactacgagaaaaactttgccgtgccttccgtttcaggctgtttcatgttgatgaagtcggaattactggctcgtttggaggggtttgatgagcgttactttatgtatctcgaggatgttgatctgtgccgacgggcgcttgaactcactgatattatgtattattcaggaactacaatcacacacgtattcggtaagggatcatataaatctctaactttattgggataccatatgcgctcagcgattctttattttaacaaatggggatggttctttgaccgggagcgctgtcgttacaaccagcgctacttgaattctatcccgatggcttcttctcgcgatcgtcgctga

SEQ ID NO: 428842 - DNA, 819 bp, Serratia marcescens
atgactacgccatgtctttacagcattgtaagatatgcgccttatgcggaaactgaagagtttgccaatgtaggcgtggttctttgcgcgcctaaaaagcacacatttcacttccggcttacacagtcaaatgatgccagagttaacgctttctttcgtgatgacaccatttttacttttgctaaagaagcggtagcaacagagctaaggctagctcaggaactcacaaaaaacataagcagtgctgatgaactggcccagttctttagttacttgactgcaaaacgcgagtctatttttcactttagcaccacacgggttgtcttggctgatagtccagaacgcgcgatgaatgccatctatgaaaaattcattaaccattctgagtacaacaaggaaagaagagaggaaattttagccaaagagctcaagtcccgactgaactcctactccgagcttaaaaatatttttagaaaagaaacgcttggcggagacctaacaaggttttcaatgccattcgtcgctaaaaatgatgacgaaattctttgcgccatcaagcccctggcctttgtacagcaagaaccgggtaagatgatggagcactgtgattcttgggtttcgcgagtggttcgggcggctaacgaaaatatcctcaacctcggccgcgtgcttttcacaatcgatgggcacaagaattcttctgtcgctgaagcaaaggcaatggatgagattagaaggacttttgaccgacaccatctagagcatttcaagcatgatgatgaaaagtcgataatatctttcgcgaaacaagcattgtaa

SEQ ID NO: 428843 - DNA, 741 bp, Serratia marcescens
atggctaatgagatactacgggttcaggaaatcattaaacgcatacctgattgtgctacggaaccttttttgtgtcgctgcgatgacggtgaactctatgtagttaaaggcatgccatgtgttaccaaaaagcagctcattgcagagtgggtttcagcttgccttgctagcgagttgaaactttcacttcctgatttccgtatagtttatgtagatcaatcactaacagaatatgtacctgcatggaaaaatgagcttagcgaaggttatgcatttgcaacaaaatttatagcgggcgtttcgcctataacctttacgcaagcccacaaaaatgttgatgaaaaaagccagaagcaaatctatctttttgataaatggataaataattctgacagaacgctttcacctcagggcggtaatgtaaacatgatttttgattacctcaacaatcggtattacctaattgaccataatcttgccttcgaccatgatgaagatgctggcgagtttgaatatcatgtttacagtgaaagacatcgccaatggctctttgacttcgtcgataagatggagggtgaggatgaggcacgaaaggctaaagagtgtttagctcgagtatttgagagcattccacaagaatggatgcttgaagatgttgatgagaatcaaaagtttttggattttgtcgagtcaactttagacagaatcaacgatgaggttttttggagtaatatcaaatga

SEQ ID NO: 428844 - DNA, 369 bp, Serratia marcescens
atgatcgacatggtcgaggaccgcggcggttggctcaagatttatagcgatgatccgaatgcatacgggcttcgcgttcggggcgatagcatgtggccgcgtattcagtctggtgagttcgttctcatcgaaccaggcacctcagtgcattctggtgatgaagttttcgttcgcacagctgacggtcacaacatgattaaggtgctccactacactcgtgaaggcggctaccagtttaccagcatcaatcaagaccatagaccaataacattgccgcaaagctctgtgctgaaacttgagtatgtggctgggatcctcaaggcttctcgccatgttgaggatgaagaggttaatcactccaagctctag

SEQ ID NO: 428845 - DNA, 534 bp, Serratia marcescens
gtggacaacaaagactttccgacccaggacgacatcagcgaagcgatacacaagctgatcacgttgttcccaggcaagtacagcgcgatggctctgcagttagatccagtgtctggcactgagaacgcattacgcaacagggttcgccaggtgtctggccaagtcgttccgctgggcatggcagttgaaatggagtcaatttcaggccgcagcgatatcacggaagccatgtgcaaacgggctggtggcgttttcgtgaagctaccggagattgagcaggtggacaacgaagagttgctggtgaagttcaacgaactgatgtcggcgctgggactatttgcaaaggcacacaacgaatttacagctgatggggtattggacagcgacgagagcaaaaaactgaaagcgaagggttaccggatccaatcgctggtggctgagatttacgcggtgacagtgatgatgtttggagaaggtgacgcccaggatatgcggtcccgggcgtcgagtgcatcaattaaacgtgtggagtaa

SEQ ID NO: 428846 - DNA, 969 bp, Serratia marcescens
atgagccgtatttttgaaattgtccaggctatgtcaggtcagaaaaactgcatcgtaattccgcggccgtacattgattttttttccgaagatcagcaggcgttcgctttggcagcggtattgaatcagctcgtattttggtctggtaaatcaagtcgcgatgatggctggttctacaaaggtcaccaggagctagctggagaaattggcctgagcgaggatcaggtacagcgagtggtaaaaaagctccgccaaaaataccttcctaatgcaattgaggtcgctaaccgcaaggttaacggcacgccggtaaaccattaccgcattatcggcgatgctttgattgccgaaatattcccgtcgcatatggactccgcagaatcgcgtaatggaaaacgcgaagatgcggaatcaacaacgcagaactgcggaaaggaaaccgcagaatcgcgtaatgggaaccgtgaagacgcggaatcttatctctatccagatcaatacaaacagatcaccaaaaccccttcttgtccggtcgctccgcaacccgacgaatcaggcgatgagacgtttttatctcggcaccctgaggcggtggtattcagtgccaagaaaaaaatctggggcagtgctgaagacctgaagtgcgcggagtggatccgctctcgcatcgtgaggctgtatgagcaagctgccgaaagcgatggggaagtcgccagaccgaaggaacctaactgggcagactgggcaaacgaaatccgcctgatgtgttctcaggacggccgaacgcacaagcagatctgcgaactattcgctaaggcaaaccgggatccattctggtgcaagaacatcctgagcccgtcaaagctgcgtgagaagtgggacgacctgacgttgaagcttagcgttagccccgcctccccggccggtggtcattggaacactgctgaagcatgggagaacaccctatga

SEQ ID NO: 428847 - DNA, 723 bp, Serratia marcescens
atgaataaattcatgagtgctgtccaaaatcgcgatggtaacgcactggcacggatgatgccggcagaaccacaggcgcgagtggtcaacggaaacgctgaaaaattggttgatctgctattcgtcaatctcatgcaagtctttcccgctgctaagcaaacagcgctgagcacgcctgcagaagtagcagccgcaaaacgtcagtggatcctggctttcgcagagaacgggatcacctccgttgagcaactgcaggccggtatgcgcatggcgcgtcagcaagaaagcgacttctggccgagctgtgggaagtttattggctggtgtaaggctggcgccgccgagaatgctggcctgccatcggttgatgaggttgaggcggagttcaagcgctacagcgcgaatcgcggtcagcatgcccggcctgaagatttcaactggtcggcaccggtcatgtactggattgtgatcgacgttcgccatctgatgcttcagcacaactacaccgaaagcgaaatccgcaaatcaattcatcagcacctcaaccgatgggctaaacggctggccaagggcgaacgagtgccaaaccctgcgccacaaatcgcccacaagcaacacatcccggcgccgtcagagctaatcgacaaagacggcaaatttcagcgtaaaggtgaagagctgctggcgcgcatccgctcgaagcgagaggggaaccaatcatga

SEQ ID NO: 428848 - DNA, 348 bp, Serratia marcescens
atgaagaaattatcgatcccggtagacgcattagaaagcgaacgtatcaacaagggtattcgtcgattggttcgcgaaggttacctgaaagacaacccagatagccagatttgccgcgtgcgaaatgccgctgctggggcaacgtggcgcacgctgcgtgaccttgaacggctggtggtggagatgtacggcgtctacgacacgcaagcagctatcagcgctcgtctgcgtgaattcagcaagccattccaggggctggttaaggaacgccggatgacaaaaagcaaatcggggaaatgggtttatttctaccgcctggttgccgttgagaaggagccttcagcatga

SEQ ID NO: 428849 - DNA, 228 bp, Serratia marcescens
atgaagtgtgtatctggaattgaggttatgccgctgctggttatagcgcatcgcgtgtggcgctggtggatgctcagagaagcacgccgtacatggcaagaacgcggtgattttcgaaagtatgcccagcgtcaaggctggttgattgaatggcaacgccagcgcttcagcactgattactgcgtagtgcgctatctggttcgcaaggcttatggagaatttgcatga

SEQ ID NO: 428850 - DNA, 1062 bp, Serratia marcescens
atgatctaccaacttaacgtaggccgatgtgaagatgttttgcgcaacatggctgataactctatagacgctatcgtaactgatcctccttacggcctgagctttatggggcataagtgggattaccaggtgccaacagtagatcagtggacagaatgcctgcgggtacttaagcctggtggccatttgctcgcttttggtggcgcccgtacctatcaccggctggcggtaaatatcgaggatgccggctttgaaattcgtgatcaactgatgtggatttatggcagcgggttccccaaatcgaagaacctgactggtgagcaccaaggcaaaggcacggccttgaaacccgcgcatgagccgattgttatggctcgaaagccgctgctgggaacggtagagggtaatgtggttcagtttgggaccggggccttaaacatcgatgcctgccgtattagtaataatgatgatgttgctcaggatcaggatggccgctggccagcgaatatacttcacgatggaagcgaagaagtgatagacgagtttcctaaaaatgctggtgcacgtgcgccggtgaaaggaactgaaccaacggcaaatgggtttagcggtgcagtaaagttcggaggcatgatcaatcgcgtgcctggtgcgtttcacaatgacaatggtagcgccgcccgtttcttctactgtgcaaaagtcggtaagtcggaacgtgatgaaggtatggagcgtttcatgccattcaccgcgagcgacatgacaggaggaagaaaagagggaagcgtgggccttaacgatccgcgcgctggtgctggacgtacggggggagccaggaataaccacccaacagtgaaacctgttgagctgatgcgctgcctttgccgtttaattacaccggccggcggccttgttcttgatccattcatgggctcagggtcaacgggaaaagcggcgttacttgagggttacgggtttatcggtatcgagttagaccctgatcacttaaccacagcagcagcccgtattgcgcactcagctaaggtggtagcgtcatga

SEQ ID NO: 428851 - DNA, 384 bp, Serratia marcescens
atgaaactgacattaccattcccgccaagcgtaaacggctactggcgttcaccaaacaaaggatcgtcacgtggtcgcactttggtcagtgagcgcggtagggttttccaggcagaggctatcgcacaggtaatcgagcaactgcgccgccggcctaagccgatcagcgccaatatctcggttcatgtggtgttctgcccgccgaataaagcgcgccgggatctggataactacttcaaagcattattcgatgcgatgacgcaggctggtgtttggcttgatgacagccagattaagcgcatcgaggcggagtgggggccggtcacgaaaggcggaaaagtggagctgagaatcagcgaggtgatgccatgcgctgcctgttga

SEQ ID NO: 428852 - DNA, 996 bp, Serratia marcescens
atgcgctgcctgttgaaacctatcatcatcagcgagctaggccaggtgatattgaaaccaggtgctgatctgatgtcgttgtttggtgatcgggtcatggtgaccagagtaccgcctgaattccgcaagatgccatctggcgcactgccgacagtagaacagcaattggcaactgacccacgttttcgatcgtttttcacgcatgaacgggtgctaagcgccgctggtgggtctgttgcgatgcgtgattggttagcccgtggttttgaatgccaatgcgccagcgctgacgggtatcacgacaagaacgtcagcgtgatggaatacggcgatcacagcatcaggatgtgctggcatcaccagcacaaataccgagagcagacgagccaaaagctgaataagctggcggaacagaacgcggctgattttatcgtttatcgcgcgcggtcccacttcatgtttgacgaatcccaccagctgacgttgccggagctttgctggtgggcatgggtaaaagaggttatcgatctgatccctgaagaggtcgcagctgcatcactgcgtgtggttccgcacagcgtacctgctggggttaagaaagaatcagatatcgagcacacgccggcggcaaagcaaattgttgcagagaaagcaaaaaaagcggccaaaacgttacttatcgatccagccccaccaaaggcgttattcaagattccaaagcgtgagcgctggaccagtgagaagtttacccgttgggttaagtctcagccatgcgcatgctgcggagcaccctcggacgacccccatcacatcattggccacgggcagggtggcatgggaaccaaagcgcacgattttttaaccatcccactttgccgaaaacatcacgctgaattgcatcgtgacatgtcacggtgggaagaagagtacggcagtcagatcgaactgtggtttagattcatcgaccactcgttatcgatcggcgccatttcataa

SEQ ID NO: 428853 - DNA, 699 bp, Serratia marcescens
atgattatgtccgaacaatacctgcagtacatccgtgaatgtttcatgatggcaactgctgataccagcggtaagacaaaagggcagctacaggcattcactgaatcaacgcaagtatgcactacgcggttgaagcgtaagagacgcactatcgtggaggaagacggaaagcgaattacaattcatagcgcacctgttcctggcactgaaaccagaccgagttcaggggcaattgcgcttattgagcctgccacgttttcagctacttcttggcgcagggctatttacccaatcgcgagcaatcagcgcagctggctttcatggtgctacacgggcgatatttcgttcagccatcaggaagagatcactcgctgggcttggagtgaattctgcgcccgcatcgaagttatgggcaagcgcatagcaggcaagacgatcgaaaagcttagggcgttgacttggttggccgcccaagatgtgaaagccaggataatgggcggtaaagcttaccagtgccaagaagtagctgagctacttcaggtatccgcgccaaactggtcaaaaaattatggccagtattggtcgctgctgtgtggaatattccagaggcttgatcgggaaggtctaatatctttatcgagatcacgatcacaacaaaaagcgacattttcacaacagggtattgcaaaagttaattaa

SEQ ID NO: 428854 - DNA, 921 bp, Serratia marcescens
gtgttatcgaatcttgaaagatgggtttcattttttgatttttctttttcacccactcacccagcagcacctgatatacccgtaaatgaagtgttactaagattaaagaatcttgtagatcagggcgatgcagtgaagctgtacaataacaaaactagagctgtccgcatttcagaaatgacctatgctgatggcgatcctcatgctgtaatgttagttcaactctgtgatcagaatgggtcggatcctgtttttggggaactggcaacaggggcgttaagactcgagccaaagctagcaggtgaggggatagccgtatctagccatatagtcatatcaacctcggtggttcctttcacagcggaccattttaagacactggttgagtcagtaccgggtatcagtaagtcgatactagaaccgttcctaaacgctgttcttaaggacgcttttgatgggcaggaatttcacaacccggcaacaaaagccaaatgtaaacaccgtcctaaattgactattttttcccatgggtcccagactttaatggacgctcttcagggggccaaacttcacaacgtcaagctggttagcactaagaagatgggcgggttggataagacatcctataccgaactagcggaaaggtctgtgagatacaaaatcgtgaaacagccgccgctaaagtacaaagagaaactgctgagaatcctcagaaagaaaggccaacagtctgggtacacgaaggtgtcaatcagttattctaaggatggtaagcaggccagtcttgatcttgatcggaatgaggatgctgctaccaagctcttcaccaagagcgagaaggtcattcttgctggtgggataaatcaatgcgagagcgccatacatcagcagctttctgcaagcatggtagggcttttatag

SEQ ID NO: 428855 - DNA, 573 bp, Serratia marcescens
atgaaactgttttcaccattgggttatttgcgtatcaaacatgaagagaagaaatggtacgattttataattccatttattggtagtgtaatagtaaccattgtttattatttttctagcaataaaattcctctaataggcaatggtggcctactagctcaggtcaacgggctgttacaagtgttgatcggtttttatatagctgcattagccgccgtatctaccttttctaatgcgacaatagatgaagtgatgtctggggaccctccaactttgatagagaagttcagggggagaaagttaaaggttactcttacaagaagaaggtttgtttgctatctatttggatatttggcattaaccagctttgtgcttttttgcatcggcctgatttccttacttatagggaaaacgctctcaatatggttgcttgccacagcatcaattaaagtgttgatagtgctaaaaacagtgttcttcttcttttactctttgattttgcttaacgttataacaacaactttactggggttgtatttcctatcagttcggttccatcaatcatcactatag

SEQ ID NO: 428856 - DNA, 348 bp, Serratia marcescens
atgaagatgccaaacaatcctcacaactgggcagagctcagcgacattcttgcggcctggtggcgcggtgacgtgccgattggtggcgtcgttatggctgtcgttatggctgtccttaggatggcgtatgccggcagcagttggaaagagaccatattcgaaggcttgatgtgcggcgccctggcgctgacgacttactcagccctggattacttcgacgtgccgaaagctttaacggttggtatcggcggattcatcggctttgtcggcgtgaagaaactcagctcgttcttgtctggttacgtgggtaatcgctttggcggaggcaatcagaatgcagataagtaa

SEQ ID NO: 428857 - DNA, 441 bp, Serratia marcescens
atgcagataagtaaaagcggcattgagttgattaagcgctttgaaggcctgcgactgaaagcctatcaggattcggtgggcgtctggacgattggttacggatggacacagccagttgacggtaaaaaagtcggccccggaatgcagattgatcaggccactgccgatcggctgctgaaatgcggcgttgtgcagtatgagcagggcgttaatcagctggtgaaggtgaaaatcactcagggccaattcgatgcgctggtgagcttcgcctataacctcggcttgcgatcgctgagcacatctacacttctgcaaaaactgaacgctggcgataagcaaggcgctgccgaccagttcgggcggtgggtaaatgctggcggtaaacgtctggatggtctgattgcacgccgtgcagcagagcacgagatgtttttgtcatga

SEQ ID NO: 428858 - DNA, 555 bp, Serratia marcescens
atgaacacctcattcagcgttcggacgatgattatcggactgctgctggtggcgctgattgtcgcgggcaggctggcgttttacttccacggcaacgcagtaaaggcaggtgagcaggttaagcagcttcagagcgataacgccctgcaggcgaaggcaatcgccacacaggcatttcagttccagcgcgccaacgaaatcagcaacgcggcgattcagtacggcatcaaaaccgacgcggccacacaggggaaagaaattgaataccggacgatcctcaagaaacagccgacgtgtgatctggctgtgcctgccgctattgctggtgggctgctcgactacacgcaccgtctacgttcccgcgcaatgtcagccgataccatcgtcgctgacgcaaccggtgctggcgccactgcctccggcaccctgacatactgtcaggcggtgctgtggattgatccgctgctggcggcgctcgacaaagcgaacaaccaactgctggcgatacgccagttagacaagggagtacaggatggaaaacaaacaacgcagtag

SEQ ID NO: 428859 - DNA, 144 bp, Serratia marcescens
atgagcgaagctaaaccgcaagatggcagcaccgtgaagggataccgcaccttgaccgacgacgatatcgcgcaaatgaatgacctgaaagacatcagtcgtaatttttgcgagcaactcgacctcgaacgcacacatctttaa

SEQ ID NO: 428860 - DNA, 663 bp, Serratia marcescens
atggcgggtttaaaagagctgtcggctcaactccaaagcgtacgcaagcaaatcccgtttgctacggcgcaagcactgacaagcgtcgccagaaagatagaggctgcggaaaaaaccgcgtttaaacggcacctggagaaccccacaccgtttacggtcaactcggttaagtcattcggtgcccggaaaagcaacctgaaggctaaggtgttcgtgatggacaccgccgcgagctatctggagccgttcgaattcggcggtcagcataagttgaacagccaggcgctgctgaacccaaaaaacatcaaactgaacaaatacggcaacctgacgcgcaacaagatggcgcagctgaaggctaaggatgacgtgttcattggcgatgtgaccaccaaatacggcgagaaggtcaacggtgtatggcagcggcagaaagccaaaaaggtgaaaaagggcaaagggcgccggcgtaaacgctctaccaatggcacgcggcaacctcgcatccagcaaagagcgccaaagctgcttatacgcttcggtgacgcgcttcccgttaagccaatgctgggctatttcgaccgtgcgcaggctatggccaatgccttgatgcctacagagctgagcagggctatggcagaggcgatgcgaacagcaaaatga

SEQ ID NO: 428861 - DNA, 600 bp, Serratia marcescens
atgaaccagtcagattttgccaaacttcacggcgtcagccgaaagacggtaacgacctggaaggcccgcggctggctggttctggccggagacgatattgacgttgaagcgtcgaatgcaaacatcgagcgcttccgaaaaactgttacccgaccagagaaaaaaccggcaggtaacaagcagggtaacaaaacaggtaacagatcctcgggtaacaagtcaggtaacaaaaacgataaggatctggccgagtctccgacgagaaccgttgagcggatgatcgccgagcacggcgtgacgatgacgcttgatgaagcgcgccagatgaaagaaaacttcctcgcgttgcttacccagctcgagtacgacattaaatccgggcaggtgctgccgtacaaagacatgatcgaggccgtaggtaatgaatacgcccgcatgcgcacccgtctcattgcgattgctcctgaacatggcccccggttacgggtgctggcttctaccaccaacgacgcggagtttgtccaggcactgcaggaggtggtttacgaggcgatggaggaattgagccttgatgcagataacaaccgaggagagaactaa

SEQ ID NO: 428862 - DNA, 1980 bp, Serratia marcescens
atgcagataacaaccgaggagagaactaacgctgcagcctggcagaatttcaccggggagctgcgccagcgtcgttccgatgttcgcccgcccgaaccgctgtcactgagcgaatgggctaataaatacgcggtgctctcgaaagaaaccagtgcgcaaaccggccgattccggtctttcgcgtatcaggatggcatgatggatgccattacagatccggcggtgacgcaggtgtcggtgatgaagtcggcgcgcgttggctacaccaagatccttgaccacgttgtcggctattacctggcgcatgacccgtcgccgatcctcattgttcaaccgcgtgttgaagatgccgaagattacagtaaaaccgagatcgcgccgatgttacgtgatactccggtgctggcggaaatctgtggtgatccaaaggccaaggacagtaatcagaccatcctcaaaaagacctttgccaacggcgccaatttgacgctggtgggggcaaatagccccggcggtttccgccgtattacatgccggatcatcttgtttgacgaagttgacggttatccgtccggcggtgccggggtggaaggtgatcagattgcactgggcattaagcggtccgaaacattctggaaccgcaaaattgccctgggttctacgccgacggtgaaaggcaccagccggattgaaaaggcgtatgaggaaagtgatcagcgccgctattacgtcccgtgcccgcactgcggtgaatttcaggtactggagtggggtggccctgagacgccatacggcatcaagtgggacaaggatgaaaatggagaaggcatcccagaatcggcatattacgtctgccggcataatggttgcgtgatccaccataacgaaaagtcgggcatggtgaagcgcggcgaatggcgcgcaaccaaaccatttaaagggcatgcgggttttcacatttgggcgggttacagcctgttcccgaacgcggcctggaaatatctggtggctgagtggctacgggtgaaaaacgatccgctcatgcgtcagacctttatcaatctggtgcttggtgagccgtatgaagaccgcggcgaaaaagcgctgagcgaaaaacgcttgctggaacgctgtgaagtctatgcagcggaagtgcccgacggcgtggcggtattaacagccggcatcgatacccaggatggtcgctttgaaattgaggtgacgggttggggacgcaatgaggagagctggtcgattgccttcgacgtgattgaaggtgatctggaaaccaacgaaccgtggcaacggctcgatgcgtatctcaagcaggtctggcgccgggctgacggacgtggattcacgataatggcggcctgcatggactccggtggccaccacacccagaaagtttacgagtttgccaaagagcgccttggccgacgaatttgggcgatcaagggcgaatcggcgcgcggtggtaaacgttcgccggtttggccgacgaaaaagccaacgtccaagtcaaaggccagtttcaaaccaatcatcattggggtgaatgcggccaaggataccatccgcgggcgactgcatatcgatccgcctgcaccgggggagcctgcagccagttacatgcattttccggcagaccgtgacctgaactatttcagccagttgctggcagaacgttcggtgttgaaggtgtccggcggccagcgttaccgagtttgggagcagcttccaggcagggcaaacgaagcgctggactgcagggtgtacagctatgcagccctgtgcggcctgttttatctcggtttaaagctgaatctgctggcggacaacatcgcgatcaatcccgagcgcctgttgccggcgccgcagcagccggaggaaaaacaaaaccttcgactgcctggcgtcatcattgaagagccggaaaaaccgaagcgcaagcgcctgtcacaacttttgccatcataa

SEQ ID NO: 428863 - DNA, 264 bp, Serratia marcescens
atgtttaaccgtaacaccagcctgttggccggtgcgatgacgcctgcgcaattgcaggacgcattggcaaaggcgcaacaggcctatattgacctcgcagccggcgcgcgcggtgtgtcgttctcgtacacgcaaggtgatggcacgcgttctgtttcttatcaacaagcctcaatggcggacctgatggcactgatccagttgctgcaggcgcagttgggtattgttccccgcccacgtcggccaatgaggtttagattctga

SEQ ID NO: 428864 - DNA, 1644 bp, Serratia marcescens
atgaatgacatcaaaattttaggcccgaatgggcagccgctaccgccgatgcggtcaaaggcatccatgctggtgggcggcagccgtgtgccttacgatgcggcggattcgtttagcgaccagttggccaactggcagcctgcgttatggtcacccgacaatgagatcaatatctaccgtgatcgcattgtttcacgtgtgcgagatcttgcacgcaatgatggttgggccagcggcagcattacccgcgtgctggataacgccgtcggcgccaactttcgtcccatcctcaagcctgactatcgcatgttggcattgatgaccggcaatgcagccttcgacgccacctgggcagatgaatatggcaaggtggttgaggctcattggcgatcatgggctaatgatccgggacgttattgcgatgttgagcgcaaacaaacggtgtctcaaatgctgcgcctgggttttcggcacaagctgcttgatggtgatgcgttggcggtgctgcaataccggccagacagactggggcgtgggcgcggccgctatgccacaacggtgcaaatcgtcgatccggaccggttgagtaacccgcagcaaaacttcgatatgccgaatgttcgcggtggtgttgaaattgacggtgatggcgcgccaatcgcgtatcacatccgcgaagcacatatcggcgattggtggagtggcgccaagacgatgacgtggcggcgcatcccgcgggaaacaagctggggccgtccgcatgtggtccatgattatgaccatgagcggggcgcacaacaccggggaaatgggattttaacgccggttgttcagcgcctgaaaatgctcatcaagtatgaccagtcggagcttgaagcagcgatcctgaacgccgtatttggagcctacattacctctccctatgatccgcagatggttgagtcggcgatgggggaaacctttgacgatactcagatcggtgcctatcaagaagggcgtgttgattttcacaatgatcgccgcatatcgctgcaaaatggcgccagaatgccgatattgtaccccggtgaggatgtaaaggcagttaatgctgcccgtcctcacagcaattttgaggtgtttgaaagtgcagcgctgcgcaatatcgccgcggcaacgggcctgtcaacacagcaagtaacgcaggactggtctgatgttaactacagttcggcacgctctgcgatgcttgaggcctggaagacactgacccgccgacgtgatgatttttctgtggggttcgcccagccgatcctgtccgcttttattgaagaaatccacgatacggaagacttaccgctgcccagtggtgcaccgcactttctggatgccagggcggcgtattgccgtgctcgctggatggggcctggtcgtggctgggtggacccggtggcggagaagaaaggcgccattctgggtatggatgccgggctttcaacgcttgaaatggaatcggcagaaaacgccggcgaggactgggaagaaatgctggaccagcgtgcgcgcgagattgccgccttcaaggagcgggggctccctgttccgagctgggcacaggctgaaattctggcacctgaaacaattaaagatccggaggcagagtga

SEQ ID NO: 428865 - DNA, 861 bp, Serratia marcescens
gtgaatttaccgcacctggcgcagcgactgtttaacacaccgctggcgctgcacccgcaaaaggccgaagtggtcatggccgcgatgatggaccggttcgggataacccgcatcaacacgctggcatctgactggctgggggatgatgaaagttttacccgaaaggcacgtaaacaggacgccggctatgacgtggttggcggtatcgcggtgatccccgtgcaagggacattggttcagaagttgggcagtctgcgaccctacagcggtatgacgggctacgacgggatcagacagtcgttcctgaccgcgatcagtgaccccgaagtgagcggcatctgcctcgatatcgattctcccggcggtgaggtagccggctgtttcgatctggtagatgaaatttatcacgcccgcggttcaaaaccgatccacgccatccttaccgaaaatgcgtattccgccgcgtatgctatcgccagcgcggcagatcgcattcatgtaccgcgcaccggtggtgtcggttcggtcggggtgatcgtcattcattgtgactggtcacagcgaattaaagaagatggcctggcggtcaccatcatcacctacggtgaccgtaaagccgagagcaacccctacgtcaaattgagcgatcaggcccgtgccgcgattcaggatgatgtagatgcgatgggtaggctttttgtcagtacggtagcccgtaaccgggggatcactgaaaaaactatccgtaacacccaggctgcctgtttcctggcggctgatggcgtcaagttggggcttgccgatgcggtgatgacccctgatgccgcattccgaaaattaatcaatgaagcaggagcttaa

SEQ ID NO: 428866 - DNA, 579 bp, Serratia marcescens
atgtctcatttcaagtttgcccatcttctcggcctcaagaaaaaagcgtctgaggaagaggaagacgaaaaagagaaatctcggcgagcggaagaagaggaacgcgattctgaagaaaatgaagagcgtgaccctgatgctgaagagaatgaagagcgtgaccctgatgccgaggaggatggcgacgaaaaggaaaaaggcaaaaaggcgaagtcccgtcgtgctgaagaggacgacgaagatgcggaagaggatgaaaaccgcgatgtgaaaaaaggtcgccgggcagagcggaaacgttgtgcagccatttttggcagtaagcatgccgccggccgcccggacatggccgctcaactggctttcaatacccggatgagtgcgcgtgaagccatcgacacgctggcgacgatgggcgccgtagccccgcagccacaaggtagaaagtcgctggatgcccggatgcgtgaagctgagcagacacgattggggcccgacggtgagaagcctgcaacgggtaaaaatgcgctggtaagcaaaatgaccagtctctatgacactgcacgaggtaacaagtaa

SEQ ID NO: 428867 - DNA, 402 bp, Serratia marcescens
atggaccagtttggacaaaatcaattcgcgccgggcatggaaagttcgctgttcgtacccgatcagctggtttccggcccgttacagctggtcactgactcggtcacgatcggtgtttcaggggcgcttaaacgtgggacggtactcggcatggtcaccgcgaccggcgcttatatcccgagcaaaaaagacgccaccgacggcagtgaaaagccgtcggccattttggtcgataacgtagacaccacaaccacagcacaaactggcggtgtgtatctgatgggcgagtttaaccagcatcgcctgatcttcgacgcgacatggaccattgctgaactgaaagcgcaattccgcccgctggccatcttcctgcgcgatagcatccagtcgccggtatcttga

SEQ ID NO: 428868 - DNA, 1050 bp, Serratia marcescens
atggaaaacatttttgataccagcgtgctggtccaggtcgtccctaacctgaaaaccagccaaaactggcttctggatcgcttcttcccgaacgtggtgacttacgagacggaagaggttgctatcgatgtggacgtggggctgcgtcgaatggcgccattcgtatcgccgctggtggaaggtaaactggtcgagagtcgcaaataccagaccaatactttcaagccggcatatatcaaagacaagcgcgcaccggatctgcgcaaaccgatccgccgacagatcggcgaacgcatcggcggcgaatttaccgcggcagagcgcgaaatgctgaacctgcagttcgagatggcagatcagatcgacatgattaaccgccgtcttgaatggatggccagcagcgccatggtgtcagggaaagtcaccgtgaacggggaaggttatgaaaccaaggtggttgattttggccgttcgccggacctgaccattaccctaagtggtagcgataaatggccgctgacggtggccgccggcgccaccaacacgcagccgtcggatgatattgaagagtggcagaccctgatcctcaaaaattccggcgcggtaccgacggacctgatcttcactaacaaggcgtggaaagcgttccggctggataccacgatcaaggataacgccatcaccttcccggcgctgagcccattcggcaaccagattaatgccggtgcgcaggtgcagaaaggggccgtttataaaggccgctggggcaacttcgacctgtggctgtataacgactggttcattgacccgctggacaatgtcgaaaaaccgattatccctgatggtgccgtcattatgtctggcgctgatctgatggggactcgtgcgtttggcgtgatcctcgatcctgctttcaactatggccctctggcctatgcccctaagacctgggtgaaagaagatccggcgcaacgcctgctgatgatgcagtcagctccgttggttatcccaagccgggtaaatgctgcactctgcgcgacggtggtgtga

SEQ ID NO: 428869 - DNA, 414 bp, Serratia marcescens
atggcatcgaaaaaacagcaaggtaacgaactgggcggcttgccgcccgagttaatggtaggtgaacaggaaaacggcgaagagttgaaagttgacggccaggagcccgacaattctaccgagaccgagaccgagaccgagaccgagaccgagaccgagaccgagaccgagaccgacgatgatgacgatcaggacggtgaacagctgccggccggcatggtttcagtggttgtcaccaaaggtaacacggtgcggcacgatggctgcgactatctagaaaaccgggcgttcatgttgccggtagcggatgcgcagcgcctgattggtctgggcgtggtagctgatgttgaacagctccgcaagttagcgttgcttcgcagcgcgccggccgtatctgtgcaatcgggggagtaa

SEQ ID NO: 428870 - DNA, 348 bp, Serratia marcescens
atgggaatcaactgggatcagcatttgcttgcgccgttgcacggcgtttttggtgacccggttgagtatcgcccttgcggcggcgcggagccttacaccattagcggcatattcgatcgggcctatacgcaagaggttgagccgctggacgatggcagcactattaacaccaccaagcctgtgctgggtgtgcgtgatagtcaattccgggcgccgcctaaacagggagaccgggtattggtcggcatcgttggtggggtgccggtcaatacgctctttgccgttgcggatgttcaacctgatagccacggggggacgaagcttattctcaacaaggtgaaatcatga

SEQ ID NO: 428871 - DNA, 522 bp, Serratia marcescens
ttgctggtcattgaggcgttgaagaataagaccgatgccgccgatcgggtttattcacctcgggactggcccaccactgctgatatgtatcctgttctcctggtgcagacaccgatcgacgtgaagaattcgctggggcgcaatgtgccccagttcaacacggtgaccacggtccgtatcacagggcgtctgcaggaactggatgatgcggcggaggacaatggggcagaaaaagctgaagaagcgttggagcaactacgcgagcaggtagagcgcgcggtcatcaatagctatgaactgacgcgaaaaattcagcagtttctgcaggtgcgttcgaccattgatgtggacgccggcggcgaagggcataccgcccagttactgatggaactggatatcgaatactatcagggccccgaagagttttatgaaattgacgcgtctccgcttgagggaattgacgtcacgatctccatgcctgatggcacccctgaaccactcgtaaaaatcgatctggagtaa

SEQ ID NO: 428872 - DNA, 195 bp, Serratia marcescens
atgtttgtgaaacccgtaccggggcgcattgtgcgcgatccggtcaagggtacctttttgccggaatccggtgaacaggttcccgataatattttttgggggcgccgcctgaaggatggcgatgtacaaaaattcgaccctaacgcatcagctaagccgatggcggggaagaaaagccaggagagtgatcaatga

SEQ ID NO: 428873 - DNA, 1506 bp, Serratia marcescens
atgaccgttccatttactcgcatcccttcaaaccagcgcgcgccgtttttctacgccgagtttgataactcgatggcgaatactgcgaccgcggtacagcgcacactgttgatcgggcagatgctgtcaacggcgacggcaacgccaggcattccgcagaaagtttcttctgaatcggcggtagcaggcatctgcggcaacggttccatgttgcacaacatgatggcggcgtatctggccaacgacatttctgcggaaatctggatcctgccgttatcggatggcaccaccggaacagcagcggcagccggtaaattacaggtagtgacagcggcgactgcgaccggcgttttgtcgctctacattgccggtattcgcgttcagctcacggtcgtcagtaccgatgataatgttgccgtggccgcggcgattgcagcggcgatcaacggtcaaagcaagctgccggttactgctgtcgtggatacaacagccactgatacggtgaacctgacggctaaaaataaaggtgctcacggtaacagcatcgatatccgcctcaattatcagggcgccgccggcggtgaggaaaccccgcagggcatggagttgaagctaacggcaatggccggcggtgcaggtgcgccgtctctgactgatccgctgggtaatctgcaagatcgcgcatttgacttcatcgtcaacccttacacggacaccacgtcgctggatgccgtgaaagagttcctgtcagatgccaccggccgctggtcctacgcacagcagctctatggtcattcgttcggtgcgctggcaggcacgtatggttccttgtctgccgccggcgaagcgcgcaataaccagcatgagacgttgctggggatcaacggatcaccgacgcccgcttatctttgggcggcagcgttaaccggggcgattgcgccgagcctgaggaacgatccgggccgtccaacgcagacgttgacgatcagtggtgtactggctccgccgctggaatcccgcttcatgctgaccgagcgcaataatctgctgtacagcggtatctcaacgtttacggtcgctgatgatggttctgtgcaggttgaaaagaccatcaccacctaccagaagaacaagttcggcgatgcagatgacagctacctgaacattgagacgctctatctgctgatgttcgtgacccgtttcctgcgcacgcaaatcacttcaaagttcggccgcatgaagctggccaacgacggcacccgttttgcaccaggctccgcgattgtgacgcccaacgtgatccgcgcggaactgatcgcccagtatcgcacgctggaatataacggctatgtgcaggatgccgcggcatttgcgcagacgttgctggtggagcgtaacagcagcaataccaaacggatcgatgtgttgtggacgggcacgctgatcgaccaactggaaattttcgcactactcaatcaatggcgacgcgcgcagaccgcagcctaa

SEQ ID NO: 428874 - DNA, 369 bp, Serratia marcescens
atgggagatacaactaaccgcctggccgggactgcatacgttaccatcgacggtgtaacggtcatggttgccggccagttcaaatacagccccggtaaagtggagcgctccacgttgaccgggatggatacggtgcacggttacaaagaaaagccacgggcgccgtttatttcctaccaggcgcgtgacagcggcgggacgtcgatcgctaaaatcaacgattccaccaacgtcacggtggtcgttgagctggcaaacggtaaaacagtgatcggcgaaaacatgtggtccgtgaatacgcaagatgttgatagcgaagaagcggtgtttgatgttcgctgggaaggcggatcggtaacggagtattga

SEQ ID NO: 428875 - DNA, 291 bp, Serratia marcescens
atggcagtgcttgataaaaccaaaacgatcgtactcagcaaagcgctggagatggcaaacatccgctacgagagcatcgaactgaaagagcccgcactggctgaggttgagcagttctatgaaacgcagcgcagcaagaatggcatggcggccatgaagctgctgctggcgttaaattccggcataactgaaaaagtgttgagtggcatggcttacaccgattacaggaagtgtgaggactacttgatgtcttttttgaccttcgatccctcggcggatggcagcaactag

SEQ ID NO: 428876 - DNA, 1875 bp, Serratia marcescens
atggccaagtcattcgactttgagctgacggctaatgatgaggcgtcagctgcaattctgcggattgaggaaattgtaaagcacctcaatccgctgttggacagaacgcgcgatgcgttggcgttgggcggccaggaatccagagataaccttgacgatttgggcagccgttttgatgtgttggctaaaaatgccagaagcggcgtccagttcatcggcgatttggtcccgccgctcaaaatggtcggtggattaaccctcgggctgggtggcgctgcagcggtcgtcaacgttgttaaaaacaacctgaccaattttgccaacgctggctaccggatcgataccgttgcaaaaaacgtcagcatgacggcggacgcgtttcaggaactgactggcgccatgattgaaaacggcagcgcgcgtgaggctgcggaaggttcggtcagtgagttgtttgaaaaggcgaatgatgctgtacacggccgtaatgatggctttctcgccttgctgaaacaacgagggatagggatcagcgaaaccaaggatggcctggctgatgtaggcaagctgattaacgatctcaaccgcgccatgcaatcactccctgctgggcagcaggcgttgtttgccaacaaattgggcctttcgcccgatcttctcggctatctgcgcaacacgaccagtgaagtgcaacgactcaaggatcaggcccgccgggatggcctgatatttacagagaaagatctgcagaatgccctggcgttcaagcagcagcttaaccagataggtgctgcctacgacggcatgctgatgaaagggcaggcctggctgggccagtcggaaaccttggcggcttcggtagaccagatcaagcaggtcgtcaccaatggtctggacagtacggctatcggttcgatcctgacgtttaacagcggcgggaaacaggccgatgttttgcggcaggctcaaggcgacgagaaatttaaagacacgctgtcatggaaagagaagctggatttaaaactgggctatgcgtcggaagatctgatcaagaaactgaacggctattataagcccgtatggcgtgcagaacagttgaacgcggatatgaataaatccctgtcttatcaaactggaaatgtcgtccaggggccaatccaggctccatacggggaggcgggtagaaactccagagggctgagaaacaataatgcaggtaacgttcgttctgcccctaatgctgttgggcatgatggtggattcccaatttttgcaaacccaagggatgggaatgctgctttagcaaggcagcttatgctctatggtgatcgaggtaataatacattaagtggtattattcacacttacgctccaagtaatgaaaataatactcaggcatatatcaatgctgtatcgagaatgacaggatttaatccttatgacagactagatctgcattcccccgacgttctacagcagttgattccagcgataatcaaacatgagaatggaactcagccattcagtagcgaagaaattaatctagctatagatgattcagttaatgatcgccgttggcaaggactccgagatagaaacaggttgctagaacaacgtcagtcaggcctatttgattacgaaagtaaagtagatgaagatggagggcaaagtacgcctatacaatccacgtcattattctcgccagccgggactgacgacgcctctattgggcgtttgactgaagctatgtcaaaggcgatcgatgagagcaaatttaagctggaagttacattgataaacagtcaaactggagagcgtcacaaagttaacacggatggtggtgggcgcgtagccctgccgatgcaatacaactaa

SEQ ID NO: 428877 - DNA, 753 bp, Serratia marcescens
atgtcaagaatgattatcccgttgtttataatgttattttcatccgcagttcattctgcatgtaactactcaaaaggtgagcaccctgtcttatatttcaaccaggttggaagtgttgagcccaagagtgttaatggagaatttaagacgagagttgaaggggcgtgttttggtagtcgagagatatcatcatggatcacagaaagtgaagatggtgttgttacttcttccatgaaaccttacgacgataaggagttcttttacgtaaccacctttaaccccataaaaaatgaaagtaagataatggctgtataccagtctccagatggtaggccaatgaaaaaattgttaatgttgggtaaggaaaactatgaaaaccctgagcgatctctaactcaaatgcttattgatggctatgactctgctcatggtgttatttatttttccgttccggcttgggcaacaagtgatgcaattcatgtattcaatgtgccactagatccttcattatcattaaaagggataacctctcgattcttgactgacggtaacttcaagtttttaaatgtattgtcagataaatgtgagaattgcttagtggtaactaaaatagaacatgatgataatggtgcttatttcccaacagtaatgtatgattggaaagggaagtttatctgtcagcttgatactcgagcttctgaatatggggatctggagtgcttaccccaaggggtgatatacaagccaagatag

SEQ ID NO: 428878 - DNA, 1404 bp, Serratia marcescens
atggctctgatcactgatgcgatctcatcgctgcttggtggcggcgacagctgggactggtttgagcatattcacccggcatcatttcgcggagttccttttgcggtagtcagtgccgaaggcgtatttggccggcgccaggccgtgcatgaatatccttatcgcaacaccgcctgggtggaagacctggggcgtggtacgcgcaaattaacgatcaggggtttcatcgtccataacagcctggcgtatgacgcacctgacgtgataacgcagcgtgattcgctggtggctgcgtgcgagacggaagggccgggaacgttgatacatccgacgcttggggagcttaccgtaagtgtgccggatggcggtttgcgggtacttgagagcgtggataacggccgttccttcgagtttactctgacggtcattgaatccggtttaaaggtgtttgcgatcaccggcagcactcaggcggcatcactggttcaggcaaactggttacgaaccggcctgatggcggccacaaaatttattgccacggttaaaggtgagatccgcagtgtaactcagaccatcaagacgttgcgcaataccgctacgttttggggaaacatggtgaaaagcaccgcaaatgaggtcactaatctcagtaatgtcctgaaatcgaccttcggtagcgcccggtatgggcgatacaacaaaggcaccgtagggggaggagtttcgggatcaaccggtgccgtaaatcgaacggcagataccgacaattacgccggattggttaaccaaaaaatggcgcaagcggtaacaggacgcgctgaattattggcgctcacggccacatttgagagcgtagcctccgttgatgccttccccgttgatgccagggccatcattgatgcggtcatttcgttcagcggcagtgtagaagaaaaaatccgcatgctggaaacgttggcctcgtatcgagataccacgttttacgcaacctctggtgaaaattcggtagccaatggcgccactatcctgctctgcatactgtctgccggcgcactggcagcgacagcagccaattatgagccatcaagctatgacgatgccattttgatgcttaatcgcgtctgcgacacgctggatgaggtgctgttgatggcggcggatgcaggggacgacgacgattatctgaaccttttgcaaacccgcgatgcgctggtcaatgcctacagccagaaaggcgccgttcttagttcactgacccaggttgttatgcccacatcgttaccggcgttggtgctggccaatcgcatgtatcaggacggtgctcggggtgatgaattggttcagtctgtcgggccgcgccatccggcattcatgcccaccaaatttaaagcgctgagaaaatga

SEQ ID NO: 428879 - DNA, 1071 bp, Serratia marcescens
atgaaagatgaactgattttgacggccggcggtaagcgaatttcaggctgggattctgttcgcgttacgcgaggcattgagcgcttgccatcggatttcgacctgtcgttgatggactactaccccggtaacgatgaaaagcagctggtactgcccggagacagctgcacggtgcatctgggagatgatctggttatgaccggctatgtcgatcgctggaatccggtgattggcaaagagcgtcatgaagttcgcgctacgggccggagtaaatgccaggatctggtggattgttcagctgaatggccgaacaacgtgatcagccaggctaatgccctgcagatagcgcaaaagctggcggcgccatacggcatcactgtcagcagcgacgtgaatgacatgacgacggttccccaatttaccctgaactggggggagtcttcgcaagaagtgatcgatcggatcacccgttgggctgcgctgctgtattacgacaagcccgatggcagtcttttccttacccgcgtcggaaccgccaaggcggccagcggcgtggcgcaaggggaaaatatcgagacggcatctttcatgtcatcgatggacgaacggttttccgattatgtaggggtatcaatgtcgatgacgccggctatggagttgtctccggatgggggctattccgccgttaccctggcgcgcgctcaggatccagaagtcgccaaaatgcgctatcgcaatcggattgtcatcgttgagagcacgatgaactctcacggtcaggcgcaaaactgcatcgactgggagatgaaccggcgatatggccgttcacgacgtctgcaggtggagatcgacagttggcgggacaaggcaggaaaactgtgggagccgaatacgctgatccccataaatatccctgtttttgggctcaataacgtgcagtggcttctggcggaggtcacgtttacccgtgacgagcggggcacgcgcgccaatctcatcatgatgccgaaagaagcatttgccgttcaaccctaccaattctatagccaggtgcaggagcttaatcgatga

SEQ ID NO: 428880 - DNA, 591 bp, Serratia marcescens
atgaatgacggcatgttgaggcaacttgggcgccgggtggccatgatgataggtctgggcaagatcaccggatacggcgatgctggcggcatacaaaaacttcaataccagacccagatggaagtgagaggcgaaaccccgcgtatggcggagtttggattttcttccggtctcccggtggggacggatgtggtgctggcgtatctggggggagatcgttccagcgccgtgatcgtagccagtaacaatcagcaataccggcaatcgggtttaaaaagcggtgagacgctgatttataaccagtgggggatgttcgtaaaactcacggaaaatggcattgagatagaagcgaaagggaagccggtaacagtgaccaatgcgaccacggttaccgtcacggccactgaaaaaatcagacttgaaacaccgcgtttggaagtgaccggcgacgtgatagacaactgcgacagcaatggcgccacattgaaagccttacgcgatacctataacgagcacagccatgccgtgaaaaatgttcagagcggcaacgatgagaaaaccagcgagaaaccgggggagatcgtcgaatga

SEQ ID NO: 428881 - DNA, 438 bp, Serratia marcescens
atgagtgatatcagctctttttgggacattgaacggctggtggctgagtggcgtgagggacgcggcgatttgatcaatggcgatgacctgcagacagcgatgattatcagtctgttcaccgatcgcgtcgcccgtgatgacgatgatatagacggagaagatcgccgcggctggtggggggatatgggggaggatcataacatcggctcccgcctttggttgttgcgccgtcagaaattgacccaagacgttgctcaaaaagcggaagactacgcccgcgaggcattgcagtggctgatctctgatggtgtggtttcgtcgttcacgatagcaacccagatcgtttatccccgccggctaaatatggtcattcgctatcagcgtccgggtaacggtgaccgtacggacatgcgatttttttgggtttgggagcaataa

SEQ ID NO: 428882 - DNA, 1149 bp, Serratia marcescens
atgcctttcaatcggccgacactcaccgaattgcgtgagaaaagtcgcacacagcttcaggctgaactgagaaagaccggtgcgctgttgcgctattccaacatgcgtgttttggcggatgctgacgctggcctggcccatttacattacgggtacctggattatatcgcgctgcagtccaccccttttaatgccactgatgaatggctatctgggtgggctggccttaaaagtgtctaccaagacccggccaatccggcatccacaccgtcttatgaatttagcggaactgcgggcgctcttgtcaacaaaggtgccgtgttgcgccgtggtgatggttatctctaccgccttgaggagagcgtaacgatcggggcaaatgggaaaggtgtcggcaagctcattgcaatactgcccgatattatcgacgacccgacagggggaggcattgacggcaatgcggatgccggcacgaccctgacactggatgtttctctacccggtattaatgcaagcggagtaatgctcgaggccgccaccggcggagcagacattgagacacaggaaagtttccgcgcccgtatgcttcttgcctatcaacatccgccccagggtggcagcgacacagattatgagcagtgggcgctggcggtacctggcgttacacgctgctggcccaaacggcgcctgatgggggccggtacggttggggtgtacatcatgtgcgacggcaacgacgaaaccaatcacggtttcccggtagggactgacggtatttctcagctggatgactggggcgcacagaaggctaccggagatcaggggcgtgtcgctgattacatctacccacgcgcgccagtcactgcgcttgtttacgtttgttcgccagtggccaagacggtggattttgagatcagcggcatttcacatgttggcagcgacattaccacggccattgcggcggctatcgacaatgtctttttcgaaggtggaacaccggtcggcaatggcaagatcttcctttctgacctcaacagggctatcggagacattgaaggaacggcaggttttatccttgtttccccaacaacgaatatcgatctgggggtaggtgaattgcctgttcgtggtgaggtgaactatacatga

SEQ ID NO: 428883 - DNA, 675 bp, Serratia marcescens
atgagccagtttaccgtaaaggagtattctcgcgcgctgcaggcgttaatcccgaccggattagcgtggccgcgcgaccctggtggggttcagggggcagttattcgggctttggctacagggtttcagcgtagcgataacgatgcgatagcgttgcttgtaggcgcattcccagaaaccgcaaccatcatgctgactgaatgggaaaaaacgctaggtttgccagatgactgttcgatcggggaggttgacacgatagcgaaacgtcaggctgctgtggcatcaaaatttatcagcactggcgggcagtctcgcacctattttatcggtattgccagagcgctcggttacaacatcaccatcaaggaataccgccaggcgcgcgccgggctgtctgtgtgtggcgatgggttaaatggcgacgactggccatttgtgtggctggtggaggcagaggaaacaaccatctcttatgcccgtgccggaatgagttactgcggcgatccgttgcgctcatggggaaaccggcagcttgagtgccgaatgaatgcgctctcgccttcacatacgatcgttaaatttggctatatcaattttggattcaacgacgagggcgtttacgacgttaccccagaatttgccgatatgttcgacaccgcatcgggctatctctaa

SEQ ID NO: 428884 - DNA, 534 bp, Serratia marcescens
atgagaaaagtaggaagtacaacggatacagcagatgcaaacggcgaatatacgaatggcaatgtggcgcagggcatcccgccgactattatcaatgccgagatgttgaacacgttccagcgcgagttaattggcgtggttgaaggctctgggcgacaactagatccggagaacgataatcagttaaaagaggtgatcggtgagctgagggtgacctctcttctgtctgatcctatcgttggtgctcttacttctcaggggtattgcattatccctactcagacgccatctggcggaaagaaaaacattattgttcaaatgggaaccggcactattaatgcgccgtcaggaacagtgcaatatccgatccctttcccaaagcgggttattgctatcgtggcaacgaaatatgcagatggaaaccgctccgtgtccgtaaccaatgattccaactcagcatttggcgcatatggctggatcagtggtggtaccagtaatgctgacaactttggctggatcgcgattggagaataa

SEQ ID NO: 428885 - DNA, 1992 bp, Serratia marcescens
atggctcagagatacaacaccggaaaccctcgtccttctaacagcatgaaggatttaaacgataatgcccttgcatatgatgacttccttaacggcgaacaagatgaggcttacgatcggtttcaaaagccattcccaacagtgcgcaggcaggttgctgaacgcattgatgagataactggagcgcaaaagagcattgagcagtatacggatgaggccaagcaggcagcagacaacgctcagaacatcgcagacgccaacacctactacatcacaccagaagacccggacggcacgattgctgggattgctgggacagcagagggtaagggcttccgcgtggcgataccagattcaacagacaatatatatctattcaaatattacaagaaagaaagtggcaccgctgtgtttatcaatagcgaggctagttatagagaaatagaacgactgaatgatgagattgaaattggtcaccgtattgaatggtcaaacgtcaacctaactactttccaggaagtaaatttaaaccgggttattttcacctccgcaagtagttcgtatcaggaagctaagggggcattagcttcggttccttcagggactacggtcgaagtctggttcagactaactctaaaatccggtgtagctcctaccttgcgtttgcgcggtgcgagtgattgggcaagccagtctgttcgcctgacgccaagccatggattattgacggcgacattaaccgctacagctgacgtatcagaaatccgtctctacagcgacacagggaacacaacggattgtgatttgtacatgtttatcatgtacggaaacgaaagtccgatcacgtcaacagttactactctgatcaatgaggctcagaactctcgtgaatatgcagagaggggggttaggtctactggctattcatcgtttgagagttcttcgccaaatacatttaaagtaacaggtgatggtacggcttatgcggaagtccgcctgtcgatgctgccaataagatctggcggaacttttaagtttaagcacaagatagcttcaacagcagagtggacatacgctcgtttatttgactcaagcaccagtgagtgggcgtcaccggaaacaatcattaaaacaaacgatctgtggagaactgttgagattgccacgactgcagatcgaatgattgataccgttgttatttataccaggacgcaaacaaaacccatctcagcatcaggtttctttaacttgctttctgttgacggtatctatttctcggcttcacaggcctatcatgacatgccacctgatgacattggtattggcatgataccacagctcaataacggccctgcgtcagctaatgtagcatttgatgagttcagtgtagagggcggcaacctcttcacgatgcggactaatactgcaaaatatgcagaggcgcgcggtgacatctccgtttcgtcagggaaactggtaactttttattatcagattcttaatactgcgggtggcactccatttatcaggctgcgtaacacagcaggaaacggatgggcaagcgctgaatacccacttgttttcagccctggtttaaactctgtcacgatcgcagcaacagcggatgcagcacaggcttacatctactgcaaaaatacccaggtttcgtataaccgcctatggggtgtgatgacgggatcgccatacacaccagagacgcttttaactgaacgcctggcgtctgcaattttgcagtcagcagcatacgtagaagcatctcgacctgttggcaataacggcttctctgcgtttaagccaacatccaacaactcgtggaactttacttctccgggtactgcgtatgctgaggtaatttcaactattcctcagcagcctgcaggcgcaaaattgcgtgttatgtatgcgataacctcaaatggcgcaaacacatatatgcgattgcgccactctgggggggggggcgagtcctga

SEQ ID NO: 428886 - DNA, 1344 bp, Serratia marcescens
atggcgcaaacacatatatgcgattgcgccactctgggggggggggcgagtcctgagacggcaattatcacggatggtgagcaacgatttattgatctgcaatctgacgccggcgcacaagtttacgccgtggttgtctattcaaggacgcaagccgcgtattacgggaaagcgtttgtatcactggccgctgtaaatgatgttttcgtatcctcctcagcagctgcaaatgagctggcatcgagcggcggaaatagcagggagcaaagcacgggggtgatgttcacaagctctctgtgcctcgtatccgggcgtccggtaacgctgtacggtgagaacttcatcagtggggcaagagagtggctgtctggtgcgaatatggcgatcagcagcacgcctgcaactggtaagccatctgtattgcgcagcgcgttgcctgatgtgacgttcaagccggaagagattggcggcacaactatcgaagttaacgcgcgcgccgacgataccgctaacgttttccgcaaatcggcagctgttcgagttgcgacgcctgtatcagctgaaaccattaaagtctgcgcgctaatggattctcacggttcgatttgcgtgccgtggctctatcgcgcagtgaacagtactggctcagtttaccagggcgtggggatgtattcgattgagggtattccgttcgaaggacgtgccggctgggctacgttcagctatatgggcaagcgttcagaagacacgttcacaaacccattccttaaagcagctgatgctaccgataaggcgaattacccgcaatggtgctatgacactgcatacagcggccagtcatacgcagataacccaaacctaccgtcgtaccacatcttcgatgttgcagcgtgggcaacggcgcgtggcttaactgccgcggataagcttgtcgtagttctgcaacttggcgtcaacgacaggtggcgtggctacgccgcagcggatgtagcagcagctcaggacttcatgatcacgaagttcaaggcagtgttgccgcaatgccgttttgttgtttcgagtcattcaatcggctggacgagtgagcgagattggagcacgtacacgccgtacatcatgcagaaaatcatcaagtttgatggccgtgaggcgcagaacatactgcaagcaccggcgtgggctttcatgtctgcgaaatatggctggcgtgaaacagcagttggaacgctacccggtggagtggtgcaagtggcgctcaacgatgacattcacccgaccgatctcggtgccgcacagtgggctgatgctctagtcggtggggttatcgcggcttggcatctttaa

SEQ ID NO: 428887 - DNA, 240 bp, Serratia marcescens
atgggcagtatcaccctcgccggccggcagatcttcattctcaatgaaaacgacagatacccagaaccacagcagaacagccctccgatgttcgcgatacgcgaagacgaggagcatcagcactggctttatgtttggcataaagggcgctggccgctcgtctcagaaacgccatttgaaacagagggcaaagccgttgatgccgcgctcgcattcgactttgccacgctgtacaaataa

SEQ ID NO: 428888 - DNA, 1017 bp, Serratia marcescens
atggccggcaagcgcaaaaaccccgcggataactggatgccgtctagagtatcgcgcggccggtccgcctatgagttcaagcactcggacggcagaactataaggctctgccctcttgatgcgacgcagtccgccgtctgggtggcatacgaaaaatttaccagtcaaaaagaggataaggtaacgttcaaaactttggctgataggttcctaagctctgctgaatttaccgatttagccttcgactcccagaaggattatcagaaatatgcaaaaaaggtaatgcctgtatttgggaagatggacccgaacaatataaagccggagcacataagaaaatacatggataagcgaggacttaaaagtaaaacccaggctaaccgagaaaaaaccttcatgtcgcgggtattcggttggagctacgagcgcggatatgtgaagggaaatccctgtaaaggggtgaggcaatttaaggagaagtctcgcgagcgctatatcaccgacgctgagtacgatgcagtctatgcggtcgcccctgatactgtgaaggttgcaatggagatcgcctatctgtgctgcgcccggcaggctgacgtacttgcgttaagtcgttcgcagatcctagagcctggaatctttatccgccagggcaagaccggcgccaagcagatcaaggcctggtcagaccgactacgtgccgcggtaacgttggccgacacgttgccgatcaaagacggaatttccagcgtgtacgtgatccaccagcgtaacggcaaccgctacacgcgcgatggatttaatacccagtggcgcaatgcaaagctggcggcaattgccgcaaatcccgatatggatttcgacttcacgtaccacgacctgaaagcgaaaggtatttctgatctggacggttcactgacggataagcaggcgatatcaggccacaaaaacgcgagccagacggcaatttacgatcgaaaagtgaagatcgtgccagtggtgggcaatcagaaaggatga

SEQ ID NO: 428889 - DNA, 225 bp, Serratia marcescens
atgcgaaacgatcacgacataatcacgaaagaagagatgattgagttgaccggtcaccattataagtctaaacagtgtgacgctctccgccgggccggaatattttttattgaacgccctgacggtcacccaaaaacaacatgggggcatttccttaaccccgtaaaataccgtaacgaaccgccgaaacctgtggcggaagaaccagatttcgaggcgatgtaa

SEQ ID NO: 428890 - DNA, 2169 bp, Serratia marcescens
atgcctatctacatttcactttttgagcctaagaaaaaggcccaggttaacggcgccgtgccgctggtgatcgcgttggacgcgccaaacaagcgcgcggccgaaagcattgccaccggcaaactgtacgaagcctacccagagggcggcgacaacttcttcaatccgaaaactgtcgaagatcagaccgggcaccctcgtccggctgtaggtcagtttgatgaaaagtttgccgctgagaacgtgtttgacggcaacgcgtggacgccaaaagagccagagccggaagtgccggccggccctatcgacctgatgacgcagcctgccaacgttcggatcgcggccgttgtgatgtacggtgatgccgagatcgatgacagtcagttatcgctggttgtagatttgctcaatgacgaggaaacgccagatgataccggcatgcgcgcggtgatcgacgggcttgtatccgttcccgctgtcggcgccatgtaccccgcatccgtctacaaattggtttcagcactgttccaaaactctactaccatgccgaccgaagaagccaccaccgcattcgcgcaggcgtgggtcgacaagcctgacgatcgcgaaaacctcacgcagaacagcaccagcaccagcaccagcaccagcaccagcaccagcaccgacaataccggcggcgcggccgactacaacaccctgagcatgcatacggcgctgtcgatcatgggtgtcaatcctgctgaggcgaaagcggcagatgtgaagaacgccaaagagatcatcgccaaccgcgataatgcctggcgtgcatgggacaaatcactgcgtgtgatcgtcggtattcttaacgtcgagaccgatgtgcgccacggcatcatttccgacggtctgaaaaatctcaagctgatcagcgacgacgccgaacgcctgcactttgtgaaatcccgccttgctggccaccctgcatgcggcgaactggcgaactatggcaagggcgacgagaagccggtcgaggtggccaaccttggcggcggccgcttctcaatcgacggcctgatcggctgcggtgagcagcagcatgcggagaccagcccggcgcaatctgccgcctcaaatcagggtgaaaaaacggaagtggcgcagcagcaagttaccgacgccgcggcagcgcaggccaaacagcaactggatcagatgggctatagcgtttacgccaacgcgccggcggagaaatccccgcaactgcagcaggcggaagaaaacgccgaccgcgccgaggcactggtgcgtcagctgaaatccgacgatttccaacagcgcgccgtgcaggttgagcaggtaatcgctgagcaatcggcagaggatggcgacaacctcggcatttggaaccgcgtttataagaccgacgccaagtttaccaaggcattcagcaataacggtggcggtacatcgatcaacggcacctacatggtgatgcaggccaccaaagtattcgggccgcagggcactggctggggtgtggaaattatcgaagagcgctacgacgatggcgccccgatcatgcgatcggtgaagcagcaggacgggagctttgttcaagagatcattccgaacggtgccggcggctatctgtgtgaggtaaaccacaccgtgaaaatccgcctgtggtacaagcgctgcggtaatactggtgaggtgtttgcttatggctgcacgccatacgtttacaagagcaggatcgggccaatcagcgacggagaagcgccgaaaaagtcactcaccgatgccacaaaaaaagccctgtcgcaactcggcttctccgccgacgtgttcctcggcctatatgacgatctggcctaccgccaagagaacgatgccgagtttgcgctcaagaacgccagcgagaaagccgggggagtaacccgcatgcgcgaagagctggacgagcatcttggaaaagtcgccgacaccctaaatggcgcggttacagctaacgaggcgatcaaagttcacggttctgttgcccgtgagattgaagcccaccgcaaggccgccgaaggtaatggcgataaagagtttgcccaatacctgtccagccgcctgcgccgcctgacagccctgaaagatgaacgcatcgccgcattgaccgaggagaaaacatcatga

SEQ ID NO: 428891 - DNA, 279 bp, Serratia marcescens
atggatatcgaaacccataacctgaccgccgagctggcgctgtggcaacgccatgatgaagccggacagcgtgaccaattcgaagccgcagcgacgcacggctattccgacgaggcgatcgaggtgttcacccacatcgacggtaccgccgccgacacccgcgaccgcctgctgatggccgtaatgatggcaacgcctgacaccctgcagcagcgccagcgtgagctttacagctggtattgcgacaacgtgaaagccgtagcgcgcgagaagttttaa

SEQ ID NO: 428892 - DNA, 318 bp, Serratia marcescens
atgaaagcactacagatacccgtcacgctctacatccacgcgaacgttagccagttcacacaagaaaaaatctccgtattcaccatggacatgtcgcagttccctgaatacgtgctgcttgaaactcgccaaatccacgtcgatgttaacgaaccagagccgatcgacatcatcgggagacaggtcgaagcgttgcagctggaaaaagcacggctggacgattctacaagcaagcgtattgccgagatcgacgatcaaattcagcagctgctatgcattgaacactgccctgccgacgccgacgaactcccgtactga

SEQ ID NO: 428893 - DNA, 198 bp, Serratia marcescens
atgtttaagcctcacggggcattctttaaccgggattacgccgtcaaccggtttcactgccgtgacagggagggttacttgccgttcgccttctccaaaacacaccggctgacgccgggcggcccgtttcgaatcaaattctttgccgtgtatcgcccggccggcggaactgtttctgaacaaccgctgcagggttag

SEQ ID NO: 428894 - DNA, 234 bp, Serratia marcescens
atgaagctcaaaaaataccttaaagagtccggcgtaaagcagcaggattttgctgcacttgtcggtaagacccaaggctatgtaagccgcgttgcaaccggcgaatgcctattgggtagccaagccgttttgggatgggcagcggcaacgaaataccaagtaaccccacatgacctgaggccggacatttacccaaaaccgacggatggtttgcctgaacagactgcagcttag

SEQ ID NO: 428895 - DNA, 453 bp, Serratia marcescens
gtggaaaacatcgaaattctgaaagacgaaattacagcctgggcggctgagcgaggacaggaacatgtggcaatagagattagccgaatgtggttcctgtttggcgcagaatcggaaacggttcgccttcacccgatcgaggatgatttcggtcgggcagattggcgcgccatcaacaacaaccgccagcagattttccgttggctgcgtggtgagtctaaggctgcccgggcgaaggtgcgagagctggccgacgctatggccgcggcgctgccggctgaacggcgcgccagattgggcggcgtgtccgtgcagtatttactgtcggtggccatacgtgagtttgccgcggcggtgatcgccattttgcttggcgcctgcgatacccctcaacggatagcgggggcgctaaacgctctgcaagatacccagcgcctgaccagcgcgcagtaa

SEQ ID NO: 428896 - DNA, 219 bp, Serratia marcescens
atgcaaactgatcacatcacataccggaatggctggcgcctcaatggcgcacctgccgacgccgcagagattagaccgattttcgaagatcgccaggctgccgcgcatgctgtctgggagcaatacgagcagcgcaaggccgcactgcgagaagaaaacctatcgccggagcagtaccaggacgcgtgccgccagcttgcggactcgctggggatctga

SEQ ID NO: 428897 - DNA, 291 bp, Serratia marcescens
atggattatcaaaaaatcctcgaaatctatcacgccaagctgccggaaatgccatcggttcaaatcctgacagacgcacgcaagcgcacgctgcgcagcttctggaagaaatttaaattcacggaaacccgctgggagctgtacctgcagttcatcgctgaaaattgccggtggatgctggaagaccggccgaacggccgcggtggccagtggcgccgtaaaaacttcgactacctaatcactgagcgctgctatgtcgccgtgaaagagggccgcgccgatgatcgataa

SEQ ID NO: 428898 - DNA, 492 bp, Serratia marcescens
atgagcactacagaattaattttcgcgaaaaaaccgggcgcagaagtcatcgatgacggctgcgatcacacagctctgattatctggcgcatgaatgctaatgcccgggctcgtacaggatcgacattcgtcttgccgccagttcctgaacaggttgtgcctcccaagtatgccaaaacggcgaccaaagccgataaacgttcagtaggcaagagaaaatcctcaaaagtcgatttccccactcgcaacctggcggcggtaatgatgggtaagactctgacctatcgcggcatcatgacggccttggatacttattacccagaacatggcctgacgcagcgacacctgcagacccgtatcctgacgatgatcaactcccctcatgtcgaaatcacccgacacgaaaaaccggtaccggaatttaccctcactcacgttgacgggcagttctacgtcaactctgagaaccagcagcatttagcaagagggtga

SEQ ID NO: 428899 - DNA, 246 bp, Serratia marcescens
atggccgggcaatcggattatctaccgcccggcctgccattcaatcgaggggcctggacgcaggaacaacgcgatctagagcagttcgacctgcgagcctgtggcctgatccgcgatttattcgcgcgcaagatcacccgcacaaaggtgctggtggcaattgaagaggcgccggagcaataccgggaacatttcagagcacgcttgaattactggcgtgagcgcagcgagggaaaggggcaatga

SEQ ID NO: 428900 - DNA, 522 bp, Serratia marcescens
atgccagcaaatgaactgagcctcgacggcaaaagcattctggatatgtgctgcggctcccgcatgttctggttcgacaaagaagacgagcgcgctgtgttcagcgacaagcggagcgagagccacaccctgtgcgacggcagaaagctggttatctctcctgacctgatcgccgacttcaccgcgctaccgtttgcagacggtagcttccctgttgtcgtgttcgatccgccgcacctggagcgcgtcggccccaatggctggcaggggaagaagtacgggaaactcgaccgtgaaacatggcgcgatgaactgcgtgccgggttcgccgaagctttccgcgtgctgcggccacacggcgtgcttatcttcaaatggaacgaaacccagataccggttagccaaatcatcgctctaacagacgagaagccggcgatctggcaacgcaccggtaagaacgataagacgcactggatcatcttcgtaaaatcgagcaaaacagcaagggaattgaaatcatga

SEQ ID NO: 428901 - DNA, 1860 bp, Serratia marcescens
atgagcatttggccaacagaggttcagcagtgcgcgtcgtcagtgttgcctgttcatgcgttgagcggtgaagaacagcagggtgtcctgcagaaaattaatcagatgttcctcaaccgcgtcagcccgcaggaaatccagaaaacggcgcacgcctgggcgcgccagaaacagatcgttgatttccgccctgatgtggaaaacgggcttgttgttgtcgggtttgccggcggcggcggcagctgcgagggcatcaagcaggcgctgggcttcgagccgcatatcgcgatgaaccacaacccggtggccatggccatgcatgccgtgaatcacccgcacacgctgcactacccggaagacattttcagcgttgatccgaagatttccaccggcgggctgccggtgctgctgggctggttctctcctgactgtcgccatttttcgaaagcaaagggcgggacgccggtgaggaaagagatccgtggtctcgcctgggtggtgctgcgctgggcgttggcggtgcggccgcgttacctgatgttggaaaacgtcgaagaattccgctcatgggggccgctcaaagccgacaaaaaaggcaatctgttcccggatccagcgtacaccggtgaaaccttcaaggcgtttatcggcatgctgagcagcggtgtggctccagattgcccggcgctggccgaggcatgcgaattcctgcaggtcgatgtcgatagtgacgatgcccaccgcctggtgtccgggctaggctataacgtcgatcataaagagctgcgcgcctgcgattacggcgccccaactatccgcaaacgcctgtttgttgtcagccgctgcgatggtgaagccgttgtatggccggatccgtcccatggggcgccggacagcgccgaggttctggcggggcaactgcagccataccgcaccgccgccgagtgcatcgactggtcaattcccacacgcagcatcatgggccgcaaaaagccgctggcggacaacacgctgcgccgtatcgtgaaagggttgaaacgctacgttatcgactgtcccgatccgtacatcgttcaaatcgggcaaacagggttcggtggagatggccggcagtatgccaccggcgcaccgctcacgacggtcacaagcaaagccgagcacctgctgatcgagccgttcgccgtgaagtgcaatcacacgtccaaccgaaccaaagacgattgcttccggggccagtctggccgcctgcctctgcaaacggtcacgcaggtcgatcaccactcgctttgtacgtcgcacctggtgcagctgcgcggcacatgcaaagacgggcggccgacgaatgcgccagcgccaacgctcaccgctggcggcaatcatattggccacgtgactgcgtacctgcagaaatactacggcaacgagaaagacgggatcgacgtcgacgcaccgatgcacacggtaccaacccatgatcgcttcggcctcaccgaggtgaaatgcgagccaacgctgatcaccgacgaccagcgttataacgcctggtgctgcgcgcgtttgatggacgaattcagcgacgatccagacgacagccacttgttcccggcgccacgcccgcagtttatccaggtcggcgaatacatggttgtcgatatctgcatgcgcatgcttgaaccgcgtgagctgtataacgccaacggcttcccgcgcagctatatcatcgatcaggacatcgacggcactcgttggcctaaatcggaacaggtggcacgttgtgggaactcagtgccgccgccgtttgctgaggcgttggtgcgggcaaacatgccgcaatattgcgtatgggagatggccgcataa

SEQ ID NO: 428902 - DNA, 594 bp, Serratia marcescens
atggcgcagtattcgtatacaaagacagcaggaaatttactggtgccgaccactcgggaagccagggactttttgcaatcaaagaagatcggctccatcctttacgccgatttcaaacaggcccgaaacccagcctttcaccgtaagtttttttcactgctgaatctcggttttgattattggcagccgaccggcggtaccatatcgccagcagacaaagcactggtgaacgggtacgtaaaattcctcgcgtattacgccggcggtgaagatgcgcttcaagcggccgccgatgaataccttgcggatgtcgcagaaaagcgggccggcaacatcagcgccgaaaaatccttcgaggctttccgcgcctgggtaactattcaggccggattctacactgaattcatcatgcctgatggcaccaaacgccaagagccaaaatcgatctcattcgccaaaatggacgatatcgagttcggtgagttttacaagtctgtcctcgacgtgctctggaactacatcctgttccgcacctttcccgatcagcaatcggcagaaaatgcagccgcccaactcatggggtacacctcatga

SEQ ID NO: 428903 - DNA, 330 bp, Serratia marcescens
atgcctgacaaaaaccccgatgtgtgggggcagttgctcgcatggcttgctgcccacaaggagggcggcggctatgcggccacggctgcgctaatggcgttattgcgcagcgcgtacgttggccagcaaggatggacgcgccgactaattgacgccgctatgtgcgcgatggtcgcgtatttcatcaaagattgcctggctgcgatcggctgggattccacatacgcctatctcggcagcatgtttatcggctatgccggcgtcgactatttcggaaatatgctgcgccgcatcgccagcaaccgaactggctccccacgacaggaataa

SEQ ID NO: 428904 - DNA, 624 bp, Serratia marcescens
atgactcaggatcaattcaaagaggcggccggtattggcgccggactggccgcgcgctggtttccacatctggaggcgacgttcgccgagtttggcatcacctcgccagtggcgcaggcaatgttcattgctcaggtagggcatgagtcggccggtttcacagcggtcgcggaatcgttcaactacagcgtggccggtctgcaatcgacctttggcaagcggctaactgcggagcaatgcaaaatgcttgggcgccagcgcggcgaatcggtggtgccggtgaaccgccaggcggcgatcgcgaatctcgtctacggcggccgcctgggtaacaaatccacgggggacggttggaaataccgcgggcgcggcctgatccagatcaccggcgccgacaattatcgcgcctgcagcgccggcatcaaaaccgatttgctgttggtgcctgacctgctggaaaaagacgagtacgcgatgcgctccgccggctggttctggaaatcgcggaattgtggccagtacgccggcgacgtcgaacgggtgacgctgctaatcaacggcggcaataacgggctggcagaccgcaaagaacgattcgagcgtgcgcgccaggcactggcatga

SEQ ID NO: 428905 - DNA, 387 bp, Serratia marcescens
atgagtggctggatctcaaaactggccggcgggggaatgttgctcctgctggtggcgtcaatctgcctgggtggctacagctcgctgttgtcgcaccggttggacctggcacgccagcaggctgcagaacagcagaagacgctggcgcagcaggcaggactgatcaccacactgcgcgcggatgacgcccgcaatcgcgcaatgatggccgaacagcaacggagagagcagcagctgcgccagcagggcgaaaactaccagaggaaatatcaggatgccattaaaaatgacgagtgcgcccgccgcactgctcctggtgctgttcttggcctcctgcgcggaacggacaccacagccgccggcgccgctcgtgctgcttccccctga

SEQ ID NO: 428906 - DNA, 1308 bp, Serratia marcescens
atgatagcgccgacgcttaatattcctcaggcccggtttttggcgatgccgcacaagttcaaagcctacgtggccgggttcggttcaggcaaaacgtgggtagggtgcggcggtatctgcaagggcatgtgggagttcccccgcattaaccagggctactttgcgccgacctatccgcagatccgcgatattttttacccgacggtcgaggaagtggcgcacgactgggggatgcgcgtccagatcaacgagagtaacaaagaggtgcatttctacgccggccggcagtaccgcggaacgacgatctgccgctcgatggaaaagccggaaactatcgtcggttttaaaatcggtaacgcgctgatcgacgagctcgacgtgatgaaaaaggagaaggcacaaaaggcctggcgaaaaatcatcgcgcgtatgcgttacaaggtggacgggctacgcaatgggattgacgtcaccacgacgccggaagggttcaaattcgtttggctccaattcgtcaaagaggtacgcgacaagccggagctggcgacgctgtacggccttgtgcaggcgtcgacgttcgacaacgaaaagaacctgccaccggactacattccctcgctgatggggagctatccgccggagctgattaaagcctacctgcgcgggcagtttaccaacctgacgagcggcaccatttaccaccagttcgatcgccgcttgaacaactgcgacgaggtggagcagcccggcgagccgctttatatcgggatggatttcaacgtcggcaagatggccggcatcgttcacgttctgcgcctggggctgccgtgtgcggttaacgaaatcatcaacgcgtacgacacccccgacatgatccgcatcatcaaggagcgtttctggctctacgacggtgccgattatcgcaaggtgcgggaaatttacatctacccggatgcgtccggtgattcccgcaagtcgaacaacgccagcaaaacggatattgcccagttgcaggatgccggcttcaacgtgatagtcgataacgccaacccgccggttaaagaccgcatcaacgcgatgaatgcaatgttctgtaatgccaacggcgaacggcgctacaaggtcaacgtggcacgctgcccggtttacaccgaatgcctcgagcagcaggtgtgggatgaaaaaaccggtgagccggataaaaaatccgacaacgaccaccccaacgacggcgccggctactacatccacaaaaccttcccgatcatcaagccggtgaccaacctcaacataggattcgcatactga

SEQ ID NO: 428907 - DNA, 1419 bp, Serratia marcescens
atgtccacgcaaaacatcgattatcgccacccggcataccgcgagtttctgcccgagtgggagctcgtcggtgactgcgttgatggtgagcgaaaaattaaaaagcgcggcaaaaaatacctgccgcaccccagcagtgacagcgtcaacgacgacccgcaggatatccgctacaaggcgtataagcagcgggcgccatttatcaatgcgaccgggcggacgctctccggcctgctgggtatcgccttcaacaagccggtaaaaatcacgcttaccggccgcgttgcggaactggaggcggacgccgacggcgaggggcaaccactcacgcagctgatccgcgatggcgtcagccagaacttacagcgggggcgcgccggtatcctgacggactacaccgcctccggtagccagacgctggcccggcttggccggccaatcctgcgcctgttcaccgccaaagaaatcattaactggcgcgtgaccgccggtaagacgtcgctggtggtggttcactacgtcgaacccgtggacgacccgcagaatttcgagctgttgctgcaaaaggtgtggatcgagctgcgcctggttaatgggctggcgtatgcccgccgttggcagcaaagcgccgccggcatgatggagggaaagctggtcgaactgagagacagcgccggcaagcagcttacggagttgccgtggtcatggattggctcgagcaacaacgatcacacccccgatgcgccgccgctggctgatatcgccaacgtgaacgttaagcactaccaggcggaagcggatatcgccgagatttcgcacctcaccgggcagccaacaattgcagtaggcggcctggatcagcaatgggccgacaaatatctatcgagcggcgtccgagtcggttcaacgaaaggcatcctgctacctgataagggtgtgatcagcattgttcaggccgaggaccgaaacctgccgctgacggtggccgaacgccgcgaaaagcagatggctatgctgggcgcgaaactggtggagcgcaacacctccgcccgtaccgcaacgcaggccacggacgaggcacagaccgataacagcatcctgtccctgtgcgtcggcaacgtggagcaggccatcaaccgggcactgacattcgcggtgatgtttgccggcagcggtgaggctacgatcgagctgaacaaacgctatgaaatttccgcgctggattccgcggcgctggcggtactgatgcagatggtgcagtccggccagatgctgctggtcgactttatccgctaccagcagagcatcggcctgattgaccagagcatgacgccggaagaggtggaggatttgctgcgcaatcaggcgccggacctgactggaggtggacgtgaggacgataaacagccgcctgcttga

SEQ ID NO: 428908 - DNA, 1113 bp, Serratia marcescens
gtgaggacgataaacagccgcctgcttgatgagacgctcgcgcacgcgctgtttgtctctcgctattcgaccggcgtcgcccggcgaatggtgaaaattctcgaccaggcggacgccgagctttcttcaaaattgctgatggcgctggatgacctggacccgcagagcttcactgttcgccgccttgattcactgctggccggagtgcgggatatcaaccggcaagtttaccagcggctttacggggcgctgagcgacgagcttggcgattttatcgggtacgagggcggttttcagttcagcctgttcgactctctgctgcccgacctggtgaaacagcgttacccgcttatcagcctgacgccacagcaggtttacgctgcagcgctggcgcgaccgtttcaggggcgtttgctaagtgaatgggccgacaagctggaaagcgaccgattacagcgcatcagcaacgccgtgagccagggttatctgcagggggaaacgacagaccagatttatcggcggatccgcggcacccgcgcacgaaattatcaggacggcgttttgcaaaccggccgggccaatgcaaccagcgtgataaaaaccgccgtcagccatatggcggccgtagcgcgcacggaattcgcccaggccaacgccgacgttatcgactgcaagcaatggctggcaaccctcgataacaagacgacgccgacctgcatcgtgcgcgatcgcctgcgctacacgctggacaacaaacccatcggccacaaggtgccttatggcgcaggcccggggcggatccatttctgctgccgttcggtggaaacgctggtggtgaaatcttggcgagccctgggtatcgatgccgatgaaatgccggcgggcacgcgcgccagtatggatggtcaggtgccggcggaaaccaattatcgggattggctgcagcggcagccctaccggcgccaggtggaggtgttgggcgaaacccgcgcccgcctgatgcgtgacggcggcatgcggccggcggaattcttctccgacaagggggagtggctcagcctgaagcagctgcgagaaattgacgaacgggcgttttcggacgccggactatag

SEQ ID NO: 428909 - DNA, 738 bp, Serratia marcescens
atgcccgcggcctggggccgcaacatcacaacggggttgatgatgaaattcaaaatcacgaaagacgagtacaacgcgctgaatgtcgtgcaaaaggcgctttataaagagtccggcgacggctaccaggtgcagatcgaaggcatgcccgacacgtcagaactcgacggcctgaaaaagaaggtcgacgagctgatgaccgaaaagaaaacggagcaggcagcgcggcgtaaggccgaggaagacgccaagaaagcggcggaagagcaggccaagaaaaacggcgacgttgaggcgctggaaaaatcctgggcgcaaaaactggccgacgccgaagcgaagtcgaaagcggaaatcgcgtcgctgaataccagtctgcatggcctgctggtggacaacgtggcgcagaaactggcgactgaattggcgggcgacgccgcgccggtgatgctgccacacatcaaatcacgcctgtccattgaagaaaaagacggtcagcacgtgacgcgcatccttgacggtgccggcaagccaagcgcggccagcatcgatgagctgaaaaaagaattcgtcggtaacgcggccttcaagggcgtgattatcggcagcaaagccagcggaaccgggggtaacggtggcggcaaccctggcgccgggggcggcgggaatggaaatggcgacaacccagattcactggtgagccgtgcacgacaaattatcgaaaacaatcaggagtaa

SEQ ID NO: 428910 - DNA, 963 bp, Serratia marcescens
atgtccctcattatttttcagcagcaagtttctaccgccgcgactgagctggtggatcaggaagtgcagaagtttaacgccgcctcgggtggcactctcattttgggtaacggcgatcacatcggtgatttcatcgaacaaaccagctggcagttgattggcggtctcgcacagcgccgtaatgcgtacgcggataaaaaattaacgccggatgagctgggccagctgctggatcgcatggtgaaagttgatgggcgtattggtcctgtcagcgtcacccctaccatgatgaagcgcctggggaaagacgtctcagaggcggcagcagttgttgcagcacaggcggctgaggcgatgattcaggactacctgaacaccacctgcggcgcactgaaggcggcaatttccaccaacaacggaatgatcaccgatctctccggtgccgccggcagcgcggtaaagccgtcactgcgtggcctgaacaaaggcgccagaccaatgggggatgcgttctcccgactgttggcctgggtgatggatggtgcaacgtacaacgacttcatcgatgaggcgctcaccaacgccaacagccttttcaagatcggtaacgtgaacgtgatgcaagatggcctcggccgccgtttcatcatttccgatattccggccctggctgatgacaacttgcagcatgtgctgggcttgacctctgccgccgcggcagtacagaccacgccgctgatcatgaaagcgcaggacgttctgggtaatgaaaacctgaaagccctgatgcagggcgagtacgatttcactatcgggctgaaaggctatcagtggaaaaacgataacctcaagtcaccaacggacgcacaactgaccaccggcgcaaactggaacaaggtgcgcaccagtaacaaggataccgctggcgttatggtgaccttcggggagaaagccgcaaagtaa

SEQ ID NO: 428911 - DNA, 489 bp, Serratia marcescens
atgctgataacggatcccgcttcgccggatttcaacagctacgccagcgtgcgggatgcgcgtgactttgctacgacgcgcggctattcgttgccggacgatgacagcgaatgcgaaacgctgctgatgcaggcgatggactacctggcagggcaaagctggcgtggttcccgttcatcgccggttcaggcgctgccgtggccgcgctcaggtgtgattgtggacggtgtaccgctggccagtgacaaaatcccgcgccagctgatccaggcacagtgtcgcctggcggtagaagcgcaggaaaccgagctgacgccaagctttgccggtggcggcgaagtggtagcggaaagcgtctccggcgccgtggcggtgcggtatgccgagggctcaagcggaaacgcgccgtatttctcatggttggccggcctgcttaatgggctgctcggcgggggcggcggcattaattttgacgtaatgcggggctga

SEQ ID NO: 428912 - DNA, 351 bp, Serratia marcescens
atggcaatcaactatacccggatgcgtgccaccgccacacggttgcttaccgagaacgggcaaaagcgcgtgctcacccggggcgggaaagtgacgcgggtaaacgggaaagaggtgcgattacccgacgaaaaggcggacgtgatcggcgttgtgacggaatacaagccgggagaaattgacggcacgctgatccagaacggcgatgtgctgttggtggcaacctaccagacggaaatccgtatcgatgaccgcattgagatcgacgggaaaaaatatcgcgtggttcatccgcatccggttaagccggcagcagtgctgatctgctaccgcgcacagctgagggcatga

SEQ ID NO: 428913 - DNA, 585 bp, Serratia marcescens
atggcagaaaacgacgcgttcatgcaggcgatcaccgccttcgtggacaaggcaaaggccaatcaggcgcaggtagtccgcgcaacggggatccgcatcctcacgcaactggttcagatgtcgcccgtaggcaatcccgacttgtgggaggtgaacgccaccgccaaagcctataacgacgcggtcgcagaacacaatgatgcgcagcgcaacgatccggccaacctgacaccgaccgggcgcctgaaaaagcgcgccagggtatccgacagcatggatatcaagacgcctgccggttataccggcggccggttccgcggcaactggcaggtggggttggatgcggctccgcagggtgaaaccggccaggtggataaatcgggcggtaaaacgctggccgccggcacgctggtgatcgagcgttttcgtgtcggcatgcaggcggtgtacttcaccaataacgttccctatgcctacccgctggagtttggtcactcgtcgcaggcgcctggcggcatggtgcggatcaccgctgccgatttccagcgtcatttccaggccgccgtttcggaggtgaaatcgtga

SEQ ID NO: 428914 - DNA, 420 bp, Serratia marcescens
gtgagtcatacccgcgtagccgaactgctcgaagcgcgcctgggtgaatgggccgatgctaaaggcgtgcctgtggtgtgggagaatatcgcggaaaatccgccggatacgctctatcttcaggcctacgcgatgccagcgacgacgacgacaatcgacctggccgaaaagctgcaggtgctgccgggcgtttggcagatcaacgtcgtggcgaaggccggcgacggcgtaagcgtcaatggcgcccgtgcgctggctgatgaggtggccgctttgtttcctgttggcctggcgctcagcgatggggggctcacctgctacatcagcacgccgccgacggtttaccgtggcatcacgtcagacacccgctattccatccctgtatcaatgtcgtacagagcgcatgtgactttgttataa

SEQ ID NO: 428915 - DNA, 651 bp, Serratia marcescens
atgcgcaatcattatgctgttggtgaaaaatatcaccgctggacaattctttcagatgctggattcaattcacacgggcagcgcatggttctttgccgatgtgattgtggtgtggagcgaattgttagagctgcaaacctaaagtctgcaacgcggtcatgtgggtgcctgaataaggatataatcacaaagcacggcttggaaaacacaccagaatatagcagctggaatcagatgattaaccgttgccacaaccctaattatcctgggtttcatgaatatggtgccatagggattaaagtatgtgatgcttggcggaatagccctgttggtttcattgaccatatcggaaagaaaccagatggggatttttctgtagatagaatagattcgacgaaaggttatgaacccggaaacgttcgatgggccagcaagtcggaacaatgctacaacagaagaattcaacaagggaaaacgagccgatatcgcggagtttatttgcacagacaaacaggtaagtggattgcgcatatatcaacatcaacaggacgccaatacttaggaattcataattccgaagaagaagcgtattcggtctatgtcgctgcttatataaaagagcacgggcatagaccaccgtacgaaatttaa

SEQ ID NO: 428916 - DNA, 657 bp, Serratia marcescens
atggcttttaacttaccaaacggcgccacggttttcgctggttccaagatggcggcagcgctgccaacatcggcggttagtaacgccaagggcgcggtgtttaccgtggcaaatggcgcactggccgccgatgacattgtgctcattaaatcaggctggggaaacatcgacaacctggttgccaaagtgacagcggcgacggcaacggcggtgacgatcggcgcactggatacgtcgaataccaaatttttcccggcgggtggcggcgctggcgcgcttatcaaaatcaccgaatggacgcagatcccacaaatcaccgaggtcggggcgtctggtggcgatcagcagtacgtgcagatccagttccttgaggacgaccgccagcgcaacctggcgacgtacaaggcagccaagacccagacgtttacctttgcgcatgattcaacgctgccgatttatagcgtcctgaccgctgccgatcgcgttggcgacattctgccgttttacatgtacgtgccgacggcgaaagaaacccgctattggtccggcacgccatcctttgacccacagccggcaacggcagtgaaccaggtggaaacggtgcaggtatcgatcgcggtacagtcccgcacgatgacgttctacaaggacaagtaa

SEQ ID NO: 428917 - DNA, 354 bp, Serratia marcescens
atgacagcaaaatttaccctggtcccaaactcgacgtttaaaaaagacgtcacaatcccgcgcgcaggcgcagaagatggtgtactgacgttcacgttcaagcataagacccgcagccagctggaagcgctggagaacaccctgcgcgaggcgacggaaaagcagattgaggccggcagtcacggcagcgcgccgatggtggcattcatcgaggaaatcgccgccggctgggcgctgcctgacgagttcaacagcgagaacgtgctggtgctgctggaaaactacccgcgtgcgttcgactccatcgccatgacctacacccgcgagctgatggcgatccgtgaaaaaaactaa

SEQ ID NO: 428918 - DNA, 204 bp, Serratia marcescens
gtgctccccgacgtgtggccagtgttcgaggtgttccgagcaatggcgacgcaatggcgtaccggtatgggcggcgtcaccgggttggattacaactgcctgccctgggtgatgaaattgtacggcgtcgacgatgaggcaaccgcgttaacggatatcagggtgatggaagccgccgcgcttgccaccatccataaaaaataa

SEQ ID NO: 428919 - DNA, 363 bp, Serratia marcescens
atgaaatgcgatttaaaacttggcgtaaacgtcgacgcctccgaactggataaagtcgaggcacagttaacgcggatcgttgatttgttggacaggataaatcaaccgagaaaaatttcattttttgatggtgaaggggcgttgcgtcttgttatttccccgtttgttgttgaacaaaatcatgtgctgataaacgatgccagcattgattcggcgaaaatttccaatgcgattattgctaaggcagaaaccgttaaagcccaagatgacgcggtgaaaaactcgattcgcgaagcggttgaagagtttctggataaggcaagtagacccggcggcgcaatttggcgggcaattaagtcctaa

SEQ ID NO: 428920 - DNA, 2997 bp, Serratia marcescens
atgacagacattgcatcgatctccctgcgcgtcgataccggcgacctgcagcgcggcaacagcgagctggataaattccagaaaaccgctgcaggcggcgccggcgcggctgacggtttcaatgcctcaggcaaagagacggccaaagtatcaaaagaggtggcgcacgaggtcgaggaaacgcacaaacgggtagcggaatacagccgccgcctgcgcgagagccagaccacggcgacggcatccggccgggcgcaggaccaactgaccgaatcctacttccgccagattgaccggatcaagcagctcggcaccggcacgcaggaattgcgcgccattcagtcgcaggtgcgcgccgcccgcgccgccggcaacatcacgcaaaacgactatctgacgctcaccagccacgccgcggaaaagatgcgcgagctgaccaaggccgaagaggcatcggcggccgccaaatcgatcttcatccaaaagttgaaagaccaggtggcgacgcagagcctttcgcgggaagagctgctgcgctaccgcgccgcgcagttgggcgttggttccgcagcggacatctacatcaaaaagctctccaccgctggcgatgccactcataaattcagtttgcagacgtcggccgcccgccgggagctgggcgttatgctcggagagctggcgcgcggtaacctgggcgctttgcgtggatccagtatcaccctggcgaatcgttctgggttgctcgagcagcttatgtcaccgcagatgctggcggtgggaggagtgcttggcggcattactgcggcgttgtatggcttataccatgtgtatgacgtagcagaacaacaaagccaggcattcaacaaagcggtaatcacgacaggcggcgtttccggccagagttccgccagcctgaaaaacctcgcgtataacattggacaggctaccgggaactatagcgacgcagctgaagcggtgacaaagctggcggccaagtcggtatcttcagctgttgattttcgtcgtagtggggaagcaatagtcaattattcccgctacagcggtgaaagcatcgattcactggtagatcagtttgcacagctttccgacgatccccgcggtggtattgaggcgctcaataaaaaatatcactttctgacggcggcaacatatcaacagatttcggcgcttgtcgatcaggggaagcaaactgatgctgttaggatagccacggatgcgctcagcggttcaatggatagccgcgcgcaggaaattaaggagagcatgggcacgctgccgagcctttttgacagcatagcgatggctgcgaaaaagatgtgggatgagatcatgagcattggccgtgatccgtcccaagcggagcagatggcggcggcggagttgcggttaaagtctgcccaagaaatggcccgacgccttgaattgcaaggtaaagccgtaccacaaaaatatactgacattatccgcgagtctgaggctgaaatcgctggcatcaaaaaggtgacggcggagaaagaaaatcagcgcaaggtcgatgaggatggtatcaagtcccagcagacaatgaaccggctggtggaatgggggcaaactcaggcagaaaagcgcacccgcgaggaacgggagcttaacaaggcgatcgaggcgaatcgtaaggcacacgaaaaggatgccagcgtccagttatttacggaggcgcagatagccaaagcgcgagctggtattgctgaaaaatataaagacccgaaaacaccgaagggacgccagtacacggcgccggccggtgatcgagccgacgaaaaagcgcaggctgatttgttggcgctccaggctcagctcaaagtgctgcaggaacatcgcagcatcaatgacaccatcagccaacaacgcaaggatttgtgggcggagcaggcgaaatttgccgttctggagcaggcagccgataagcggaagctgactgcgcaagagcaatctctgctatccagcaaagatagcgtgctggcgcaaaaggaacggctggcggttctcggcgacgagatcgccaagcaggagcggcttaacaaacttcaggatgcctcgtccaagtatgtcactcagatgagcgagaagcgtcaggcgctgcgtgaaagcgccggcttgagcgatcgggatgcgcggcgccgcatggaagaggcgcagctcgcgcaggggtggcagaatcagggcggtagcctgcaagatgatggttacaagcggcagctgcaggcggcacgtgatttttacaccgaagaagacaagctgcgagccgattggaaaaaaggcgcattgaaaggctggaacgaatatctggactcagcgaccaatgtctattcctcagtcgccaatgtcgccaatgctgcattcactgggctgagcgacacgcttaccagccttgcgacaaccggatcggccaacgttaaaagtttcggcgtctctatgctgaaaatggtggtggacgtcatcaacaagctattggtggcttacgccgttcaggcggctatggggtggattggtagctcgctcagtgcgccctctggcggcaataaccccggcgcagttccaatggggttgcattacgacggcgggtataccggtgacggcggcaagtacgagccgaaaggcgtcgtgcacggcggtgaattcgtgttcaccaaagaggcgacgcgcaatattggtgttggcaatttgtacgccatgatgcacagcgcccagggttacgcggacggcggctatgttggtaacgcgccaatgcacggtctcacggcggcgggaggcaattcgatcgttgttcatgcgccggtcaccatcacgcaggagagcagcaacggcggcgacgtcagcgcagcgaataccgcgaacacagcccggcagctgcaggggattgtccagaccgaaatcaccgatcgcctgaagcgcgagatgtcgccgggtgggctgctttacgcaccgcggaggtaa

SEQ ID NO: 428921 - DNA, 153 bp, Serratia marcescens
atggtcttcaatagtaatggggccaacgactttaaaatccttatccactaccagaacaaatcgggtttcacgcaactgatccgtccgatacctcccgaaaacacaggacgtaccattatcacttggcaaatactgcatatccgaaaattttaa

SEQ ID NO: 428922 - DNA, 357 bp, Serratia marcescens
atgcatggagaaaagatggcgacagatacctttacctggcgaacgcaggcacagccgacaggctcggagaatatgagcgtgatcgccgttcagtttggcgatggctataagcaggtggccagcagcggcctgaatgccatggctcaatcgtggacgttgagcctgaccgacacaaaatccaacgtagctccgatccgctcgttcctgcaaaaacacgtcataacgtcgtttttctgggtaaacccctggggtgagaaaaagctctatcgggtgaaagcggattcgatttcctcgacgtttctcgccgccgaggtgatcaccttgtcattcacctttgaagaggcctttgcaccatga

SEQ ID NO: 428923 - DNA, 738 bp, Serratia marcescens
atgagtttaacgcaggatctacagtcgctggagccagggcaactaatccagctggttgaagtcgacggcacggcctttggtatggaccgcgtgctgcgcttccatgcgcacaatataccggctgatggctgggcatcgttcgccgccgaaaacatgccatcgatcatctggcagggcaacgaatacgaccctcacccgtatgaatttaaaggcgcagaattgacgagcaccggagcgcagccaacgccgacgctgtcgattggcaacatcggaaactatgtgacgtccctatgcctggcttacgacgatatggttcaggcgaaggtgcgcattcgaacgacgatggcgaaatatctcgatgctgccaactggaaagccggcaaccccagcgcgatgccgaccgaagagcgcgtgcagcttttctacatcaacgccaaaaaggccgagacgcgcgcccagatcgactttgagttatgtaccccgttcgatatccagaacctgcagctgccgacccggcagatcacaccggtttgcacctggtgcatgcgcggctggtatcgcaccggtaccgggtgcgactacaacggcaatcgctatttcaagaaagacggcactccaacggacgatcctgcgcaggatgtttgcggcggccgacggcgcgattgcgaggatcgtcacggaaaagggaatccgctgccttatggtggctttccagcggccaacctgcaggggaaataa

SEQ ID NO: 428924 - DNA, 720 bp, Serratia marcescens
atgcgagaaaaattactggcggccatccggcaacatgtggccgctgaatacccgaacgaggcttgcggggtgatcatcgagacgggaaagcagcagcggtatatcccctgtaaaaacattgccgacaagccgacagactatttcacgctttgcccgcttgactatgctgctgccgaagaattgggcgaggtgatcatggtggttcactctcaccctgatgttgtgcagctcattccctcggagttcgaccgcatccagtgcgaccattcgggcgtggagtgggggatcatgtcctggccggacggtgacttttgcacaatctcgccgcggggggaccgcgcactggttggccggcgttgggtgctgggttatgccgactgctggacgctcatcatggattattaccgccagcatcacggcatcctcttgaaaaattattcggtgccgcgcgaatggtggatcgatgggaaagaaaacatctatgacgacaactggcaggctgaggggtttgtcgaagtgtcgtccgaagctatccgaccgggcgacatggtgatgatgcagatcagcgcgccggtaaccaaccatgcggcgatttacctcggcgacaacaccatcctgcaccacaacttcgggaacctgtcggcgcgggtaccgtacgggaaatattaccgtgatcgcaccgtgcgggtggttcgacacaaggagctattggatgcttaa

SEQ ID NO: 428925 - DNA, 618 bp, Serratia marcescens
atgcttaaaaaaatcacgctcaagggagcgatgggtaaaaagttcggccggcatcatgagtatgcggtcgcggatttgcgcgaagcgttgcgcgcaatgtgcgccaccatgccaggctttaaaaaatacatgtccacggctcacatcgacgggatccgttttgcatttttcagcgggcgggaaaatatcggcatcgaagaattcgacatggccaagggcgccaatgaattcgtgatcatgccgataatcgagggcgccaagcgtggtggtgtgctgcaggtggtgatcggcgctgtggcattggtggccgcgttcttcactgccggcatgtcgatggctgcctggggtgcggcaatgacggccacgacgatatcagccacgtcgattttgacgggcgtcggcctgagtatgatgctcggcggtgtggtgcagctgcttacgcctcagcccagcatgaacgttggcgcctcctcaagtaccgacaacaaacccaactatgctttcggcgcgccggtgaatactgtggcgatggggtacccggtaccggtgctttacggcgaacgggagatcggcggggctatcatcagcgccggcattttctcaagcgaccagcagtaa

SEQ ID NO: 428926 - DNA, 3186 bp, Serratia marcescens
atgagactacttgaagggcaaacggtcatcagtggccgcaaaggtggcggtggaagcccacacactccggtagagcaggctgacgatctgctgtcggtcgccaaactgaaaatggtgattgcgttatcggaaggagaaatccagggcgatctcacggcgcaacatattttcctgaacaatacccctctggcggatgatgccggcaattacaacttttcaaacgtgaagtgggagtatcgcaaagggacgcaggaccagacctatatccagggcatgccggagatcgacaacgagatttcggcgaatattgaagttaaagccgcgtcaccgtgggtgcggcagttctccaatctgacgatcgatgcggtgcgcatcaagctcagcctgcctatccagtaccagtacaaagacaacggcgacatggtcgggacggtcacgcaatatgctatcgatctctcaacagacggtagcgcctaccaaaccgtcgttgatggaaaatttgatggtaagaccacctcagactatcagcgtgatcaccgcatcgacctaccgcgggcaacgtctggttggtctatccgggtgcgccgcattacacctgattcgacgtccagcaaactgatcaatgccttcaaagtgttctcttttgctgaggtgatcgacagcaagatgcgttaccccaatacggcgctgctgtatatcgagctcgattccagccagtttaacggcagcgtgccgaaaacgacctgcaagccgaaaggcaagttgatccgcgtgccggacaactacaacccggtcacgagaacctatagcgggacgtggaccggtaattttaagctggcctacagcaataatccggcctggattttttacgatctggtgctggatgaaatttacggcatgggcgggcgcgttgatgccagcatgatcgataaatggcagctctacagcatcgccgcatactgcgatgaaatggtgtccaacggcgccggcgggaaagagccgcgctttacctgcaacgttttcattcagaaccagcaggacgcttatacggtactccgcgacctggccgccgtgttccgcggcatcaccttctggggtaacgatcagatctacgtgaacgcggacgtgccgcaaagcgacgtcgattacgtgtatcacgtttcaaacgtggttgacggcgtattcacctatgccggtggttcgtataaaaaccggttcagctcgtgccaggtgtcttggtcagatccgcttaaccactactcggacaccatcgaaggcgtctatgattccgagctggtcgagcgctaccgcgtgaatcagatgcagctgacggcgatcggttgtacctcgcagagcgaagcgcaccgccggggccggtgggctattttgtccaatgccaaagacggatcgatttccttcaacgtggggctggatggttacatcccgctgccggcggaaatcatcggtgtggccgatcctttccgtgcgggcagggagaatggcggccgtatcagccaggtcggcggccggaatatttccgttgaccgtccggcaaattatgctgttggcgatcgcctggtggtgaacctgccagatggtaccgcgcagagccgcacaatcagcgctattagcgccgacaaaaagacgctgaccgtttcaacggcttatcggcaaacacctgtgccaggggcggtgtggtgcatcgacagtgacaagctgtcgatccagtattttcgcgtcacgtctatttcagcaaacgatgatggcacattcacgatcgccggggtgcagcatgaccccaacaagtaccgctatatcgatgacggcgtgcgtatagacccaccgccgatctcagtcacgccgccaaacgtcatgccggcgccgaagggaatcgctatcaccgaagttgaccatcaggcgcaggggctgacggtagcatccatgcaggtgacctgggagcgggtggagggcgccatcgactatctggcgcagtggcggaaggataagggtgactgggtaaacatcggtcgcaccagcgcgcaggggtttaccgttcaggggatctacgccggggtgtacgatgtccgcgtgcgcgccgtgaatgcggtcgacgtgtcatcgccctggggttatgccgactcgaccacgctcagcggtaaagtgggtaaacccggcacgccggtgaacctcatggccagtgataatgtcgtatgggccatcgatatcacctggggctttccctccggtgccggtgatacagcctacaccgagatcgagcaggcaactaccgccgacggtcagaaccctctgttgctggcgaacgttccctatcctggggtgagctatcagcacggccctatgccggcgggcgtgcgccgttggtaccgtgcgcggctggttgaccggatcgggaataagggggattggacgccgtttgttgcgggtatgtcgaatgtagatgctgacgacctgatcggctcggtggttgatgattacctcaattccgaggacggcaaggcgctgctggagccgctgaaaaccagcccagaagctattttgcaaagcgtgttggcggaatacggcaccgctaaccaacaatgggcgaactatggcgaaaaccgggccgggataatccaggcacagaaggtggccgctgatgctcaaagctcagttgcgcagctggaaaccgacgtcaccgctaaattcaacgatcaggaagccgccatacaggagaaaatgaccgcttacgcagacgcttccggcccttcggcgatctggacgttgaaaaccggtgttaagtacaacggaacgaattacgacgccggcctggcggtggccgtgaccgtcaacggtacgcaggttgacacgcgcgttgccgtcaatgctaaccagttcgtggttatcagcggtagcagcggcagctattactcgccgttcattatcaaggatggacaggtgcttatcagtcagggctttatcggcaagggctggatagaaaacgcgatgattggcgattatatccagtcgaatgattatgttgctggaaggcaaggatggaggcttgataagagtggcgtctttgaaaataacgggacgggtagcggcggaagaatgatccaaagaaataattcaatcaggctatatgatggcaatggagtgctgcgtgtggctataggcgaatattaa

SEQ ID NO: 428927 - DNA, 660 bp, Serratia marcescens
atgtcatggggagcgttatttgtagataacgatggggtgccgtgggctacgccagatagcacgccgatgagcctggttaaaaaatatcgcatagatcgcgctggagcaggaaatgatcagctcgatgttgattttactaagccagttgttttggcaatggtggcaaatacaaacggagttatcgcctctgtatccagatctgcgagtggtggggcatctgtcacatctaagttaataattggcaatggtccatatgccatagatgtttacgctttctcgacacaatttcaaccagcggtaaaatttggaattaacatatttgatgcgcagggccgatgcattcaaactaatgaaactaaagttatgcctgcaccgcggcggcttggcgagcctgggagcgatggagccggttacaatgtgagagaagccttggcgggcagatgggcgataataccagcgactacaggttacattacggctgttattggtcatcaacaaccaaggccgttccagcaaccaatatcgagcttttcagcttttgatgggagcaatacatcagtgtattccggcgcatgggacactcccggcggtgaagcgcacaatataacttattacaacacaaaggattcagtgtacgtaatagatgtatctggctattga

SEQ ID NO: 428928 - DNA, 1284 bp, Serratia marcescens
atgccagcaggcacgattacccttaaaaacaactcggcagccgttaccggtagcggtactgcgttcagcacagaactcaaggccaacgacttcattgtggtgacagttggccagaccgtttataccctcggtgttaagtcggtggagtcgaacacggcgcttactctggtgcgtaattttgacggaccatctgccggcggtttggcatggacaccaatcccctatggggcgatggtcacgattacagcgcagacgcacgcctacaccacagaggcgatacgtgggctgctgctggataggaaaaactggcagcaagtattcagcggcaccggaaacattacggtgatattgcctgatggcagcacttacaccggcccggcctggaatagctttactacggcattggaaaataaagccgctaaaggggtaaacaacgatataactcagctgaaggctttgaacacggctatcaccgttgcccaaggtggtacgggtgcaaaagacgcagctggcgcgcgaacaggtcttggcctggggaattcgtcaacgagaaatataggctctgaggccggaactgttgcagctggtgatgatgctcgtttgaatactgtaggcggtaaatctggcgggcagcttaccggcggtctgggggtgttgaacggggttaataatgtaaacctttccttacaggggacatatttattatggaatgagcaaccggggactggggtaagttcattggttaataatcccggcgatggccttggcgggttttggattagacttttaaataaggcaaacacagcagagaaggcgcgtttcactttcaaccctgacggcacaatgattgtgcccagtggtgtttattctttaaatgggcgggtacgttcatttacggggttaggcgcgggctatgttgagatttttgtcgatggtgttcctaagggtatgaacttctttgattcagacgaaacaatcaaagagaaaattaatccagtggaaccgggtgccgcttcggctgttatacgtaaaattcgcccggtgtcatacaaatttaaagatactacttatgacggcggggtaactataggtgctacgcatgatttcggtgtgattgcacaggaaatagagaagatattacctaatggtgttacgacattatccgatggaaaaaaatctcttaatccacttgagctttttggccttttattgacagcgaataaggaaatgctggaaagaatagatcgccaggatgaattaattaaatcactcatggagaaataa

SEQ ID NO: 428929 - DNA, 1413 bp, Serratia marcescens
atggcattaattagcgatatcctccgcggaccttatggcgacccgcaacctaacgtaattattaccatgcgcgccaaggagacgagcgcgcgtgtcttggtgagcaattcatctgcagccactactgccgcagacggaaaatactccatgcaggttttccctggtgaatatgaagtcttggtatccaccctgggaaaagttggcgaaattcgcgtatatcccgactccaaagatggaactcttaacgatttcctaattacaccaggcgaggatgaattaacccctgaaattgtacaaactgtcgagacaatgagggtagaggcggcaaagtctgctgcagccgcgaaaatcagtgaaaataatgcggcggccactttagcaaatgcagcaaagagtggtgctaactctgatattacgtctttatctggcctgaaaactgcgcttagtatctcgcagggtggaacaggggcaaaaactagtcaagaggcggcacaaggaattttacttggcagttgctatgatagatttacttccgggtatgttagtaatggcgcctggatgaaaatcacagttaaatttgcagatacttcgaatggtaaaacaattggatttatcattataggtgggtcgttatttaacggaaatccgctacagcaaggcgttcagttcgtcactattaaaacaggtaacacgaataaagatggctttagtaatgctgttattcatacgctttttggtgcaaataatcgaacaattaaagaagcgaagttgaacacgttagctgatgggcttactgttgagctttattgccgagtagaccagtactcgagtgataccggcgcaatcctgttgccaagccgacacgccaatatcagcgatgtttcattttcgaatgtgcaggtgttgccagcgaatattcccgcgactgcatccgatgcccgcgtgctgtttgtcgatgcctggactaatcagaatacgacaactgactccaacggttttgttaagaaagcctctccgatcgtgaagcttttccgtgatggcgcctctgaacttaacaacgaaagcctgggtgtgactactgagcgcgtgagcgagggggtttaccgggtttccggcacgctcgggtttaatgcagatgcgcagtggggcggcacggatggcggtatcgaggttcctctcgaccgcaacaagcagccgctgatctgggttgattacgaggtagagccgaccggcgatctgctgattaaaacctaccaccgcacgcacccggcggcgccggagttcgcccgcaatgacgttctgggctatgacgaggggatgccgatcgacatccctgaggggcgctgggtggatctgcgtgttgagatgccggtggtcgatgaaccaggaacggaagaagaagccacagcataa

SEQ ID NO: 428930 - DNA, 399 bp, Serratia marcescens
atgggaatgatgccaaaatttgccagcccggcagcagactacgttgagtgccgcttgagccttgacgagatctgcatttcaaagccgagcgctacttatctgctccgcgccgccggccaggcgatggcggtcggtatccacgctgacgcgttgcttgttgtcgattcgtcggcgacaccggtgcacggcagcattatcgttgctgcggaggaaggcgcgcatgtgctgcgccggcttcgactttacccgtatcgcgcgcttgagtttctcgatggctccggccgggaaactgagctcggtaacgaagactcggaagaagggatcgaggtgttcggcgtggtgatgtactgcgtgaatgatatgcggtcgtgcgagtgggatgatctgccggttatttga

SEQ ID NO: 428931 - DNA, 138 bp, Serratia marcescens
atgataagaaaggaaaaagtgcaggtgcaatacgaatttcaggcacaaaaaaaccgcctctcggcggtctacgacattactacttattgctttgattattcggtattttcgttccctggtacccggggcgggacttga

SEQ ID NO: 428932 - DNA, 1443 bp, Serratia marcescens
atgttttgtaaaatcgacaaaaaagcactttttctttattcagggattgctcttctttttatttatccgctaatccaagctggtatcttttatagggatgacctagatagagccataactggccagtatggatggagaggattgggtagacctgttgcagatattctcatgaagattttatccgccagtggccactataaccttgatttattcccctatacaatgattgcttcctgcttgtttatcggcggagcgtcgcttttacttagcgagcatttatcgaggttagaagtctcttcacacaagtttgttgctgctcttctcatttttaatccattcatgttacaaaatatcgcttacagatatgactctttaggcatgtctgttgcgtttttcctggcagttatggcttatacctataaagctaataatcctatcagacaagtttcggtgaaactgttagccggagtactatctttaaccctatatcagccatgcgctaatatatttattggtttacttgctgtggacattatgatcgcagcagttaaaaataactgcaaggctactgggattataaataaaacatttaaaagtacagttttatttatctctttttacttagtttacatgttgttttttgctacaaaaagcaattcacgcgcagagatcatatcagctaattctgaagggctggaacatctgctagctacgacaatggcattaaaagatatggttctatcttatttttatgggccagtttatatttattttttaattccagtcgttagtggtttgattttcacactaattgcaaatcgccataatggaaaaatgacattatcattcggtctttattgggtgctttccttaattgtgtttttagtttcacttatggggccaaccatatttcttaaagacgcacctgtatttccaaggactctggtctccttctctgtgtgtcttgttttgattgcgatccccgttgtttgcttcttacccaaaatgaaatatttgtcacttgttcctgttattacagtaattgcattcagtgctcaactaagcagcgctattaaatcacagcgcgagtatgaagatttcattttcaacatgattggtcgcgacttgatgactaataacgaaataaaaaccatcggaacagttggccaagtcaatatagatgaaagaactaaactgctaatgagcaacaaaccattaataggctatttccttagccctgcatctgagtttctagcctctttccagctaattaataaagggttcccgcagacactgcatggttacggaaatgaacaaaacaataaaaatgcgctttctcgtatgatcagcagtgggattaaaccaatctcaaccaataaggaatattccctgttcatttctggtaatacagccattgtatcattgggaacgaataataattga

SEQ ID NO: 428933 - DNA, 912 bp, Serratia marcescens
atgaaaatttcacttgtagttcccgtattcaacgaggaagaagcaattcctcttttctatcagtctgtccgtaagttcaagctttttgagcatatagacgttgagatcgttttcgtaaacgatggcagctcagatacgacagaagaaataatttcttcgctggctatcaatgaccccaaggttaaagcagtgaactttacccggaatttcggaaaagagcccgcactgtttgctggcttggaagctgctaccggagatgccattatcccaattgacgttgaccttcaagatccaattgatgttatcccccatttattaaataagtggcaagatggcgcagacgtggtattggccaagcgtatggatagacaatgcgatggcaggatgaagaggaaaacggcagagtggttttatcgcgttcacaataaaataagcaaaccagctatagaagagaatgtaggtgattttaggctaatgaccagggaagtcgtagagaatattaagttgcttccggagaggaacctatttatgaaaggtatccttagctgggttggcggaaatgttgcaattgttgaatactcgagagccgagcgagtcgcaggaaccagcaaattcaatggctggaagctttggaatttggcaatagagggaatcacaagtttttccaccttccctcttcgggtttgggcgtacattggattttttgtcgctgcaatttcatttatgtatggtgcatggatgattatagataaagttatttggggaaaccctgtggctggttatgcttcaattatagtttccattcttttcctcggtggtgtacagcttataggcatcggagtgcttggggaatatattggtagaatatacatagaaaccaaacgccgcccacgttatataataaagaagtaa

SEQ ID NO: 428934 - DNA, 408 bp, Serratia marcescens
gtgagcaagtacccgaaaatgaaggtggtgcagaagcagagcgccaactattcacgcagtgaaggtatggacctgatgatgaactggctgaccaacggcgaagcgatcgacatcgtcgccgccaacaacgacgagatggcgatcggcgcaatcatggcgctgcagcaggcgggcaaggcggacaagaaagtgctgatcggcggcatcgacgccacgccggacggcctcaaggcgctggcctccggcaagatgcaggtcacggtgttccaggacgcggtcgggcagggcaaagcctcggtcgatgtggcgcagcgcatgatcaacggtgaaaagctcgagccgtattactggatcccgttcgagctggtgacgccggccacgatgcagaagtatgcggccaggccgtga

SEQ ID NO: 428935 - DNA, 765 bp, Serratia marcescens
atgaacgcattgaacggcaaggtggcggtgatcggcggcgccagttcggggatcggcagggcggcggcgctgctgttcgcccgccagggggctgcgctggtgttgggcgcccggcgcgagcggctgttggcggagctggtggaggacattcggcgcgagggggggcgggcactcgcggtggcgggcgacgtgcgcgatgaagccttcgccgaacggctgacggcgacggcggtcgacgaattcggcgggctggatatcgccttcaacaacgccggcacgctggggccgctgggaccgtcgctggcgctcaccgcgccagaatggcgcgaggtgctggaaaccaacctgtcgagcgcctactacggcgccaaatatcaaatccccgccatgctggcgcgcggcgcgggctcggtgattttcacctccaccttcgtcggccacaccgcggcgtttcccggcacggcggcctatgcggccggaaagtcggggctgatcggcctgacgcaggcgctggcggtggagttcggcgggcgcggcattcgggtgaacgcactgctgccgggcggcaccgatacggcgatgggccggcagatgagcaataccccggaggcgctggcgcaggtggccgaactgcacgcgctgaagcggctggcgatgccggaggagatcgcgcaggcggcgctgtatctggcgtctgatgcgtcctcattcgtcaccggcaccgcgatgctggtggacggtggcgtgtccatccagcgcggctga

SEQ ID NO: 428936 - DNA, 1956 bp, Serratia marcescens
atgagcactcactcttcttcaccgcagcccgccgtcgatctggacaaagaagccggcgccggcaaccggccgctgagcggcgtttatttgcagctggcaaccgtcctggcgatcgccatctccgcctatgccatctacgccaacgcgctgtccaacacgcaggagttctaccgcaacaccactttcctgagcggtattctgatcctgggctttatcctgttccccttctcggcccggtacgccacccgcagcttcaaccgctgggactatctgttcatcatcctgacgctggtcagctacggctatttctacgttaactacgtcgatctgcacgtggtgcgcaagagcatccccaacgccaccgactatgtgatggcagcgatcggtatcggcgtgctgtttgaagccgcgcggcgcaccaccggctatttcatccccggcctggcgagcttcgccattctctatgcgctgttcgggcaatacttcatgggcatcttcggccacggcggcttctcggtagaacgcctgctgtatcggctgttcatgaccggcgaggggattttcggcatcaccctgtccactgcctccacggccatcgtggtgtttattctgttcggtgcctttctcagcgtcagcggcgcgaccgcgctgttcaacgatctggcgctggccgccgccggacgccgccgcggcggcccggcccaggtggcggtgatctcgtcggcactgaccggctcgttgagcggcagcgcggtggccaatgtcgccaccaccggcaccttcaccattccgctgatgaaaagcatcgggctgtcgtcccgcttcgccggcgccgtggaagccaccgcttccaccggcggcatgatcatgccccccatcatgggcgcggcggcgtttatcatggccggtttcctcggcatctcgtacaccaccatcgtcatcgccgccatcgtgccggcgctgctctattacgccgcgctgatcatggctatcgatctggaagccaagaaacagggcctgaaaggcatcaacaaggagaacatccctcaggtgcgcgcggtgctgaaggcgcgcgggctgctgctgttgccgctcgtcatcgtcatcggcacgctgctgctgggcaaaacgccgatctatgccggcttcctcggcatcattgccatcatcgtcgccagctggctcacccccgacagttcggtgcgcatgacgccgaaaaaaatcgctctggccttgaatgacgcggcgcgcggctcgattcaggtcaccatcgcctgcgccgccatcggcgtgatcatctgcgtggtgaccatgaccggcatcggctccacgctggcgttcaacatcgtcgccatgaccgacaacaccctgtggatgatcctgctggtggtgatgctggtgtgcatcgtgctcagcatggggctaccctcgaccgcgctctacatcgtggtcgcggtgaccgtgtcgccgatcctgatcaaagccggcgtgctgccgctggcggcgcatttcttcgtgttttggttcggcgcgttgtccaacatcacgccgccggtggcgctggccagctacaccgccgccagcatcgcccgcgccgatccgatgcaaacctcgtgggacgcggtgcgcctggcgctgccgggctttatcatcccgttcattctggtctacaacccgatgctgttgatgcagggtgacgatctcaacccgctgtcggtgctgcatatggtgatcagcgcgctggtggggatctacgccctgtcgatcgccagcgccaatttctggctgatgaagacccactggctggagcgggtgctgtttaccgcggcggcgattttactgatcaaaccgggcctgatgaccgatctgggcggtgcggccctgatcgccgccgccgccgccatgcacctgcttcgctataaacagcgcgccgcgctgccgggaggcgcgtcatga

SEQ ID NO: 428937 - DNA, 1266 bp, Serratia marcescens
atgaaaaagacaaggcagttccgcggttggtatatggttggcgccgtgcatctcttgctggcggttatttttggtgccgcttactcattcggggcattttttactgcattacagacgaactttgacgccgggcgtttttctaccgcctcaattttctcgctgacggcgttaatttactatgccgttggggtattttccggtgcctggagcgatcgcacttcggtgagaacggtaaccggtatcggtattttactgctttcgctgggattctttggcagtagcctgctggcgtcgtcactgtcgacgtttttgctcacgttttgcctgttggtaggggttggcgtcggattggtttacgtgccggctgtttccaccatccaacgttggttcgtcgttcatcgcagttcggcttccggcctggcgctggccggcaccggcttgggaacgctggtggggccaatggtggccggtgggctgatgcaacatttttcctggcaaagcactctgcaagtttatgccgccgctatcgcggtgttggggttggctgcctccttcattttacgaggccggccagaggacgtgggcgaatatcccgatgggcttcgtcccgttgaggcgacctcaatgcagcgtccagggttcagcggtagcgtcacgcttcgagaggccgctggccgagcccaattttggtggtttttcatcgcgatatttttcggttcgatcgggctgtttctggcattggttcatattaatccttacgcgctgcaacaggggctgaatgcaacgcaggccaatctgctcatcggcttgatcggcgtgggtaatatcggcggccgtctggcgttggggcgtatcggcgaccgtatgggagcgcgacgttttttagtcattgttacgttgagtttggccgtgttgtgcggcttttggagtgtggcgcatagcttaaccgcgctggtgattttcgcgctgttgttcggtgcggccaacggcggttgtatcgcgctgtacccggcagtggccagtacatggttcggcaccgccaatctgggcgccattttgggggcgttgtacatcgccgtggggatcgccgccgttggcggggggagtgccgccggttggctgtatgacctgtatcagagttacacgctgtccattgcgttggccggcattgcggcagtgttatccgccgggagtgtcgtcttggccgccgcctacgggacgcttcatgaccgccgacgaagcggcggcctgggggctgatcgataa

SEQ ID NO: 428938 - DNA, 1389 bp, Serratia marcescens
ttgagtaaagctggtattcagtctaataggggggatggatatcaaacgttggtagcgtttgactgggctttgaccgtgttatccgatcctgattatcaatggttagagacagattcagtgaaatggctggtcgatgacgttgtgatagggcggactgacggtacaagaatttgttgtcagtgcaaaaaaaatcaaacaggatttcgagcgtggtcattcaccgatcttaatgatgagctagaaaaggccattaaaacgcttatacaagatcctactacgacagtcagattttactctcgtactccttttggtgagctggctgctttgcaagaatttagtactaatttcccagatgaaagtgcttatcatgctgctttaaaagagacaaaggtacatgaggcgataaatagaaaactcattgaattaattgcaacaatatcttctaattttaatggttatgagtttttatccagaacaaaatttgttactagcgatattcatgaacgaatgagagaaactctggaagagcgattgcaatatttggtgagtaattctgttgcagcttttaattcgctttggacttgccttgattaccaagggatgcgagtcgctgacacgcaagataataaactatcatcttgctcgcgtttaaccaaagccgaccttataaatcttctttctcaatcaggttgtgttatttctcctccggcagatattcaatctatttttaattcattcagaaaaacatcatccattggtcgttcatggcaacgagatattagtggtcatcgtattgatacacttctggtaagtgaattaattgaagctatcaaaagcaagagccattccatattagtgactggagggccgggttcaggaaaaacgtgtgttctacttgaattgcaagagaaactagagcagttggcgcaatctggtagtattatgttacctctattcattcaatcgcgagagtttgctgatttagaaactgcacaggaacggcaatctctagggttagacgagcaatggattgaaaagattgcgcgtgtagctgacagctatcatgtaatagtcataattgattcacttgatgtgcttgctatagctcgagaacatatggtgctaacgtattttttagctcaaatagatcagatgtcattaattccaaatgttaccgttattacggcttgcagagagtttgatagacattacgatagacgtatatctcagcgctcatgggataaagagtttaagtgccaggcattagattgggaaggtgaaatcaagccgttgcttgaaaaattctcaattgactcatcagccattgataacacaacgcgacatttaattagcaatccacgtgagttagtgacctgcccccgggattag

SEQ ID NO: 428939 - DNA, 417 bp, Serratia marcescens
atgaaaaaactgacttttttattggcgctggtattactgagcggctgtgtgcaggagcgtccctggttctatccggcaaacgtcagcgttaaaaataatcgcgtatgcgttagcgtgccggacgatattgccggaaaacgcgagctggtgggcatcggaatttatcaaccgggggtcggcgggaaggcggaatggtccacttctgttgcgccaggtcagcaaccgatagcggtcatgccaggcgaatgcttggcggtggctttcgacgggttccagattgggcatagctattcggttgagattgcgacggtcggcaatgcgtcaaatgaggcgccgcgcaaatattggactgaatttacagtggttgctgataaagcggatggtaataaactcgctgtcgtacccattcagcgctga

SEQ ID NO: 428940 - DNA, 540 bp, Serratia marcescens
atgattacggctaaaggaatggcgcgaaagctcaccgtgggtgagataggaattgcccagatcatttttaagaatgctatcgattactcgagggtgagtgtgcataacgcgggttatttcccttttggtttgcaaaatgacaatacggccgttacaccgaacggcgaaatttatttcactccaaagaattttcgtgaagattattcaagagagagcgcgggttttcaacattggtttatccatgaaatggcgcatgtttggcagtatcaaatgaagatgaatgtgttgctcagaggtaccatgagctgggcggcaacttatgaatactctcttcccaactataacactctcgctgactacggaatggagcaacaggcctccatccttgccgattactttttacttattcgttttagtagagaagagtggcgtcgtaacaaacggatgactggcttggaagggccagatcttaaaactcgctatgaaaccgtgttacggttgttcctacgagagccgcgtaaccctaaggcaatgaaatga

SEQ ID NO: 428941 - DNA, 630 bp, Serratia marcescens
atgtttcaacccgccgcattttgcgaagacgatctggatgcccaactggcgctggtgcgcgcccatccgttggggctattggtcagccacggcgagcagggattgacggccgatccgctgccgtttctggccgatgtcgaacaggggcagatccggctgcgggcgcacctgtcgcgcgccaacgagcactggcggcggctgcagcacgcggcggaatgcctggtgatttttcagggtttggaaggttatgtgtcgcccggctggtacccgagcaagcgccagaccggcaaagtggtgccgacctggaattacagcgtggtgcaactgtatggcgtgccgacggtgatggacgacccagcctggctgcgccgccagctgatcgacctgacggcgcaacaggaagggcgccgcccggcgccctggcggctcgacgacgcgccggccaactacatcgccgcgcagcttaaaggcatcgtcggtatcgagatcgccgtcacccggcgcgaaggcaaatggaagatgagccaaaaccgcagcgccgacgatgccgatggggtgatcgccgggctgcgcgaaggggatgaaacgcagcggcggctggcggcggaggttgagcggcggcgcggatag

SEQ ID NO: 428942 - DNA, 366 bp, Serratia marcescens
atggatgaacacaatggactggactacatcattagcctgcatggcacgcgggtcaatcgtgaggatggctattggtggaaaatcgaggcttggacggtgacccaaacggcctttatccctcacggcatccgttacaatttgaccttgcatgataaccacaatacccgggtttttggcatagataacgcgcatgccattaaaacccctcgcaaaggtaaattttcaggccgcgtcgtttacgatcatcaacatgattccccgacggacaaaggctcaccctacgagtttcattccgcctatcagttggtggaagatttttttacccggatagacgaagtcatacgcaagagagaaaatcgaggttga

SEQ ID NO: 428943 - DNA, 378 bp, Serratia marcescens
atgaaagcactgattggcgtgatgcctgaagaactgattcgcaagcgcatactggcgatcgcgaaaggggaataccagccgcaggaacgtgaacccaaagtctggttcacgtcgatgattgcgctggcccaggtgctcagcaacgagaatatcgccctgctgcgtcttatcgacaccgcccgccccgagaccatcagccaactggccgaactgtccggccggcaggtcagcaacctgtcaaccacgctgaaaacgctgagtgggcacggcctggtggcactggaaaaacaggggcgctcggtaaagccccgagcgctgtttaccgatttcgaaattatcgtggatcagaagttaaatgcccgctttagcgctgcgtga

SEQ ID NO: 428944 - DNA, 513 bp, Serratia marcescens
atgttcaccgtccgtcaggcattgctggaagatttaacgcaggtgcgcgatatcggcatccgcacctatcgcgcgcacttcggtgagctgtggcgctacccgcacgagctggaggcctttctggccgaggatttttccgtctctgcgctggaacggacgctgcgcgatcccgacgtgtgctggctgttggcctatgaggatgacgccctcgtcggctatgcgcgcgtgaacttcgacagcctgttggccgccacccaacggcgcggcgccgaactgcaaaagatctacttcctgccggattacgccgggcgcggtttcggccgacaatttttcgaacaggtgcaacggcgggccgtcgaacgccgtcagcccctgctgtggctggaagtgctgaaacagaacgcagacgcccagcgcttttatcagcggcaaggcctggccgtatgtggcgaggcccaatacaccagcgaacagggtgccatcgaactttgggcgatgagcaaggcgctgtaa

SEQ ID NO: 428945 - DNA, 3144 bp, Serratia marcescens
atggctcaaatgttaaaagaagatctgcagttcaacgcaggaaaagccgccgatgaggtcaatgatggcggtgaattggttgaatatacccctgaacagtttggcgccgtaggcgatggcctggctgatgatcgagaggctgtcagcgctatgttcgctaaagtggctattgacgctgctaaatcgataaaaaaacgccaggtcagaatggcgaatgtttatagattgacgctgggtacggcttggcagcctttgcagatccccagcaactgccatgtttatggcggtggtgaaattcacctggatgacgatacgcctcaaatcaacatttttaataccgttgagcagtcgaattttatcgtagaagatctgaggatcacgagaaaggcgactcagaaagatgcagatcctatttggtggtacgccactcgcgcgtgtaccggcatggctttcacccgttgtgaaaacttcaccgtgagaaattgcgtcatcagtatgcatactgatgctttgggcctttctgactgtacgtccgttactcttgagaacaatttacttaaagatctgggagaggaacctatcgcggttcgtggcggccgccatatcacgatccagaataacgagctgacgaatcaccagggcgacgggatcctgctgaaaacgggcgtgaacagagaggcttatgatatcttaatcgtgaacaatcatattcacgatgggcacaagcctgcgaaaccggcaggggcagggcacacgcaaagagggggcggggtgacgctcaataacgaggtgaccggcacgcctcattcattcactaacctgaccgttgccaataaccatattgttaataccagctatggtatcgcactgggtggaatcagtgacattaatatctctaataattacatcaaaaggatcgaaaggttcggcattcagatagactattccttagtaaataaccccaccaaaattcctacgaataattcacgaatcattgggaatcacgttgaagataccgttgaaaatggcatcgactatcacggcaataacgatatttctgtcgcggagtctgttatcgcagataactttttaaatttctgtggcacctccacagcgtcggccttcaatggcattgccgcaacggaggcgaccctttcaggcaatattatcaataactgtaaggtcgccctgttcgccaatagctgcgtgatgaccggtaacaaaataaccaactccggatggaccagtagccaggtgtggatcaagctctatggcgaccgcacggtgttttccggcaatcgggtaacggactctgattttggttatatccgctttttgaatgggaaaaacgctattatcgaagggaatgtgattaagcttgctgcgcctgctcgggcactggagttaggcggggcatttgacgaaacgaccctcattggcaaaaacgtctgggattgcgcttttaaaccgattctctctacgattgctggggtaacgggcaatcgacttattcaatattccttcccgaatgaaggcgtggcccacatcacccctcagatgttcggcgcgaaaggcgattggaatgatacagctggcattgggacggatgatacgcaggcgtttaaacaggctatcgcctatgcgattaatcaaggctacaagaagctctatgttcctgccggcaactattacattacggatacgttaaatttagggggggaaaactacaccggagatagaggcattgcgatagagggtgaaaattggattagcacgaaattcttctttaagccgatgtctaatgatcatgcgtgttttgagtcgaaaggcggttccgggatccataccaacagatatatcagcgacgtgacgattacgccggccaagggcgcgttatatacgggcaccggctatcggataaatggttcctgcttcatgcggcatgaaagactgctgattatgaagttttttgtgaacctacatctgttgaacggctataccggtgcgtttaccgagttcgtcagttttcactcttgccggttccaccgcggcctgtccaatatattgatggagagtaatagcggggatagctccttccacggcgtggggttccacgaaattcaatgtcagataaaagtctccggcaatccgggtgatggtggcacaaatacggatgccggcgtagggctggagctgagaggagacgccaacagggtgcggtggtacaacggtttctgctatatccacctgttcggcggcgtcggcgctacggctattaaactcacccgaaccgacaccgataacatcttggggcagtttacttgcgaaggtgaaactattcttcagagtgatggaagcacttttgaatgccgaggcggtttctataatgtgaataataccacttacaatgtggcggcagagccggtaaacggcatcgcggcggcatttgtatttgataacatgatgagcaatacgacaagattcgccaacgcggcaatcgccgatatggctccgaggcagcttccgtggtccttggcggacagggccaacaatggcgcttatccagccatttttcatggcatcaagggtgaatccgataacctgttctatgccgccagaggggggaataccaactaccattactttggcggcatttcccctggcaataaccttcaggggtttgaaccgggcgtcaggttggctcaggacggggcttctttagttagttttgcacctaagtttacgctgggcgctaataacaatacgaccagcagcggcgtatccatctcccctgcggatttttcgccgcagaaggatatcgcgaccgccttaggacaaccctcattcaaatggagcgggttgtacactaagcagttaacggttgcggataatggcatctatccggccggtaacggcgcttaccctattggtggaccgaataaccaattctcctctggccacataaaagtgttgaatatttatgattcagcgaacgtgaacggagatcccgtaggtgtcagagttgccgtccccgcatcggccgttgcgcccggcaaaataggccagtggtcggcggactccgcgttcttttatgtttgcacggcggccaatacctggagaagggtggcgctaaccacatggtag

SEQ ID NO: 428946 - DNA, 654 bp, Serratia marcescens
atggccgaccttatcgaacgcatcctgattggttacggttcggagtcgggcaacgcccgggcgctggcgatgcgcctgggcgagcaaagcagcctgcaaccctaccgccccgtcgtgaaagaactcaacgccatccagcccgccgatgtgggcgaacgtgacgccctgctgatcgtctccagctcatttggcgacggcgaaccgcccgccaacgccgagcgtttttccgacgcgctggcgcaatggccggatcgccaccggttgtgctacgccatcttcggtctcggcgacaccgcgtacccgcatttctgcggcttcacgcaggcgctggatgcgcgtctgacgcaatacggcgcccgcgccatcatcaatcgcgtcgacgccgacgttaacttcgaaccgttcttcgcaacctggctgacgacgctggagaaggtgctggccggcgatgcccaggccggccgcgatttgcatctgcgcgtgaccgcctacggcgaagaccatgcgttcagcgccgccctccttgaacggcggccgctcagcgcacgcacgccgcaggcctggcacctgcggttgaatatcgccggcagcggcatcgtttaccgggctggggataccgtctatctgtgccggagaacgacgaaggattattga

SEQ ID NO: 428947 - DNA, 957 bp, Serratia marcescens
atgaacgcacgcgtattcatcctgcttctgctgctggccgccaggtcggcagcggccgaacattttcccgtcaccgtagaaagctgcggtgtgccggtcaccttcaaccaggcgccgcagcgcgccgtcatcaacgacatcaacatggccgagatggcctttgcactgcatctgcaggatcgcattgtcgggctgaccggcatcaccggctggtacaaactgacgcccgacttcaaggccgcgatgggcgccattcccgaactggcgccgaaatatcccgctttggaaacgctgctggcggcacagccggatttctttttcgccggctggaattacggcatgaagatcggcggcgacgtcacgccggagaagctcgccccgttcggcatcaaaacgctggtgctgagcgagagctgcgtacaggccggcgggcggccgcaaaaggccgatatgaacctgctgtatgacgatgagctgaagctcggcaagattttcggcaagcggcaagaggccaccgcgctggttgagggctggcagcgccggttggctgcgctgcccgccaggccggcgggccaggcgccgctcaaggtattcgtctatgactcgggggaggagaagcctttcaccagcggcaaatacgcgatgccgacggcgatcatcgaagcggccggcggccgcaacgtgatggacggcttgccggcgagttggacgacggcgtcctgggaggcggtagcggcggccgagcccgacttcattattctgctggattaccagaccggatcgggcgccgatgcgctgcggcgcttcctcgagtcccacccgttgatgaaattaacgcctgccgtacggcaccatcgctatctgaaactgcagtatgcggagctgacgccggggccggccaacatcggcgcagtggaaaagctggcgcgggcgctgtacgcgccggaggctgaatga

SEQ ID NO: 428948 - DNA, 543 bp, Serratia marcescens
atgaccccggccatccgcatcgcggccattgaggcgctgcccgatgattacctgacgcgcggcgatttcagctttaccatccgctgttacgccctgccgcagttcgactgcccggtcgacagctggccaacccgcccggtggcgccgtttcgtaaacagtatcccctggcgccgttcgccaacgaagacagcgtgaccttcctggcgtatcgccaggacgaagccgttggccacatcacgctgagcaaaaactggaacggttacaccttgatcgacgagatcgcggtcagcgctcacgcgcgccgtcagggcatcgccggggcactgctggactgcgccaaacagtgggcgcggcagcaggaaacctcgggtatgatgctcgaaacgcagaacaacaatctggccgcctgtcgctgctaccagcattacgggtttattctcggcggcatcgaccgtttgctgtaccgcgccgagccggagatcgccgatcacgaaatcgcgctgttctggtatttgccgttcaatagcgaaatcggttactga

SEQ ID NO: 428949 - DNA, 1821 bp, Serratia marcescens
atgatttcattaaatgattacgccaacctgcgcagctatgccggtagcgaaaccgcggtgatgctcgaaaaccgctaccaccacggcgtatttacccgagacgatgcggataccgccagccaggacaacggcgttaccctgctcgtcgatgcgcaaaaccgccgctggaagcgcatcatcaatgatggcgattacagcatcgattggtggcacctgccgggcgatgagctggattactcgctgaccattacccgcgcgtgcaacttcttgcaggtcaaaggcgaagagtggtggcagttgcctatcccaaccaccccggcggggattaccctggtgggccccggcggcattcgcccttgtaaaaccaccgccaacctgaagctatggaaaaattccgtcgattttaagggcactattctggacttcagcggcgccaccaacatcgagtgcgtacgcgtgcattattcgctgggagcgccagcgatttacaacctgcgcatcgtgggggcccctggcgcggcggccaacctgcgcggcctgtgcgtctacagcgatgcctctaacatgcacggcttgccggcctgtcagctgctggtgcaaaacgtctggctaaccaacctgtacaaaggcatcgtcttcggcaataacgcctatatccagagctggcacagcatcatggtgcgcggctgtttctggccgatctggtctgaaaccaccgccaacgccggcgaaaaaatcgtcttctacaaatgtctgttcggcgacagcagaaactattatcagggggtgcacgccctggccttccgcgattgttcgttcgactacagcggctttagcaatgaaaccgaacagttggccaataccgactatggtttgttcgaccttaaaggcggcacgctggactttaaaaattgccacttcgaatggggtaacgccaactgccgcaactaccggccggtctttaccagcaacaacggcggtacggtaaaaatcaaagacagccaatggcacagcgtgatgaccaacaacaccgatgccggcagcagcgtgccctatcaatacgtcgagtatttcttcttcgataagtccagcgatctgagcggaaaatgttatatcgacggtttcgatctggtgaacgccgacattaaaaaaggctggtccaacaaccacatcgagatgaaaaagatcgtcgcacccggctacgtcaacatgtggcgcctgctctatctgggtgatggcgtcaaccatctgccggagccgagctggaaagaaagcggcgcgctggcgttgaataacgtctacgccttcggcggcgcacgtctctcgcaaacggcgaccgccgatctggcggtaacgctgcaaaacggcgtgctgaccgccaccaccaaaacggcaacgacggcggacaaacgcgtcgagatctacttcccgatcgcgaaaaacgatctggtgctgtggcgcgccacgctggccaacctgaaaggtcagagcagccttgatgtcatcatcggcacctaccaaggcaagtatgtcctgaacggcgatgccggcgtcaccaccgtgctggaaaaagcctgccagtggggccgcaccggtacggtaacgccgaccacttcggcaacgatgacctcggatcgcattaccgcactcgacgtcgccgagtatttgccgctgcctgagggctacgtcaattacgcccgtatcgccatcgtgctgaaaaactttgtcggcagcgccgctcagcccacctcggtggacctgacccaactgctgtgtcaaaagatcgacatcgtctcacgcaacccacataaatcctggtaa

SEQ ID NO: 428950 - DNA, 438 bp, Serratia marcescens
atgccagcttccgtccctcatcaggccgccggccgagcgcgcggcgagcaaacgcgccggcagctgctcgccgcggcgaccgaactgttcggcgaatgcggcctgcagggcgccaccacccgcgacatcgcccaacgcgccggccagaatatcgccgccatcacctattacttcaactccaaagaggggctgtacctggccgtggcgcagtcgctcgccgatttcatccagcaggcgttcgccccgctggccgaggaggtcgatcgcttctggcaacagtccgccgcgcagcgctcacccgacgcggcgctgcgtttgctgcagcgtggcctgctggccttcagcgaactgatgacccagccgcacacgctgaacctgagcaaaatcatgtcgcgcgaacagctcgccccgaccgaggcctacccgctagccaggtga

SEQ ID NO: 428951 - DNA, 2079 bp, Serratia marcescens
atgtggcgccgcctgatctaccacccagaaatcaactacgcactgcgacaaacgctggtgttgtgcctgccggtgctgttcggcctgctgataggccagctgcagctcggcctgatgttctccctcgtgcccgcctgctgcaatatcgccgggctggatacgccgcataagcgcttctttaaacgactgatcgtcggcggttcgctgttcgccttcagcagcgtgctgctgcaacaggccctgctgtggcacgtgccgctgccggcgctgatgctgggcctggcgctgctgctcggcgtcaccggcgaaatcagcccgctgcacgcccggctgttgccggcggcgctggtggccgccatcttcgccctcagcacggccggcacggtgcctatctggcaggcgccgctgctgtacgcgatcggcaccgcctggtacggcttattcacctggttctggttcaagctgtggaaagagcagccgatgcgcgagacgctgagccagctctacctggaactggcggactatttcgaagccaaatactcgctgctgacccagcacaccgatccgcagaccgcgctgccgccgctgctggtgcgccagcaaaaggtgatggacctgatcagcctgttgtaccaacagcttaatttcctgccgcacgccaacaatctcgagcaaaagcgcctgcagcgcgcctttcaggtggcgatggacctgcaggagcacatcaccgtcagcctgcatctgccggaagaggtgcaaaaactggtggagcagagccaggccgaagcgatcattcgccgcaatgctcaggtgatcgccggccggctgcgcgtggtggcgcacgatattctctatcatcaacattcgaagcgcttctccatgacccacgagctggcggcgctggaaaaaatggcggcgcagcatcccgataatccggtcggccagttttgttattaccacttcagccgcatcgcccgcctgctgcgcacccagcatccgctgtaccgccgcgacctgatgcccggccagcaccgcctgccgttttggccggcgctagtcagctatctgtcgttcaaatccaccgccctgcgcaacgccgcgcggctgggcgtaacgctggcggtcggcagcagcctgggtgcggtattcaacctgccgaagccttactggatcctgctcaccatcatgctggtgagccaaaacgggtataacgccacccgggtgcgtattcagcaccgtgcgctgggcacgattgccgggctattgctggcagccgggctgctgcagctgcagttgccggagggagaaacgctgagcatcatgctggtgatcacactgctggcctacctggtttcgcgcaagaactacgggctgtcggtgattggctttacggtcacggcggtttacaccctgcagctgctggcgctgaacggctcgcattttctggtaccgcgcctgatcgatacgctgatcggctgcgtgctggcgttcggcggcaccatttggctgtggccgcagtggcaaagcgggctgctgcgcaagaatgcccatcaggcgctggagaacgatcaagccgcgctgcggctgatgctgaagcaaccggaaccggacgccaccgcgttggcctatacccgcatgcaggtcaaccaggcacacaacgcgctgttcacctcgctcaatcaggcgatgcaagagccggggttcgcgtcaaactatctggcggacatgcggctgtgggtcactcacagccagttcatcgtcgaacacctgaacgccatgaccattctggcacgcgagcactacatgctgacgccgaaactggcggaagagtatctgcagacctgtgaaatcgcgctgcaaagctgccagcagcggttggaatacgacggcccgagcagcggcaacagcggcatcatgcagccgccggatctgcatccggacatgcccgttaccgagatggagcgccatctgcggcgcattttgtcgcacctgagcgtgatgcacaccatttcgtcgctggcctggcgccagcgcccgcaccacggcatctggctcaagcgcaaactgcgcgatcaataa

SEQ ID NO: 428952 - DNA, 1686 bp, Serratia marcescens
atgtatgaatttaaccaggtgctgttgctgctgcagcagatgtgcgtctatctcgttatcgcctatttgctgagcaaaaccccgctgttcatcccgctgatgcaggtgaccatccgcctgccgcacaagctgctgtgctacgtgatcttctcggtgttctgcatcatgggcacctatttcgggctgcacattcaggattcgatcgccaacactcgtgcgataggcgcggtcctgggcgggctgctgggcgggccgtcggtgggctttctggtcgggctgaccggcggcctgcaccggtatacgctcggcggcatgaccgacgtggcctgcgcgatctccacggtgtcggaaggcctggtcggcggcatcgtgcacagcatcgccatgcgccgagggcgtatcgagctgctgttcaatccgctgttcgtcggcggcgtggcgctggtggcggaagtgctgcagatggcgatcatcctggcggtggcgcgcccctacgacgaagcgttgcagctggtggagcacatcgcgctgccgatgatgatcgccaataccgtcggcgcggcgatgttcatgcaaatcctgctggataggcgcgcgatgttcgaaaaatacaccagcgccttctcttccaaggcgctgaagatcgccgagcgcaccgagggtatcctgcggcagggcttcgatcaggagaacagcatgaaggtcgcccgggtgatctatcaggagctgggcatcggcgcggtggcgatcaccgatcgcgacaagctgctggcgtttatcggcatcggcgacgatcaccacctgccgggcacgccgatcgcttcggtgcattcgcatcgtgccatcgacaacaacgaggtggtgtacgccgacggcaatcagctctcttactgctgctcgatcaatccggcctgcaagctgggatcgacgctggtgatcccgctgcgcggcgaaaaccagcgggtgatcggcaccatcaaactgtacgaaccgaaaagccagctgttcagcaccatcaaccgtacgctgggcgaaggcatcgccagcctgttgtcggcgcagatcatggccggacagtacgagcgccacaagcagctgctggcgcagtcggagatcaagctgctgcatgcgcaggtcaatccgcatttcctgttcaatgccttgaataccctggtggcggtgatccgccgcgatggcgagcgcgcctgcgatctggtgcagtccctctcgaccttctttcgtaaaaacctcaaacgctcggatgacgaagtcagcctggcggatgagattgaacacgtgaacgcctacctgcagatcgagaaagcgcgcttcgccgatcggctggagatcgcggtatcgctgccggaggcgctgttggcggtgcggctgccggcgttctcgctgcagccaatcgtcgaaaacgccatcaagcatggcacctcgcatctgttgggcgtgggtcgcatcgaaatcggcgcctgctgcgaaggcgagcatctgctgctgcaggtgacggacaacgccgggctgttccagccgaaaccgaactgcagcgggctggggatgaatctggtggataaacgcattcgcgtgcgctacggcgaaggctatggcgtgcaggtggattgccggccggacgcctacacccgcattacgctcaatgtccccatggagagggccgcctga

SEQ ID NO: 428953 - DNA, 351 bp, Serratia marcescens
atgtctgttagaggttttaaagctggcataaggccgctggcttttcctggcaaacgcagaaaaaagtcccgatcaggccaccagggggcggatcctagcacagacaacgggattttttgtgatggctgtcgattttttgatgtaacccatgaaggggtgatgcgcattattgtgatctatttgcgtaccgtcacaatggaatcacggttgactatcgtcggctcaaaccggtgcgccggggtggcggggtcgatcagcctgcgcgccgcgtattgggccatctcgctgatgggaaaatggacgctgctcaacgccgggcgcacgaaaggcgcgcgttcgccgctgtcgtag

SEQ ID NO: 428954 - DNA, 1185 bp, Serratia marcescens
atgaatgacagtaaccgcatacggcttacctggatcagcttcttttcgtacgcgctgaccggtgctttagtgatcgtcacagggatggtgatgggaaacattgcagagtactttaacctgccggtttccagcatgagtaacacctttactttcctcaacgccggtattttgatttcgatcttcctcaatgcctggctgatggaaatcatcccgctgaagcgtcagctgatcttcggctttgtcctgatggtgctggcggtcgcagggctgatgctcggcaagagcctgaccatgttctcgctgtgcatgtttatcctcggcgtggttagcggtatcaccatgtcgataggcaccttcctgatcacgcacatgtatgccggccgccagcgcggttcacgcctgttgttcaccgactccttcttcagcatggccgggatgatcttcccgatcgtcgccgcgatgctgctggctcgccacatcggctggtactgggtttatgcctgcatcggcctgctgtacgtggggatcttcgtgctgaccctgtgctccgaattcccggtgctgggcaagaaaggcgccgacgccggtcagccggtcgaaaaagaaaaatggggcatcggcgtgctgttcctgtcgatcgccgcactgtgctacatcctcggccagctgggcttcattcagtgggtgcctgagtacgccaccaagtcgttcaacatggacatcggccaggccggtaagctggtgagcgacttctggacctcttacatggtcggcatgtgggtgttcagcttcatcctgcgcttcttcgatctgcagcgcatcgttaccgtgctggccgcactggctaccggcgcgatgtacctgttcgtcagcaccgacaatccggagcacctgggctactacatcatggccctgggcttcgtttccagcgccatctacaccacgctgatcaccctcggctcgctgcagaccaaggtctcctcaccgaagctggtcaactttatcctgacctgcggcaccatcggcaccatgctgaccttcgtggtcaccggcccgatcgtggcgaaaggcggcgcgcacgcagcgctaaccaccgccaacggcctgtacctggcagtgttcgtgatgtgtctgctgctgggcttcgtaaccaagcaccgcagccacggtcacgtgacgcactaa

SEQ ID NO: 428955 - DNA, 261 bp, Serratia marcescens
atggctactatcaccgtcagaaatctggacgacgaaatcaaagagctgctgcgtatttcagcggcgaaaaacggccattctatggaagaggaagcgcgcatgatcctgaaacaggcgctggtgaaaaagccgccgcgctatgggttaggaacacgcatgcatcagtacttcgccgaattcggcggcgttgagttggagatccccccacgtgatgaagcccctcatcgtattgtcaactttgatgaagacgatgaaaaatga

SEQ ID NO: 428956 - DNA, 480 bp, Serratia marcescens
atgattgtgctggataccaacgtcgtttcggaattgctgcggccggcgcctcactacaatgtattgcgctggttagatgagcaggatacgtatcggttctatttgagcgccatcgtggttgcggagctgtatacgggcatcgcctgcatgcctcacggcaagaaacagctcgaactgcaaactaacctcggcgacatgctgcaggaagagttttcagacagaatcttaccctttgacgtcggctgtgcgatgcagcatgcggaattaatgggcgccaatcgccgccgaggcattggcgtcagcatgccggatacccaaatcgccgccacctgcctgcattacggtgccgccctggccacccgcaacaccaaagacttcctccactgcggcatcgagttaatcgatccgtggcaggcgccgaccggccgtcggttgcatgaggatgcggcggaatactacgtgatgagcaggaagtcctga

SEQ ID NO: 428957 - DNA, 963 bp, Serratia marcescens
atggaatttaaagattactacgcaacgatgggcgttgagcccaacgccgatctgaaaaccatcaaaacggcctaccgccggctggcgcgtaaatatcaccctgacgtgagcaccgaagaagacgccgagagcaaattcaaggagctggccgaagcctatgaggtgctgaaggacgaagagcgccgcgctgagtacgatcagatccggctgcaccgcaacgatccgaactttggccgccaggcgcgcggcgagcacggtggctatcagcagagcgcttcatggcatggcggcggtgccgacgcacaagacttctccgatttcttcgaaagcatgttcggcgggcgtgcggcaggcgggcaccgctccgcttcgcactcgcacggtgggcatggcttccgcggccaggatctcgagatggaggtgccgctgttcctcgaggaaacgctgcatggccaaagccgcgagatcgcctacaagctgccggtgtacgacgagctggggcggcaggtgagcgaagccagcaaaacgctgaacgtgaaaatcccggccggcgtgggcgacggcgagcgcattcgcctcaaggggcagggcgttgccggcgtgggcggcggccagaacggcgacctgtatctggtcatccgcctcgcgccgcatccgctgttcgagattgacggccacaacctgagcatcgtggcgccgctcgccccgtgggaagcggcgctgggggccagcatcgaggtgccgacgctgaccggcaaaatcgcgctgaccgtgccggccggcagccagagcggcaaacggctgcgggtcaagggcaaggggctggcgggcaagaaagagcccggcgatctgtatgtcattctcaaggtggtgatgccgccgaagccgaacgagaaggccagcgccctgtggcgagaactggctgaacaggcggcgttcaacccgcgcgcggaatgggagtaa

SEQ ID NO: 428958 - DNA, 852 bp, Serratia marcescens
atggataacaatcaccaaaaattcgattcacagtcgattgccaatcgggtcagggagctgtttttacattacgggattggaaaacgtcagcatgcccgagagctcagccgcatcttggatctgagtttttcacatgcgcaccgcaaactgaaagggcaaagcccttggacgctggagcagatcaacagcgtcgcggccgcgctgggagaaacgccggcggcgatcgccgatttgagcgccgaacacgagacgcccgagccaaacatggcgcgcgatgccatctttgtcgtggcgggggtggcgataccttgcgtcgggcacatcggcgacgagcttgctgccgggcggccggcggagtttgtggcgctgcgcgtggaagggcagtggcatatctatcgcgccgatgaggcgccggcaggcccgcgttacggcgtcgatctgatcgaaatccggcccggcttcggcgacgacgagcggctgagcatcgcggtattggacgattcgcatcaggcggccgatgagctggccaagtatctcggcggctgcggtttcaacgcggtggcgttttacgacgtcgacagcttctgtcaggcattgcagcaaagcctgttcgacggctacgtggtggactggctgatcggcgaggaaacggcggatcgctgtatcgccaccatccgcgcctccgacaacccggatgcgccggtactggtgctgaccggcgagctggggaccgaccgacgcgagtcggaaatcgctcaggcgatgcgcgagtacgacgtgctcggcccttatgaaaagccggtgcggctccatgtgatcgaagccgcactgcaacgctgttttaatctttag

SEQ ID NO: 428959 - DNA, 1317 bp, Serratia marcescens
ttgaaaaccctcttaaaatcaacattatgctatttcttattcttaccattccttaccattgccagcgtcggtttcttatccccaagtggtgttaataaagatttcgctgacaaagtagattttgcaatgatcaatgtttataacgcagaccaactgcgagaaaacctcgtcattgccaaagagcataatttgaaaattttcttggatctgggaccatccatcaatacagccagagagactaaagatattaacgtaaattatcacgatggaaacggcagtgttcaaaaaaaagtgttcactccacaggagaaaaataaactaaggaaattacctgaacccgatgaactaaatacgagactaaatctgtacattcctatcatcaaagaatacccaggtaccgttgcggctatctttcttgctgacgaaccctatttaaacggattaaataaaaaagacctcgaacttgtcgcagagaaaacgcggaaaatattaaacgacaacaatttaaaaaaaataaaactaggcgttatctttgccagtgcaatgtttgatcgtgattttgcaaaaatgatggatggaaactcgtcaaaatacgttgtcaatattgatagtcattataaaagcattatggaaaagaaaccgactaacgatgagttgcaatgggttgaagcgattaaagccaatcgactgacaacttatgactcagctgggaatctctatacacaagggggaattcctaaagggttcgacatttacacctttgatttttatctctcgactatactgttagataatctttatgaaaacgtcatcacttggttgaaaaataaaaatatcagcaccagctgtgaaatacttcaagaaaaaaccatcagccaacttagaaatgaactgagcttcttcaacgatgggccggtttcaacttctaaaaaagaaatggatagcgatcaacatctgctagatgctttatatcaatgtcgtatggaaacggtcaccaaactcttgaaggcagaaatagagaaaacatcacctaaggcagaaattatccttatttctgaatccagcagcaatggtgcaatggaatttgacgcacagggaaacattgagaaatatcaaccggaaaaactggtggaactacgtgtcttacaagaagtacaaagagcaaagaaattctatcaagataatgccaacagcaatgtttccggcatcatgtttttcctatatgccaatgaatatgataagacgataaagattaacattggtggcgcagctggcatgccagcggtattgagcgaaatttactctatcaaacaatga

SEQ ID NO: 428960 - DNA, 1203 bp, Serratia marcescens
atgcttaccgatacgaaactgaaaaacttaaagccaagagagaaactctataaagtcaccgatcgtgatggcctctacgttgccgtgcaaccaagcggatcagtctccttccgatatgactatcgaattaatggccggcgtgagacgctgacgataggccgttatggtgcagacggtatcacattggctgaagcgcgcgacgaacttaatgccgccaaaaagatggtggatgcaggcctgtcgccggctgcagcaaagcgcgacggtatcatgcaaataaaaggggcggataatttctccgactataccgtcgcctatatgaaacacgtccgtcttgcggatagcactcgggcgatgaaacaggcagtgatcgacagggacatcctaccaacgctggggaaaaagcttctgcatgaaatcactacgccaatgctccgcacactgtgcgataagatagtcgaccgcggcgctagggcgacagcgatccaggtacgtgaaatagtcagtgccgttttcacccatgctattgaccgcggccatgcagtgccaaatccggcggcaaatatcaaagcttccagcattgccacattcgaagaacgcgatcgcgcgctggagccttatgagatcggggtgttcttcaatgctctaaactcaaccggcgccgcatcttcattaaaactggctttgaagctgatactgatcacgatggtgcgcaagggggagctgactgacgccacctggaaggaggtagatttttcttcagcgcgctggacgataccagctgagcggatgaaggcggggcggccgcatgttgtttatctgtcccagcaggcgatcgatatcatggttgcactacaagttgcagcgtgtggttccgatttcatcctgccggccaggtataacccacgaaaatctatgtccaactctgctcttaaccgagtgataaatacgacaaacgaaaaaatcagggaatcaggaaaagaaatagcgcacttcacagttcacgatctgcgtagaactgccagcacgctgttgcatgaagaggggtttaatacggattggattgagaagtgtttggcccatgagcagcgcggcgtgcgcgcggtatacaacaaagcagagtatgccgaacagcgccgggatatgctgcagcagtgggccaatatggtggatgggtggatcgaagcggagcgggtaaagtag

SEQ ID NO: 428961 - DNA, 285 bp, Serratia marcescens
atgaaacacaaccgtgatgatgttatgcagatcgtgaaagacaacgagaacatcggctatgcaaagataaaggaactgtacgaaatggaacacaagccaatctcgtcacatgcccttagccgtgcgctggcgacgttggttgaccaccagctcatcgagcggaagctacacggcaatcaaccatgcacttacgcgtattccggaggacagcatcggttcgcacaaagcccaaaaatagccatgttcgatcaatgcctggcatcagtcagcgcacgacaaaattga

SEQ ID NO: 428962 - DNA, 654 bp, Serratia marcescens
atgacctatcaacttatctacgcagatccgccgtggcagtatggcaacaagatcagcaacggcgccgccggcaatcactacagcacgatgacgctgcaggacttgaagcggcttcctgtatggtccatctccgcagaaaacagcgtattggccatgtggtacaccggcacgcatgcagagcaggcgaaggaactggctgcggcttggggattcgacgtgcggcagatgttcctgtttacctgggtgaagttcaacgaactggcagagcgcaccatcaactcagcaatcgaggatgggctggtcgacttttacgacttcctcgacctgttaaacggtgtaacccggatgaaccccgggaattacagccgaggaaaccaagaatcaatgctcgttgctgtacgcggtgccggactcgagcgccgggatgcatctgtaaagcaggtgatctacgcgccgattactcagcacagcgcgaaaccatgggaggcacggcatcgtctcgagcggttatatggtgacgtgtcacgaattgaacttttcagcagaggtgacgcgccaggatggcaccattggggtaacgaatgccctcggaatgacgtcgaactgctccccggaagattcaccatcccagagtcagtgaggatcgcatcatga

SEQ ID NO: 428963 - DNA, 879 bp, Serratia marcescens
atgagcaacgaactctctttgacatctcaacacagcgccacagtaggaactgcagcggccattttcagcccggaggggatggatcggcttgttcgcttcgcagaactgatggcacaaagcaaagccaccgttcctcagcacctggcaggaaagccggctgactgtctggcagtaacgatgcaagctgcgcagtggggtatgaacccatttgctgtagcgcagaaaacccacgttgttaacggctctctgggctatgaggcgcagcttgttaacgcggtagtctcatcatccaaccttttggccactcgccttaattacaaatgggatggcgactggtcgaaggtgaacggcaaaaatgataagtctgctgatctgacggtaacggtatgggcaacgctacgcggagaaaccgaacctcgctacctcactatcagcatgaaagatgccggcgtgcgcaactcaccgctttgggaacacgatccgaagcaacagctggcatacctgtgcactaagcgctggtcacgcctacatgcccccgatgttctgctgggtgtctataccccagacgagcttgaggaaaccaaaccacgcgttgaacgcgacgtcaccccacccgcaaccagcgccgccggcgtaaatagccttatcaacggcaagaagccggaaaaagagatcaagacggtgaaccaagatgagcggtcgcctgacgatctgctggctgcatttaccgaagcggcaaacaaagccgcaagcgtggaagaactggacaaagcctataaatacggcgcgcacgttctggcgccacatgaagaacagctgcaggcagccaccgacgtttacaacatccgtcgcgatgagttgaacgaagtcccaatgtaa

SEQ ID NO: 428964 - DNA, 822 bp, Serratia marcescens
atgaaacaaggtatctaccatgatatttcaaacgaggattaccacgccggcgacggcgtgagtaagtctcagttggatatggtcgccaagaacccggcgctgctgcagtggatcaagtcggcaccggtcgacactgaaaagctaaaggcgctggatatgggaacggctctgcactgcaagttgcttgagccggacgaattcagcaagcggttcatcatcgcgccggaatttaaccggcgcaccaccgccggcaaggaagccgaggcggcattcctgaaagactgcgagcataccggtaaaaccgtcatggacgcagagcaaggacggaagctccagttaatgcgagatagcgttatggctcaccccgcggcgcgctggatgctcgaagcagacggtcactgcgaatcttcattttactggactgatccggaaactggtgagttgtgccggtgccggccagatagatacctcagcgatcacccggtgattgtggacgtaaaaaaggtcgcagacatggaccgctttgcgcgccacatcgaagaattccgctatcacgtccaggacgccatgtaccgcgatggattccagcaggtcaccggcgaaactcctggatttttcttcctggccgtcagcgagacgatcgactgcggccgctacccggtacgcgtttttgaactcgacgcagcagatgtagacgagggtcaccgactctaccgccgggatctatccacctatcaccaatgccgcatcactgatgaatggggcggcgtcgaaaaaattcaacgcccagcgtgggcgcgcaaacaggaccaatacgcatga

SEQ ID NO: 428965 - DNA, 306 bp, Serratia marcescens
atgaacgcacaacaggctatcgatattgaaaagatcgttgccggcttcacggagcaggacaacgaagcggtttatgcagaggttgaagcgctggataagaaggtgccgatccacggcttcaccgctttcatcagcaagtacctcccgccggactttgacccggaggttttagccctgggcaccgactcaaccgaatatcaggagctggcaggcgcggcaatttgggattgcataacggagctggtcaagcgtcagcgcgcattggagatctaccgccggcgccaccagttcgacgaggtggcgtga

SEQ ID NO: 428966 - DNA, 267 bp, Serratia marcescens
atgacagagaagaaaacttacaacctggccagcctaagtagagaggatatggacaaggttaacgtagaccttgcggcgtccggtgttgcgtacaaagagcgcatgaatatgccgatcgtacctgcgcaagttgaagaagagcagctaactcaccttcgtgaatacttccgcgaacgtttgcagcattatcgtggagagagccacaaattcccagggccaaacgacccgcgataccagcagatggctgacaccaacggcaagaaataa

SEQ ID NO: 428967 - DNA, 597 bp, Serratia marcescens
atgaaaagcattaacgacatccgccgcgagaacctccgcgacatcatcaaccgtgatttcgatggccgacaagtacgcctggcggaacggctggagattaatgccaacgtgatcagccgttggctgaagccggctacagacaagaaccacaagacgatcggcgactcagtggcgcgcaagctcgaggttgcagcgaacaagcctaagttttggcttgaccgcgatcacatgatggcaatggccgccggcgccgaagcagtgcaagaggaaaccgaaatcggcgctattgtggcgagcaatctggaattgtggatgagcaacaaccgcgagctttccagccaggctaaagttggcgccgccgccggcgttggccagtctactgttaaccgggtgctgagccgtgaaggcaatatcaccatcaacagcctggaagcgatcgccggcgcgttcgggcgccgcggctatgagctgctgctgaagccaaaagaccccaccctgattaattatgatcgatcacaatacgcgcagttgccggccgaagataaagccaagatcgaatcattcattgagttcgtgatgcagcaggcccgcatatga

SEQ ID NO: 428968 - DNA, 219 bp, Serratia marcescens
atggagccgtttaacttcaaacaattctggctggggatgagcaaagatgagcgtgatgcgtttgcagaagaagccggcaccaccgcgctttacatcatgacgcatacgcaaaggaagacgcgaatgccgaagaaaaagttcattgatcagctatttaaggcgtgcaaaaaaagaaagccggatttgacaaagcaagagctggtgctgttcttctactga

SEQ ID NO: 428969 - DNA, 951 bp, Serratia marcescens
atggctcgcattcggacaataaagcctgagttttggactgatgaggatatggctgaagtgtctgaagctgcatgtttgcttgcaattggactgctgaattatgcagacgatgagggctatttcaacgctaatccgaagcttatcaaagccgctgtttttccaatccgtgaaccttccgtgagcattccggtaatgctacgggagctttccaaccatgggtatttgagcatgttttacacctccgataaccggcaatttgggctgatcaaaaactttgccaaacatcaggtcgtaaacaagccaagaccaagcaaaatcaaggagatggagttactaccgtacaactacggtagcactaccgtaagcctaccattaggaatggatcagggatcagggaatggaaatgataaaaccccactctgcgcgcgagagaaaaacttgccagctgatccgccgcaggaacaacaaccgcctttccctttaaacgggaatcaattcggcaaattcaccatgcataacggatggcaacccggcgccgacttccagcgaatggccgccacctgggggatgaagatcgccgagccagttacgccggaagaattgcaggaattcattggctattgggagcctgaaggtaaggcgttccatcaagcacagtgggaacagaaacttgcacgcagcgtgctcatgagccgcgcccgtaaaactacaggagtaaaaaaccatgaaacaggtaagcgacctgatgggacaactggacattggcgcgggaatgccgccgaaggggtatacgcagcactcacagaacagttgcgatcagacggacttagcgaaagccagatacgcaaaattttggatgaggatgatggagatctattcggatcggtggacggcgaagaacggcagggcaccgtcgttactttggaagcaggcgattacagcgctcactga

SEQ ID NO: 428970 - DNA, 354 bp, Serratia marcescens
gtgaagcgagttgcaaaccgttcctttgcccttggccgccttaagaccgggcagatgaataagaccgaagaggcgtatttctctgaactcaatacgcagaagtcatctggtctgatcgcctggttcaagttcgaaggagtaaagctccgtctggcagataacacgttttacacgcctgatttcgcagttatgcgcgcagacggaacgatggaactgcatgaggtgaagggattttggactgacgacgccagggtaaaaatcaaagtcgccgcggatatgtacccattcaggtttatcgcgctcaaggccaaaagcaaaaaggccggcggtggctggcagcaagaggagttttaa

SEQ ID NO: 428971 - DNA, 213 bp, Serratia marcescens
atggacaacatcgacgatgcaaacgagcgcgcagccacatacctgcaggcgcagatcgatgcagtaaccaaaaagtcatcactgccggcggcgcatgaatgcgacgagtgcggcgaagaaatcccagaagcacggcgcagaaccgtgccaggcgtccggctctgtatcgactgcaaagagctggaagaactgaaccaacgtacacacaggtaa

SEQ ID NO: 428972 - DNA, 483 bp, Serratia marcescens
atgaaaaatatccttgaaaatcaatgtataaaaattgataagccgttaccaatgagttatgaggctctaaaggctgagcgcgatgcgctggcacaacgggttgagatgttgtctcaaaatcttggaaatgccatctggggtgagcaggaagcattgcagcgagttaatgcgctggctgtggagaatgcgagcttcaagcatgcgctttccgtcattttggaacatgtggatgtaacagacaaagggcaagccggagtagtggtgatgattgccaatgatgagctgttcaactccgaaaccccggccactgacgcagcacttgcagctatccaggcgcagggagtggagaagtttgctgcgcagcaagaacagttggccgctgactatcgcaaactatctcctggctgttacggagagacatcatctgctgaaaatgcactgatggcgcgggattttgccgccaagctgcgggagggtaaataa

SEQ ID NO: 428973 - DNA, 297 bp, Serratia marcescens
atggcctgtaattgctttgaaaaaacagccgcgctgttcaaggagcgcatttccgaaaaggtcggtgatgcccttggcgagattgatgaggctgggttcgagaactcgctctacaacttcagcggtggcgatcattcccctgtggcgatgaattttaaattccgctactaccgcaagcgcaagggcggcggactggcagcaaaccagaccaaagcagaccacctttgcatgatgagctactgccctctctgcgggactaaattcgaaggcgacgaaaagcatccggaggccaaatga

SEQ ID NO: 428974 - DNA, 423 bp, Serratia marcescens
atgaaagagcgcccatatgacaaccgcaaggctcgcattgagaagaaattcagcaccgaggcgatgcggctgctgatagcactcatgccgcgtcaatatcccgccgatgcatttgaaatgggttggggctacgaatttgatttcgaccaatggcaagtaaccaccgttgattattggggagaggctgacagtttcgattcgttttatctgctgcacgatgctctgattttgcaaaccactgactgggacggaatcagtaaagcccacgatgctgcaggctgggaaaattacgattccgttgacgaatccccattctattcgccgtggcgtcttggtgatgtaacccgccgagaaatcattacccactgccgaaaattggttaaggctggcgtgtgttgggaggtgcgtgatgccagcaaatga

SEQ ID NO: 428975 - DNA, 549 bp, Serratia marcescens
atggacaataagctgagcgagccggtggcgtggactgttggcggatttgctagtcatgataaaaaatgggccgagcgcagaagcgcagaggagaatcttcttcttgaacccctctaccgccacccggtagtaactggaattgatgaaaatcattatgaccctgagcttgagccggggctttatgttgccgaaattatgactaaaggcggggctgcagtgattaacggttactacaccgccccgccagcgccagcagttcctaaggaaatgaccatagagcaatcttatgaaaatgttcaaacatggcattacgccaatggctggaacgcctgccgcgccgcaatgctggctcaacctgtaagtagcggttacaagttgccggacaacgtgcgagaagccttaactttggcgcttcaggctatggaatttatgggcgacacactgaataatatcgacgcggtatgcaccgaagatgttgagtttgtgacaccggcattcacagccgtacgcgagttgctggcagcagcgccggagggtgggaatggctaa

SEQ ID NO: 428976 - DNA, 387 bp, Serratia marcescens
atggctaagagcgacgaacaacgcaaggctgacgcgcgcgaccgtaagcgcgctcagcgtcaacgcgaaagagaagcggcgagcagcgccgctgtaagcggccggcgacggattacgttcgaggttagcgattacatcttcgagcagatcaaggccaactgtagtgcgcgtcgccctgggaaagaaccttatagcgtcgatgaatatttcgaattgctggcagtgcaggacatcaaccaactgaagcgccagcttgcggagctggccagccacaaatgccagtgcggtgagtctatgcctggtccagccggcgggtgttaccgcaacggagaagcggcgtgcggtcagacacagatctggcgagagctgatgctcaagacgctgtga

SEQ ID NO: 428977 - DNA, 555 bp, Serratia marcescens
atggcgagagacggtaagcttaacgcgcagatggaacgcttctgccaggaatacataaagaacccagacaaccagaccgcggcggcggcggctgccggctataagaatgcggccgtgtcggcatcgcgcaacatggacaacccgaaggtgcaagagcgtatcgctgaactgatgaagcaacgcaacaagcgaacgaagatcagcgctgactatgtgctaacccggctgattgaaatcgatcagatggacgtgctggacatcttgaatgatgacggcggccttaagcctatcagtgattggcctaaggtttggcgcactacactcagcggcctggacatctcaacgacgatcacaaacttcgatgaaaccacgcttgagaacatgcttaagaagatcaagtggccggataaggtgaagaacctcgagctgatcggtaagcacgtggacgtaatggcattcaaggagcgacttgaggtttccggcactataactattgccgaccgcatggccgccgcgcgccgccgggtcaaagagcaggctgatggtgaagaatga

SEQ ID NO: 428978 - DNA, 1473 bp, Serratia marcescens
atgacagccgcagccatgtcgccggaagagcagctcgtcgaggatatcgcctcattcacttatgacccgctgggctatgcgctctatgcgttcccttggggtgaggatggtacagagcttgcgcacgctaccggtccgcgcaagtggcaggagaagacattcagaaggattggacagcacctgcaaaaccctaaaaccagacatcagccgctgatgattgccagggcttccggtcacggtatcggtaagtcagctttcatctcgatgctgatcaactggggtatggctacatgtgaagactgcaaaattgtggttaccgccaacaccgaaaaccagctgcgtactaagacatggcctgaaattacaaagtggtcacgccttgccattcacagcgactggtttaagcctaccgccaccgcgatatacagcacagacccaggccacgataagagctggcgcgctgatgccataccgtggtcagagaacaataccgaggcattcgcaggcctgcacaacgaacgcaagcgcatcattctcatttttgatgaggcatcgaacattgcggatctggtatgggaagtggcagagggtgcgctgacggataaagacacggaaatcatctgggtggctttcggtaacccgactcgaaacagtgggcgtttccgcgagtgcttccgtaaattccgtcaccgctgggattgcgagcagattgacagccgtaccgttgaaggtattaacaaagaccaaataaacaagtggattgaggactacggcgaagacagcgacttcgtgaaggtccgtgtgcgtgggatattccctgatgcctcggatgcgcagtttatccctactggactcactgatacagcgctggcgcgggtggttaccgagcgagatgtggcgcacgctccgacaatcatcggtgtcgacccggcatactccggcgccgatgacgcagttatctacatgcgtcgcgggctgcatgcaaagcttctctggcgtggcaataaaacaaccgatgacctgatcatggccaagcgcattgctgacttcgaggaccagtatcacgccgatgctgtgcatatcgactttggctatggcactggcctgcactcaatcggaagtggttgggggcgttcatggacgctggtgccattcggtagcgcgtcgagcgaccctcagatgctgaataagcgcggtgagatgtacaacaacgccaaggcctggttaaagctcggcggcgcattggatgagcgcgagacggcagaggatttgtcagcggccgagtataaagttaggacggatggcaagatagtgctggagccgaaggaagacattaaggagcgactcggtcgctccccgggttgtggtgatgccttcgtgctgacgttcgcctatccagtgacaaagcgccagcacgcattgccgggcgagagatacggtggggctgtcaccgactatgacccatacgcataa

SEQ ID NO: 428979 - DNA, 174 bp, Serratia marcescens
atggaacgaagagaactcattgcaagtctgttcgaagaacttgtgatagccaggggtgtgattaaagagatttgcacggagcgaaacattccagagccaaatgcttctttgcagcggatggataaaaccatcaatgcagcaaaagaatacatgaaggaaaacgtctcattataa

SEQ ID NO: 428980 - DNA, 372 bp, Serratia marcescens
atgaacgacaaagaaatcgagcaggaaatccaagccaaaggaaaaacagcgccgcgcgtaacgcctgaccatattgaaagcattatcgccagcgaacatttttttaccgctgctcaaggatacgataagtcagccgctgataatttccatgatgacccttacccactggcaacgccggacgcattacacctgctgacattctgcgttctggtacttcgcaatggcttcaccgtcaccggcgaaagcgcctgcgccagcccagaaaacttcgacgccgaaatcggcatgcagatcgcccgcgccaacgccgtgcaaaaaatctttatgcttgaaggttatttgctcaagcagagactgcatgaaggcgaatga

SEQ ID NO: 428981 - DNA, 1686 bp, Serratia marcescens
atggctgagcaggaatcccgcaaacagtttctggaaaagcagctgtctcagctcgtaaccgcgcggacgtcgtatgactcgcattggaaagaactgagcgatttcattctgccaaactgcgggcgattccttacaaccgatgctggccgcaacaagcgcaacaccaaggttgttgaccctaccggcgggcttgcttcgcgcactcttgaatctggcatgttgtccggcatcaccagtccgactcgcccatggttttctttgagtacgccggataagcagttgatggatagctggccggtcaagatgtggctatctcaggtcgtcgaattgatgaacgacgtgatgaacaaatccaactggtatcagtccctgacggttctctatcgataccttggcacgtttgccaccggtgcgatttccatcctggaagatgaagaggatgttatccgcacgcatgtgctgccgatcgggagctactacatctcgaacagcgatcgcctgcaggtcgacaccgtcttccgcaaattctccatgacctgccgccagttggtgacaaagtttggaaaggagaacgtgagcgaagctgtggcgtcagcctgggataacggttcgtttgaaacgtggttcgaagtcgtgcatgccgtattgccgaacaccaaccgggacactggaaaactgaacgcgaagaacaagcgtttcagctcgatttattacgaaccaggcggctccggcgacaaactgctgagcgagtctggtttcgatgaaatgcctatcttggtgccgcgctgggacatcaacggcgaggatgcatacggctcatcatgccctggcatcctcgcactgggcggcgttaaagcgttgcagcttcagcagaagcgcaaagaccaggcgatagacaagttggttaacccgccaatgatggcgccaagttcgatgaagaatgaacgcctgtcgttgctgcctggcgatgtttcctactacaacggtgtcggcgacacggctggattcaaaccggtttacgagatcaacccacgcattcaggaactgctcggcagcattcaggacgggcgccagcttgttaatgagtgctacttcgttccgctgttcaacatgttcagcaacatcaacacccgcagcatgccgatcgaagcggtaaacgagatgcgcgacgagaagatgctgcagatcggcccggtgctcgaccgcctgaatgatgagctgcttgacccggctatcgatcggattttcaacatcatgatgcgccgcggcatgttgccaccacctcctgatgaactacaggggcagccgctgcgcgtggaatacaccagcgttatggcgcaggcgcagaagtctgttggcattggctccatcgagcgctttgtcggcttcatcgggaatatggctgcggcagggttccaacaggccgctgacaagctggacgttgaccaggcgatcgatgagtacggcgacatgcttggtgttcctacgactataaccaagtccgatgagcaggtgcaggcagagcgcgagcagcgtgcgcagcagcaacaggcagcgcagagcctgcagatgggcgccggtgccgcggatatagcgaagacactcagtcagtcaggaacggcagaccctaacttactgaccagtattcagcaggctatgcagcaaggccaggcggcgcagcaatga

SEQ ID NO: 428982 - DNA, 300 bp, Serratia marcescens
atgatgactcgcgaacaactccaacagcgccacgctgacgacgtgaagaaggtgatggcaacagagagtggccgccgttttgtatgggggcttctcgatcaggctggtgtgtttcgcatctcattcaccggcgaagtcaacagcacaattttcaatgaaggtaaccgcaattcagggctggcgctattcaacgatgtgttgaagttctgccctgaactgtacctaaagatggccgccgaggccgagaaagacagagaggctaatcatggcaacacaacgccagaaagtgatccggaatga

SEQ ID NO: 428983 - DNA, 267 bp, Serratia marcescens
atggcaacacaacgccagaaagtgatccggaatgacggcggcgtgcaagtcgttaaggttctgagcggcggcggttcctccgttgcttggggtgacatcaccggcaaaccaaccacattcgcaccgccggcggcatccgcttctgtagtcggcggcgtgaagcaggctgcaacccaggctaactcaaccgcaacagatgcggctgggctggtaactgacttaaacgctctgctggccaagttgaaggccgcggggatcatggcttaa

SEQ ID NO: 428984 - DNA, 711 bp, Serratia marcescens
atgaacttgttcgaacgtttgatgtatcgccgtctgtgctctgaagcttcgcctgaaggcggtgatggtggcgcagcccctgcagcaaccggcgataacccggcagcagatgccaatgcagctaatcctggggaaggtgacaacacggaagacgaagggaaacaggaaggcggcaagacggcagaagaactcgcagcagaaaaagacgcgaaagagaaagccgataaggaagctgcggaaaaagcggaaaaggataagaaacccgcggcaccggagaaatacgagttcactccgccggaaggccaggaactggatgccaatgctctggctgtgtttgagccgatcgccaaagaacttggattgagccaagagcaggcacaaaagctggtcgacatctatccgcagatccagcagcagcaggcagaagcctggagcaagcaagtttcggattggggtgagcaggtcaaggccgacaaagaaatcggcggcgacaagttcaactccagtgtaggcgccgcgcagcgcgcgctggatcagttcggcaacccagagttgcgcgaatacctgaatgcgagcggcctgggtaatcacccggcactggttcgcttctgtgcaaaagtcggcaaggcgatggctgaagataccttcgtcgtgccaaatcaaggcggtcagcgtagcgcggccgacattctctacggcaagaaggagtaa

SEQ ID NO: 428985 - DNA, 984 bp, Serratia marcescens
atggctattaaaagcaccaacgcgctgacgctggcagactgggcaaagcgcactgatcctgatggtaaagtgccaaccatcgtagaactgctgtcgcaaaccaaccctgtgttgaccgatatgctgtttgttgaaggcaaccttccaactggccaccgcaccaccgtgcgcaccggtctgcctgcggcaacctggcgcctgcttaactacggcgttccatccagcaaatccaccacggcacaggtaacagacagcactggcatgctggaaacctatgctgagatcgataaagccctggccgatctgaatggcaatacggcagagtttcgcctgtctgaagataatgccttcctggaggcaatgaatcagacgatggcagaaaccatcttctacggtgacacgcgtattaaccctcagcgattcaccggcctgtcggcacgttataacgacaagtctgccaagaacgcgcaaaacatcgttgatgccggcggcaccgggtcaaacttgacctctgtatggctggttgtttggggtagcaataccgttcatggaattttccccaaagggcagaaagcaggtctgaaccatcaagaccttggcgagcaaaccctgaaagatccgaatggaggccagtatcaaggctatcgaacccactacaagtgggacaatggcctgactgttcgcgactggcgatatgccgttcgcattgccaacatcgacaccaccaagctgggcgccgacgacggtccgaacctggcgaagctgatggtgcaggctttgcatcgcatccctaacctgcagatgggtaaggctgtgttctatatgaaccgtgatgcggctgaatacctggacattcaggcaactgaaaaagcctctctggcgatcagcgttaaagaaaccgaaggtgtgtggtggacttcgttccgcggtgtgccagtacgtacctgcgatgctctgctgagcactgaatcgcaggttcaataa

SEQ ID NO: 428986 - DNA, 447 bp, Serratia marcescens
atgatcctcgactatctgaatatgttctcgcaggcgcaggctgttacggcaaccgcgccatcaactgacgtaatcgacctcggcccgctgtatgccggcaatgatgtacgcgatatcggtcctggctacccggttgagttcatcgcccaagtggcttccactgccgcggctggcggtgcagctaccgtaacgatcagtctgcaaacctccaagaccagcgatttcgccagtgcaaccacgctgctgcagaccggtgcaatcgcagttgctgatctgaaggttggttatcgctacgtggccactgttccacacggtgtgcagcgctatttgcgcgtcaactacaccgtggccactggcccgttgaccgcgggtgctttcactgctggcctgctgctggatgctgatgcacaacgcagctatgcaagcgccttcaatatcactgtttaa

SEQ ID NO: 428987 - DNA, 297 bp, Serratia marcescens
atgtcacaactgaaaatgtaccgcgtcacacggaagtcattcatcaacgggcatctgctggaagagggcgacatcatcgaatacggcggcaaggctggcgacaacctgcagctgatcgatggcgaaggcaatctgctggaagatgggggcgaatgtggcgatgacgacagcgctaagctggccgcgctgcagcagcagtatgaagaaatctttggctccaagccgcaccacaaagcgggcatcgccaaattatcagaagaaattgaagccaagcgcaaagagttaggcatcaactaa

SEQ ID NO: 428988 - DNA, 324 bp, Serratia marcescens
atgaaaaccgtaaacctcaagatcggcacagacacctacgaaagcgaaggcggaaggccggagactcgcgacgaatatccgtgggggcttcgcttcacgctgaacaatgacatattggaaaagctggggatcccactgccaaaggttggcgaatcactgacaattggcggcctggctaaagtgctgtctgtctccacccgcaccgaaggtgataaagccgaaagcagcgttgatctgcaattcacagatattggcgtagagccggcggccgcgccgcagcgttctgctgccgacacgctttatggcgacgcaggaggcgagtga

SEQ ID NO: 428989 - DNA, 609 bp, Serratia marcescens
atggcatccgttatccagatctgcaacgtggcgcttggtcggcttggcaacagccgggtgattgccagcttgacggaaaagagcaaagaggcggcagtatgctcgctgttttatgaagactgccgcgacgcggtgctggctgattttccgtggaggttcgccacaaagcgcgtggcgctcgccgatttggatatcgaacagcctgattggcaatacagttaccgttacccggtggactgcctgcgcattgttgcgatcgtctctccagacggtgagcgctttattacgccagaacggcgcgtgccgtatgaggtcggttctgatgagaatggcactggccgtttgatattgactgacctgccgaaagcatggctgcgctacgtgacacgcgtcaccgacccaaacatgtttgacgcagagttccgcgacgcacttagctggcgcctggccgccgaaatcaacatgcagatcactggcgatgccagtctcggtaatcgcgccgagcagaaataccaactcaccatttcgtcagcttcaacgctgagtatgaatgaaacccaggagccgccggcaccgtggtctgaggtttccgacgcgagggcatcataa

SEQ ID NO: 428990 - DNA, 2502 bp, Serratia marcescens
atgacaaccagcctcattcaaccgtcctttgctggtggcgaggtatcgccaagcctttacggccgcgttgacctggagaaataccagacgtcactgcgccgctgccgtaacttcatcgtgcgccaatatggcggcgttgagaaccgcccgggaacgcgctatgtggcgccggcaaagtttcccgatcgcaagtgtcgtctgatcccgttccagttcaacacggagcagacctatgtgctcgaggtcggcgatcactacttccgcgtgtttatggatggagcacaggttgtctactcatctggcgccagtgccggccaacctgtcgacgtaacaacgccatgggccgctgcagatatcgatctgctgaagtacacgcagagcgcagacgtgatgacagtttgccacccgaactacccacctatggaaatccaacgctatgcgcacgatgactggcgcactgcagaggtgtccactgtcagcggtccatttgctaacgtgaacattgacgagtcgatcactgtctacgccagcgcgacaagcggagtggtagacctcaccgccagcgcatcgattttcaaaagctggcatgttgggaagctgttctacatggaacaaaagaacgtcgacaccgttggtcgctgggttaccggtgagcaggttagcgttgggaatatctgccgataccaggagaactattatcgttgcgttgatgctggcgaacgagggcatactggcccggtggcgccaactcataccactggtgatagctgggacggctgggctgtagccggttctgatgcctatggcgtcaaatggcgttatttgcattccggccgaggtatttgccgcattacgtcggtaagcggcgacgggatgactgccacagcagaagtggtgatccgcaaggatggcgagattgagctacctggccaggtggtgggcgccgagtcagcaacatacaagtgggcgcattatgcctggaatggtgatgccggctatcctggcactgtcgtgtatttccagcagcgcttgatttttgccggctcgcgcagtcagccgcaaaccgtgtggaccagccgcagcggtgattataaggacttcggcacatcaaacccgaccgttgatgacgatgcgatcacctatacctacgccgggcgccagctcaatcaaatccgtcatctgatcgacgtaggctcactagtcgcgctaaccagtggtggcgagtacaaggtgaacgggaaccagcaaggtacgcttacccagtcggcctttcagttttccagccaggggcagaatggcgccagccacgtgcagcctattgcgatcagcaacgtcgcgctattcatacagcaaaagggcggcgcggtgcgcgacctggcctactcgtttgacgttgacgggttccagggttctgacctaaccatcctcgctaaccacttctttaccgggtaccagattaccgattgggcgttctccatcacgcctatgtcgatcgtttggtgtacgcgcaatgacggcgcgctgttgggattaacctacctccgcgatcagcaggtggcagcgtggcacttacacccgggtgccgggcgctatgaatcagtgtgcagcattgccgaaggaaacgaagacgcgctctattgcgtggttgaacgcaccatcaatggccagcagcgacgctatatcgagcgtatgcagagccgcctatacgatgtgatggacgatgcctttttcgttgactgcggcctgacgtatgacggcaggaaccgtgacgccggcaaaaccatgactcttaccggtggcacaggtgactggccatacgacgaagagatgacactgacggtggccggcgccagttacttcacgacaggtgatattggcagtgaaatccacatgccgtatgtcgaggatgatgtgagcaaggtgctgaagttgctgatccgttcggtcgcaagtggaaaccaggcagccgttaccagtaaccgaaatgtgccggcgcagttccgcggtgtgccagtcagtgactggagcatggcgcgctctacattcgcaggacttgatcacctcgaaggccaggccgtgagcattttgtcagatgccaacgttgagccgcagaaggttgtcaatgctggcgccattacgctggagaaggctggctccgtagtgcatgcaggactgccgatcgccgcagtcattgaaacgctggacgttaacctgaacggcaacgaaacactgctggataagaagaaactcttcacggccgcatcgttgctggtgaatgaatcgcgcggtgtgtttgctggtacgccaggtggcgagatgtacgaatacgcgcaacgcaacgatgaattttatgatgacccggtcgaaccgaagacgggaaccattgaattacaattggatgccaactggagcaagaacggccggctgattgtggagcagaacgacccgctgccgatgaccattctcgcagttattccgcgtgtaaccgtaggaggtatttag

SEQ ID NO: 428991 - DNA, 573 bp, Serratia marcescens
atgtgtgagcctgcaacaattgcagcaggtgctgctatcgcgatgggcggactaagcgcctatagccagattcagcaggggcgcgctgcgtctcaggttgccgacgctcaggctgagtcatacgaaaatgcatcgcgagatgcgatcaacaccggcaatgctgaggctgcgcgccagcgtcagcaaacacgtcagctacagggtcaacaggcggcagcgttcggcgccgccgggacggacatgaccagcggaagctcattgaacatcttcggcgacaccgcggccggcggccagctcgatgtgctaacgacgatcaataactccataaaccaaagcaacagccttgcatttcaggctgatgtgacgcgcacgcaggcaaagattgaccgacaacaatcaaacctcggcgcctttaccacgatcctgaatacgcccttgaaggcatttggtgcttacaaaacatttggcggcgatacctcgatattcagtagcgccagcaaggcctccaaggcaggaccggcttcaagcgccaatatgttcgataacgccaagaaaggcttcactttcctgtaa

SEQ ID NO: 428992 - DNA, 2649 bp, Serratia marcescens
atgccaatcgtcccaacgtatgagcgccaatcccgcgcggaaatggcgccggttaatcaggttgatattcgcgttccgcagactggcgtaggcgaagctttggcgcaggttggtggtaactacttgcaggcatttggtgaggaaaagcaaaagcaagacctcgcctttgcccagaatgccatgctgcagtttcaaacgcaggctgacgaccttctcaacaacccacaaacaggcctgatgacaaagcagggcgccaacgcgattggccagagcgagcaggttataggccagcttggcggccttgctgatcaggcgtttgcatcaatcccggacggcccggtaaaagaacaattcaggaatcaattccaggccgccggccagcctattgccaatcgtgcgcgccagtacgagatcggccagcgtcagcagttcgaagcaggtcagcagcaagggcttttggcaaacctgcagcagcaggctgaaaacagcttcgacagcaacgaaggattcgtaaatgccaacctgctggccagagagcagatcatggcatatggtcaagcgcatggacaaagcccggaagagattgaagccaattgggtaaacttccgggaaaactcagccaaggctgccttgaatgctcagcttactgctggccgctatgatcagttcctggctagaaatggcgagccgtcagacgttggtggcgtgtctcgattcactgcgcatggaaattcatctgctgcgcgaggtctgcgaaataacaaccctggcaacattgaggccagtgataaaaacccatgggaaggacagacaggcagcgatggtcgatttgccaagtttgagaccccggagcatgggatccgcgcgctggggaaaaacctgttgtcataccagaggcagggctacgacaccgtgtctgaaatcgtcaaccgctgggcgccggcctctgatggcaatgacaccgacgcctatattaaagcgctgtgcggcgctctgggtattggcgctaacgatcaggtagacatgagcaacccgcgcaccctggccgctctgtgcgccggtatcgtgaagcatgagaacggaagccagccatatactactgaacagcttggagcaggggtaagcgcagcgctaggcctatccgcgttggagtcatcgaaacgtcgaaccggtaacgcggcctttgataccgccagccctgcaacacagggaacctatctccgccaggctcaggcgatgcagaatgagcagcgcgcactgtatgcccaacaactcggcacgtcgctgaaggatgcgtattcagcccttgatgaaggtctgcagcctggtcaattgccaacgcaggcggatttgataaacgcctacggcccggccaaagggcttcgccagtggcaggacctgcaggatcaacagagctatggcggggtaattggagctgcaaaagatatgtcgccagccggccgccaagacttgctcgagcgcctgcgcccatcagaccctaatgcacctaacttcgcagccaatcagcagcgatgggacaagatgcaggcgaagtttaaacaactcgatacggagtgggaaaagaaccagggcagcagccggtttgagtcatcactgcagaacaacttcccactggacccaactgataaaaacaaccaggcggccgctgaccattattttgaccggaaggtcgcgcctggattcaatatcaataacgctgacagcatgaaccaggtcgctgagataaccacaaaatccggcatgctcccgacgcagatcaagacgatgctcactgcaggggctacatcacgcgatccttccgtcgtcgttccaatggccaagatgtacgggcagattttcgataacaatccggcggcggccaccggtgttgataagggtgccatggcgttctattcgaaagtttacgcctatgaccgcgctggtgtgcctgccgagaaagctgttgatatggcctacaaccaggtttatcagcaggacgatcgcttgaagcagatgattagccaacaggtaagggataaagactacatcaaggccagaaccaccgcagcgcaggacaatatcaatagcctttcgccgtcgtggacaagcttcggagcgccaagcatcagcgccgctgggcaggctaatcagttgtaccagcgtgactaccagaccatttacgacgccaactttgcccagaccggcggcgatgctgatcaggccaaggccatgaccaacgccatgattaaaaaggtgtgggcagtatcgaccattaacgggaaagaagaggtaatgaaatatgcacctgaagccgtgtatggcgttacgaacggttctggtaactggatccaaggccaatgggaagaagagaagcgggcgcttaaagggtctgcatttggtggtgcgcgcgatgacaccgatttagtcctgatacctgatgcagtaacgccacgcgatcagagttacagcgtaatggtgcgccagaagaatgcagaaggttacgacgatgttcgcacatattacggcgaaaatggtatgccgttgcgattcaggccggagcaaaaaacctctccgatgtacaagcaaactatggaaatccaacgacagagggttgatgcggcgcgcgctgctcggcaggaagaaaagtag

SEQ ID NO: 428993 - DNA, 3390 bp, Serratia marcescens
atgccaacgtatgagatgaagcctgatgatctgctgtctgctgatgtgcagagcattcctcagtctgatgatagttctacatatatggaaacgccgtcattgctttcggcgatcaacccattcaccgataaccagcaggttcagcgcggtcgtgacgcggctttccggattgataattccctgggaagtttcattgccactgcgccattcagccagtttgacaaggttgatgggtataaccctttcgacaatgatgcagctgatcttaaaggatatgaggattacgcagactcattcattgattccggctctcctgatgagacgcgcgctataaagcagcgcatcgatcagcagatgcaggacaggcaatatctttcagaaacaggcggtgccgggacaatatcaagcttggcgatggggcttatcgatcctatcaacctggcgtcgatgtttgtccctgccggcgcggtggtgcgcggcggcgaggttgctgctactgcaggtagatttgcccttgccaatgccgtcggcggtatcgcgtccgaggctgcgcttagcgccacccaggaaactcggacattggaagagagcgcggctaacgttgccgttgatgctatggttggcggaatactcggggctggggcgcagttgcttgccggtgccggtcagcgtaccgcggtatctcaagcggtttccagtaacctacgtggcaatgattctccgcagagcatcggcgcggcgcaggttttcaacacaacgctggatcaggaacagcttgcaggtgttggattaatcaacaaaacgttgagcgttaatcctggcggccgcctggctcaatcgccatcccgcgcgtcgcgggcaatcaatcagcaactggcagagaacaactatttctttgcgaagaacgatgaagggttggcaacgttcaccgcggctgaaaccaagatcaagcaatatgatgccatgctgtacaagcaaatggagtcaaccaaggatgcttatcaggcgtacagcaaaaacattcgcgccgccggcggtaagcgaatgaactttgttgatttcaacgaggccgttggcatggctatgcgccgcggcgatcagagtgacattcctgaagtggcacaggctgctgctcagattcggccaatgttcgaagcaacaaaggtccgcatgcaggaacttggcattttgccagaggatgtcgacgtatcaacggcacaaagctacctgcctcgcatttataatttcgacaaaattctctccgatcgcactgagttcagagggcgcattgccaactggattcagggcatcagtgcaaaaggtgcagatgctgccggcgcgcgcattgagaagatcgattcaggtttgtctgctgctgcagaggccgagccgcgcgcaaaagcattggctgatgaaattgccgcggcagagtcatggtctggccgtaaaactgaacttatggatgaggttggaaacaggacgaaactgatcagccaggagcaggacttaactgccaggctggagaagcaacaggcgcaactggccacagccaaaaatcaaaagctgatcacccggcttaacaaagaggtttctgacttgcgcaccaagctggatgatatttccagggcaaaggaggagcttccaaccctgcagcgccatcttgagttgcttgataacccacgcaagcaccgctcagagctgcgcaagctgcagaagaaggccaactccacgaccagactgaatgcaagccgtgagcgcgctctgaaggcgatggagccactttcacgagaggaagcagaggatgccgcagatgaaatcgtcaacaagattattggcgctccttctggcctggttcccgctcagctgctgcctgaaaaaataatcggccgagctggcttcactaagagccgaagcctgcttatcccagacgaacggattgaggactttttggagtctgacatcaaccacgtcatggaaagctatctgcgccaggtgggtccggagatcgaactaaccgcgcaattcggtagcaaggatatgggtgagcagatccgacaggtatctgaggaatacactcaactgatcaaagatgccaagacgccgaaggaacgtgcgaagctggagaggcaacgtgaagctgacctccgcgacattgaagcaatgcgagacaggttgatcggtacgtatggggcgccgaaggacccacgaagcttctttgtccgtgccggccgtgtcgcgcgaaacgtcaatttcctgcgcctgctgggtggtatgacaatatcggccgcaaccgatttgatgcgtcctgtaatgcagcacggtttaagcaaatcacttcgcccaatgggcgccatgctccgaaacatggccgcggtgaaagtggcaaccaaagacctgcgtgaaatggctgtcggcctggattatgtactgtctacccgaacgaaggccattgctgatctgacagacccatacagccgacgctctgcttttgaacgtggacttaactggggtacgcagaaatttggtaactggacgctgatgaaccaatggaacagcgcattgaagtcatggtcaggcctgatcgttcaatcccgcatcctggacaatgctcagctgctggcagcggggaaggaagtaccgcagaaggaaatcagaaagatggcccaagttggcatagatcagagcatgttgcgtcgtattggtgagcagtttgcgaaacatggtgaggatatggatgggcttcttactggccatagccacctgtgggacgatcgcgcagtgcgtgaggctttccaatctgcggtattgaaagatgttgactctaccgttgtcacgccaggcgttggcgacacaccactggtgatgagcaatgaagtaggcaaaatgatcctgcagttcaagacgttcatctttgctcagcataaccgggtgatcgcgtctggcatccagcagggcgatgcatcgttttatctcggagccatggggactatcgcgctcggcgcaatggtctacgtaatgaagcaaaagctcagcggccgtgatatcgactacagccctaacaacctggtgaaagagggtatagaccgcgccggcatgatcggctggttgtccgagccgctaaatgccgtggagaatatcagcggcggacggttcgggctgggcgccatgtttggcgcgccgccggtatcacgcttccagagtcgtaacgcaatcggcgctctgttggggccaacgttcgacatggccggcgatggggctgtgatcgcgaatggtgttctgaacggagaatttgacagcaagcaagttcatgctgtaagaaaagttatgccatatcagaacctttgggcaatagctccgttattgaacaaggttgaggaagaacttaaatag

SEQ ID NO: 428994 - DNA, 669 bp, Serratia marcescens
gtgctctcagctgtcatggtgatatctggatgcgcagaatccaaaaaagagccatatcgttacaattttgggtcgcaagataattctgtaactgatagtgaggttatcgcaaaaaatgattcgttaccaattgctattgataataatgacagggatccactatcagaaaataatccatcatcctacaaatatctaactaaaaaaatggatgaaagttctgcttatggcaataaaggtaatggagtaaaagctatccctgacggggatttttgtttgatttctgataaggagttcaaaaaatcatcaaataacttccgttcatgtatggactatcatttagtcaggctaacagacaaagtctcacagccatccgatattgctgctgcttcatttgattcttgtgatgcgcaacttagtaagttatcaatgatgattgatgttatgtcaaaatgtgaaatggttaaaagcaatgggagaacagttggttattgggggaaccaattcccatataatagagggcgtgcagagtttactttgaaggagaggttttatcctaaggttataaatagaattctaactataagacagaagttactgactaaaccacaagtaaatgaaaaagaaagtcgcgaagataaaaatcagaaaaaaggtgcgatcttaatctaa

SEQ ID NO: 428995 - DNA, 180 bp, Serratia marcescens
atgagcaacgcactgagaaaaacagagcgtctatacattcctcgccgcgacaaaacagcggtggcttccccgcgcgcagctatcggggacggcatcgctcatgcagatcaggtcaaaaatgcatttgactttggctttgctcgctacgaaaaagctatggatgaactgtctaaggtctaa

SEQ ID NO: 428996 - DNA, 741 bp, Serratia marcescens
atgacagctcaaaacgcacctacagttttctctttcgactcaaacgtaaaaatcaacgtcatcaccagatccggcgcgccatggtttttcgctgctgaagtctgcaaggcgatcggaatcgctaaccatcgagacgcagtgagaaagttggatgatgatgagaaggccgtcggtttaaccgacacccttggaggcgagcaggaatcagtcatcatctccgaatctggcctctacacactgatcctgcgctgccgcgacgcggtgacgcctggcactatcccctaccggttccgcaagtgggtaacgtccgaagttctgccggccattcgacagactggccagtaccagcatcgggcgccggagacgttatctgacctggccggcactggaaccacgatgacagttcgagacgcgcgccgcggcaagaagaagaccagcaccaagaccgcaagccgtatcgccgatgcatgcgtgccggttatcctggaagccatgcgcgaccagtaccactacgccaacacgaacgttggaccggaagaagtgatccccgccctgctcaacgacgagcgcaacctgcagatctccgcgttggttgaagagctggccgacaatggccacaacgtcgccggcgtcgtgcgtgaagttgaggtgatgcgctactacatcctgcagtgcgcgaagaacatggcggcgatcgccacacacgcagcgtttatcgcgcaacagacgaaggtacagtaa

SEQ ID NO: 428997 - DNA, 249 bp, Serratia marcescens
atgaagaagtacaactacccggttagcaggatgcaggagaaacatatcaatacgcggcaaggaatcgcagggttagctaaggattctatgctgcacacgcttctaaatgagttagattcggacggctcagagatcggcggtgccatgctggaactgaacgccttactgaactatgtcactcaggaagagaggttgagaaaagaaatttcgacacattgtgaatttattacgcagcagttaaatcaataa

SEQ ID NO: 428998 - DNA, 648 bp, Serratia marcescens
atggaaactgatacctcaactggtatttctaagttatcattgaaaacgcgaatttcatcaggtcgtggtgtaaggtactttggccaagactctgaagtcgggtttgattatactaaaattagaggcgaggttggcagtggcgggtactttgtgtggcgcggaggggcaacgtatgcggctggttactcatctcttgctataattgaaaggtattctgctctgatactaagtgatttgagagtgcctaatagtggcgatatttatttgcgcagtggtaactcatcatcttatgtgatagcgcaaaactgtaccttggggagtgtgtatgctatcgggggaaattcccatccaaaccctgtcatacttgacaattgcgattgccaggatgttattgctgattatgttttttcaatgaggcttaataatgtgcgagggcgcaacctattaataacaaatccatacaacaacaaaagtatgccttggctactaaatgcaacttttaataaggtagaaggagtcattcgatacggctctgggaaaattgtgctttattcagagactgagagtagttctctactagtaactcacggcgatttagaaatttcaaactatgcttggtatatgaaagatataggagcggtggagtaa

SEQ ID NO: 428999 - DNA, 516 bp, Serratia marcescens
atgagcaagctgaataaaacgggtgccgtaggcgccatctgttctgtagccgtaattatcggcctggtgctgtcgagcggagaagtaaaaaccagtcgtgccggccttgagctgatcggcaatgcagagggttgccgccgagacccgtacaaatgtccggctgatgtgtggactaacgggattgggaatacgcacggcgttaatcccggcgtgcgcaaaactgatcagcagatcgccgcggactggcaaaagaacatcctggcggcagagcgttgcgttaccaactatgccgccggaaataaactgcagcagggcgccttcgatgcggcggtgagcatcacgtttaatgccggctgcgcgacgatgcagaaatcgacgatgttccgcctgttccgtcagggagatgtggcggccgcctgcgagcagttcccacgctgggtatatgccggcggcgtaaagctccacggcctggtgattcgccgtgataaggagcgcgcgctatgtctggcaaaataa

SEQ ID NO: 429000 - DNA, 375 bp, Serratia marcescens
atgtctggcaaaataacgtctgtggtagtgatcgtgctggcgctggtggcccttgttggcgctggcgcctggctggctggtcgtcactatcagccgacgattgaccgtctcaacgaggcgttgacacagtgcaaagccattaacaaacaacaggcggcggcgatcgccagccagaacgccggcattgaagcgctgcagcgcaaacaggaacagatggaatccaaggctaaggcagcgcaggaaaaagcccgcagagaggcgcggggcgattatgagagggctaacgcagttatggcagaacgaaccacaggcgatatgtgcgctgcggcgtcggcggcctttgacgcagagctgcgccgggagcgtgcacaatga

SEQ ID NO: 429001 - DNA, 258 bp, Serratia marcescens
atgaaaaagttaatgtccgtgatctcattgatgatagctggatgctcaagtgcaccgccggcaacgtcatatgtagaagtaaaagttccgattgccgtgccatgcaaaatgaccgacgttgcgcgcccggcgttcgctgtagaccagttgccgatcggggccaccatcgatgcgcaaatgcgcgccctgcgcgctgagcgtaaccagcggatcggctatgaacgcgagctgttggcggctaacgaatcctgtaattaa

SEQ ID NO: 429002 - DNA, 978 bp, Serratia marcescens
atgcagaattcgattggtataattctggctaaatgttatggagcttgcaattacgcgcactataatgctcacaaccaaaaagatgacacgaaaatgaatatagcaaaaaaaatcttaaaaaccactatcataagcaccttaggatatacaaactacttagatttattatggcattataaatttatcaaggctcataaaactctcccgaacttaaaaaaacctaacttattcaatgaaaaagttaggtatcgaatgaagcatgatagaaatcatatgtacacttatttgtctgataaagtaactgctcgagactacatatctaataagattggcgataaatatttagttccaattagatacatcttaaagtctccgcaagatattctacagaatactgtaagattagacagaacggttatcaaatcgaaccatggcgcaggaatggttttagtttatgatggtagagataaaaacgaagtagtccgactatgcgactcttgggtgagcactgatttctctaaatttcttaatgagatgcattactccaaaataactccacgcataattattgaagaatcattgtgcgatgaaaatggagtacctaacgattataaatttcacgttttcaaatctcttagcggccaatttaattacatactccaactggttaacggccgtttcgataaagaatcaagagcctactatctaaacgggatggaagagggagatttagtataccatcatggcaatggtaatcaccaattaccttcggagcataaagagatattaatgcaagcagcagagttatcaaaaaatatttgcacagactttgactatgtacgcgtagattggtacgtatctcaagggaagttatattttggtgagcttacatttactcccggtgcatctttttcttttgagtttggaacagagctagagaaaaagatgggcgctttttgggagttccaaataatatag

SEQ ID NO: 429003 - DNA, 375 bp, Serratia marcescens
atgagcgtgatgagttatgatgagataagaagtagctttgcccattcaagttacgtttattgcagggagataattgacctattgaaagatggggataaccatggggtttgtgatacatctgatcaggcgtttgcgtatgagtcattagaaggttcgtttgaagaacctatagaatgcctcatgcttgagctagtgacgctcatctttatggctggtcgatgtagtgataaaacagtaaagttccacacagatatcatattaaaaattttatccgaaaatgatttattcgaaatgcttaaggatgtaactgaagatgacaaaaacgaaattttaaacgatcttcgattgcttagcttgatcgataagcctgaataa

SEQ ID NO: 429004 - DNA, 627 bp, Serratia marcescens
atgaagatcgttgaggtgaaacacccgctggtaaaacacaagcttggcctgatgcgcgaaaatgacatcagcaccaaacgcttccgtgagctggcctcagaagtgggtagtttactgacctatgaagcgaccgccgatctggagacggaaaaagtcaccatcgaaggctggtgcgggccagttgaagtggatcagatcaaagggaaaaagattaccgtagtgccgatcctgcgcgcaggcctgggcatgatggaaggggtgctggagcatgtgccgagcgcgcgcatcagcgtggtgggcgtttaccgcgacgaagaaaccctggagccggtgccgtacttccagaagctggtttccaacatcgaagagcgcatggcgttggtcgttgacccgatgctggccaccggcggttcgatgatcgccactatcgatctgctgaagaaagccggctgccacagcatcaaggtgctggtcctggtggcggcgccggaaggcatcgccgcgctggagaaagcgcacccggacgttgagctgtacaccgcctccatcgatcagtgcctgaacgacaagggctacatcgtgcctggcctgggagacgcgggcgacaagatatttggtaccaagtaa

SEQ ID NO: 429005 - DNA, 480 bp, Serratia marcescens
atgtccacctctttgtctctttcacagctgaaaacgcagggccgctatcaggaagccactgcactggcgctacggcagctggcagcagaaccggaagcggcgatgctgcactttcagctggcctgcctgtatgacgtacagggtctggagcaacaggccattccctgctacctcgcggcgctggcccgcgatttgccgcccgcccagcgccgcgaggcctggctgggcctcggcagcacctaccgcgccctgggagaatacccggcttcgctacgggctttcgacgatggcctgaccgagttcccgcaggccaacgagctgatgctgtttcgcgctatggcgctgtacaacctgggcgaaaataaacgggccgtggccgatctgttgttgctgttggcggacacctcgtcagaccccgacatccgcggctatcagcgcgccattcggcactatgccgccgatctcaatgttattggttag

SEQ ID NO: 429006 - DNA, 1647 bp, Serratia marcescens
gtgaaactgactcatcgctgcttgttaccgttaagccttttattgatggccagcgccggcgcccacgcggcggactgcgccaacgtgccggaatggacggctaaaacctacgccatcaaaggcacacaggtcatcaaggacaatgcgctgttcgccaataaatggtgggcagaaaagcaccatatccccggcgtagccggttgggtcggcgaaccctggcaaaacctcggccagtgtaccgcccaggaagccccctggtggcaagcctacgccgagcaggagggattcaacgatgcgctgcgttacatcggcaccagcctggatgcgctgaatcaagacgccgaacaggcgctggcggactcgcaagatgcccgcacgccgctgtattggctcaagcgcaccatgcagatgtacccgtcagacacgccaaatgtctaccggctgccgatcgttcacgccgccagttggtacaactccttgtatggcagcatggcgcgcggaattttcttctacacccgcacgctggggaatcagggcgacagcgtcacgatcaaggccggggccattccggcaggcagctcatgttttgcggcgaccagcgcccgtttcgataatgtcgacagcatctactcggaaaaacgaaagcttgatgccaacaaggagaccacttataccttcgcgcaaaccggcgtactggccttaggctgcagccatccgcaaaaacagcaaaacggcgaattggtccggtttgaggtgagcggcggtggcgacagcaacctgcacattctcggtcaaaatacgcaaggcgactgggagcaacagaaggccggcgccagcatcctgggcggcgtcgtgttgtatgacggtaaatccaatcacttcgtaccgaagaaaatcaccgacaaaacgcaggagatcatcaataaatcgctgggggaaagcctcagcattgccgcgctgtatgaagcggtgaacggcatggatggtacccacgagatgttcacggcgtcacagggctccctgttcctcaactacagcaaatgctgcagcgcggaataccgcgagggcgcggtcaacgtcggtttcttcgccgacaagaccacccgcgccaatgccgctcactgggggctctggcacgaactggggcacgagaacgagccgcagtgggaatacaacgtgttccccgaagtgcaggtcaaccgctattcggtactggcctgccgcatgctgtcggaacgtaacgattttgactatggcccgacctgcaaactgggggcagacaaagagtgggatcgggatgcggtgcgtaagttcctcgcttcggaagtgcgctacgacgagttcccgaagcagcagcacgatctcgcactgggattctttacccatctgctgcacgcttatgatgaatccttcttcccgcgcatcaatcaggaacggttgaagcaggccttcgcggcaccgggtaacaccatgcaggataaatataaatacgtcttcggcacgccgcagaaggtcatcgacttcagcgtggtcgtctacagccgggaggcggggcaggatctgcgcgagtactttacccgctgggggttgcgcttcagcgatgctgcggcgaaacaggttgccgcgatgcatctgccgacgccttga

SEQ ID NO: 429007 - DNA, 540 bp, Serratia marcescens
atgaaaaaagtattattgcctttggctgccctggtattgtctgcaactgcttccaacgcaatggcagcaagcggcactgttaaattcaccggtgaaatcaaacagtctacctgccaggtaactagcgatactcagaataaagaagtttacctgggtacttacccaacttctgctttccaaaacgtgggtgacaaatctgcatctaaagctttccagatctctctggaaaaatgtgatgccggcgattacagcctgcgcttcgacggtaacaccgttgccggcaacccagacctgctgtccgtaagcaacgtgggtggcaccggcactgcagctaccggcgtgggtatcgaaatcactgacaacaacggcaagccattcgctatcggcgacggttccaacatcaaagacgacgtagcgaaagtcaccatcgctgctgacggtaaagcgaccttcaacctgcaggctcgttaccgttcattcgctgcagtgaccgcgggtctggctaacgccaccagcccgttcaccatcgaatacaaataa

SEQ ID NO: 429008 - DNA, 2595 bp, Serratia marcescens
atggcaaatcaacgaaaagtagcaggcggaacgacgcggctgacacagctgatccgaattgcaatcattgccgccagtgcgccgatgttatggagtgaagcggcgctggcagagtttaacatgtcgtttattcacggcgatgaaaacctgagcaacgcggaagcggtcgcccagggcgatgctttgcaaccgggcgtttacccattcgacatctacgtcaacctgactcaggtcgatcataaggatgttacttttcgtcaggctaaaggccaggccgcgtctcaaccctgcctgaaagttgaagacctgcgcaactacggcatcaaactgccggaaacgctgcaggccggcagctgcgttgatctgcctgcgttgattaaagacgccaccgtcagctatgacgcggcggtgcagcagatcaacatttccgtgcctcagaccatgatggatctgagcgcgatcggcgcgatcccgccaagcatgtacgatgaaggcatcaacgcgctgttcgccaactataacttcaactacaacaagaacagctatcgccgagatgacgccgacgacagcgagtacatgttcctcgcgttgaacagcggccttaacctgggcagatggcgcctgcgcaacaactccacctgggacaaacagagcggcagcagcagcaactggactaacgtctcttcctgggccgagaccgacatcgtgccatggcgcagccgtttggtgatggggcaggcgagcaccaacaacagcgtgttcaacagcttccagttccgcggggtgcaactctccagcgttgacgacatgctgccggacagcctgcgtggttatgcgccggtggtgcgcggcgtggcagcaaccaacgcccgcgtcgaaattcgccagaacggttacgtcatctacagcaccaatgtcgcgccgggtcctttcgagatccacgacgtctatccgcataccaacaacggtgacctgcaggtcaccgtgaacgaggccgacggttcgcataaaacgttcagcgtcgcctactcttccgtcgccaacatgctgcgagaaggcatttggaacttccagctgaccgccggtaaataccacactggcgacggcggttatcagccgaagctgatccagggcaccgcggcatacggcatgaactatggcctgacgccgttcggcggcgccatcatcgccgaacactaccgttccgccgccgtgggtatcggtaagagcctggggtcgtggggtgccatctccgtggacggttctatctccgataccgagctggcgaacggcgatcgcaaacaggggcagagcttccgtttcctgtactccaagtcgcttaaccagatgggcaccaacttccagttggcgggctatcgctatgcgacttccggttattatgacctcagcgatgcggtccaggagcgcaaccgctggcgcaacggcttttatgccaacgattactgggatccgaacgatctgcagccgggccagccttcctggagcaacaaccagaaacgcacccgatacaccgcgcgctacggcaacaaacgcgaacgcgtcgaactgtcgctcagccagcagctgtgggcgggcgccagcctgtacgccaacgtgagccaccagaactactggggcgtgtccggcaacgatcgcacgattcagctgggctacaacgatggtttcaagcgcatttcctacggcgtttatctgcaggatacgcgcggccagtacggttattccgatcgcagcgtgaacttcacgatgtcgatcccgctggattggggacagaacaacaactcgaccactgccaacttcagcgcggcgcacagcaagcagagcggcgacagctactcgaccggtatcagcggcaccatgctggacgaccgtcgcatgaactactcggtctccaccgggcatacgcagtcctccggtcagagcagcaacctgaacctgggctacagcagcagcatcggtaacatcgacggtagctatgcctatagctcgaaataccgccaggaagggctgggcctctccggtggcctgctggtgcactccggcggcgcgaccctgacgcagccgttgcagaacaccatcttgctggtagaagcgaaagacgccaaaggcgtgcgtctggaaaaccagccgggcgtgaccatcgaccgcttcggttacgcggttgtgccgtcggccaacccgtaccgctacaactatgtggcgctgcgtaccgaagacttcggcccggggctggatgtgccggtggccagcaaacaagtggtacctaccgagaaatcggtggtgaaggtgagcttcgataccttcaagggcgtcagcctgctgattcacgctcgtctgggtgataacggttatccggccatcggcgccagcgtgttcaacgagtccggccgcaacagcggcaccgtgggcctgaacggcgcaacctatgtttccggcgtacaggcgggtgagaagctgacgatcaaatggggcccgaaagccgaccagcaatgcgtactgccgatcccggcgaacgtgggcgacaaacaagcggccatgggatatcaggaactgaccctgcaatgccaaaaactgtaa

SEQ ID NO: 429009 - DNA, 1746 bp, Serratia marcescens
atgctggtaagcaaagcttatgcggacgacaaaataaacagtattattcctttggagaccgaaaagtctttcgctgaaaatgaaagtatttcatctctttcatccaaactatctgaatatgatggagcgaagtatattggtcgctgcccagatataaatacattaaggaagatcacaccgcaattcccagaccaaaaaattgatgttgttagtttctatacgtccagcactcagaaatcggctggaggtggcgaattttatgcagtagaatcgaaagatttaaaagaaaaaagcggaattgtcgtaagagtaaacgataattggtgctgggtgagagtggactcagtctccacaaatatatggccaatagagtggctcggtattgtaacgggctcagtccagcatggcgaacttaactcgaatatcctgcaggagtctctagttaataattaccgtgttgaattagtttttccaagtgccatgacatacttcaagccaggaatgattaaaatcccaggaaattgggctggcgtgcttcgcggaagtaacaccagaaactgcatcattcgtccaagtgaagaccccaaagatccaaacgtaatacttatagagtacaatcctgaaagagcgttcagctggggattaaggatagaaaatttgtccttcgatggaacaaattatactcttagtgctctaagattaaccaatgtggcttatgtttacaccaataacttgcagatatactcattcaaaggttgcaacctttggctcgataaagttcaggattctgtatttgaagcaaccaacattcaagatggcggttactcagctggcgatccatctgataataaaaatacaactcacccggcactattactaacgagcacaatagaaaatgacgcttgcaacatgattaggtttaataactgtcaaatagaaaacaataaatgtagcccatacgtacgtattactaacggtatcgggttaatgttcaatcaaacccatgcagagataagagaaaaatcaaactggagtaaaagagactttatggaaataggaagtgctgatgtgcaaatctcagaacatgcaggctctcgcttcagaaatgcaatattggtcaatggctatggaaaaacaataatttcaggaggaagaggtatcggcggagatatcacagttctggccgtaggaaaaagaggtgctctcgcactatcaaactgccttgtcggtaatattaacatttctgcttataacgggaatcatcaattctctaatgtgatagcaaaagatgtatcattgacgctaaatgcaggctctattcggtggtttggcggcacggtcacgtcactcacggtcaaaaatagtgtcaaacctgctttgggtgtacattttgatggcgttctggtcaataatgacgttacattttctgataaccaaaatttccccaatctatcacactcttttattaacagcaccgttcttggcaacatgaccttcaattgtattgatggcatttattatggaaacagcgttgctggacaagaaataataaaaatggggcaaagaattgctattcccagcagtataagaactatttacgctgattctgcacccaaatcaggaaatttcaaccaaggagatcgcgtaatcaatacggctccaacagccggaagctgggacggatggcgatgtgttgaagcgggaaaaccaggtatttggaaagggtatgggaaaatatctgactaa

SEQ ID NO: 429010 - DNA, 879 bp, Serratia marcescens
atggtggcagaggaaaaactcgtttctgtatatattccaacgcataatagaaaagttatgcttcaacgtgcgatttgttctgtacagcagcagacatatgaaaatatagaaatactagtctgcgatgatggttcctcggatggaactaaagatctgattatgcagcttgctgcagcagatcgtagaatcaaatatttaagaagtgatacccctcgtggtgcctgttttgcaaggaatatggggatttttgctgctaaaggctattatattactggcctggatgacgatgatcaattcaccgaagacagaataaattcattggtcagcgcatttaatgaaaaagacatgtcttttatatgtagtaatttaatcatgaattttggtagtcatcagcatgttatgggcacttttagtggccaaatagatttggatatgatgggagacaaaaaccacgttggcaatcaggttcttacattaacacggcgtctgaaggatatcggtggctttgatgaaagatttcctgcttggcaagattatgacgcatggttccgtttagttgaagcatatggttcagggttgaaattattaaacgcctcatatatacaaaatgttgatcacgaactggggcgaatcactactggaaaaaaagcaaaaattggctatgaaatgtttattaaaacgcacgccaataaattgagccaacggcagcttaaacatctttattttcaagataaaatgaacagaaacgagttaatcaagcttgaagaattactgagtaacatgacgttaaataacctgacaatatacacaaagcagttattaaagcggagtgttcctggtgtaaaaaatattgttaatctcatgaagaaaagggtgtaa

SEQ ID NO: 429011 - DNA, 1074 bp, Serratia marcescens
atgcttgatgacttctctaaaatatcggaaaacataaacaagaaaggtgccacactcatattcccatctaaattcatgggggggcatgagattatgacagtacaaataataaatagagtgatttctcaggggcatgttagccccaacaaatttaagtgcatagtccccaatgaaaataaagtgttgcagagtaaactagatcaacactccatttcatatgaatgctttaaagcgaacactcataatccggaatttttgtacgcattattgaacccattctatttaaagaaatgcatcaatattttccgagcagtaccaaaagataactatgtgattctggttcagggagatattctccagggaactgggtttttacttgcaggtatgctgtcttccaataaagtaataagctatattccttatgtgcactcatttaagaaaatgggggcaaaatttgccacgctaaaagatatctttgcagcattcttctttaaatcaactaaccattacatcacaatatcaaaatgtttcaaagaagatatagaatcaaaaaatagtacggcaagtgtattgttggttaataactttgtcgataaagttccagataaattcccaaagcgcaatctgacagagagtgataaaattaatatatttatacttggtcgggttcaatttcatcagaaagggcatgacgttttatttgatgcattgtcgggaattactaatcgtcagattacaatacatgtcgtcggggatggtcctgacctccctcaattgcaactactaggtactggtttgcctgataatatcaacgtagagtttcatggctgggttagtgattcttgggctgtcgcgaaagagcataatattgatctccttgtgataccatctcagtttgagggggtgccacttgttatgctggaggcacttgagcgcgatgtcgatgtcattgctgctggcagggatggtatgttagattacctacctgagaatagcctttatacagtgtcagctgatgaagttacagcactgcggaataaaatactctgtcatattcaaaatagattggtatga

SEQ ID NO: 429012 - DNA, 1137 bp, Serratia marcescens
atgataaatccgagagtaaaagctctagctattattgtgtatggaacgatgttaactggatgtacagtcgttccggggcaacatttaagctatgataataaaagtgttgtaaaacaagatgatagcgatttcgatatttcagagatggttaacatctatccgctgacaccgtctttagttgccaaactgaggccagaaaaagttgtcgcacagccgaataattctttagagcaagcgactaaaaactatgagtataagattggcattggcgatgttttaaacattactgtgtgggatcatccagagctgacgacaccagccggccagtatcgtagtgccagtgatacagggaactgggttcagtccgatgggactattttctatccttatatcgggaaggtgagagttgtcggcaaaacggcaagccaggttcgcacggaaatttcaagcaggctgactcaatatattgaaagcccgcaggttgacgttaacattgcagctttccgctcccaaaaggcttacgtgaccggagaggtagagaaatctggtcagcaagcaatcaccaatattcctttgactgttctcgatgcgattaatgccgctgggggactaagtgccaatgcagattggcgcaatgtcgtgctgacccatggtgggaaagagcaggtattgtcattgcaaaagctgatgcaaaatggcgatctgacccaaaaccggctcttgtatccaggtgatatcgtttatgtccctcgtaacgacgatctgaaagtctttgtcatgggggaagtgaaaacacctgcgacacttaagatggatcggagcggcatgacgctaactgaagctttaggaaatgctgccggcttagaccagacaactgccgatgcaacaggtgtttttgtgattcgcactttacgcggtactcaggggaagaaacttgctgatatttatcagctaaacatggcagatgcaactgctatggttatgggtactgaatttcatctgcagccttacgatatcgtctatgttaccgcagcgccaatagcgcgttggaatcgcttgatatcgcaattggctccgactatctcaagttataacaacttgactgaaggtacattgcgtattcgcaactggccatag

SEQ ID NO: 429013 - DNA, 129 bp, Serratia marcescens
atgctttttggtcattggaatgataaaaaagaggtcgtggatccttatcgcaagagtgatgaggtattcgagattgtatatcatttgttagctgagtctgctcagaaatgggttaaagcactaaactga

SEQ ID NO: 429014 - DNA, 1848 bp, Serratia marcescens
atggcattgattgcggggattgatattggcaacgccacgacagaggtcgccctggccgagtccaccagccaggggctgcgatttcttaccagcggaattgtgccgacgaccggaacgaaagggacgcgggacaacatcagcggggtggttggttcactcatgcaggcgctggataaagccgggcgcagtcagcaggatgtggcgctcatttgtctgaatgaggccgcgccggtcattggcgatgtggcgatggagaccattaccgaaaccataatcaccgaatcgacgatgattgggcataacccccagacgccgggcggtgagggactgggcgttgggaccacgatccgtctggaaaatctggacgcgctgacgcccgaagaatacagcagcggatggataccgctggtggaccatcaggtcgattttatggatgccgcctggcaactgaatgaggccctcacgctgggcatcaacgtggtggcggtgatcctccagcaggatgacggcgtgctgatcaataatcgcctgcagcgtaccttgccgattgttgatgaagtgacgcttatcgaccaggtacccgaaggcgtgctggcggcggtagaagtggcggcgaccgggcaggtgatttcgctgttgtctaatccctatggcatcgccacctggtttgcgctcaccccggaagagacacggatgattgtgcccgtggcgagagcgcttatcggcaaccgttcggcggtggtgctgaaaacgccgaaaggcgatgtgaaatcgcgggtgatcccggcggggcatatcaccgtgcgtggggaaaaacgtaccgtccaggcggatgtggcacgtggagccgagtcgattatgcgcgcggtcgccgggtgtgccccaatttgcgatattcgcggtgaacccggcacccacgctggcgggatgctggaacgggtgcgccaggtgatggcttccctgagcggtcacggtgcccatgaggtctttattcaggatttacttgccgtggacacgtttattccctgcaaagttcagggcgggctggcggatgagttctcgatggaaaatgccgtgggcattgcggctatggtgaaatctgaccgactgcaaatggaggtcattgcgcgcgaactcagccaacgtttaaacacccgtgtggaagtgggcggcgtggaggccaatatggcgattgccggggcgctcaccacaccggggagcgacacaccgctggctatcctggatttaggcgcgggttctacggattccgccaccatcaatagagcagggcagataaaatcggtgcatctggcgggggcgggcaatatggtcagcctgcttatcaaaaccgagcttggattaagcgatttgacgctggcggaggagattaagaaatacccgctcgccaaagttgaaagcctgttcagtattcgccatgaaaatggggcggtggagtttttccgcgaaccgctcagcccggccgtgttcgctaaagtggtgtatatcaaaaacggcaccctgatcccgattgataatcacacttcgctggaaaaaatccgtctggtgcgccgacaggcaaaagaaaaagtttttgtgaccaactgcttgcgggctctgcggcaggtctcgccggagggcgaaatccgtgacatggcctttgtggtgctggtaggcggatcatcgctggacttcgaaatcccgcaaatgatcaccgatgcgttatcccattatggtgtggtcgccgggcagggcaacattcgcggaacggaaggcccgcgtaatgcggtggcaaccggactcgtgtatcgctgcgatacagataatgaccgggtttgcgatgacagataa

SEQ ID NO: 429015 - DNA, 432 bp, Serratia marcescens
atgaccacgaaaaccacaatgacggccgcagattacccgctggcaacccgctgcccggagcgtatccagacgccgaccggaaaaccacttaccgatatcacgcttgaaaatgttctcgccggaaagataggcccacaggatgtgcgtatctcacgggaaaccctggagtatcaggcgcaaatcgcagaacagatgcagcgccatgctatcgcccgcaacctgcgccgcgccggggagttaattgctattcctgatagccggatcctcgaaatctataatgcgctgcgcccctatcgttcttccaccgaggagctgctggcgattgccgatgaactggaaaaccagtatcaggcgacgattaacgccgcgtttattcgcgaatcggcagaaatctatcgccagcgcgataagctgcgtaaaaaagaagcataa

SEQ ID NO: 429016 - DNA, 591 bp, Serratia marcescens
atggaaacgaaaaagaaaaagagcccggtttttaccctgactctggttgaaaacggcgttgccggtgcgggtgaacgtgccgatgaagtcgtcattggcgttggcccggcatttgataaatttcagcatcaaaccctcattgatatgccgcataaagcaattatcaaagagctggtggcgggcgttgaggaagaggggctgcatgccagagtggtcaggatcctgcgcacctcggatgtctcttttatgtcctgggatgcggcaaatctcagcggctcggggattggaatcggtatccagtctaaagggacaacggttatccaccaacgcgatctgttgccgctcagtaacctggagctgttctctcaggctccgctgttaacgctcgaaacctatcgtcagattggcaaaaacgccgcgcgctatgcccgtaaagaatcgccctcgccggtgccggtggtgaatgaccagatggtgcgcccgaaatttatggcgaaggcggcgttgttccacatcaaagagacaaaacatgtggtgccagatgccaaacccgttgcgctgaatattgaaattatccgggaggaaaaatga

SEQ ID NO: 429017 - DNA, 1575 bp, Serratia marcescens
atgggtagcccctgggacccgccatcttccgtgaaagtagaaaacgggcgcattgttgaactggacggcaaagcccgtgccgatttcgacatgattgatcggtttatcgccgattacgccatcaacattgaacagacagaacgcgcaatggccctggatgcgttgacgatttcacgcatgctggtggatatcaacgtggggcgggcagaaatcattaacatcaccaccgccatcaccccggcgaaagcggtggaagtgatggcccacatgaacgtggtggaaatgatgatggcgttgcagaaaatgcgcgcgcggcgtacgccttccaatcagtgtcatgtgaccaatcttaaagacaacccggtgcaaattgcagcggatgccgctgaagcggggatccgcggattctccgaacaggagaccaccgtcggcattgcccgctatgcgccgtttaatgcactggcgttgctggtgggctcgcaatctggccgtcctggcgtattaacccagtgctcagtggaagaagccaccgaactggagctgggtatgcgcgggtttaccagctatgcggaaaccgtctccgtgtacggtactgaagcggtgttcaccgatggcgatgacacaccgtggtcgaaagcctttctggcgtctgcctacgcgtctcgcgggctgaaaatgcgctacacgtctggcacaggctcggaagcgctgatgggatattccgagagcaaatcgatgctttacctggagtcgcgctgcatctttatcaccaaaggtgccggggtgcaggggctgcaaaatggcgcggtaagctgcattggcatgaccggggcggtaccttccggtattcgtgcggtgctggcggaaaacctgattgcctccatgctcgacctggaagtggcctccgccaatgaccagacgttctcccactctgatattcgccgcacggcacgcacgctgatgcagatgctgccggggacggactttatcttctcaggctatagcgccgtaccgaactacgacaacatgtttgccgggtcgaatttcgacgcggaagactttgatgattacaacattctgcaacgtgacctgatggtcgatggcggtctgcgtccggtatcggaagaagagaccatcgccatccgcaataaagcggcccgcgcggtacaggccgtattccgtgaactggggctgcctgcggtgaccgatgaagaagtgacggcggcgacctatgcgcacggcagtaaagacatgccggcgcgtaatgtggtggaagatctgggcgcagtggaagagatgatgaagcgcaatatcaccgggctggatattgttaaggccctgagcgttaacggatttgatgatgtggctgacaatattctcaatatgctgcgccagcgtgtgaccggggattatctgcaaacctccgcgatcctcgaccgtgattttgacgtggtcagcgccgtaaacgatgtcaacgattaccaggggccgggtacgggttaccgaatctccccggaacgctgggaagagatcaaaaacattgccacggttatccagcctgacagcatcgagtaa

SEQ ID NO: 429018 - DNA, 429 bp, Serratia marcescens
atgattaaaagccttccccgcgccaccgtcagccttgccatggcaaaagcgatgtcggcagctgctgagagtaaagccagtgaaatcaatgtgccagtggtcatatccatcgtcgatggcggagcaaacccgctgataatgcaacgaatggatgaagccttcgtcaccagttgcgatatttcgctgaacaaggcgtggtcagcctgctgcctgcaacaaccgacgcatgaaatcaccgcaggcgttcaaccgggccagtcactctatggtttgcagcttaccaatcagcagcgaattgttatttttggcggtggtttccccattattgaaaacaatcaggttattggcgcaatcggcgtcagtggtggcacggttgaacaggatatggaaatagccaggtcagcgctcgactatttcgacaagcattaa

SEQ ID NO: 429019 - DNA, 1164 bp, Serratia marcescens
atgagcgatcgtatgtatgactttcttgttccaaatgtgaacttcttcggcccgggcgcggtgtctgttgtgggcgaacgctgcaaactattgggcgggaaaaaagccctgttggtgaccgataaaggcctgcgcgccattaaagacggcgcagtcgatcagaccgtaaaacatctgcgcgaagccggtattgacgtggtaatttttgatggtgttgaaccgaacccgaaagataccaacgtgcgtgatggtctggcggtcttccagaaagagcattgcgacatgatcatcaccgtgggcggcggcagccctcatgactgcgggaaaggtattggtatcgccgcgacccaccctggcgacctctacagctatgcgggtatcgaaaccctgccccatgcgctgccaccgattattgccgtcaacaccaccgccggcaccgccagcgaagtcacccgtcactgcgtactgacgaataccaaaaccaaagtgaaattcgttattgtgagctggcgtaacctgccttctgtttccatcaatgatccgctcctgatggtcggtaaacctgccggtttgaccgccgcaaccgggatggatgcgctgactcatgccgtggaagcctatatctccaaagatgccaacccggtgacggatgcgtctgctatccaggctattaaactgattgcgactaaccttcgtcaggccgtggcgctgggcaccaacatcaaagcgcgtgaaaatatggcctgcgcgtcactgcttgccgggatggcgtttaacaatgctaacctcggttatgtccatgcgatggctcaccaacttggcggcctgtacgacatggctcacggtgtggcaaacgccgtgctgttaccgcacgtctgccgctacaacctgatagccaacccggaaaaatttgccgatatcgccacctttatgggcgaaaataccaccgggctctccacgatggatgccgctgagtgcgcaattaccgccattgcccgtttgtccaaagacgttggcatccctcagcacctgaatgaacttggcgtaaaagaggctgacttcccgtatatggcggaaatggcgcttaaagacggcaacgcgttctctaacccgcgtaaagggaatgagaaagagattgttgagattttccgtcaggcgttctga

SEQ ID NO: 429020 - DNA, 366 bp, Serratia marcescens
atgcaaaaccctggtattcccggctcacccgcagtgcatctgttttaccatccaggcctgcacgacagcgaaaggctgcgtcagataagcctcggtcttgaggaacagggtgtaccttgccgaaccatctcctgtgctgacatcgataacgcactggcgcttgcccatcaggccgcgcagcactccgcgctccgcaccgggatcggcgtttccgccagcggcgataccgtactgacacatgcccagtaccctgccgatcgccccctgcgtcactgccctcctgacagtggctacgcccgtttacgtaatctcggcgcgaatgcgggccagttggtgaaagtcatcccctttagcgaggcgctataa

SEQ ID NO: 429021 - DNA, 549 bp, Serratia marcescens
atgtatcgcatctatacccgaaccggtgataaaggcacgacggcgctgtttggcggtagccgaatcaataaagacgatatcagagtggaagcctacggcagtgtggatacgctaatttcactgctgggcgtctgtcatgctgccagcgacgatcctgacctgcgtgccgggctgcaccgcattcaggaggagttgtttgtggtgggcgctgaactggcctgcgatgaacggggaattactcgtcttagccgcgttatcgatcaggcggatattaaccgtctggaacaggagatcgaccgaaatatgaccgtaacgggcccactaaaagcgttcgtcatccccggcaagaacctggcttcggcccacctgcatgtggcgcgcacgcaggcccgacagcttgaaaggattctggtggcaatggacagaactgtgcccctgcgcgagttgttaaaaagttacattaaccgcctgtctgatgcgctgtttgcgatggcacgcgtggcggaatgccagccagaggagagtcttaatcctgatgtcgatgcttga

SEQ ID NO: 429022 - DNA, 1926 bp, Serratia marcescens
atgaccacgcagaatgagcacgtcgaacaggccctgacgtcatttattgaccagtcctggcaccgctgcggcaagatgatgaagcgcgaattctggagtccgccgcatcaggctcaggggctgacgttccagtctatctgccgtcgtaagactgcgctgctgaccatcggccaggcggcgctggaggatgcctgggagtatatggacggtcgcccgtgcgccctgtttattctggatgagtctgcctgtgttttgacccgctgcggccacccggataccctggaggcgctggattctctggggttcatggccggtagttactgcgcggaaagcattattggtacctgttctctctctctggcgtcaatgatcgggcagccgataaaaactctgggcgatcaacattttaaacaggccttattcccatgggcattctgctccacgccaatttttgataacaacgggcgtttatttggctcgattgccctgtgttgtctggctgaggactcgggtgtggcagatctctctttgaccctggcgatggccagagaagtggggaattcgttgctgacggatagtttactggcggagtccaaccgccatctcaatcagatgtacggcctgctcgagagcatggatgacggtgcgatggcctggaatgagcaggggatattacagtttcttaatccccaggcggcgcggttattacacctcgatgcgcaggcgtgtcaggggaaaaatattaacgatctggtcacgctgcccgccctgcttcggcgggccaccaaacaggcgcgctccctcagccacgccgaagtcacgttcgaaagccagcaccagtttgtcgatgcggtcatcacgctaaaaccgattgtcgaagcgcagggaaccagtttcattctgctgctccatccggttgaacaaatgcgccagttaatgaccagccagttgggtaaggtgagccatacgttttctcagatgtcggcggacgatccggagacccggcggttgattcattttggtcgtcaggccgcgcggggcaatttcccggtactcatgtgcggggaagagggggttggtaaagagttaatcgcgcaggcaattcataacgaaagcgaacgggcggcgggcccgtttattgccgttaactgccagttatatgctgataatgcccttggcgtagatttcatgggcagttcggcaacggaagaagagaacgggcgcctgagtcgtcttgagctggcgtccggtgggacactctttctggagaagatcgaatatctggccccggagctacagtccattttacttcaggtgatcaagcagggtgtggtgacgcgtctggatgcgcgccggttgattccggtggatgttaaagtgattgccaccacgacgatggatctcggcaatctggtggaacaaaaccgctttagccgtcagctttattacgctttacactcgtttgaaatcagcattccaccgctgcgtgaacggcggaacagtatcccgtcgctggtgcatagccgcttgcgcacgctggagcggcgattctcatcccgactgaaagttgacgacgatgcgctggcgcatctggtggcctattcgtggccgggaaatgattttgagctgaacagcatcgtggagaatattgctatcagcagcgagcacgggcacatccgcttaagcaatctgccagggtggctattcagcgaacatcccggcgtggcgggtaacagtacattaatgcccgccagtatgagcatttcggcaatagagaaagaagcgattattcacgccgccagagtgaccagtggacgcgtacaggagatgtcccggttgctgaatattggccgcaccaccctgtggcgtaaaatgaagcagtttgatattgatgtcactcagttcaagcatcgacatcaggattaa

SEQ ID NO: 429023 - DNA, 1101 bp, Serratia marcescens
atgctacaagttattcagtctccggcaaaatatcttcagggtccagatgcagcagcgttgttcggtgagtatgccaaaaacctggcggacagtttttttgtgattgccgatgatttcgtcatgaaactggcgggtgacaaggtactgaatggtctgcatgaaaacggcataagctgccatgcagaacgctttaacggcgaatgcagccatgcggaaatcaatcgccttggcgcgattttgcagcagaaagggtgcaaaggcgtggtgggtattggcggcgggaaaacgctcgatacagcaaaagccattggctattaccataaactgccggttgtggttatcccgaccatcgcctctacggatgcgccgaccagcgcgctgtcagtcatttataccgaagccggggaatttgaagagtatctgatctacccgaaaaaccccgatatggtggtgatggatacggcgattattgccaaagcccccgtacgattactggtttcgggtatgggtgatgcactctctacctggtttgaagcgaaagcctgctacgacgcacgtgcggtcagtatggcgggaggtcagtcaacggccgccgcattgagtcttgcacgcttatgttacgacaccttgctggcggagggtgaaaaagcacgcctggcggccgaagcgggtgttgttaccgttgcgctggaacgcattgttgaagccaacacctatctgagcggcattggtttcgaaagcagtggcctggcagcggctcacgccattcacaatggcttcaccattctggaagagtgtcaccatctgtatcacggtgagaaagtggctttcggtactctggcccaactggtgctgcaaaacagcccaatggaagaaatcgagacggtactgcgtttctgccagaaagtgggcttaccgatgacgctggcgcagatgggcgtgaaagaaggcattgaggagaaaatccttgccgtggctaaagcgacctgcgctgaaggggaaaccatccacaatatgccgttcccggtgagcccggaaagcgtttacggcgcgatcctgacggccgatcgcctgggcgcacaatggttggctacagagtaa

SEQ ID NO: 429024 - DNA, 1071 bp, Serratia marcescens
atgaaaaaactgattaaccgtgtggaagatgtactgactgaacaacttgccgggatggcgaaagcgcaccctgaactgaaactacaccaggacccggtctatgttacccgggcagatgcgcccgtcgcgggtaaagtggccctgctttccggcggcggaagcggccatgagccaatgcactgcgggtttattggtatggggatgctgagtggtgcctgcccgggagaaattttcacctctccgaccccggataaaatgtttgaatgcgcgatgcatatcgacggtggcgaaggcgtgctgctgatcatcaaaaactacaccggtgatgtgctgaactttgaaaccgccaccgagctgctccacgagagcggcgtaaaagtcaccacggtggtggtcgatgatgatgtcgccgtcaaagacagcctctatactgccggtcggcgcggcgtggcgaacacggtgcttatcgaaaaactggtgggcgcagccgcagaacgtggtgacagccttgaagcctgtgccagcctgggccgcaggctgaacaatcagggtcactctatcggcattgcgcttggcgcatgtaccgtccccgccgccggaaaaccatcgtttgaactcaatgataacgaaatggagtttggcgtgggcatacacggcgaaccaggcatcgaccgccgccccttcacctcgctgaacgacaccgttgacgccatgtttaccaccctgctggagaacggcaattacagccgtacgttacgccagtgggacccggtaaaaggcagctggcaggaagttacccagaccaaacaggcgctgcaacagggagatcaggtgattgcgctggtcaacaaccttggtgcaaccccgctttccgaactctacggtgtttataaccgcctggaaacactgtgcgatgacgccggaatcactcttgcccgcagtctggtcggttcctggtgtacctcgctggatatgtccggtttttctattacgttgctgaaagccgatgccgaaacgctcgctctttgggatgcccccgttcacacccctgccttcaactggggtcattaa

SEQ ID NO: 429025 - DNA, 633 bp, Serratia marcescens
atgtcactgaacagaaataacattgtcgactggctgtatcgctgtggcgaaattttcaccacccagagcgattttcttaccggcctcgaccgcgaaatcggcgacgccgatcacggcctgaatatgcaccgcgggttcagcaaggtggtagaaaaattaccgtccattgccgacaaagacattggctttattctgaagaatacaggcatggtgctgctttccaacgtggggggagccagtggcccgctgttcggaaccttttttatccgcgcagcccaggttacccaggctcgtcagaacctcagcgttgaggagctctatttgatgatccgcgaaggtgctgacggtgtggtgagccgggggaaagccgaacgaggtgataaaaccatgtgtgacgtctggctcccggtggcggattcactgcgtcacgccagcgaaaaccatttatcaatgaccgccgcgctggaagcggcctgcgaggtggcagaacaggccgcgcaatccaccattaccatgcaggcgcgtaaaggacgtgccagctacctgggggaacgcagcatcggtcatcaggatccgggcgcaacatcggcgctgtttatggtgcaaatgctggctgctgcggctaacgcgtaa

SEQ ID NO: 429026 - DNA, 1428 bp, Serratia marcescens
atggtaaacctggtaattgtctcgcacagtgcccaactgggccagggcgtcggggaactggctcgccagatgttaaggggtgatagctgtaagttggctatcgccgcaggcattgacgacccaaccaatcctatcggcaccgatcccattaaggtgatggacgcaatcctctccgtggcggatacggacgcgattctggtgttaatggatatgggtagcgcactgttgagtgccgaaaccgcgctcgacctgctggaaccggaggtggccgcacgtgtgcatttatgcccggccccgctggtcgagggcgcgctggccgccacggtcagcgccgccagcggcgcgagtatcgacaaggttatcgaagacgcgcaaagtgcgttgcaggcaaagcgtgttcagctcggtttccccgcgctggaagacctccgcgataacctatcggcggaagaaaacgatgcttgcgatgcgcaggccgagtccgtaacggtggagattaacaaccctaacggcctgcacgttcgccctgccgcccggctggtcgaggggctttccgggtttgatgcggtgctactgctggaaaaagagggcaaatgcgtcaaacctgacagcatcaatcaaattgcactgttgaaagttcgctgccacgatcgggttcggctggtagccaaagggcctcaggccgcagacgccttgatcgcatttcaggcgctggccgccgacaattttggcgaacattgccaggcagacgctgaggttgataacgcacaacccgcgctgacaacggtgagtggacaggtgctgcattacgcccccgttcatcatcgcttcgatgaccttgccgacggtacgcaggaagaggagtttcgtcgcctgaaaatagcggtaagtcataccctggacgatctcaccgacttaacccgcctggcagctgaaaaatattcggacgacattgccgccatcttctcgggccagcataccctgcttgacgatcccgacctgctgaacagcgccagcgagacgctgcgtcagcggaaatgcagcgccgagcgtgcctggcaagagaccatgatggccctcagccagcagtatcgtgagcttgatgatgcctatcttcaggcgcgctatatcgacgtcgaagacattatgcatcgcacgctggggcatctgacggatgtgaccgacaacgcccctgttctgctgcatcgcaccattctgattgccgatgacatctacccgtccgtcgtgttgcaactcgacaccagccacaccgccgctatctgcctgcggcacggcagcccattagcccacggcgcgattattgcccgtcagggcggcattccctggctgtgccagcagggtaacgcctttgataacctgcacaacggcgacccactcacgttaaaccgtctgaataccagacagtaa

SEQ ID NO: 429027 - DNA, 1659 bp, Serratia marcescens
atgtcgcaatttttctacaatcaacgcgaaaacctcgttaatgacgctattgaaggggcgataatcgccagcccatggaacaaccttgcccgactggactgcgaccctgcgatccgcattgtggtgcgccgcgatctggataaatccagagtcgccgtcatttccggtggtggcgcagggcatgaaccggcccatgtcggtttcgtcgggaaaggcatgctcacggcggcggtgtgcggcgatctcttcgcctctcccagcgttgatgcagtgcttaccgctattcaggcagtcacgggcgatgcgggctgcctgcttatcgtgaaaaactacaccggagaccggctgaactttggcctcgccgctgagaaagcccgccgtatgggctacaaagtggaaatggtgattgttggcgatgacatctctctgccggataacaaacacccgcgcgggattgctggcactgtcctgatccacaaagttgcaggctattttaccgaaaccggcagtaacctggatacggtcgcccgtgaagctcgtatggcgatgaaccgggtattcagtatcggcgttgcactctcaagctgccatctgcctgccgatccgcaggataacgttcgccaccatccgggccaggctgaactggggatggggatccacggcgagccaggggccgttgtcgtcaatactcagaacagtgccgacatcgtgcgtctgatggttgaaaaaatcgcggcggcaataccggacaccggccgcctgatgctcatgctgaataacctgggcggcgtgtcggtcaccgaaatggcgattattacccgcgaactgaccgccagccctctggctacacgtactgattggctcatcgggccggcgccactcgtcagcgccctcgatatgaaaggtttttcgattaccgcgatggtcatggaagatggcattgaaaaagcactgctggcagaggtgaaaaccgcaggctggctgccgccagtacgccttcgcccacagcaaaacatgccctgcgatatccgcagcgcccgggtcgactttacgccttccgaaaatgggcgggttgggcactacgttgaaacggttaccgcaacgctctcagggctggaaagcgaactcaatgccctggacgccaaagtgggcgatggtgataccggctccacttttgctgccggcgcgcgtgaaatcgcccgcttgttgcaccagcaacaactgccactggctcaactcgacaccctgtgtgcactgatcggtgaacgcttaacggtggtgatgggcggctccagcggtgtgttgatgtccatcttctttactgcggcaggtcaggctattcacgaaggtaaatcggtcgttgccgcgttacaggccgggctcggtcagatgaagttttatggcggcgcagatctgggggatcgcacgctgattgacgcgctgcaaccggcgctggaggcactggcgcaacatccgggggatctggatgcggcttatcgggcggctcaggccggggccgatgccaccagccacgcaaccaaagccaatgcaggccgggcctcgtatctcaacagcgacagtctggcagggaatatggatccgggcgcgcacgccatcgccatggtcttcaacgcgctggcacaacgcacaagcgcgtaa

SEQ ID NO: 429028 - DNA, 552 bp, Serratia marcescens; identical to SEQ ID NO: 428399

SEQ ID NO: 429029 - DNA, 393 bp, Serratia marcescens
atgcaatcccggatgacaaaggacattgtcctgaacgcactgctgatggctgtatggcggcgtaatcccgaaaaacaggtgctggttcattcggatcagggcagtcagtacacaagccatgagtggcagtcgttcctgaaatcacacggcctggagggtagcatgagccgtcgcggtaactgccatgataatgcggttgcagaaagttttttccagttgttgaaacgtgaacggataaagaaaaagatctacggaacgcgagaagaagcccgcagtgatatttttgattacatcgaaatgttttataacagtaagcgtcggcatggttctagcgaacagatgtcaccgacagaatatgaaaaacagtattatcaacggctcggaagtgtctag

SEQ ID NO: 429030 - DNA, 546 bp, Serratia marcescens
atgaagggtctatatactattttaatactacctgttctcgtaacagcttgtagtatgaatgatatagcaactacaaaccagaaaatcagtgatggtgcctcaggaataatgaattccctgagaggtaactcctcaggaaatgatgagcagcgtatgaaagtatctccttcagaaaaaaaagaatcgacctctaaaagttatactgtaccagtagatgttgatactgcagcagcaagaattaaaaggaagtttaagtttatctctaatgatgaactgagattaattagagaaaaaaataacgatggcgaatggactgccagcgcaattaccgatagtaatcaggaatgggatgcgatgactggaagttattataaaatgggctcagattggggcgactatgatgatcacctaactattgagctagaaaaaaatgggtcaggtagtcgtattcatataacgtacagttcttcttcaaagcaaagactcgcaagtagcggcttgcaggatttaatgcaaaatattaagaatgtagctgaagggaagtaa

SEQ ID NO: 429031 - DNA, 1281 bp, Serratia marcescens; identical to SEQ ID NO: 100896

SEQ ID NO: 429032 - DNA, 441 bp, Serratia marcescens; identical to SEQ ID NO: 100897

SEQ ID NO: 429033 - DNA, 900 bp, Serratia marcescens; identical to SEQ ID NO: 100898

SEQ ID NO: 429034 - DNA, 528 bp, Serratia marcescens; identical to SEQ ID NO: 100899

SEQ ID NO: 429035 - DNA, 1125 bp, Serratia marcescens
atggcggaaacaggctggtcttccggtgagacattctccggcctgagcgttgccatgctcgttatggggctggtttcaccgcttatcggtcccgtaatggcccgtaccggtggacgcaccctgatgatggcgggaactttggctataaccatcgggtgttttctgatggcgtttacctattcaacattagcgtgggatgccgtctggatcctgacaggcgcgggcatgcggcttgctctgtatgacgccgcttttgccatgcttgtggaaaccgcaggcgcagaggctcgcaaggcaatctctctggtcaccctgctgggcggtctcgcgtcggccgctttctggcctgctggcgcagcgcttcttcacgtcaccgactggcggcatgccgtcatcatttatggctgtgcgggcctgctgagcctgttttttttaactgccgttccggcaggcagtcgggtaaaacttcccgtaacagggcgatccggccattcggctgacgcaacagcaacatcagaggacacaaaagcactcatcagcggcctgtggtatgccactctgatagcgttgataagctttgtctccaccggcgtgtccacacattttccccggatactggcctcttatggcgtgcctgctctggctggcatgctgtggggagtggggcagttaggtgcccgtctgctgggtgtagtttcaggtgcacgaatctccgcgatacgcctgaaccttataaccggtatcctgcttcccctctgttttctgaccggccttgcaggcagcattactcctgtggctacagcctttttcgttctgggctatggggccgtaaacggactgaatacgatcgtgaaggccgtacttcctcttgtgctgtttgatccgcagcagtacgcccgcaaaacaggaatactgatgtcgccggcattttttctcgcggcactggctccgtctgcgtatgccatactgctggagcgctacggtatacccggcacgctgcttttttccttcatcctgaccctgatcattacggcgatttctgtggtcctctggcagcgtcattctggctctgttgtgcagaaccgggaccatggagcatctacccttcacgaaaaaaatgtttga

SEQ ID NO: 429036 - DNA, 336 bp, Serratia marcescens; identical to SEQ ID NO: 390288

SEQ ID NO: 429037 - DNA, 723 bp, Serratia marcescens; identical to SEQ ID NO: 390289

SEQ ID NO: 429038 - DNA, 429 bp, Serratia marcescens; identical to SEQ ID NO: 390290

SEQ ID NO: 429039 - DNA, 1284 bp, Serratia marcescens; identical to SEQ ID NO: 390291

SEQ ID NO: 429040 - DNA, 354 bp, Serratia marcescens; identical to SEQ ID NO: 100901

SEQ ID NO: 429041 - DNA, 459 bp, Serratia marcescens; identical to SEQ ID NO: 100902

SEQ ID NO: 429042 - DNA, 2529 bp, Serratia marcescens
atgccaccaaaaacgactcagaccacaccggcctgttgcagcaccgggagctgctgctcaacggacggcctgagccagatgtccgaaccggttgcagagcttccccgcaacgatgacgttcagacgcgtctgcgcatcatgcagatggaccgcccgacggaggagacgctcctccgaaaaaaactggcaaaattacctgccgtcagcaatcttgaattcaatctgatacagagggtgcttaccgtgacccatacaccgcaggcgctggaaccggttctgcaggcggtgcgctcgctgggttttgacccggaaccgattgataaagcaatgcagcctgaaggcagctgctgctcaggccgtgaggcggaaaataccggcggttcctgctgctcgcctgcccctgtcacattcggtgagctgcagacgcagcaggtgaccgctgacggggtgcgtaccagtatcaggatcatgcagatggactgcccggttgaagagggcatgatccgtaaaaagctggacggcatgtcagccgtcaaggaactggatttcaatcttatgcagcgtgtactgacggtggttcacgcaccggatacgctggagccggttctggccgccattcgttctctgggctttgaacctgaacttcctgacagtaatggccggcacgcggtcactgaggaaaagaaaaaacactggtggccgctcgcgcttgccggtgtggcggcaatcgccgccgaagccatgcactgggcgggcatgccggaatggctggaagcggctcttgctctggctgccgttgcggcctgtggcctgtccacgtacaaaaaaggctggattgctcttcgcaacggcaacctgaatatcaacgccctgatgagtattgccgtcaccggggcgctggcgctcggacagtggcctgaagccgccatggtaatggtgctgttcacgattgcggaactgattgaagcgaaatctcttgatcgcgcccgcaatgccatcggctctctgatgaagctgacgcctgaaacggccacggttcagcaaccggacggctcctggaaagaaactgaggccaggtctgtatcccttaacagcgtggtcagggtaaaaccgggcgagcgtatcgctctcgacggcacggtggtccggggcaggaccgccattaatcaggcacctattaccggcgaaagtctgccggtggataaaggggaaggtgacccggtcttcgccgggacggtcaacggctccggtggctttgagtaccgtgtaacggccgctgccggaaataccacgctggcgcgtatcattcatgccgtggaggaagcgcagggggcaaaagcccctacgcagcgctttgttgatcgctttgcacaaatttatacccctgtggtgtttgctattgccgtcgcagttgccgttctcccaccgctgattgcaggtgaaagctggcaggagtggatttacaaggcgctggtgatgctggttatcgcctgcccctgtgcgctggtcatttccacgccagtgaccattgtcagtggcctgacggcagcagcccgccgggggatattgatcaagggcggcgtttatcttgaagaaggccgaaagctgaagtggctggcgctcgacaagaccggcaccctgacgcacggtaagccggtacagacggatgcgattatctataccggggtggcagaagatgaggggcgcagtctggctgtgagcctggcaggttactccgatcatccggtttcgcaggctgtatcggcggcatcagatggcattcagcgttatgaagtggaaaactttgaggctctgccaggccgcggcgtgcgcggcgtcatcaacggtcaaacctacagtctgggcaatctgaggctggctgaagaaacggtgcgctgtccggaagcggtcagggctgcactaacggaactggagaccgggggtaaaacggtcatcatgctctgtgacactcatcaggtgctagggctgtttgcggtggctgatacggtgaaggaaagcagccgcgaggcgataagtcagttgcatagtctgggtgttaaaacgctcatgctgaccggagacaatgcgcacactgcgcaggccattgccggtcaggttggtatcgatgaggcgcggggggatcaactgccggaagataaactgcgtgctgtagaaacatttacggcgcagggcacgaccggcatggtgggcgacggcatcaatgatgcaccggcgctggcccgcgccgatatcggctttgccatgggtgcaatgggcacggataccgccatcgagactgccgatgtggccctcatggatgatgatttgcgtaaaattccggcttttgtccgactctcccggcagacgtataacattctggttcagaatatcgttatggctattgggatcaaggcagtgttcctggccctgaccattgcaggtatggggaccatgtggatggccgtattcgcggatgtgggggcaagcctgcttgtcgtggcaaacggtctgcgcctgttgcgtaagtaa

SEQ ID NO: 429043 - DNA, 300 bp, Serratia marcescens; identical to SEQ ID NO: 100904

SEQ ID NO: 429044 - DNA, 2127 bp, Serratia marcescens; identical to SEQ ID NO: 100905

SEQ ID NO: 429045 - DNA, 978 bp, Serratia marcescens
atgcattccgcatctgctcttctgctgactgagcagtggcttacaattctttcgaatttaggaagagccagcgcaactattaaagcctatcgaagtgccctgacgcatttttttgccttctgtgaaatacacgacattgctcctgaaagagcttcctttgaagacattgcaggatatatccgacctcagctccctgatatgccgtcgtccgttgcaagcgccacgctccagttgcgcctttcagctcttcgtctctggtatgactttctggtttatcaggatatttgcagtctcaacccgttaccccgttcgggtttgcctggtgccatttataccggacgcggcctgatcccacgtatcaaccgactccccgttattcccgatgacggggagtggctcaggttcctgaaacacgtttctgcagcgcctctgcgtgaccgactgatgcttgctctggcttattatggggcgctccgacgtactgaagtgacggctctgaggcttgaggacattgacctggctcatcgcctgatacgcatccgggcagaaacgacgaaaaacagacgggaaagaatggtctgctatagcgccgacgttgcgccggtacgggcaaaccattttcaaaagctacggctggaaggctggtcaggcggtgctttgttccgttccgtctctgaccgtaattacggcgctcctctctctttctggagctggagtaaaaccgtacggaaatgggcggcagagactgatcagccagacatcaccacgcatacttttcgtcacctccggctgacgcatctggcacgggccggatggaaactgcatgaactggctacttatgcagggcacagggacccacgtacaacacaaatttatattcatctgtcgggaacggatatggctgcccgcatggctgctgccgtcgctgaaaccgaccgtaagattgcagggcttatctttcaggcgggagccgtgtga

SEQ ID NO: 429046 - DNA, 1476 bp, Serratia marcescens; identical to SEQ ID NO: 428371

SEQ ID NO: 429047 - DNA, 348 bp, Serratia marcescens; identical to SEQ ID NO: 100924

SEQ ID NO: 429048 - DNA, 1452 bp, Serratia marcescens
gtgaagacaagattatcgaaaccacaggctgtctggcagtcttggtctgaggtagagaggctaattacccgtgaaggaaaggaagtcgatatatccggagatacttggaagttaccgtattctgcgcgggataattcaaccctgattttcaaaaagataattaactccgaaataagagaagcactcaaggaccatgttgccgatcggctaaaacgagtatcaacccatgcgggctatgcagcgtatcaggatgtctggagggaagtacttcgacattggggacatccggtatctaaagttgatacggagtcgcatctaatagacctttttgaatccgctatcaatcgtgctcggtcacgaaaaaagttgtggtcaatgtatagaccgattcagtggtacatctggagcgcggacaacaatccagaatatggattttccgaaatttatgcacaagaacttgagtctctagagctacctggaaatccgaaaggtgaagctgttcggatggaagatcccgaaagtggtcccctgcacaagtctcttgagctacctctcttaatcaatgccctcaaattggatgaggggcaatcgttggagtatttgcagcagaaagttgtagttgccttatccgtagcgtttgggcgcaacccggctaacctaatatttctgcgagagtctgattttgagcagttagctcccggaggtgcggacccatgctacatcattcgcatgccgatgattaaaaagcgatttgtgaatccaagagacgatcttttggatgaatatctcgacccacattttggttccatgattgagcagttgatcgaaatcagtaagttggtgccgttgagctatgcggatagggcctttgtaaatccggaagagcgaccattgctaattaacaggaatggaaataaagcggccattttatccaaagattttgataacgcatttaacctgaccagcaatgatatatcgcgtttactcggtgcgtttgtaaagcgccacaatattatctctccgctcactggcgagttattgcatgtcacgccaaggcggctacgctacaccttggcaacaggtttggctgccgaaggaatcagtaagcgcgagctagccagaatactggatcatacagacactcagcatgtgaatgtctattttgagatggctggaaaaatagtcgaacatctcgacaaggcgacggcgaaaggattctcgaagtacctcaatttcttcaaaggtaggttgatcgatgatgatgaagatgcggtcaatggtgagcgagacgacaagcaccttacttttgtagatgagcaaaatcctgctgatcaatctgatattggtgtatgtggcgaatccagcgtctgccaccttgatccgccttactcatgctatttatgccccaaatttcagccttatcggcatgctgaccatgagcatgtattgtga

SEQ ID NO: 429049 - DNA, 1173 bp, Serratia marcescens
atgaaaatagagctagtcacacacaagacgggtgagcagataccaataatgctggatgcttctggtatgccagtagttttacctaatgagtttatccttgccagacgatcccttagtaccaatacattggttcggaatctgagagagttgtcagtgctttatcgttggttggataaatcaaattgtgacctatctgcgaaattattggctcaaaactcattcaacgaagcggaattaaaaggtggtttagtcgaagcgttaagaatcgaccagtccaatggacggataagtgcagtagcgcctaataccttcaatcaacggttaacaactatccggcaatttatcagttggtgcatggacgtactgacaagtcaattgcccttatcttccttggactatgagcgtttaagggagagaaagtcatttttgctaaaaacgctggatggtagctttatgtctgccacaccagtaagagcaagtcttcgtaaggggttaaatgaggtagaagttgacttcctgctggctgtattgcatcacgatgctgatcaaggatttggacgagattcagcggtaaagttcaggaattatatatctgttgggctgatgctattttgtggtttaaggccaggtgagctgcttagcctcagggtagaagatgtccaggttggtgcgatttcagcgattaaggttgagcgtcgaccagcggacccgctagatgtgaggcgacctagacctcaaataaagcgtaatggtagactcattcccattgagagtaggcagtttgcttttgtattaaacgagtacattgttacttggcgtgaagtgttagaaagtaaaagctacggcgaatcagactatttaatcttgagtgatgagggagctcccttatcccaatcctcaattacacagtttttccagttgttgcgtgcacaatacgtggaccatctccctgaaaatttaacggccaagtctcttagacacacattttcatcccggattgagagggtattacgagcttcgggaatggatgaacaacgcagaagagaagcgctggctttgctacgtggcgatagtagtttgaattcacaagatacttatatagcccaagaagtggaagagcaggcgatcaagtcattgaaacggtaccaggctggaattatgtcagagaggtag

SEQ ID NO: 429050 - DNA, 807 bp, Serratia marcescens
gtgggtactaaactgggaacctctgtcgccgcgctgttatttctgtttcctttcgccgctcaggcgcaggacggcgaggcctctttaacgctcgccggcggccttgccgtcgcccccgcctatgaaggctcttctttttacagcattgaacccttgtatcaggtgaatgccggctatcaaaacgccagctggggggagttcagcgcaggcagcgagggggcacgctggcaattcccgctcgccggccccgtcggcatcgcgttattgctcaactatgacgccggccgtgacgaggaaatcagaaccttacgcgggcgcaacacccgactcaagggcatgggcaagctgggtggcgcactggaggccggcgccgaactgagctaccaactcgatcccttccgcgcctacgtaaaaggcatgcaggcaacgcgcaagcgcagctacggcggggaagaactgggccacacggcctatgtggaaaccgggctcaccgggcaatatccactcagcgaacagctgacgttgatcggcaacctttccaccacctgggccaacagcggctatcagcgcggctatttcggcgtgacgtcgcagcaggcacagcgcagcgctttcagcgcttatcggccgggcagcggcttcaaggatgcgaccctcaccgccgcgctcaattaccaatggcgaccgaacgtggccttccaggccggggtcggcgtgacccgtctgctgggcgacgcggccgacagccctatcgtcgaaaaaaccacgtcgggtatggccttcaccagcgtcagctacagcttctga

SEQ ID NO: 429051 - DNA, 1011 bp, Serratia marcescens
atgaagaaactagaatcattgcagtatgccagagcgatagcagcaatgctagtcgtcatagatcatactgtaacacaattctctctctatcagtctactggcattgattttattgatgcaattttaaagaaaacaatcaacatggggaacataggtgtatatatcttctttgtcattagtggatatataatgtcatatacaacaaagaataaaaccttcaatatcgcatatgctaacacgttcttaaggaaaagagttaagaggatatatcccttgtactggatatatctttcaatatttctggcgttatgggctgccggtctagccatgcgctcctatcattacagtgcttatcaaataatatcttcatatcttctgataccttatggtgtaaccgataataaaataacaccaccagttttggcacaaggatggacactaatatatgagatgttcttctacatcacgtttgcattattgataatgctaggaacaaacaagaaaataatgccattgttattgcttgcatttttctcattattaatggcactctcgcaatcaaatttactcccatcaaacgaattaaatatattcttctctaaatggttactttttcttttcgttgccgggatattaatagaaaaaaatcaacaagttatcacaaaaacactcatcagggtgaataattacaccttgtggtcactagccgcaactcttatattgatagcaacttacattgataaaccagtcatcattgattacttattgagcacgctggcattaattcttattctacccattgaccaagataggaaaggcctcttaaaagttggcgacgcatcatacaccatatatttaagccactcatttatagttttagcttacggaatcatttcaaaaaacatttctaatatgtgggtgtgtctgatcgctggtttaataacagtatttacctctgtaattctgggggtgattctatatgagaaattagaaaaaagaatacatagctaa

SEQ ID NO: 429052 - DNA, 186 bp, Serratia marcescens
gtggccgatcatccgctgcgcatcggtctttctacgctggtgaccgtcgacaccgccaacctggacggccgcgtgctggccgacgtggtgcgcgacaaaccgctgtatcagagcgacgcgctggcgttgaatctggcgccggttaaccagctgatcgccgacgtgatccatgcgaacgccggctaa

SEQ ID NO: 429053 - DNA, 513 bp, Serratia marcescens
atgaagacattactaacatcgccgtgtgttaatcaacggggagcaggtcaatcccgctatgtaggtttgcgaacggaagaaactgttcagtccgcaaaatcattaaaaacatggcgacaggccttaataaacggtgacgattgtgtccgggttgtttttggcaccaaaggtggtcgtcctcgcgatacgacgatttttaatcgtgagaaggttttatctattttagatgcggcaataaaatattgtgatgttcacaatgggaaattgattgataagccatcattacatactgcaatagaacggtatcgtaatattgttcgtgatgctggaatgacagggaaagatgcgccccatagtttgcgttacgcatattcacacgatgcggttactcatcatgttcagaatggaatgagtcgcgaagaagcggaagcattggtatctatggacttggggcatggtgatggaagagggcgctatataaaacaggtctattttcgagaagacgtcgagtaa

SEQ ID NO: 429054 - DNA, 723 bp, Serratia marcescens
atgaacaaaataaaagacaatctgcctaatatcattctcgacattttcgatgccccggtcagtggggagaaactgggcctgagtgcagcggaacaagcgccacgcatactgatgctgtacggttctgttcgggagcgctcttacagcaggctggcgaccgaagaagcggcgcgcttgctcacggctatgggtgcggaggtccgcatttttaatccctcaggacttcccctgccggatgatgcgccagagacgcacccgaaagtgatggagctgcgcgaattggtacgttggtcagaagggatggtatggtgctcccctgaacgccacggtgccatgacaggtatcatgaaatctcaaatagactggatccccctttcagagggtgcggtacgcccttcccagggaaaaaccctggcagtgatgcaagtcagtggcggttctcagtcctttaatgcggtcaatcaaatgcgtattttggggcgctggatgaggatgatcaccattcccaatcagtcttccgtcgccaaagcttggatggagtttgaggaagatggccggatgaaaccctccgcatattacgatcgcatcgtcgacgtgatggaggagctgatgaaatacaccttactaatccgtggccgtaccgaatacttggtcgatcgctacagcgaacgtaaggaaaatgctgaagcactttctgctcgagtcaacttgcgtagtatttaa

SEQ ID NO: 429055 - DNA, 342 bp, Serratia marcescens
atgaatatcaatatagcggctgaagcgttgaaagaactggggcacccgacccgactcagcgtgttcaaagagctagtcaaattcgggtacgaaggtctccccgtgggggaattgcaaaaacgtctagagatccccgcctcgacactcagccatcatctttccgcgctactgtcggtggggctcattcgccaggaacgacaggggcggatcctgtattgccagccacaatatgcgctgctgagccagatcatcaacttcctgctcgaagaatgctgcgtggccaatacctcctgctcatctgttacgacatcaacccttgccaagactgggatcccatcatga

SEQ ID NO: 429056 - DNA, 1209 bp, Serratia marcescens
gtgtcgaattctaagcttgcaggccagtcaacatgggaggtctttctcatttttctcaggcttggcctgacatcattcggcggccccgtggcccatttggggtattttcataacgaattcgtcacgcgcagaaaatggatatccgaaagcagctacgccgatttagtggccctgtgccaatttttgcctggtccggcaagcagccaggttgggagcgctatcgggttatcgcgggctggttatatgggggctttggctgcctggaccggttttaccctgccttcagccatacttttgatcttgtttgcttcaggccttacgcattttggtggcaccctgtctgcaggtgctttacatgggttgaaagtggtggccgttgccgtagtcgcccaagcggtttggggcatggctcgccaactgtgcacagatgcggcccgggtaacgataatggtggcggcagcctgcctggcgctatggctgcctttcgcgtggagccagttggggatcatcatactcgctgcactgttcggcctgtttatttttacaccaacacccattaaagccacctcagatcggctgccaataccgattagcgccaggatgggcgtggcatggctgatgctgttcctggcactgttgtcaggattgccgttgctggcggggctgtttcctgggactgcgctgtcaatggttgacgtcttttatcgagcgggctcgctggttttcggcggtgggcacgtcgtcttgcctctattgcaagccgaggtgataccggccggctggttgagcaatgacatatttctggcgggttacggtgccgctcaggcagttcccgggcctctgtttacgttcgcggcatttattggcgcgtcaatgagcgtggggccttcaggtgtgattggcggagcactctgcttgctggcgatttttattccctctttcttattggttgcgggggcgttgcctttttgggagctgattcgtcacaatgcccgcatgcggggggcaatcttcggcatcaacgctgccgttgtgggattgctactggcggcgctttataaaccggtatggacgagcaccattcaaacgccgcaagattttggttttgctctggtagccctgttggcgttgatatattggaaatttcccccttggctggttgtggtctgctgcggtatggcaggaggtatattacacgtctggttttaa

SEQ ID NO: 429057 - DNA, 165 bp, Serratia marcescens
atgaaaccctcgtcatattacgatcgtattgtcgatgtgatggaagagttgatgaagttcactttgcttacgcgtgggcgctcgggttatctggtcgatcgctacagcgagcgcaaagaaagcgccgctgaactttcggcctgggttaaccaacgcagcatttaa

SEQ ID NO: 429058 - DNA, 168 bp, Serratia marcescens
atgttaatgaaagaaataaaagataacctgcccaatatgttgcctgaagctttcgacgccctcgtctgcaaggacaagctggggctggaagcatcagaacatgcgccacgcatcctgatgctgtatggctctgtacgcaaacgctcatacagcaggctggcgacctaa

SEQ ID NO: 429059 - DNA, 429 bp, Serratia marcescens
atgagcgtaattacgatttaccataaccccgcctgcggtacctcgcgtaacaccctggaattgatccgcaacagcggtgttgaacctacggtaattttgtaccttgagacaccgccaagccgtaatgaactgctcaaactcattgccgatatgaacatcggcgtgcgcgccctgttgcgtaaaaatgtagagccttatgagcagttagggctggcagaggacaaatggagcgatgaccaattggttgattttatgcttcagcatcccattttgattaaccgccctattgtagtgacgccgctcggcaccaaactgtgccgcccttctgaagtggtgttggatattttaccggatgcgcaaaaaggtgaatttaccaaagaagatggtgaaaaggtgatcgatgcgcaggggcagcgcgtaaccaagtaa

SEQ ID NO: 429060 - DNA, 1284 bp, Serratia marcescens
atgtggctggctgcggctatttttatcctgaccatcgtgttggtcatttggcaaccaaaagggttagggatcggttggagcgcgatgttcggggctgtacttgccttactttcaggagttgtccacctcggcgatatccccacggtgtggcatatcgtctggaacgccaccgcgacctttatcgccgtgataatcatcagcttattgctggatgagtctgggttctttgaatgggcagcccttcacgtcgcccgatggggcaatggccgaggacgctggttgttcacctatatcgtgttattaggggcagcagtcgcggcattgttcgccaatgatggcgcggcattgatcctgacaccgatcgtgattgccatgctgttggcgctgggcttcagtaaaggcaccacgttagcgtttgttatggctgcagggtttatcgccgactcagccagcttgccacttatcgtgtcgaatctggtcaacattgtctcagccgatttctttaagctggggttcaacgaatacgcttcggttatggtgccggtcgatatcgccgcgatcatcgctacgctggtaatgctgcatttatttttccgcaaagacatccccgccacctatgaattagccaaattgaaagcgccaaaagaggcaatacgcgatccccaaacattcaaaacaggctggggcgttttggtgctattgctggttggattctttgggctggagccgctgggtgtcccggtcagtttggtggccgccgtcggtgccttgatcctgtttatcgtggctaagaaaggacatgccatcaataccggcaaagtgttacgcggtgcgccctggcagatcgtcattttttcactgggcatgtacctggttgtctacgggctgcgtaatgccgggctcaccgattacctgtcaacgatactcaatggtttcgccgagcaggggctctggaccgccactctgggcaccggtttcctcacggcgttcctgtcttccatcatgaacaatatgccaacggtgttggtgggcgcattgtccatcgacggcagtgcggccaccggtgtgattaaagaagcgatgatctacgccaatgtcattggcagtgatttgggccctaaaatcacccctatcggcagcctggctaccttgctgtggttacacgtattggcgcaaaaggacatcaaaatcacctggggatattacttccgggtgggcattgtcatgacgctgccggtgctgttcgtcacgctggcggcgctggcattgcgcttatctgtttag

SEQ ID NO: 429061 - DNA, 1764 bp, Serratia marcescens
atgaagtatctcgcgaatgtccccaccttccttttcttcaccggtaaaggtggcgtaggtaaaacttcactttcttgcgcaaccgcaatcaaactggctgatgaagggaatcgtgttctgttggtcagcacagatcctgcatccaatgtgggtcaggttttcgggcaaaagattggtaacacgttaacgtcaattgctaccgtttctggccttaccgcactggaaatagacccacaggccgcagcacaacaataccgcgatcacatcgttgcaccggtaaagggcgtgttgccggacgagatcgtacgtagcattgaagaacaactatctggggcatgtacaacagagattgcagcctttgatgagttcaccgggttgctgacagatgaagcgttgttgagagattttgaccacgtcatttttgataccgccccaaccggccacacgatccgcttgcttcagcttccaggtgcctggagtagttttatcgaaagcaatcccaatggcgcctcctgtctgggaccattggcgggtttggaaaagcaacgagagcgttattctcatgctttatcgatgctggctgatggggcaaaaacgcgtttggtcttggtcgcgcgcgcccaacattctacgctaattgaggttgcccgcacgcatgaagaattgcttcaggtggggttgaagcaccagtacctggtgatcaatggggtcatgccggccgaagaagctgcccacgacgaattggcgaacgcgttataccaacgtgaacagcgtattctgtcaaacttgcctgcggtacttgccgtcctcccaagtgatacgctccccctgcaacaggaaaatctggttggcgtagtagccctgcgtcgtttattgaatcgggttcaagatcccccgtctactttttcaaccacaccacgtcagatgttgaaacaactcccttcgctggacgccttggttgaggagatggctaagaatgatcacgggttgatcatgctgatgggaaaaggcggcgttggcaaaacgacactagccactgccgtcgccgtgtcgctggccgacaaaggattagatgtccacctgacaacttcggacccggcagcgcacatcgaaagcacgctgcatggacagctcgataacctgcaagtcagccggatcgacccgcacagtgaaactgaacgttatcgtgagcatgtgctcaccaccaaaggtaaagacttggatgcgcaaggccgggcactgcttgaggaggatttacgctccccttgcacggaagagatcgcggtatttcaagccttttcccgagtgatccgggaagcgggaaaacgttttgtcgtgatggacacggctcccaccggccataccttactgctgctggatgctaccggtgcttatcatcgcgaagtggcaaaacggatgggtgaaaatggccattatctgacacccatgatgcaactgcaggatcctgctcgtaccaaaatagtgttagtcacgttaccggaaacgacccccgttctggaggctgccaatctgcagactgatctccggcgtgctggtattgaaccttgggcctggataatcaataactgtcttagcgccgccgaaacgacatcaccgctcttgttgatgagggctcagcatgagtccactcagataaacaaggttcagaatgagctggcatctcgggtagcgctcattccattacagcgagacgaacctgtcggcatagaacgactgcgccgtcttgctggtaaatcggaataa

SEQ ID NO: 429062 - DNA, 426 bp, Serratia marcescens
atgagctatcaacatattgcgattgccacatccttgttggatgaggaacgcatgcttatcgataaaggtgtctcactggctacagcattgtccgcgaagttgtcgctgatttatgtagacgaacaccatagctactattattccgaactcggcagaatggtgcataatttttccgaacagaagtttgaaaccgcactccgccaggagatgcagcccatggtttcggctgcggcctaccccatttctgagatcattatccgacgtggtgagttggcgtacgaattgaacctcgcagccaccgagaaggatatcgatctgtttatttttggtcatcatcatgacatctggagtaatctattttcagcggcccgaaatgcaatcaatgtattgaatatagacgtacttgtcatacctcttcaggagtaa

SEQ ID NO: 429063 - DNA, 444 bp, Serratia marcescens
atgagttatcagcatattgttattgccactgacctcagtgatggggatattcgcctgatagaaaaaggggctgcattggccaaggtgacccgagccaagctgtcattaattcacgtcgatattcaccatgccccttactattcggcaatgggtttacagacctaccactatgacggtgaagttcccaccaatgtcacaacccagcaggcgctggctgcgctggcattacgctcctcttatccgataccggatgccatcatggtgaccggcgagttggttccggctttgcgtcgggagatcctggcacgcgggatagacttgataattttcggccatcatcaggatctgtggagcaatctgttttccgccactcgccaggccatcaataaccttgaggttgacgttctggtcattcccatgactgcgggtacggaggaaatatga

SEQ ID NO: 429064 - DNA, 201 bp, Serratia marcescens
atgtttcattcatgcgaaaatgaatacctcaagaaagtggagatgaaagcccacagaggtgggcttgaagaagccattaattacatcaaaaaattgcaaaaaggtcatgagggattgcgaaccctgagtgactatttcaacttaggattattcgtgatgaagggcaagcaagtagatattaatagatgggttttaagataa

SEQ ID NO: 429065 - DNA, 828 bp, Serratia marcescens
atgaacaataccgttattgcctgtgttgacggttcgccgtccacccgaccggtgtgcgaatacgcggcctgggcctcccgcttgctggatgcgccgctatccctgctgcacgtactggagaaagatgcacaccctgccgtatcagatttgaccggaagcatcggcattgatagccaggcgtatctcaccgaagagctggtgaaagttgaaggagagcgtagtcggttattaatggcgcagggcaaagccatactggctagttgtgcggcgttgctgaatgatgccggtcatgctgatgttcaattactgcaaaaacatggcgcgttggatgaaatcctggctgatttaggggatgttcgcctgatggtgctgggccgccgtggaacgcagaacccggttggcagccacctggaaagcattattcgcctgcagaaaaaaccggtacttatcgtgccggaggcttattccccaccgtccaaggttatgttcgcctatgatggcagcgatgagagtcgcaaaaacctgacgcgcctgacacttagcccgctactcaatggtctggtttgccacatcgtgatggttaagggggatacacgaaccttgcaggaagcacagagtgtgctgcaagcggctggcatcgcgaccgaaaaccacatactggaaggctcatccgttaccgaggcgctctgccgtcacgcccatgaaaatgccattaatctgatcgtgatgggtgcctatggtcattcaccgttgcggcgattttttatcggcagtaataacaccgccatgttggaaaaaacaaaaatcccactcttaatgctgaggtga

SEQ ID NO: 429066 - DNA, 1479 bp, Serratia marcescens
atgttgctgtcctcgacgcgtaaggactggctgggtaacgtccgtggtgacgtcctcgccggtattgttgtcgcgctcgcgcttatccctgaagcgatcgccttttccatcatcgccggcgttgacccgcaagtcggactctactccgcgttctgtatccccctcgtcatggccttttttggcggtcgcccggcgatgatatcgtcatctaccggtgcgatggcattgctgatggtgacgctggtgaaagaccacggcctgcagtatctgctggcggcttccgtcttgactggcctgttccaactcttggccggctatctgaagcttggcagcctgatgcgctacgtttcccgctcggtggttaccggttttgtgaacgccctggcgatcctcattttcatggcgcagttgccggagttgaccaatgtcacctggcacgtttatgccatgacggcagtcggtctcggtattatttacctgttcccgtaccttaataaaactatcccttcgccgttggtctgtatcgtcgtgctgaccgggatcgccatgtggttgcatctggatatacgcaccgtcggcgacatgggcaagttaccggacagcctgccgatcttcctgttacctaatgttccgcttaatctcgatactttattgattattctgccttattccgttggtcttgccgtggtggggctgcttgaatcgatgatgaccgcgaccattgtggatgacatgaccgatacgtcgagcgataaaaatcgggaatgcaaggcgcagggtatcgccaacgtctgcacctcgtttatcggtggcatggcgggatgcgcaatgattggtcagtcggtgatcaacgtgaaatccggagggcgcgggcggctctctaccctaactgcgggtgtggtattgctctgcctgattatattcctgcgcgactgggtctctcagatcccaatggcggccctggtggcggtcatgatcatggtctctatcggcaccttctcctggcgctcaatcaccaacttacgcagtcatccgctgtcaaccagcgtcgtcatgctggcgaccgttgcggtggtggtggcgacacacaatctggcgtatggcgtcttgaccggcgtgttgattgcgtccctgaactttgccaccaaagtgtcccgttttatggcggtgtcgtccgaacttaaagcgtcaacgcggacctacaccgtcgccggccaggtgtttttcgcctctgccgatcgattcatgagctacttcgatttccgcgaagcggtggaacacgtggtcattgacgtttcacacgctcacttctgggatattacgtcggtcagcgcactcgacagagtggtaatcaagttccgtcgcgaaggcacggacgtggaaatccgcggaatgaatcaggctacccgcactattgttgaccgcttcggggtgcatgacaaacccgaagaagtggaaaaattgatgggcggccattaa

SEQ ID NO: 429067 - DNA, 375 bp, Serratia marcescens
atgcatacccagttacccaacgtacttgacgtgaaaaccgcgcttgatgcgtttcatttcctttgcctggttgaaggtaagctcatgagtatacgggcttaccagcgcctgggattgggtattgaacgtgaagaccccactgagctgaatgatgtggaaaatgccgttatcaatgcgggagaggcctttggtggtttcctgctggtcatgcagtacggctatatatcgacactttccgctaacgggcaagcgcttatggctcgcctggatacgctgagcaaagatattcacgcgtcttattggttgcaggccgtggagcaaggcaagcgctatgtcgaagccgacattgcgattggcgagctcgaggtttggtga

SEQ ID NO: 429068 - DNA, 549 bp, Serratia marcescens
atgaacgtgtattttgtcgcaccaccgtcccagaacgcgtggattgatttcaccctggcggtgaccgaggtgttctggttgttgccggatgaggcccggccagaaggtatcacggaagccggccagctgtttgatggcatgatcttcgaaacggccggtttacgtgtatcaccggaatcagagggaagtagcccgatgcaaccggtgccttacgtcgaagaacgtgtggggttctttcagcgccccgacttttttcaccgactggttctgacactgattcataacctgtgccctggctctgtacggatagagcggaacgactccagactcgccaaatatccaggatgggagttgccactactctggttgcgccatcacctcaaacgcccagaacttattgctccgggtgaagtggatgaggcggcactgactgatgactccattctttaccatttggaaggtatagcagtcataacgatgatcccgatgaactgctttgtcgctggtgcgttattgtcggcatggatgacgtgctggcggcgcgtttga

SEQ ID NO: 429069 - DNA, 486 bp, Serratia marcescens
atggggcttgatatcaactttttccgtcagcgtaaggctgactatccgatgttgccggttaacggcgactggacacccgttggcgactgggtgccgtgttcaccagagtggctggaggacggcggtgattgtatgcaggcgccgcgaatatacaaccacaaaacgtgtaaccactaccatccgccgctgctggttcactcctgtcattttcgcgggtttactgcgttgatgcattgggtggtcaacagtgtcggggacgtcaaaagcggtgagctgatggcgttcgaccgcaacgacatccagatgctgcagatgctgttgtcacgattgaatgaagcgaactgccatgaggagttccctgatgactctcgcgactactgcgatgtgtactggatgcaggtcgacttactgaaaacgtacgttaacagcgtacttaccggcttcgattttagccggcatcacctttacttccgggcatcgtggtaa

SEQ ID NO: 429070 - DNA, 603 bp, Serratia marcescens
atgttgcattttaaccctgcagaactgcgcgccgtggtggctgaagtccgcgccaatcagtgtgcgttggtgttggccaaagacgacggcgtctatctgatgcctgctgtgggcgaacgaaacgccaccggccgtatcaaacacctggcgtatgccgacgggtgtcatcctgataaagatggtgcctggtatgaaacgtcccggcggctcgccggcggcgacgactttggcgaggcgctgatgctgaacgacagttgtatcgagcgaatactgtcgcaaggccatgagctctggatccacctgttacccgaaacggtctatatgcacgttgccacggttaactgggtgtgtgtcgccgacttccgtcgtataaccgcccgcatgctgcagctggccgaggtccattactcggtttgtgtcagccaggatgagtttaaacactggcgtgagcggtccatcaacttgctggccacggcctgtcataccgattgcaagcgggcaaagcccgccgatcgggaagactatctggtcatgttcgaacggctgaaacagcgtgttgacacggtaaacccgaaaggggcactgcgttaccccgctctctaa

SEQ ID NO: 429071 - DNA, 1011 bp, Serratia marcescens
atgaagaaaacatcatcatcacgtcggccggcaaaagcccgtcgcgaacgtactgacctgtaccaacaggttacggacaaaatcattgccgccatcgagacgggaaccttgccctggcgcaagccctggcggaccgacaagggccgcggcgcgtcgacggccatcatgccgcagaacggcacgaccggttaccactacagcggcgtgaatgtgctgctgttatggatggccgcggacgaaaggggttttcactccaatcgctggcttacctacaagcaggcggaagccgttggtgggcatgtgcgtgccggcgaaaccgcgaccctggccgtggtattcaaaccctgggacaagcaggtggaggatgctgacggccggcagctgtttgacgaggacgggaacccgctgaaaacgcgaatacccatgctgaagccgttatacctgtttaacgttgcccaatgcgccgccctcccggaaaccgttgtcggcattacgccggcagaggtgccggaagaggaggggtcgttggtcgatgcgaaaacacaggctcaggtcagcaccctcgttgaggcctgcggcgttcgagttgaacaggtttaccaggacagagcctattacgcgccgggtcgcgaccagattgtcctgccacaggttcagcaatttcgaaccgaggcggattactggtcgacgttattgcatgaactggtgcacagcaccggtcatgcaacacggctcaaccgggaggggatcacgtcttcttcccgcgcgttcggagacccggtatacgcgttcgaggaactggtggcggagctgggcagtgcttttatgtgcgcacagcttggcgtctttggcgacatccagcacgacagttaccttgaacattggctcagggtattgcgtgaagataagcgcgcgctgtttcgtgcggcaaaacaggcccgtgaggcgtcagagtttttactgaaacccctggcggaaccggtgacaaccgatcctgccgttgcggcatga

SEQ ID NO: 429072 - DNA, 279 bp, Serratia marcescens
atgacgattgaacaacgttactggcagaccattgccggcaggttactggccaaatactttggcctggcgttaaacgatacagatctgtgtgaagcggagtgcgtgatggctttacaggaagcgggagtgcggccgtttgaggcgatcaacaacctggtggataaataccacctggtacgcctgggcgccagtccctttaccccatcatcaccgtatctgcgccaggcggaagagctgggcgtgatcggtgaaacagagcaggagataaccgatgactaa

SEQ ID NO: 429073 - DNA, 273 bp, Serratia marcescens
atgactaaaaccaccaacaaggggctgcaggtcaccgttgaccctgagattgccggcgagctggcgtacatgctgaagcttcagcagacctgtggcgcggccgttcagcttgagaatgtcgagggccttatccattacattctggccagtattgccgatggtagccgacgtccgggctcgtgggagcgcggattattggtacagctgggattggtcgctgatggcgacgaacaccaggtctaccgggctcactatggcgagcaaagccactaa

SEQ ID NO: 429074 - DNA, 924 bp, Serratia marcescens
atgtcgaactggtgcaaaaaccgtttagtgatcacgggccaatctgtttttgtggatgaactgcagcaatgggtcaatggccatgttgtgcctgactaccggcacgccattcagcagagctgccggctattcctggccggctgcgccggcatactgaagccggctacgacaaaacccggcgtttacgtgccttacccgggtttattaatgcacccggggatcgcatcgcctcagaatctggcctttgaacactggttcgggttgctgaaggcggatgtcacgttaacgaccgagaacatccgtctgattgagcgtctctaccgccagtcgggtcttgacgccgtgaaatgggagaatatccccaacgtcgcgaaggagcgtatggcggatgtcctgtctcgccagtatgcggactggttcggcctggtgggggtgagtcctgacatcgatgccggcatatgctgggaacgtttgggcatgatgcccgagtataccgcaccgtgcgatatgctgatgctgatcccgacgcgtctggcgaccgaactgaatggttcaggcgctttgttacgtgatgtgccgaccacgaccgatctctatggtcgacagtacggcgtcgaatggccatcaggccataatgccggttgtgtgcgggatggcatcaacacgctgacggtgcactttgattccccgtggtacccgccagccggcgaggttatcgggacagtgtcggagcggttcagttgccaggtggaacatacctggtacatgcctgatgcggaacgcagtggttacgatcgctacgaccgcggcgagcatgtcgacggcggacgaatagcggctgaagttgaggccggtgaagtgatccacctgacctacgccgacaaggattcggtaccgttgtcaccgaatgcagcagccggctaa

SEQ ID NO: 429075 - DNA, 681 bp, Serratia marcescens
atgttgacgtttactgaagcacaaaaacaattcatcggcctctttggtcaaactgcacgctaccatcatcgatataaggtcttctccgactttgttcagtgtggcgcaatagcgatgcataatcgcttctgtccagacgaagggctggagaaacagtacctgaacatcatcaaagggtatgaacgtgaagacgtcgagcgcctggcgcacttacttggcctggtacgaattgcgctgaatgctcaggcatgtgattttctggggatgacgtttatgcggctcgagctcggggataaacaccgtggacagtttttcacgccctggagcgtggcatctatgatggccaagctgcagttcaccgggctggagcaaaaattgcaaactcagccgtttgtcaccatcagtgaacctggctgtggtgccggcggcatgatgattgcagctgcagtggagatgcaggcgttggggtatgaaccttcagagtatatgtgggtttcctgtgttgacattgatgtggtggctgtgtcgatggcctatatccagttgtcatcactgggtatacccggtgaaattgtactgggaaacgcattggcaaatgaacgtcgattggtgatgtatacaccgatgcattggctggggaaatggtcacttcgaatacaccagtatcattcagaaaattaa

SEQ ID NO: 429076 - DNA, 1449 bp, Serratia marcescens
atgtcttattgtgatacgcctgaacaggccgccatcatcggttggtctggaagcaaactggtggttagggcttttgccggcaccggaaaaacgtccacactggtgcggttcgcgttagcgaacccggacaccaggatgctctatcttgcctataaccgggccgtcagggatgaagcagagcaaaaattccccttcaatgtggtctgtaaaacctctcatcagctggcctggcccaacttcgggcgtcactatcaacaacggttgaccggcaatctgcggatcactgacgttgcccgtcaactcaatactcggtactggcctctggcgcgtgtggccattacgaccttcaatgcctttctctgcagtgctgatagccagtttggaccgcaacacctgccggatgatgatgcgcgcagcggattatccgctgaaaaaatcctggcggcggcacagctgctctggcgtgagtcagcccgtcaggacggttcctttcccgtcacccacgatgtctacctcaaactttatcagctctctgaacctgatctcgccagatgctggcagacggtgctgttcgatgaagggcaggacgcgaatccggtcacgcaagccctggtgctgtcacagcgctgtaatgtagtcatggtcggcgatcgccatcaacaaatttaccggttccgcggggcagaaaatgcgctcgatgccgagcaactggctgatgccgatcagctttgtctgacacacagcttccggtttggccctgcagtggccaaggttgcgaatatgctgcttaaacggcagggagaaacgctgtccctgatcgggaacggcggtgaagacaacgtcgtggcgagcttgccggaaaaggacaaatcaaaacacgtagccgtactcagtcggactgttgcaggagtgattggtgtggcgcttgaagctagcctggcgggcagaaaagtgtattgggttggcggcatcgccggctacaaaacagaggaactggaggacctgtactggttctcggctgatatgtctgaacggatgcaatccccgctgctggcacgagaataccgtaattttgaggagtttgagtcggtggccagagcaacgaaagatgtggaaatgaaccagggtcttcggttactcgatcagtacttcccgttgccacaaaagctacaggtactgcgtgaacatgcggtcactgatgaacgtcaggcgcaggtgaccgtttcgacagcacatcgtagcaaagggctggagtggcccgtcgtggtgttgaaccatgactttgcggatatcacggatcccctgatgtccgatagggaacgtaccgatgaaaccaatctgctgtatgtcgctgtaacccgggcccggcaaacgctggtactgaatgatctactgcaggtgttgatggacgacgaaggtgaggatatcgctggaggcctagcatgctga

SEQ ID NO: 429077 - DNA, 1701 bp, Serratia marcescens
atgctgaaggcgatcaaagaactgcttgtcgggacccgggatatgccggcaaaaccagcggcaggcatttcagcctcccggagtcctgctggctactatatgcccgcgtccgcagaacagctgttgagcacggcaccccgtaagcagtgtttacagcagttatgggaaaattgttcgcttcccaaagacctctatgaacacttctatctgcagccactgaagcagctcatgacgttgatacaggtgttgccggcagcgccgcagggtgagtatgcgcgggaagggggattggttgatgtcacgctgcagacaacgacatatgcagtgcgtctggccaaaggccacatgctgcctcctggcgccgcacccgaagaacaatcggcccagaatgtgcaatggaatgtcgtggtgttttacgctgcactttggcactacctgccgctgttgaaccagctgcagggcgagttccagagtggccgcgcctggttacccggtttgacggtgccgggtgaaccctaccgttttcgattcaggatggctccatcagccctgacactggcaacaagtcaaagtgcgatgattgcggcccggctgctgcctgtcgaggtaatcaactggctatcaacactgccggcggcaacacacgcgttgatgacaatcgcttcccgacagcctagcacattacctgtgatagacgacattatccaggaggcggccaggctggcgcgcggcgatagcctggccgtagcgtcctcttcggcatccctctccgccccattgacagcacctttaccgtcggtggcgccgacgacagaaaatatcacctcttcagtacccacgattgatttgcaaagtgcagtcagcaccaccaccccgccgctcgttgatgagccgttgccggcagagacattaaatcagcccgaagaaaatgcagtgtcagcaacggaggtattactgagctcggccctggatgcgccggtcaatgataaacctttggctgagatggtcgtggtgccagaaacggtggtcggcatcgaagaggatatgcaggccctgttgtcattaatggcggttgaggtgtcagcaccggcttgccaggttatccaggaagagggagacgcccctcaaaaagagagccccatccctgaaaataaccagagtccggtacatgacatgaccactgtaattgaagatagccgtgatttaccagacataatagaacctgatttatcagaaaacacagattcatcggttatttcagcatctgaacattcatcaaagaaactacagccagaagaaattaatacagagggtaacttgatcgcagaaaataacattggggatgccttcctacagtggttgagtcttaggttcaggaaagggaatatatcaattaacagcatggattccagagcgcatattgtcagtggcttcgtatttctttgcgtgccagatatttttcatctgtatatcaaagaaaataatgtagagggcgttgaccgaaattcaatccaaaaggcgtttgaaaaaatgggcagacatcggatccgtaaggggcagcgattctttattggtcatctttatcaaaagccagaggggcggggctcatatcgtcgtatcaatggctacctgattaaggcaaatagtttatatggtgggacaagagtaccagaggacagcccattactcgtgatcccgtag

SEQ ID NO: 429078 - DNA, 1032 bp, Serratia marcescens
atgaaaaacgaagaaaagatgcacgacgagtgggaatttctgcttgaggaatatttctttacaaaacaacttcgttcagcaacggaatggagctataggaaagtagccttaacgtttacgcgttttattggtggaactattactccagccatggtgacgcaaagggatgtgttgctttggcgccggcatctgctaaaggagaaaaatctttcggtacatacctggaataataaggtggctcacctgcgggcaatatttaacctgggtatcaaaaaatctttggttcaacacattgaaaacccttttaatggaacggtcgtccgggctgacactaagaaaaaacgaatactgacgaagtctcaattgacccgtctctacctcgtgatgcagcaatatgaacagagggagaaagagagaaaaccagtgaaaggtgggaagtgcgcactctatccgacctggttctggatgacggtattggacacatttcgatataccggcatgcgtaacaatcaaatggtccatatcagagtgagagatgtgaaccttgaacaaggctggatcgagcttcggcttgaaggcagcaaaacacatcgagagtggaaggtgcctctggttcgtcaattaagagagcgaataaagctgctcattatgcgcgcaacagagcgaggtgctggccagcatgacctgctttttgacgtcaaacgattcaccagaccacgtcaagctcattacatctatgacgagaaaaatgttctgcagtcgttccgtagcttttatcgtcggctgtcccgggaaagtggattcgatatttcctcacaccgtttccgtcacacgcttgccacggagttgatgaaatccccggatagaaatctaaaactggtgaaggatctgctgggccaccgtaacgtaagtacaactatggaatatatcgaattggatatggaggtagcaggaaaagcacttgaacaggagcttgttttacatacggatatcactgcgacgagaagcttacaaagcttgacacaggcatga

SEQ ID NO: 429079 - DNA, 825 bp, Serratia marcescens
atgggcgttaaccagtttatcgcgcagggaattatgagatacataattaataataatattaaatatcatgaagatagatcggagctgatctcgctgcatgacgacattccgccgattgtgctgacggccacgctgaaccgcctgctttccgccctggtgcgcaacaataacctggtgctttcccgcgatacgctgctgacacaggtgtgggaggcgcatggccaggtcgcttccggcaacaacctcaacaacaccatttcgattctgcgcaaagcattctcttcgctcggcgaggaagagattattgccaccctgccgcggcagggtttcatgtttaccgcccgcgagctgaagacgacagatagccaggcggaggcgctgatggtgcagaacgcggcgctcgtcggcgaggccgcgcctgctgcagagcctgcggctagattgacgcgcttcaaacgcattgggctgagcgggttgctgctgttggccgcaggaagcgggatctgggcctggcaggaaacgggatatcctgcggcaagtttgatgacggtgggaaaaataggaagctgcgatgtgcaatttattacctcctatcacaatgtcggtcccggcgagatcgacctgaaccacctgaagaggatgttgcaagaaaagaaaacggcaacttgcggcgaaccggcgacgttgctttattatgacagtcaggcattggtgcccaatgccagcgggcgtgtcagggcgtcttatttctattattgtccgcaggaggcgatgacctctggcagggtacaatgcgagaactactatgaaagctggggtttatag

SEQ ID NO: 429080 - DNA, 312 bp, Serratia marcescens
ttggtgagtgtggttcctgatggggtgaggcatgccaccatattgtttaatggtagcgtgttgtacgatggtaagcgttatatcattgagcgttccctggggatagactaccgaaagtggggggggaactacgaatttcgggtccgggaaaatatcaaaaaaccgccggacacgctacaagacgaggcgttgaaccgcagtttgccaatggaagggcagacgattcacttgcgtattgaaagaatggacgcacgccattatctgtttgtggataaccatgcgccatattatgtctgcgtgacatcctcataa

SEQ ID NO: 429081 - DNA, 756 bp, Serratia marcescens
atgattttcatcataaatgacatcgtcctttataatgaggaggacggcacattggcgcatatcgataacgccagcaataaaatagctttacttaagcccagcgccaggctgctatcgatgttcattcgtaataataacaatctgttgctgcgggagagattgcttaatgaagtgtgggtcgaacatggcctgaaggcttcgaataacaaccttaataattacgtctccggtttgcggaagtctttggcgcaatgcggtacagaagatattatcgtgacttatccccgccaggggtttaaattcagcgccattagtattcacgagacagattcaaatcaggggaaatataagaaagttcataaaaacacgttggaaaccaccaccattccgccaccggaaaataaacagccgggtatccggcgctcgctacagagattaattatgatcatggcggcctgtctggtaccttttgctgccatcgtactgtatcaaaacagcacgcgcattaatgtttatcctttgggaagcttcgggaattgccagatttacagcatgacgttaggcagtggcgatttaggtcaaatcaaacgggtcatacaacgcgctggtttcagttgccaaacgcgcgccgacgtttattactacgataatatccgcagtgaagactcaaaaagcggcaaggaacaattgaccttttgcccacgagatatcaacggcccctgtgtcaataagcttatagataataacgacatctaa

SEQ ID NO: 429082 - DNA, 438 bp, Serratia marcescens
atgcaaggcgctattatcgataccgcctgtgccatcgccacggaaagccgagaacaaattattgacatgaaaaatacggcgctggcggacattgtacgcagcgggaatgggaaaagcgtgcccttcagcattgagctggtgaactgcgtgctcgagcgtgccgataaaaaactcccggactggaagcagtttcaaattacttttgatggccacgccgacggggaggcttttggtgtcaatggcgaagcctcaggcgtgtcattgataattactgatactgcaggaaatattgctcggccgggcaaaccgttgccgccaatggagattgttgccggtgactatcggctgaattttaccctggcgctgattgccaataaccggccactcaaagtagggagttatttttcctcggtgcgtttcaaaatggattattactga

SEQ ID NO: 429083 - DNA, 2544 bp, Serratia marcescens
atgatgtttttgcctgcagggaagccgtttcgtttgcatattctgagcgtcagcgtggcgctggcgctgggcttcgccggcgagatgcctgcggcgcaggcggaggagatccagttcaacactgacgtgttggatctgaacgaccgtaaaaacatcgatctcagccagttctcgcgcggcggtttcatcatgcccggcagctacagcatggtggtgcgcctgaacaaaagcgatctgccggagcagccggtgccgttctatgcgccggatgacgatccgaacggcagccgcgcctgcctgtcaccggcgctggttgatcagctcggcctcaaggatgagatgctcagcaagctgagctggtggcatcagggggagtgcttggatgaggtcagcctgccgggtatggaagcgcgtggcgatctggctacgtcggcgctgtatctcagcgttccgcaggcctatctggattacgtgtcggacgactgggatccgccggcgcgctgggacgaggggataccgggtgtgctgctcgactacaacctcaacgcgcagagccagcaccagatccaggccggtacccggggttacagcctgagcggcaacggcacggcaggggctaacctgggtgcctggcggctgcgcgccgactggcaggcaaacgtacatcaccagaccggctccgggcaaccgacggagaagcggctggactggagccgctactacgcctaccgggcattgccggcgctgcgttcgaagctgaccgtcggcgaggactacctcgactccggcctgttcgacagcttccgcttcggcggggtgagcctgcgttccgacgacaccatgctgccgcccaacctgcgcggctatgcgccggaggtggtgggggtggcgaaaagcaacgccaaggtgaccatcagccagcaggggcgggtgctgtacgagacccaggtggcggcggggccgttccgtattcaggatttgaacgatgcggtttccggcgatctggacgtgcgggtggaagaacaggatggcagcgtgcaggaattcaggatgagcaccgccagcatcccgtacctgacgcgccccggctcgctgcgctacaagctggcggcgggcaaaccgtcggactttgatcaccgctaccgcgggccgctgttcggcaccggcgagttttcttggggggtgagcaacggttggtcgctgtacggcggcgcgttgctgggcggcgattacaacgcggcggcgctgggtatcggccgcgatttgatggcgctgggggcgctgtcgttcgacgtcacccagtcgcgcgccaggttgccgtacaacggagagacgctgagcggcggctcgtaccgcctcagctattcgaagaccttcgacgagctggacagccaggtgaccttcgccggctaccgcttctcggagcagaactttatgagcatgagcgagtttttggatgcgcgcgagtacggccgccggtttggcaacagcaaggagatgtacaccatcacctacaaccagcagctgcgcgacctggggttgagcgcctacctcaactacaaccatcagacctactgggatcggccggccaacgatcgctacagcctgacgctgtcgcgctatttcgatctgggtagcctgaagaacatgagcctgtcgctgtcggcataccgcaaccgctacaacgagcgcaatgacgacggcgcctatctgtcgctgtcggtgccgtggggcaacggcgccacgttgagctacaacaccacggtcaaccgtgacgacaacagccaccgggtgggctattacgatcgccttgacgatcgtagcaattaccagatcagcgccggcggttcgcgcagcggcgccagcctgagcggctactacagccgggacggcgacctggcgcgcatcaacgccaacgccagctaccagcaggaccggtacagcgcggtcgggctgagcgcccagggcgggatgacgctgaccgccgagggcggggcgctgcaccgcagcaacatggcgggcggtactcgcctgctactggataccgaaggggtggccggggtgccggtacgcggctacggcagcacggcggcgaccaaccgctggggcaaggcggtggtgacggacgtcaacagctattaccgcaacaaggccagcatcgatctggaccaactgggggagaacgccgaggccacgacctcggtggtgcaggcgacgctgaccgagggcgccatcggttaccgcaggttcgcggtgatcgccggggagaaggcgatggcggtgattaagctggcggacggcagcgagccgccgtttggcgccacggtgctgaacgcccgccaacaggagaccggcatcgtcaacgacggcggcagcgtctacctgagcggcatcaacgccggcgagcgcatgacggtgcgctggggcggggcggcgcagtgcgaggtgctgctgccgacgccgctgccgccggagatgctgatgaatactttactgctgccgtgccgggcgctgagcgtgggcgacggcggcaacgaacactga

SEQ ID NO: 429084 - DNA, 756 bp, Serratia marcescens
atgatgagcaaacgcaacgtaatcggcctgctggccaccacttcgctgctggccggggcgctggccccggcggcgaatgccgccatcgcgctggaccgcacccgggtggtgttcgacggcagcgtgcagtcggtgagcctgagcgtcagcaaccagaacaagcagctgccgtacctggcgcagggctggctggaggatgagcagggcaacaagatccagagcccgctgacggtgctgccgccggtgcagcgcatcgagccgggcaaaccgagccaggtgaaaatccaggcgctgccggcggcgaagctgctgccgcaggaccgggagacgctgtactacttcaacctgcgcgagatcccgccgaagagcaacaagccgaactcgttgcagatcgcgctgcagacgcgcatcaagctgttctaccgcccggcggcgattgcgccggagcgcaacgcggcgccgtggcaggagcagctgacgctgagcaaacagggcgacaagtacatcgtcaacaacccgacgccgtactacgtcaccatcgttgatgcggcgacgcgcaaaggcgtggaaggggccaaagggttcgagccgtttatggtgccgccgaagggcaatacgccgctgacggtaagcgcggggagcctgggcggcagcccggtgctgacctacatcaacgactacggtggccggccgcagctgagtttcagctgcagcggcagcagctgcacggtggtgccggagaagacggcgtcctga

SEQ ID NO: 429085 - DNA, 522 bp, Serratia marcescens
atgaaatctgatggttgcggtggctttggaacaagggttgggaagtggcgcctttgtgcggggctgatggcaccgctcttgttcccttctctggccggtgcggtgaacagcacggtttatctctccgtgaccgtggttgataaaccggcatgcgttatcaacggcgatcggactctcctcgtcgattttggtgatgaactgttcaccaaccgggtggatggcgagcattaccttaagacgctggactttacgctggaatgcaagagcaacaggaagaacgcgatgaagatgaaattggcaggaaacgccactgcgttcgacggtagcgcgctgcaaaccaatcaggccgacctggggatcgcattacgggcaaacggccggccgttaccgatcaacagctggttgaatttcacctatccggatcgccccttgttgcaggccgtgcccgtcaaacgccccggtggcgtgctgcaggggggcgttttcagcgtgggggcgacgctgctggtggattatcaatga

SEQ ID NO: 429086 - DNA, 495 bp, Serratia marcescens
atgaagcctttgagcctgctcgtcttcttgtcgctgctgtatgccttatcgcctgcggcctgggcccaggataatcagcagcaggtgcagtttcgtggcacgttgaacgtgccgccgctgtgtagcgtcaataatggccagattatcgacgtcgattttggcgagcgggtgggcgtcaacaaggtagacggtaaaaactacctgaaaaccgtgaactatgagatccgctgcgagccgggggggcgagggctggatatggggctgcggatcaatgccgataccgctgcttatgatgacagcgtgatacagaccagcctcgccgatctgggcatccggctgctgctgaatggccaacccttggcgttaaatcggcgcatggttatcgatgccgctaacccgccgatgttgcaggcggcgccgatcggccggccaggggcggaattaaccgagggcgcttttcgcgctgccgcgaccttgctggtcgactatcagtaa

SEQ ID NO: 429087 - DNA, 873 bp, Serratia marcescens
atggtgataaggctgactttcatcagaaaaaaagaaatgcgtaaatggcttttgtttattctgctcggcggtatttatctggcgggaatgtccgccgcagtcgcaaaaatatcgcttaacgtcaagtgggctcaggatggtgcggggaaatggtcattaagcatcagcccgcagggttcttatgagctcgactctgcggtgaaaagtgccaaatgcactggcgcgggagcctggccctgcgaagggcgatggcggctttatatcaataataaaggcatttattgcgatccgcttgtcagcggtgcggtggggatgacggtcgaaaccttcgcggcgcgtgtggcgagcgcttataacggaaaaaactgtacgctgagcaatttggtgctggatggcaccgagaagatatgtgcgatgacctattttaccggtgaatggctcaacgaatcgctatattccggcgggacactgtatgcgaccactggctgtgatggcggtgcgctcggggggggggaaacgattttaccgccaatcaagccgttgagctgttcgatcaacagcagcatttcgctggcgcacggcaccatcgattacagcgagatcggcaccagccaggcaacctatctggcgaccgtaagctgcacccggcaggccacggtaaaaatcaccgtgccgaacgatggtaaagtggattttaataacgacggctcgttttattccgtggtatcggtcatggataaaccgggaggcgcgcaattttccgttaacggttctgtgcaggtgaagttctcatcccggctttacgccgtgggcgatgagtcgctaaacggcgcgtttaatagttcggccgttgcggtgctgaatatattgtaa

SEQ ID NO: 429088 - DNA, 657 bp, Serratia marcescens
atggcaaggaaaaaggcccgtatacctgaatggcaatatctttgcagcgaactgcgttattacgccgcgctgggcgggctggcgctgatggcgccgctcagcctgacggcgctgctgtggctgctgccgtcggccaatgccgtcgacaactgggaagtggacggcgccaatggcgtgttgtatgtcgaaggggctctgacagagagcgcttgccggctggagatggacagcgctcgtcaggatctctggctgggggaagttgctaccggccggctagcgcagccgggcgatcgcggcacgccggtggcattcgagctgcggctgcgcgactgcctgcacgggccagcggcgagtagggacgagcgtaccggcgcgttgagctgggcgctgagccagccggcggtgcgggtggcctttaacgccccggccgatgcggacaacccacagctggtgaaggcgcagggcgtctccggcctggggctgcgcttgttggacgtgcacggccgggacgtgcggttgggcagccgcggggcgccgctgtggctgacgccgggcagcgatacgctgagctacaccgtggcggcggaacgcaccgccgcggtgttgaacgccggggcttaccgggcggtggtggactttgccctgagttatgactga

SEQ ID NO: 429089 - DNA, 543 bp, Serratia marcescens
atgtttgggataaccagaactgcacattggcgggccatctgtgtgggagggctgttggcgtgcgctagcggcagcgctctggcggccgacaatatgtattttcacggtgcgctggtggcagagccttgcacgctgcggccgggtgatgaggacattcgcctggactttggttcggttattgataaatacctttatacctatgggcgcacgccgggcaaggcgtttagcctgacgctgcaagactgcgatctcagcctggggaaaaccgtgaaagtgacctttaccggtgccgaaagtagcgcattgccagggctgttggtgccggatggcggcactcctctcgggattgcgttgggcatcgagacgatggcgggtacgccggtagcattgaataaacccagtcagagctacaccctgaacaacggtaacaacagtctgcaattacaggtatatatacagggggagccggcggcgatcgcgcaaaagaacatcggcctcggtgcgttttcttcggtcgctacctttgctcttgagtatgaataa

SEQ ID NO: 429090 - DNA, 501 bp, Serratia marcescens
atgaaaatgacggtaaaaacagggtttctattgggggctttgtacctggcaggacacttatggaacacggacgcttacgcgggctcaaccgtaacggtcaaagtcaccgtattggcgccgttgccctgtgtactgaacgaaaagcagccgatagaggttgattttggtaacgaggtaatgactacgcgtatcgatggccaggcttaccgtcaaaaagtggggtatagcctgagttgctccgggcaggggaagaatgcgatgcggttgcaggtcaaaggaacaggggctgcctttgacgctaccgcgctgcaaactgatgtcaacgatttggcgatcgcgttcgaacaaccggaagggaaaaggttgccactcaacggctgggctaactttgactatcccaaattacctgatctctatgcggtgccggtaagaaagagtggggtggaactgttgccgggagcattttctgcagctgccacgctacgcgttgcctatcaatag

SEQ ID NO: 429091 - DNA, 495 bp, Serratia marcescens
atgaagcctaaattgcaaatcagtctgtttatcatcttgagtggtttgttgcctgtcgttccgtcgttagcggtggaagatgtggcgataaatttacacggtggtttgatcgcaccgccgccttgcgtaatcaatgatggtggaaaaattgacgtcgactttggtgagcgtgttggtgtgaataaggtagatggccagaattaccgggagaaaattaattataatgtaacttgccagccgaatgttcattcatggttgatgacattgacgttacaaggaaataccgcttttgataaaactgcaatacagacaaataacgtctctctaggaattaaaatatatcaaaacggtctctctttcgatgtcaatagtagaataaaaatcattccggatgccctccccgttttggaagcggttcctataaaaaaaccgggggtggagttgctggcgggtgagtttatcgccgtggccagtctgcgagcggagtatttttag

SEQ ID NO: 429092 - DNA, 798 bp, Serratia marcescens
atgtggagaaacgtgttggttggtatgttgacattttttattttgtcaagcaaaggtatggctgcatgggagatatatgcggaattcaaacctgacaatcagtattattatgtgacaataacaaggtttgatcagtatgatccgacgccgaatccacttcgcaggtgcgggttagcgggggggcggctctgtcaaatttatattgggtggtcagataatgttggtaccgggaatggttatatgggcggtttttccgtgccgggaatgtctgaggccgaaactatgggcgatttggggaagctaatagtggacaatggctacttaaaccgtgagcttagggcaatgtatggtggctctagccagaaaggtgtgcgtgcctgtttttggcttagctattacgattttggagcgacgattttgcccaatggcccgacgctgtgctcgcagcctgaaattaccccgacgttttgtagtatctcagagccttatattgagctgttacatggggccgttaccgggaatgtggttaacggccatacgattagcacaccgatacatgtatcctgcagcagagattattcggtcgccatagtttctgccgataaaaataccacgattgatcttggtaatgggctgaagagtgatttaaagattaatggcgttgattttaataacgggtatgtcgttactgtcggccccagtgggaagtcgtttgttttaagttccaaattatatggctactcaggcagagtggggaacttccagggttcgaaagtcataatgctcattcttccataa

SEQ ID NO: 429093 - DNA, 546 bp, Serratia marcescens
atgaatcctatcaatattataatcgatgacgaaaactgctatttcgccgctgggctgcgccacagcattacagcatatgcgcaggccaacaagaagtcggtgtattttttaacgccggggagtatagagtgccccgatatcgtgctgacgtcggtacggcgccgtgctcagcgttggcgcagggcggggtatggcgcatcaacagcgccgattgtcacgattaaggaaaggccgattaaattcgctaatgaaataagctgtgtgctctaccgttcggacgatcaacgccgcttgtttgagttgctgacggaaaccttgtccggcgttcaatatccagtgaatgagcgtcgcgcgttgaccacccgtgagcgacaggtaatgggttatatgcgccacggttttgatcagtcgcaggttgccagaattatgggtgtgagcgttaaaacggtgcatagccataagcgttctgtcatgggaaagttaatgctctgtcgcaatcatgagttgctgtattggcttttgtcgcatgaaggagaattatcttaa

SEQ ID NO: 429094 - DNA, 297 bp, Serratia marcescens
atgccgggcaatgccgagctggtcgtctggctcaatgagttcttcggcgacattgaggccgaaggcaaaaccttcgaggaaatgaaggtctaccagaacaacaaggatcgcgtgcgcggcatcgtgcgtatcgctcgccagaccggcagcacgttcggcgaggacgtgaaactgatgctcgatagcaagctgaccttcgatgaaatcaagcagtcgccagacttcggcctcatgtccaagtcgcgtctctcgaaggtcaaaacggcgatcttcgagcagttggccaccatcatctga

SEQ ID NO: 429095 - DNA, 456 bp, Serratia marcescens; identical to SEQ ID NO: 283262

SEQ ID NO: 429096 - DNA, 360 bp, Serratia marcescens
atgaaaatgatggtgtttcttctggtcgttatggttgcgtacatggcgttcttccgtgatgacggccgggacgcggcggcagcgacctatgccgcgcagcggatcaacgagcaggacaaaattctggttgagcttcaatcgctcaacgatccccacgtatcggatttcgtccgcgattggcgctactacgcgccaacgccttcgcctgagcagctttctgagcttcggataattcagcagaacatcaggaacgataaaagcgttgctgaaaagtacacgctggaatggcaaaacaagaatggcttctgctcaaaggttgaaggcgtgtttggcaagatcgaatgcacgcccggcctctga

SEQ ID NO: 429097 - DNA, 369 bp, Serratia marcescens; identical to SEQ ID NO: 283264

SEQ ID NO: 429098 - DNA, 291 bp, Serratia marcescens; identical to SEQ ID NO: 283265

SEQ ID NO: 429099 - DNA, 312 bp, Serratia marcescens; identical to SEQ ID NO: 283266

SEQ ID NO: 429100 - DNA, 327 bp, Serratia marcescens; identical to SEQ ID NO: 283267

SEQ ID NO: 429101 - DNA, 444 bp, Serratia marcescens; identical to SEQ ID NO: 283268

SEQ ID NO: 429102 - DNA, 1242 bp, Serratia marcescens; identical to SEQ ID NO: 283269

SEQ ID NO: 429103 - DNA, 261 bp, Serratia marcescens; identical to SEQ ID NO: 283270

SEQ ID NO: 429104 - DNA, 984 bp, Serratia marcescens; identical to SEQ ID NO: 18052

SEQ ID NO: 429105 - DNA, 492 bp, Serratia marcescens; identical to SEQ ID NO: 283272

SEQ ID NO: 429106 - DNA, 315 bp, Serratia marcescens; identical to SEQ ID NO: 18025

SEQ ID NO: 429107 - DNA, 2508 bp, Serratia marcescens; identical to SEQ ID NO: 283274

SEQ ID NO: 429108 - DNA, 789 bp, Serratia marcescens; identical to SEQ ID NO: 283275

SEQ ID NO: 429109 - DNA, 204 bp, Serratia marcescens; identical to SEQ ID NO: 18022

SEQ ID NO: 429110 - DNA, 1719 bp, Serratia marcescens; identical to SEQ ID NO: 283277

SEQ ID NO: 429111 - DNA, 306 bp, Serratia marcescens; identical to SEQ ID NO: 18020

SEQ ID NO: 429112 - DNA, 699 bp, Serratia marcescens; identical to SEQ ID NO: 283279

SEQ ID NO: 429113 - DNA, 939 bp, Serratia marcescens; identical to SEQ ID NO: 283280

SEQ ID NO: 429114 - DNA, 459 bp, Serratia marcescens; identical to SEQ ID NO: 18017

SEQ ID NO: 429115 - DNA, 1461 bp, Serratia marcescens; identical to SEQ ID NO: 283282

SEQ ID NO: 429116 - DNA, 471 bp, Serratia marcescens; identical to SEQ ID NO: 18015

SEQ ID NO: 429117 - DNA, 249 bp, Serratia marcescens; identical to SEQ ID NO: 283284

SEQ ID NO: 429118 - DNA, 630 bp, Serratia marcescens; identical to SEQ ID NO: 283285

SEQ ID NO: 429119 - DNA, 615 bp, Serratia marcescens; identical to SEQ ID NO: 283286

SEQ ID NO: 429120 - DNA, 624 bp, Serratia marcescens; identical to SEQ ID NO: 18011

SEQ ID NO: 429121 - DNA, 408 bp, Serratia marcescens; identical to SEQ ID NO: 18010

SEQ ID NO: 429122 - DNA, 339 bp, Serratia marcescens; identical to SEQ ID NO: 18009

SEQ ID NO: 429123 - DNA, 705 bp, Serratia marcescens; identical to SEQ ID NO: 5348

SEQ ID NO: 429124 - DNA, 648 bp, Serratia marcescens
atgggcgtggcgctaggcctcgtcgcccttgtgtatttcgttgcggactctcggcaaaaggacgctcctgcggccgaagggcagcaagtcgcgcccggcacgcagtcgccagaactgataggcaaggtcgtccgcgttctcgatggcgacacgttcgatctgctagtagatcaacggccagtccgcatccgcgtgaccggcattgatgccccggaaaaagatcaaccatttggccagcggtcgcggcagtcgttggcgggcatggttgatggcaaccctgtcgcggtgctcgtaaaaggcaaagaccgctacggccgcacactcggcatggtctacgccaagatatgcgccccttctgtcccgtgccacaccgttcatgtcaacgccgaacaggtaaaggcgggcatggcatgggcttaccgtttccacggtcaagccgtcgatccggcaatgctgaaactcgaaacgcaggcccgtagcgagcgcgtcggcctgtggtcagcaccgaacgcagtggagccgtggaagtggcggcaccaaatggagagcaaggccaaggtgcgcaagttcaatctcacggccgctttgcggttcgtggatcaggtcaacaaagccagctcggaagggggaaatagtgaaagctcttaa

SEQ ID NO: 429125 - DNA, 726 bp, Serratia marcescens; identical to SEQ ID NO: 18006

SEQ ID NO: 429126 - DNA, 318 bp, Serratia marcescens; identical to SEQ ID NO: 18005

SEQ ID NO: 429127 - DNA, 708 bp, Serratia marcescens; identical to SEQ ID NO: 283251

SEQ ID NO: 429128 - DNA, 243 bp, Serratia marcescens; identical to SEQ ID NO: 283252

SEQ ID NO: 429129 - DNA, 2028 bp, Serratia marcescens; identical to SEQ ID NO: 283253

SEQ ID NO: 429130 - DNA, 3324 bp, Serratia marcescens
atgaaaaaggaatacgccgaggaagtcgcggcgcggatcatagagcagttggagcagggcaccgcgccgtggcaaaagccgtggcagcccggcgagctgcgcttgccgtacaacccgaccaccggcaaggaataccgtggcatgaacagcctttggctgcacatgcagggccacagtgatccgcgctggatgacctacaaccaagccgccgccgaaggcgcacaggtgcgcaagggttccaagggaacccatatcgtctactggaagttcagcgaggaacgaaaggccaccgacgagcagggccgcccggtcattgacccggacaccggcaagcaaaagaccgtgaccgtgcagctcgaacggccgcgctcattcatggccgtggtgttcaacggctcgcagatcgacggcttgccgccgctggaagcacgacccaccgggccagagccggagcgtcacgcccgcgccgaggccatcttggccaattcgggagcggacattcgccacgaacccggcgaccgggctttttaccggcccagcacggacagcatcacgctgcccgagcgtaaccagttcccgaccgccgacaactactatgcgaccgcgttgcatgagctgggtcactggacagggcacccgtcgcggcttgaccgcgaccttgcgcacccgttcggttcggagggctacgcccgcgaagaattacgagcggaaattgcctcgctgatgttgggcgagcgcctcgaaatcggccacgatccgggccagcacgcagcctatgtaggttcgtggattaaagccttgaaggaagatccaaaagagatcttccgggccgcgtccgacgccgaacgcataagcggctatgtgatggacttcgagcaggagcagatgcagacgcaaacgcaaaccgtcgagcgtcagcccgtgccggaaatcgcgcccgaggttgcggccgagctgcaacgcgatcacgaaaatgccgtggaaggttattcgccgctggaaagctggcagatgatgaaagccgaggccgagcgtaacggctattccgcccgtatcggcttcgcgtctggcgagctgggcgacttctacgaaatcacctaccacgaccagcagggcgagccgtccggcatccgcacggaaatgtatggcgatagcaagctgatgaccgagtacaacggcacgcgcttgtcacagttcatatcgaacgacgacgaaagccagcctgcgacactccgcaccgctatccagcagcacgaagcggccaagctggcccggcaggccgagcagcagagtgcgccgtacacgcccggccaagagtcgcccgcttacaccgtgcagagccgccgcgtcgtgccggagaatgccgccaatcatgcaggccagaacgccgtctatgtgcagctcgatgacggccgcaaggcttggggatttggcgcgaccgacgaagccgccgagcaatccgccgtagaacgtgcgcagcgcgtcggcctcgatgccgaccgagcaccgacccgcgccgttctgcatgagcaaccggagaagcctatgcaatcgcgcacctatctggccgtgccctatgccgagaagaacgaggcgaaggcgctgggagccaagtgggataaggaagcaaaatcatggtacgcgcccgagggcgtggacgtagccacatcgggccttgcccggtggagcgtggacaaggccaacgtcgtcactgcatcggaacccaagcccgccatcgagcagttcaaggacgcattgaaggacgcgggcttgcagctcaagggcgagatcatcacggacgggaagatgcagcgcgtgcccgtcgagggcgaccgaggcggtgccaccagtggcgcatacgcctaccacgaagccgggcgcacgccgggcggcttcatccagaactacaagaccggcgaagtcgtgcattggaagcccgaaggcaagacgccggaactcagtgccgccgaccgtgcgcggcaggccgccgaggcgaccgagcagcgcaaggcacgcgatgcggcccgccagtccgagcacggagcgaccgccgccgccgcgcaagcgttgtggaacgaggccccggccgcgaccgctgacaatgcctattgcaaagccaaaggcatcgccaacccggtaggcctgcgcgtcgtgccggacagtgtttcgccggagactgccgcgcacgggatcaagatcgccaagacagccaaggaagccaaggcgctgcgcgaggctgacccggccaaccgggttttcaaagcgggcgacctgctgatacctggcacagacggcgaggggaaattgtggacgctgcaaagcgtcaatccctacttcaaatcgttcatgaagggcggccggaaagcaggcctctacaccgttgccggtgcttccgatccgcgcaaggcgctgtcccaagacggcaattctcctttggtgctcgccgaaggctacgccacagccgacacggtttcgcgtctgctgggcggtaagccggtcatcgtggcattcgatagcggcaatctcgacgcggtggccaccgagctgcgcgagcgtcacccgtcgcggccgctgttgatcgccgccgacaatgaccacaacgcgccgaaggagctggatgccaacggcaagcccaaggtcaacgtcggactggtgaaggccacagaaaccgcagagaagcacggcggcggcgtcatggccccgcagttcaacgacggcgagaagggttccgactggaacgacctcgccgggagccgtggcgacgaagctgcccgccggatgctcgccgagcaaatggcggtagccaagcgtgatgccgccataactgccgagcggttgaccacccttgcgcgtacccgcgacatggaagcccgcaacgacccgacgacgagcgccgacgatgcggccgtagcaacagagcgcgggcacgcggccgaagtgctggccggtgcgcaatccgcactcagtgaggtgcgcagcatggccgccgatggcgtgaccggcaacaccaaaggggcaacccgttctgccgctgccgtcaaagccgggatagaccggaagaccgaggcgatgcacgaccgcgccaaagaggaacgcgaggaagtgctgaaccacggccagaccggcccgctcgatggcgtcaccgctggcgtgtcgtggaaaaagttacccgagcaagccaagcaggcgctcatcgaggacgtgaagaacggcaaggacgtgaccttgccgaaggacgccccggccaagctcaaacagatggcaggccttgaaccgacccccgcgccgcgctcgcgtagccgtgggattgatgcaggcctttga

SEQ ID NO: 429131 - DNA, 897 bp, Serratia marcescens; identical to SEQ ID NO: 17999

SEQ ID NO: 429132 - DNA, 567 bp, Serratia marcescens; identical to SEQ ID NO: 283256

SEQ ID NO: 429133 - DNA, 1959 bp, Serratia marcescens; identical to SEQ ID NO: 283257

SEQ ID NO: 429134 - DNA, 2697 bp, Serratia marcescens; identical to SEQ ID NO: 283258

SEQ ID NO: 429135 - DNA, 300 bp, Serratia marcescens; identical to SEQ ID NO: 283259

SEQ ID NO: 429136 - DNA, 384 bp, Serratia marcescens; identical to SEQ ID NO: 283260

SEQ ID NO: 429137 - DNA, 1134 bp, Serratia marcescens
atgggcgacgatttcagtagccgctggcaacagctggattgggacgacattacgctgcgcatcaacggcaaaaccgcacgcgacgtggaacgcgcgttgaacgccgacaagctgacgcgcgacgactttatggcgctgatctcccccgccgccgcgccgtatctggaaccgctggcgcagcgcgcgcagcagctgacccgtcagcgcttcggcaacgtcgtcagcttctatgtgccgctgtacctctctaacctgtgtgctaacgactgcacctattgcggcttttcgatgagcaaccgcatcaagcgcaaaacgctcgatgcggcggagatcgcacgcgagtgcgaagccatcaaggcgctggggttcgaacacctgttgctggtcaccggcgagcatcagaccaaggtcggcatggactatttccgtcagcacattccggcgatccgccgccacttcagctcgctgatgatggaagtgcagccgctggcgcaggacgagtacgccgaactgaaaacgctgggcctggacggcgtgctggtctatcaggaaacctaccatcctgccacctatctgcagcaccatgtgcgcggccagaagcaggatttccattggcgtctggccacgccggatcgcctggggcgcgccgggatcgacaagatcggcctcggcgcgttgatcggcctgtccaacagttggcgcaccgactgctacctgctggcggaacatttgttctacctgcagcaaacttactggcagagccgctactcgatctcgttcccgcgtctgcgcccctgcgccggcggcattgagccggcgtcgatcatgagcgagcctcagctggtgcagctgatctgcgccttccggctgttcgcgccggacgttgagctgtcgctgtctacgcgtgagtcgccgtacttccgcgatcatatgatcccggtggcgatcaacagcgtcagcgccggatccaagacgcagcccggcggctatgccgacgacgtaccgccggaattggaacagttcgagccgcacgacggccgcacgccgcagcaggtcgccgaggccatcagcaatgccgggctgcagccggtgtggaaagactgggacgattatctgggacgcagcgcgcaataa

SEQ ID NO: 429138 - DNA, 621 bp, Serratia marcescens
atgccgggctgcagccggtgtggaaagactgggacgattatctgggacgcagcgcgcaataagcggcaacgtttaccgccgcgtgaagaaaacgctggaacggccgcgcaatgccgaacggtggcgctggcgccggcagacccgccggctatagtgaccttgccgaccgccaaacccggcgccggccggggccgtctccctctcgatggccccgccttatcccatcccggatcgcgccggagattctcttgcgcgacaccgggccctcgtccgcggcaatgcgcatatggcgtatcgcggcctgtaagggcgtacggacaggttgtcttgtcggctaaaggactgtggcctagcggtgctcggcactcactcagcggtgagactcataggacgctgttgcggcagaaaagtggggaaagaggaaaaaagaaggtacagcgacgaagagagattcgagtcgtcatccccggtgctgccaatggccctggtgttggccgcggatctttttgccgcctgctccctgcttacggacaagagcaggcggtttattttgtgagactggcacccccccaggacgcgaatcacacagtatgtgcgctaattaaccacataaacggttaa

SEQ ID NO: 429139 - DNA, 903 bp, Serratia marcescens
atgcgtgtacttttgactggtgctgcggggcagctgggacgctgtattatcgatcgtttccctgccaattggaccctgatggcgatggacagccagcaattggatatcgcggactccgctgccgtttcggcagcggttgaacagctagtaccggatgccattatcaatgctgcggcttatactgcggtggataaagcggaatctgagcctgaaaaggccagggcgatcaatgcgctcggcccaggattcctggctacagcagcggcgaagttagacattcctttcatacatatctcgaccgattacgtctttgacggcacttcatcggaaccgtactgtgaagagacgccatgttcaccccagagcgtttacgggcaaacgaaactcgaaggtgagcatgcggctttgctggcaaatccgaaaacggtagtgatcagaacggcctgggttttcagcgagtacggcaacaacttcgtgaaaaccatgctgcgagtcggtgcacagaggggggaattgggcgtggtaagcgaccagttcggctgccctacctatgcgggagacattgcggcgacggccatcgctatgctgtcccatcctcaattaccttacggtatctatcattactgcggcgataacgcggtttcatggttcgattttgcttgcgctatcttccgggaggcggggaactcaggtcattatccgcatcaggtgaatgtcaaacctatcgcaacccatgaatatccaacgcctgcatccaggcctgcttattcgattctgagcaccagcaagatttgtgcgctggatctgaagcctagcccatgggaacagcaacttaaaattgtactccagaagatattatctcagttgacctgctccccgttgattaacacacggcgatgttag

SEQ ID NO: 429140 - DNA, 534 bp, Serratia marcescens
atgaaagtgatagagacgcaggttgaaggtgtaaagctgatcgaacccaaagtgtttggcgaccagcgtggttttttcttggaaacgttccaaaaaagccgataccaggagctgctcggcattgatgcggagttcgtacaagataaccactcccgttctgcgcgtggcgtcttgcggggattgcattttcaaacggcaaaaccgcaaggtaagttggtaagggtggtacgcggcgaggtctacgatgtggtcgtcgatattcgtcctgagtcgccgacgttcaaaaagtgggttggcgtctacttgtctgaagagaacaaaaaccaactttgggtgccgcctggtctcgcccatggttttgtcgtagtttcggactcggctgattttgaatataaatgcactgattactatgatccaagtaatgaaggttgcctactgtggaacgatccggaagtaggtgtcgaatggccaatcagcgatccgctgttgtcgccaaaggatctgcagggaaaactgtttagagagcttttttaa

SEQ ID NO: 429141 - DNA, 1425 bp, Serratia marcescens
atgtccaaactaattcctgtggttatggccggcggtactgggagtcgtctatggccgatgtcgcgagaatcgtttcctaaacagtttttgtctattgatgacagtggcgtaagcctactgcaacagacgttacagcgtttgtcaggcctggcaggcattgaagttgtcgcccctctggtcatctgcaacgaggaacatcgttttttagttgctgaacaattacgcgaaattggacaattagcgaccaatattattttagagcccgtagggcgtaataccgcaccggcagtggcgttagccgctcatcttgctgctgaggaagacgaagacagtatgcttctggtgttggcagcagaccatctgatcaccaaagtggataattttcacgcggctatccagacagctatctcgtttgcagacaacaatcaactggtgacgtttggcattattcctgagcatcctgaaacaggctacggctacattaagcgtggcgagcacctttccgatgcgtgtttcaaagttgattcgttcgttgaaaagccgcgtttggagaaagcgattgaatatctcgccagcggtgattacagctggaacagcggtatgtttatgttcaagaccgctaagttcctgcaagaactgcggcagttcagtcctgaaattttcagcacaacgcagcagtctgtgatcaatagtcagcgagacatgaattttatccgggttgagcaagacatcttcaaacattgtccgagtgactccatcgactatgcggtgatggaaaagacgcatgatgcggtggtgattcctatcgatgcgggttggagcgacgtcggctcctggtcctcgttgtgggaagtgtcaaagaaggatcatttgggtaatgtcaacgtgggtgaaattatctcgatcgattctaatgacaactacatttcctctgagtccgcgttagtggcgaccatcgggctagaaaaccttgttgtggtcaacaccagtgatgctctgctgatcgctcacaaagacaaagtgcaggatgttaagaaagtcgttgatgagcttaaaaagcgtaatcttcatcatttccgccagcattccaccgcctaccgtccttggggaaagatttgcgacattgacagtggtacgcacttccaggtgaagaagattattgttcggccgggtgaaggtttgtcagtacaacgccatctccaccgtgctgaacattgggtggtcgtgagcgggacagcaagagttaacgttgataataaagagttcttcttatcggaaaatcagtccacttttattcctgcgggcagtgtccatacgctggaaaaccccggcaaaatcgatttggaaatgattgaggtcagatcgggccgctatttggaagaagatgatattgaacgcttacaagatcgctatggcagagtttaa

SEQ ID NO: 429142 - DNA, 1107 bp, Serratia marcescens
atgcctgagaaacctgctgcttgcgataaggtaatcatcctgcagttagataaggaagcggaaagtacaaaaataagagagccaatccgtttggaatacattgatgccattcgagggatcgccgcacttagcgttgtaattgctcactttatcgttccaatatatggtgcggagaattttgttttttctcacgttcttgatattggaaagattggtgttgttttgttttttattattagtgggtttattattccatttagttttcggcgagagaacggcggagtcaaagcattctttatatctcgatttttccggctatatccaggttattggttctcattgctgttatttattgttgtctcctattttttggggaagcagtttccgtggtatcaaatattagctaatacaacaatggtccaaaccgctatgggggtcaaggatatcgttggcgtttattggacactttttatagagattgttttttacgctttatgtgttgctgcattcgtcatgaggctactgaataaggcgcgtttcaactatgcgtcctctctcgctatgctcttggttgcttttacgttgggaattgctaagcgtaaattaggtattgctttgcctgttgcactacctttggcaatgtcattgatggcgttcggtggattatggcgtgcctatttattagaaggcgatcttctggcgaagaaattcgctcgaaagtatatttgcatttttgttctggcaataccattcataagttttttgtcatatggtatggagccaggccatactttgcgctatacgataacttattatcttagtatgttcttttttattttgctaacaacacggctaaagataagaaataaatatatggtgtttatgggagtgattagctattccatgtatttaattcaccctagcctattgattttctatgaagcatttacacaaagcatgagtgaaagtgccaggtacttatttggcgtggtaggggtgtttttaacgttgccgatatcgtacttagtctataagtttattgaattgccttcaattatattagggcgacaggtgaaatcagtgatgttaaaatccagcaagagctga

SEQ ID NO: 429143 - DNA, 132 bp, Serratia marcescens
atgcgggggaggttattcccccgcatgtttaaatttgtgagcagcatcatcctctctaagttattccatttcgttatcttcccgttgctttttcattttcccgtatcattctgttttatcatgcctttttaa

SEQ ID NO: 429144 - DNA, 135 bp, Serratia marcescens
atgcaacagttcttgcccaacagaatagtttccaacagattcttaatgttgcactttatagtggggatgggactgcagctggtcttgggggaacgacagttcgtggcattgcttacattatgggggctggggtaa

SEQ ID NO: 429145 - DNA, 1293 bp, Serratia marcescens
atgaaactcaatgtatttaaaaattctttttggatgatacttgaaaaggtaatttctatatttggtctgatatttgttacatcttatgtggcaaagtatattggcccgtcggcctttggcgctatttcttttgctgcttctctgtttgtcataattcaagctatttctttgtttggctcggagcatataatttttaagcgagttagccagaatgtatcatccggcgtgaggcttatgcattcaacgcgattccttagaggtgtcgttttttctttatcctcgctggcggtattgatctatatttattatacattcgatgtaataacattggtgttttgcgttgctagttgtgtggctacatactttgtcacgcaagatgttctcgttatttataatgatgcgactcttaattctaaatttaatacaatagctaacgctattggtttgatttcaagcttgttaatgcgctttttaatttctcactatgaacttcctgtaatatatcttgctataccaattgttaccactacgcttattccatatttcattagaatttatttctttcgtaaacaagaagccgagctttcaacgagtaaccgtgaaatcgtatgggatgtgaagagaaagtatattaagtacctgttttttgcagggttgccgctagcagtttctggcgtatcaatcacgctttataccaggctgtctcagcttgttttggcgaagtacggttcaacagcggagcttgggattttttcggctgccagtgttttagcctcgtcctggacgtttattactttagcatttattacctcattttttagtgaaatatataggttgaaagataaaagttctgcaatgaaaataactgcaaagctcaatggtcttgttttttgtatttgcatttttattgtgttctggattgtggttgtaggcaaaccagttgtcttattcctgtatggtgaggcttatcaagctgcatatcctattatgattattcttgcaatctcgacttccttttctgctatgggaccaattgcacatagatacatcattaaagagtcgggttatcgttatctatcttataagacggttgcagtttttattataaatataccacttgtttttgttctggttcctttatatggtattgttggggctgcgatcagctcattacttacagaattgatttcattgacagtattgaattatttcttccaaagtggagttattgctaaaattcattttcttactctaaatccgaagacttatcattcaaggaatggtctcaactag

SEQ ID NO: 429146 - DNA, 1164 bp, Serratia marcescens
atgacagacataatgaaagaaattgaagtaattgacaaagatataagagagtctctttatctaaaatttttgcgatggctaatagctatatttataattgcgagtccattgagtccttttgtttctaatacaactctatatctttggattccattagtattactagattttcagtacatcaatactttccgaaagatctctaagcccataatgctttgcctatttttgtggttaagtatgtgcatcatgtttttaagatatgatcttgctattaagtcatttgtactgattcttggcgtctcatatctattaagagtggggggggcgattacaaataaagtttacatctgtatgttgatttctattgtatggtgtattattcagttcgtggcttaccagataagtcccgtttactctactattattggccctagctctatatctaaatttatttggggtgagttcgctacaaatacatatacaaatcaatatgttgtttttctgtttcctagaatgtctggtctttctagagaggctggtttttttgcttcgttgttaattatctcatttatgatcagggttcgcgatcataagcttagtctagcagaaaaaattcttttcctgctgggttacttgtttagcttgtcaaaatcatctatctccttggttttttactttattttaaaaccaatgagaaaaattttgcaaaaagtccccgttataatcacatttatcgctcttatggtgatttttgtagctcttgcgcagtttttagatattggctcaccaagttattttaccaacaacgattcgattgcacaccgtttatctgcatcttatctaatgttgcatatggacattggcaatcttctttatgggtgcaatactgattataattgtctcgttgattatcagcctgttttcaacttcttagccgcgcaaggaatgatgcctgcggttggattgtctggggttgtgatggatatgggattgcttggctttgtcgcgatcgtgtttttatttctaataatgaagctagacagttatgatgttgctattttagttatctttactgcaactgtttcattttttacattggatagctttattatcctaacttattactatattctcactaaccataaaaacactgtgagtgaatga

SEQ ID NO: 429147 - DNA, 825 bp, Serratia marcescens
atggtggataaagaaaatacgcagttcattgtcgcccttgagttcgagcagcataatctgcgtgattggtggttaaaaaacttggctaagcacaattgccgttctgtctcggttattccgactctgcgaggtgttcctttatatgggacagatatgtcattcattttcagccatgaggtgatgatccttagagttaataataatttggcaaaacactcatctcgtttcataaaaagagcattcgacctttttggctcattaaccataatgttaattctttcacctgtacttctccttttagcatatttagtatcaaaggatggagggaaggcgatttatggacatgagaggattggtcgcgatggtaaaaaattcaagtgcctaaagtttcgttcaatggttgtaaattctcaagaagttctatctgaacttctcgcaaaagatgagcaagctcgcagtgagtggaataaggattttaagcttaagaatgatcctcgaataaccaagatcggcgcgtttattagaaaaacgagcttggatgaactgccacaattgtggaatgttctcactggagaaatgagtttggtcggtcctcgaccaattgttgaggctgagttagagcgctatgcaggcgatgtggattattatttgatggctaaaccaggtatgactggtttgtggcaagtaagtggtcgaaacgatattgactatgatactcgagtttatttcgatgcgtggtacgtcaaaaactgggcgctttggaatgatattgtaatcctttttaaaactattaatgttgtattaaggagagatggcgcgtactaa

SEQ ID NO: 429148 - DNA, 282 bp, Serratia marcescens
atgcttaagttgattggtgggctgctgattttagttggtgcaattactgttggttacgctatcggcatggaagttactgttggctacgttgataaggtttacaacagtgggctgatggcaaaccgagagatttacacaattgcaggtagtgcaacggctatcatcggcaccttagttgctatgactggggtgattgctgagtttttggaaaaaagagaaaacgaaaagttagacatcttgaaaaatatcaagaatggcttagctgaccacctagagaaataa

SEQ ID NO: 429149 - DNA, 1305 bp, Serratia marcescens
atgagcaatgccttgaaagggctgttatggctgattatcgccgtggtggtgttggcgggaggatacgcgctgtacacgctgctgcggcccaccggcgcggagcctgcggcgccgatcgccggggcgccggccggcatcaccgataaactggcgcgcggcgagtacctggcgcgcgccgccgactgcgtggcgtgccacaccgcgccgggcggcacgccgtatgcgggcggcttcgccttcaaactgccgttcggcaccatttacggcaccaacatcaccgccgacaaggagaccggcatcggcaactggagcgacgatcagttcgtgcgcgcggtgcgtgagggcatcggcccgcagggcaacctgtatccggcgatgccgtacacctcgtacaccgaactgagccgcgacgacgtgctggcgatcaaggattatctgttcagcctgccgccggtgaagcaggccaacccgcaaaacgatttgtcgttcccgttcaaccagcgttggggcatgaaattctggaacctggcgttcttccatgagcagcgctttgcgccggatctcaacaaggacgagcagtggaaccgcggcgcctatctggcgacggcgctcggccactgcggcgagtgccatacgccgcgcaatctggggttcggcctcaaccagagcaagcacctgagcggtgaagtggtgcagggctggttcgccgccaacatcacgccggataagcagaccggcatcggcggctggagcgaccagcagctgtcgcaatatctggccaccggccatgcaccggggcgcagcagcgccgccggcccgatggcggaagcggtggaaaacagcctgcagttcctgacgccggaagacaatctggcgctggtgaaatacctgcgcgatatcgaaccgatcgccggcgacggcgcagcggcggtgaacctgcagccgaagggcgcgggggcttccacaccgatcctgccgggcgggcaagacagttcgctcggccggcgggtgttcgccaacgactgcagcggttgccaccagtggaacgggccgggccgccagagcgagtacgcgtcgctggtaggcagcacggcggtgaacgatccgcaggggcgcagcgtggtgcaggccatcctgaaggggacgagcatcagcatcggcgatcggcatgaaatgatgccggcgttcggcagcgcctattccgacgaggaagtggcggcggtcgccaacttcgtggtcggccacttcggcgataagcagggcaacgtcaccgccaaacaggtggcggagcagcgcaagcagtag

SEQ ID NO: 429150 - DNA, 912 bp, Serratia marcescens
atgaagggtatgcagaagatcaaaaggggtaagagcttcacaggtgttgttcaatatgcattgaagccgggagcacatcataaaagtgatacaatcgtaatcgggggcaatatgctgggtgatacggtccatgaactgattgctgaatttgatggcaccaaacagcttcggccagatgtccagaaaccagtatggcacaactcgcttcgcttacctgatggtgaatcattatcgaatgaccaatgggcaaagatagctgacgactatatgaagaagatggggttcaatgagacccatctccgctgctatgttctacatgacgattctgccggccagcacatacatatcattgcaagcaggatagacctctatgctgataagctataccttggcagaaacgaaaacctcatcagtacccggatcattagtgaactcgaagtcgcttatggcctgacagtgaccaaaactgcatctcccccctcgcaagcacaaccgaagcggaagagagtgtcccgtaatgagaaaatgctatcggaacgaactggggtgctttcaccaagagaagctctgcagcagatacttaataaaagtttatctgataagccggaccttctgactttcacaaaacgactggaagaagcagaagtcggctggacggcgaatgtcgcttcaaccgggaaaatgaacgggttctcattctcctaccgcgatatagctttcaaggcatctaaacttggaaaggcatactcttgggtaaatcttcaaaagcagcttaactacaaccctgaccacatagaagctctgcgaagcgacatatcgataaaagaccaatctcctgctcctgctcctgctcctgctcctgctcctgctcctgctcctgctcctgctcctgtgacctgcccccgggattag

SEQ ID NO: 429151 - DNA, 414 bp, Serratia marcescens
atgaaaaaacattataaacacgagaccgtatcttgctacaacatactaaagcctgaaaatttatctaaaagaatatattgcatcagtgttaggttaaataataaggaattagagattctcaatgtgaatcgaggaagttacaaaaaaggcgaatggctccgcatggctttcctacataaactgccctccattattcctgagatcaacatcgaagcatggagagctttatctgacatatcacaaaagttgaatcgtattgccgctcatatagatggtaaaagcaaagacagtcagcttactcagactgaattgtttgcagtgaagcgacaactggaagagcttcgccagcacctgctaaatgctgacatatggagcaaatcctatgaagggtatgcagaagatcaaaaggggtaa

SEQ ID NO: 429152 - DNA, 1056 bp, Serratia marcescens
atgattaagagtccattagatctgaagaatttaaacataacagatctgattattcacagagtttatttgcctggtcagcagagtcattttacagttgagcattctaaaaacattatcccgttgactggtaaagccaagcaaactcttgagctacggctaatcaaggtattaaacagaggctcaaaatgtatcgaaatggacattgtagacgatgatccattggacaaaattcatgcacttcatgactccagtgaagaacttttcatctcaaaaagccaagatatcgctgacaagctcggaaaatcgcaaacaagtaagaaacatcctgaaggtatccttgttgttgtcagatgtacttatggtgttacaaagaaaataagagcaattgctattattaaagccgagcttcatgaaggttttacctctacagtaaaagataatgtggcatcaatcggatatcttaataatctctttcttacaccagaacaaaaactttataaagtggcatttttctcagaaattacccgtgtgagtaagcttaataaagattcttataatgtttatttatttgataataatttgacggctaaagatgattctggtgctgctgcttatttctataaaaaattcttagggctttcgatttcagccgattcgagtagactcactcgtagtttctatgaagctaccgagaaatatattaatgagcattgtaaatcaatagaggaaaaaattgatttaacaaatgctttgcggacttacataaaaataggccaatcagaaataattggaactaatgatttctctgagcaatatatgccagttagtaaaagagatgattacattgcattctgtgaagaaatagatcctgtcattacatcatttaagaaagatgacgctttaataaaaaataaaatcaagatgtcaacttacaaatttagtaatgatgtcaaaattacatacccaccatcgttggatggtaaaacatgtgaaatcattgaaaaaagcaatgagcatacgctcattaaaattaatggctatttaataggaaattaa

SEQ ID NO: 429153 - DNA, 1257 bp, Serratia marcescens
atgataaaaaaaattaatttaaaaaatattaagtgttttcaggatgttacatttgagtttgctcccttgaccgtattttgcggggccaactctgcaggaaagtcaactgctattcaatgcttgctgctattaaagcaaagttttgatatacatagctttgaagaaaaaaaattaaacttatcaggtcccttattctctgttggacatgttcaggatttagttgctcaacaagctatcagtgatacgattagcatcaaggttgatgattccgtatatgaatcacaattgttaaagaatattgatcaaaattcttatcttttaccattgaaatcagaaaatatcggtatccatccttttcttaataacgctttccattatttgaatgcttataggctttcgccacagaatagttatgatgtcaactttgattcagacaaaatagattttgggatatatggtcaatatgccgttgccgaactagaacgtttaagattggaaccagcattaaatcaagatttagccagaaaaacagtcttacttacacaaaaactattggggacaaatataagtgaagtagctaaagagtcttttgaagactctgataaaaacaatgattttttgaatttcgatgaaatcattgacgaaacatcaatagattcattcatcaatggtaaaaaaaataacgagaatataattaaacctgaaagtaattcttccgatcaaaaagtatatggcttagaagtcgctgtaaaagaaacaatgaagaggatttctaaaggttttgatattaaattagagccccataattccttagataaagtttcacatagttacggttccatagaagcaaaaagagcagttagaccagtgaatactggttttggtataagctatgttttacctattgtagttgctgcattgtgtactccacctggggggatattgattgtagagaaccctgaggtccatctccatccagccgctcaatcgcagttggctaattttctagcccatacttcacaaacaggtgtacaagttattattgaaacccatagtgatcatataatcaatggaattcgtttatttgcaaaagattgtaatttgaacgaggaccaagtagtaataaataacattagatctgagcacgataaaaaaatcgttactgcaattagagttgctaaaaatggtagcctttctgattacgatgatggattctttgatcaggcagaaaaggatttgatgaggttatttgaatga

SEQ ID NO: 429154 - DNA, 795 bp, Serratia marcescens
atgaaattatatgtgaatgattgctcttttaatggtcaagcgaaaagcagggaagaagctgtagatattctgatggaggtagtaaaaatattttatcactgcaaaactttttgctgtgctaagaaaagttcaatccatccagaagtgaaaaatgcaagaatatgggatgaaattaccatattagagattttgcatgacatgaaaagttatgagaaagataaaaaaagggctatattagaggttttttgtagaagcccacattatagtaaaaataaacatgttgatggtgagaccatacgagatcttgatgacaatgatctgagtggtacatgttttgattcagcttcaatttcaaaatgtggtgcaatcgttgtatctgctcaaaactcagataaatataatgattatgatattgaagttcaaagcagcatctccggaagaagaaaaattattaacttgacgagatactctgattcattaaatgtcaattggatttatgaacctaacccaaaacataaaaagctacctctagatttaggaaaattcgttgttagtgaaatggatttagatattaacgaagctcaaaatgcacttacaaatggcgtttttgttagtaagaaagtaatcagtaagtataaagacacatggtattgtttcccttatcatgaggaatctgtttttcacggctataaaataaatttaaaacaaaatgatgctgttcatagtttagttgatgaaatacttagtcgagtaaattatgaaccccgtggtcaaatattttatggctatgtttga

SEQ ID NO: 429155 - DNA, 726 bp, Serratia marcescens
atggctaagtggttattacacaaaattcgtatgtgggattatagaacagcgaatggtgtagatcattttattgctaattctcattttattgccagaagagttaaaaaagtatatgggcgtgatgccgatgttatttatccacccgtcgatgtagagcgttttgatttccgtgccgacaaagacgacttttatattacggcatctcgcttggtcccatataagcgtgtcgatttaattgttgaagcatttagctctatgccagataaaaagttgattgtgattggctctgggagtgaactcaataaaataaagtcgaaggcaacaaaaaacgtcgagttactaggttttcaaagtaatgaagtgatgcaagattatatgcaaagagcaaaagccttcgtttttgcggcagaggaagactttggaattacgccagtcgaggcccaagcgtgcggtaccccggtcattgctttccagaagggaggctctctcgaaactgtgaggccatatggagttccgaacgctacaggattattctttgatgagcaaacatcggaatctataaaatccgctgtcattaaattcgaaagtattcagcatgagctaaaagcagaagactgtcgacagcattcattaaaattctcatctgaaagatttaggatggaaatgaatgattatatttcatcaaaatgggaaaagttccaggaaagaaagaagatagcatactag

SEQ ID NO: 429156 - DNA, 411 bp, Serratia marcescens
gtgagcattcctgcatttggtttaggtactttccgccttcaggatcaggtcgttatcgactcggtgagtacggcgctggaactgggctatcgggctatcgataccgcacagatctatgaaaacgaagcggccgtcggccaggctatcgcagccagcggtgtgccgcgtgacgagctgttcatcacgaccaaaatttggatcgcgaatctggccaaggggtcattaattcccagcctgcgagacagcttggtcaaactgcagacctcgtatgtcgatctgacattgattcactggccatcgccaaatgatgaagtgtcggtcgccgagtttatggctgaattgctggaagccaagcgattggggctaacccgtcagataggggtatccaatttcacggtcgatctgatgtga

SEQ ID NO: 429157 - DNA, 912 bp, Serratia marcescens
atgtcagggcttgcaaagcatttggttgctgaaactgatcttactggtttgtctaaggacgaaattattgcttgggaacacttttgtcaagtattacaggatggagtagacctagaatctgcattgcataaagttgttgtttctgaaattctcaccgctagaattattaaatcgacatgggggctcattaattttgaagatattaatattttcaatttaagtctacagaataatgcaatgtttccactgagtcgcttacttgaacatatgttcaaaagtagtcttagagtaataaatatagtaacaacaaattatgatcgtttggctgaatatgcctgtgagcaagggcgaattcatcattttactgggtttacatatggtttttttcgtcagttggctacaccaagtgaaataagtgttagtcgtcgagttaatatttggaaagtacatggttctgtcgactggtttcagtcaccagtaaaagatactattgctttgtcaaatattcatgatgttccagagagtcacgagccgcaaatagttacacccggtacgcaaaaatatcaaaaaactcacttagagccatttcgttccatcatcaaaaatgcggatgaagccataaattctgcctgttcgtatttgtgtgtcggttacggatttaatgacgagcatattcaaccaaaactaatagcgaaatgccttagaaataaagttcccataactattattacctataccctttctgatgctgcaaaaaaactaattatcgaaagtaatgcgcaaaattaccttgcaatagagcgaggagataccgatgatcaatctataatctactcttctttggctaaggcacctgtgactgttgaaaagaacctctggagccttgaaggttatctgtcactaatcatgtag

SEQ ID NO: 429158 - DNA, 1734 bp, Serratia marcescens
atgtctattttcaattttaaagatgaagacgcacttggaagtgttacttccgttgatacgacaaatgttatcgtagatgtggaaaatattgatcagctgaaaagattgcaagttaaccatctcgcagttctccaaagtagtcggccagggcaacacctcatcggccttataacacaggtgacgcgtaagcgaggtatcgaagatattattaataatggtgtcaatgataaaaattccgaactaaatttatgtcgtatcgctttgattggtacgatgttggatcgtgatggtacgaaggaaaacgtattccgtcgtactcttgaaagtgttccagaaatagatgctaattgtttctcactggagggagaaaatctaacgagtttcatgcgtattctgtctaacgtatctgcagacggaaatgccctaacacttggtaaatatacgcttgacgaacaggctgttgcttatctcaatggaaataaatttttccaacggcatgcattcatcggaggcagtacaggttccggcaagtcttggacgacagctaaaattattgaacagatgtctggtcttacgacggcaaatgcaattgtatttgatcttcatggtgagtatgctcctttagttggcaagggaattcagcattttaaggttgctggtccggctgatgttgaggtaaaaagaactattagtgatggaatcctttacttgccatattggttgctttcgtatgaagcgcttgtatcaatgtttgttgaccgcagtgaccagaatgcacctaaccaagccatgattatggctagagaaatcaacctagcgaagcaaaaatatttagaagatattggacagcaagacattttgaaacatttcaccatagacagcccagttccgttcgagcttagtagtctcatgaaacgtttgaatgaaattaatgttgaaatggttcctggtgctaagcctggtacggaaaaacaaggtgatttcttcggtaaacttgctcgcatgatttcccgcctagaaaataaaatctacgataggcgtttaggtttcatgtttaatggtggtaatgatattctggatttctgctggcttgacagttttgctaatgccgtactcggtagtgctgaggagaatggcaaggctggaataaaaattatagatttttcagaagttccatcggatgttttgccattgattgtttctctggtcgctcgtgtcaccttttcaattcagcaatggactccatcaacgttgcgtcatccaattgctctcctatgcgatgaagcccatctatacatgccccagcgcaatatggcagattcagcggatgacatttccctagatatttttgagcgaattgcaaaagaagggcgtaaatatggggttagccttgtggtaataagccagagaccttcagaagtgaataagacaatgcttagccaatgtagcaatttcgtatccatgaggttgaccaactctgaagatcaaggggttattaagagattactaccagatagtcttgggggatttagcgatatacttcctactttagataccggtgaggctttggttgttggcgatgctagcttgcttcctagtaggattaggattgatgaaccgaaaaacaagccaaatagcggtacggttaatttttgggatgaatggcaaaagccagtcaaggagcaccgtttatcagttgcccttgaaaattggcgtaagcaaagcattcaatga

SEQ ID NO: 429159 - DNA, 1038 bp, Serratia marcescens
atgaataaaattaaaccaacttggcagctattcgaaaatcttgtatgtcgtatcctggaggtcaacttttttagggtaaataagaataacctcagaggaagcgaaggatttgacttgcttgcagattttgaaaatcaaagctgggctattgaagttaaatactatcgtacagcacgtgctcaaccatcacttattgatgtggctgcgaatcgtatagcgaataatggtgtggccgcaggggttgaaaagggaatgttggttgtctcttgtgttctctctcctgaattacgagaggcccttgaaaatagatttagtattacttttttggatcaagcggacttaagggcactgtgtggtccacatcctgaactcgcggaggaattggatgcattgttggaagtcaatctaaatgagactctgacaccttccctttaccgtaaagataataggttaataattagagacattgggcttctagaaagtgggcgatttgagcagcgagatagtaaagggacgaaactttgcaatgagctacagagtataaaaaaaggaaaagcatcttggagtcagtatgaacgaaaatgtgaggagattctcaagtatttattccataacgatcttcaaggttggcactcacaaaaaagaactgacgatggtttaaaccgttatgactatatttgtcgagtgaggccaattactgaattttggaagtttgttattgagcatcttgatagccgttatgtgcttttcgagttcaaaaattattcaggtaaaataaagcaaggtcagatactcactactgagaaatatcttttggaaaaaggcctcagacgtatggcaattattatgacaaggagtggcgctgaggaaaatgcagtggtaatgactcaaggagccatgcgagaacacggaaaactaatgctcatcctcaacgatgaaaaagtatgtgagatgcttaaaatgaaggagcgtggtgacgatccaaccgattgtttatttgaaattgcggataactttttgctgacacttcccagataa

SEQ ID NO: 429160 - DNA, 921 bp, Serratia marcescens
atgtccgacatgattaccctgatgaatagacttgcggtgcaagagggatacaacctcactgccctgcctgatgtgcgaattttgcgctccgatcgcccgcttgccagaacgccggtgctttacgatccggggatcgtgatcgtctgccagggcagcaaacgcggctatttcggtcaacagacctatttatatgatgagcagcactacctggcggtttcggtgccggtgccgtttgtgatggaaaccgacgcgtcagcagcacatccgctgctggcgatttatatgcatctggattttcagcttgtcgcggaactgatgctgcagattgaacagcatggcgccccgcatcctcccgtcgcgccgcaaagcatgatgtcgagccccatggacggcgcggtaaaaatggccgtacttcgcttacttgacgtcctggccaacccgcttgaggcggcaatcctcggcccggcgcgggtgcgtgagctttattttcgcgtgctgacaggcgcacagggcaacgcaatgcgtgccgcgctggccttgcagggccagtttggcaaaatcggtaaagcgttgcagcacatccatgccgcttacgcggagccgttaacgctgacgcagctggcgatgagggccggcatgagcgtgccgacctttcatagccatttcaaggcgataacgcagatgccgccgatgcagtatgtgaaatcggtacgcctgcaccaggcacggatgctgatggtgcgccaacaaatcaccgccgccgccgcgagttacgccgttggctatgaaagcccatcgcaatttaatcgcgaattcaaacgtctgtttggcctgccaccggcagaggagataaaacgcatgcagcgtcacttcgccattccgcccgcgcagcctgcctcgatatttgtttcgtcgcactga

SEQ ID NO: 429161 - DNA, 702 bp, Serratia marcescens
atggcatctgcaaaaacgattttaatcaccggcgtcagcagtggctttggccaggcgctggcgcgggaagccctcgccgtagggcatcgggttgtaggaacggtgcgcaacagcgaagcactgcaggctttcgccgcgctcgatacgcagcacgcttttggctatctgcttgatgtcacggacgatgaacgtattgatgaggtggttggagagatagagtccgccgtcggcccgatagatgtgctggtgaacaatgccggttacggccatgaaggcattctggaagaatccccgcttgcagagctgcgccgccagtttgacgtcaatgtgtttggcgcggtggcgatgatcaaagccgtgctaccgggcatgcgccagcgccgtcgcggccacattatcaatgtcacctcaatgggcagtttcattaccttgcccggtatcagctattactgcggcagcaaatttgcactggaagggatatcagaaactttaagtaaagagcttgccccgttcaacctacacgtgaccgccgtggcgccgggctcgtttcggacggactgggccgggcgttcaatggtacgcagccctcgctgtctccctgactatgacgcgttatttgaacctgttcgtcaggcgcgtcaggaaaaaagcggcaagcaactgggcgatcccgtgaaggggctcacgccatgctggcattga

SEQ ID NO: 429162 - DNA, 189 bp, Serratia marcescens
atggaattaataatcctgaaattaattaaggattattccttattcggggttctacgccggaaccccagatttttccgtccgctaaaattatccccggttgagcagctttataccgtcagctcgcagtggaccatcaggggaaatgtggcggtacagcgtttgtcgggttatcccaagctcctggcataa

SEQ ID NO: 429163 - DNA, 2538 bp, Serratia marcescens
atggccataaaaaacaagaacggcgcagggcgtacgttcacatcagccaaacgcattaccgggaagcgcgtcgctatcgggataggatgcgcactatcgggcatgctcacctccgcgatggcggcacccggtgcgtcggcatcaccctcggcggtcgaacagcccgctatcctttccttcgccattcccgccggtgatctggcgcccgccttgcagacggcggccgctaaggccggcgtgatagtgattttcacgcccgaacagacgcgtggaaaaagcaccgcgggcctgcagggacattatcgcctcaccgacgcgttcaatacgctgttggcgggcagcggattgcgcgctcaacaaaccgcacagggatatcggttggtcgacgccgggccggttcagccgttgacgataccggagctgtcggtggtcggcggtttgtccgacagcgtcgccgccggccgttcggtgctggataaagaagatatcgaacgcgtgcaggcagacaatatcgccagtttgcttgatcgcttgcccggcgtagggatggcgggatcgccgcgcccgggtggccaaagcctgaatatctggggcatgggcgacatggaagatgtgaaggtggtgctggacggggcgccgaagggatttgagaaatatcggcagggttcggtattcatcgaacccgaactgctgaaaaaggttgaggtcgataaggggccgcacaatctgttgaacggcaatggcggctttggcgggaccattacgctggagaccaaagatgccggggatatgctgctgccgggcgaagattttggcggcttgctgaaatacagctaccacaccaacgatcgccagggcatttacagcggtgcgttgtacggccgtacgccggaaggattcgccgacggtttgatctacatgagcaagcgtgacggcggcaacctgaagcggccggacggcacgcgctttgcctattccgccaacgatcaggcttcctacctgttaaaaaccaatatttatctgagcgaggcgcaaacgctgacgctgtcggcgatgcgctccgattccgatggctggcagccttttgccgccaagcgggacgatatcgccgcgcccagccaggcggatatcgataaatacggccgggaagacgcgtggcgccgcattctggtgtatcgcgaccagacggacaccaattactcggtgaaatggaatctggcgccggaagcgcagccgttgctgaatctgacgctgtcttatgcctattcgaagacagaacagcatgacaagcggccggattccgcttcaaagttcagctatcttggtacgctgggcaatgaaagctgggtgaactataccgatcggcagtttgacgtcagcaatgaaagccgtttcgccagcggaccgctggagcacaagctgttgctcggcgcgcgttggcataaacatcagcgcgataccctgatgtattacccctcgcaggtgaaaaacgccagttacaactacggctatttccagccgtattacatgccggcgggcgaacaggaaacccgcagcgtttatctgcaggatgcggtcagcttcggcagcctgaccgtgacgccgggcgtgcgttacgatcatgtgaccaataccgggcaaccgaaccgggcgccgcgctataacgacagcgatccgctcgtgggtcatgattacagcagcgtgacctataccggctggtcgccgcatttgggcgtgatgtggaaagcgacgtcgaatctgtccctgtttgctgacgttagccgcacctggcgcgccccggtgatcgacgaacagtacgaagtgcaatacgccgcttccagcgtgcccggcaccagccgcggcctgcaggtggaacgcatgacgggcgttcgtctcggcgcggtgctggacttcaacgatgtgttgatggcgcgagacagtctgcagatccgcactacgctgttccgcaatcgcggcaaggacgagattttctatcgtcgcggcgtagtgtgcgacgccgcacggcacgggggccaatgtgggcaaccgttgtcgaactatcgcaacttgccgggctataccattgagggcgtggagctcgaatcgttttatgacagcgaaagcctgttcggtagcctgtcgttctcctcgattcgcggcaaacgcgacgcttcaccgcgcgatccgtggggcaacgaaacctggattgccgaaattccacccgttacggcacacgcgatgctgggtatgaaagtaccgcagtgggacatggccttcggctggaccggcgattttgtgcgtaaacaggatcgttcaccggccgacggcgatccgatggccgttgtctgggcgctgccgaaaacgtcgggttatgcattgcacggcctgttcgcctcgtggcagcctggcggtttgcagggcttcgaagctcgcgtcgcggtggacaacctgttcaaccgcgattattacccttacctgggcgaatcggtgtccggcgtagggcgcaacatcaagtttagcgtcagtcaacgtttctga

SEQ ID NO: 429164 - DNA, 177 bp, Serratia marcescens
atgagacgcagtagaaatgaagtgggccgctggcgcatgttgcggcagagccaacgccgccggcatcgctggctggagcgccagtcgtgcagcaatcgccatatcatccgggtgcggcgccgcctggacgatcagcatcggcgcgcgctgctgtttgcggtatcctgcgagtggtaa

SEQ ID NO: 429165 - DNA, 570 bp, Serratia marcescens
atgagcaagaaaaagatcctgatgctggtcggtgactatgccgaagattacgaaaccatggtgccgtttcaggcgttgcagatgatcggccattgggtggacgccgtgtgtcccggcaaagccgtcggcgactacatcatgaccgcgatccacgattttgacggcgcgcaaacctacagcgagaaacccggccaccgtttcaccctgaacgccgacttcgccaccgccaaagaagagcactacgatgcgctcttgatccccggcggccgggcgccggaatacctgcgcctgaatcccgacgtgatcgcgctggtgcaggcgtttgacgccgcgaaaaagccgatcgccgccgtttgccacggcccgcagctgctggcggcggccggggtgttgcaaggccgcacctgcagcgcctacccggcctgtgcgccggaggtgcggctgggcggcggccattatgcggagatcggcatcgatcaggcgcacgtcgacggcaatctggtcaccgccccggcctggccggcgcatccgcagtggctggcgaagttcgtcgaggtgctgcagaaatag

SEQ ID NO: 429166 - DNA, 777 bp, Serratia marcescens
atgaatgtgctgattgtttacgcccacccggagccgctgtcgctgaccggctcactgaaaaacttcgccgttgaacgcctgacgcaggccggccatcaggtacaggtgtccgacctgtacgccatgaagtggaaagcgacgctcgacgctgacgacagtctggaaggcccggcaacggctcgtttcgatccttcgctggattcgcagcgcgcgttcgccaacggcatgcagagcgccgatatcgaacgggagcagcaaaaattgcgctgggcggacgcggtgctgctgcagtttccgctgtggtggttctcgatgccggcgatcctcaaaggctgggtggagcgtgtgtatgcttacggttttgcctacggcgtgggtgagcattccgacacccattggggtgaccgttacggcgaggggtcgctggcgggcaaacgggcgatgctgatcgtcaccgccggcggctgggagtctcattacgccccgcgcggcatcaacgggccgatcgacgatatcctgttcccgatccagcacggcatgctgcactacccagggttcgaggtgctgccgccgttcgtcacctaccgcgccggcaaaaccgatgaggcacgctttgccgccctgtgcgagcagctcgggcagcggctggataatctgtggaacgccgagccaatccgctttcggcggcagaacgccggtgactatctgatcccgcagctgacgctgaaagcgcatctcgcgccggggcaaaacggtttcggcgttcacatcgagtag

SEQ ID NO: 429167 - DNA, 471 bp, Serratia marcescens
atgaccaaaagactactcctctgcgcctcactggcgagcgcattattgttaagcgggtgtgcaagcatccccctcgcaacagatcaagaatcagcgcacgctaaaagcttcccggcgctggatgaaaacaaagcgggcctctatatttatcgtgacagctttgtcggcaaggcgctgaagaaagatgtttatcttgacggcaaatgcgtggggaagaccgcggataaaacgtttttctatacccaggttgacggcggacaacagcataaaatctctaccgaatctgaattttctcctaacgatctttccatctataccgaagcggggaagaattacttcgtaagacaatacattaagatgggtgtattcgtcggtggtgccggtctgagtcaatcgacagaagacgaaggcaaacgtgttatttctaaagctgcggtaaaacttgccaagggcggccattgcgataactaa

SEQ ID NO: 429168 - DNA, 1104 bp, Serratia marcescens
atgccgcttcatcatgcaatctggcgagtgggggatgccccccagccgctggccatcagcaagctcccgagcgaacaactgctggagaaaatgatcttaagcgatccgaccatcctctccgaccagtggatgctgatcggccatcaggaaaataccctcgataagggacgtatcgatctgctggctatcgcgccggatgcctcgttgattctgattgaattgaagcgcgatcgcacgccgcgcgaggtggtggcacaggctttggactatgcctcctgggtggatgatctcaccgccgatcgcctgtcgcagatttacgaaaaattctccggcggcggcaatctgggggaggcgtttaagcaacgcttcaacaccgagctggaagaggactccctgaatcagtcacaccaaattatcatcgtggcggcagagctggatccctcgaccgagcgcatcgtggactatctcagcaagaatggcatctcgattaacgtgctgttctttaaagtgttccagcacggtgacgatcagttcttaagccgcgcctggcttatcgatccgagcgagacgcaaaccaatgccgcgcaggccaccgcgggaaccagcgccaaaaccaaagatccctggaacggggagttctatgtttcatttggcgatccgttaagccggagctgggaagaggcgcgtcgctacgggtttatcagcgccggtggtggtagctggtatagccagactctaaaacaacttcagcccggcgaccgcgtgtgggtaaagatcccggcaacgggctatgtgggcgtcggtttggtccagagcgctgtggagcctgtcagcagttttacggttaacaccgaagacggtgaaaaatcggcgatggaagtgcttaagtatcgcgatctgtatcgccgcaatgccgatgatccggacaagtcagagtattttgtcccggtgaaatggctggaaacccgcagtgaagaagatgcggtcaatgaagtgggcttcttcggcaatcagaatacggtatgtaaaccgacggcgccgaagtggcggcataccattgagaagttgaaacgctatttccgccactgggatgcggacgcgtaa

SEQ ID NO: 429169 - DNA, 1749 bp, Serratia marcescens
atgagcgttgagaaactgattaccgatcatatcgatatctggtcctcggccctgcaaacccgctccaccgccgggcgtggtagcaatggcaaaatcgacctgtatggcattaagaaactgcgcgagctgattctggaactggcggtgcgcggcaaactggtagctcaggatccgaatgatgaaccggcgtctgagctgctaaaacgtattgctgctgaaaaagcggagctggtaaagcaggggaagatgaaaaagcagaagccgctgccggaaattaacgaggatgaaaagccgtttgagttgccggagggttgggagtggtgtcgattcggttcgctatcgactatgtattccacgggacttgacagaggaaagagtcagcaatcatcagagaaccagtttaaatacttcaaaatgaataatattttaaataatggtggttttgatttaactgatgtgactcgagttaatgcaactcaacatgaagttgtgcaatattctcttcgagaaaatgattttctatttaatactagaaatagcaaagagcttgttgggaaaacatgtgttttcaattcaactagcaaagagaccgttctttataataataatatgttaagggctgtgtttttagaaggggttttatcttaccaaattgacatttggatgaggagctctagtgggaaaaccgagcttgaaaaaataaaatcagggacaactaatgtttgggctatatatcaagggaaattagagttgttgtgttgtttggttccacctcttgcagaacaatatcggatcgttgccaaagttgatgagttgatgcatctctgcgaccaactggaacagcaatctctgtccagtctggatgcgcatcagcaactgattgaaaccctgctggcaacgctgacagacagtcaaaatgccgaagaattcgccgaaagctgggcgcgaatcagccaacatttcgacacgctgtttatcaccgaagcgagtatcgacgcacttaagcaaaccattctgcaactggcggtgatgggcaagctggtgccgcaggatcctaacgacgaaccggcttctgaactgcttaaacgtattgagcaggaaaaagcgcaactggtgaaagaaggcaaaattaaaaagcaaaaaccgttgccgccagtgagtgatgaagaaaaaccgtttgagttgccgaagggatgggcgtggtgtcgtttggggcattgtatccatttaatatctggacaacatctaaaaccaaatgagtactcagaaagtatagtggaaggagcaatcccctacataactgggccggctgagttcggtgattcaaatccgacgtattcaaaatttacactcgaaaaaagagctgtagcaaagcctaaagacattctcattacctgtaaaggtgcaggtttagggaaattaaacgttgccaatgttgagatagcaattagtcgacagcttatgtctattagagcgattagcaccagctttgactattttaaattgttgctatcaagcatgtataactattttcaagggaaaggcattgggatagctataccgggaatatcaagggaagatgtcaccgaacctgttatattactaccgcctttgaatgagcaagagaggatagtgctaaatgttaatagcttatttggtctttgcgatactctcaaatcgcgcctgcaatccgcccagcaaacccagctgcacctggcggatgcgcttaccgacgccgcgttaaactaa

SEQ ID NO: 429170 - DNA, 1473 bp, Serratia marcescens
atgtcgattagctcagtgattaaatcccttcaggacattatgcgtaaagacgccggcgtagacggcgacgcgcagcgccttggccagctttcgtggctgctgtttctgaaaattttcgatacccaggaagaagagctggaactggagcaggatgattaccagttcccgatcccgcagcgctatttatggcgcagctgggcggcgaaaagcgaagggatcactggggatgcgctgctcgagttcgtcaacgacgatctgttcccgacgctgaagaacctcaccgcgccgatcgacaaaaatccgcgcggttttgtggtcaaacaggcgttcagcgatgcctataactacatgaaaaacggcacgttactgcgccaggtgatcaataagctcaacgaaatcgatttcagcagcagccaggaacggcatctgttcggcgatatctacgaacagatcctgcgtgacttgcaaagtgccggcaatgcgggcgagttctacaccccgcgcgccgtgacgcgttttatggtcaaccgaattgacccgaaactgggcgagtcgatcatggatccggcctgcggcaccggtggttttctcgcctgcgcgtttgaccatgtgaaagagcattacgtcaaaacgaccgaagaccacaaaacgctgcaaacgcagattcacggcgtagagaagaaacagctgccgcacctgctgtgcaccaccaatatgttgttgcacggcattgaggttccggtacaaattcgccacgacaatacgctcaataaaccgctttcctcctgggatgagcagattgacgtgatcgtcaccaacccgccgtttggcggtaccgaagaagacggcatcgagaaaaacttcccggccgagatgcaaacccgtgaaaccgcagatctgttcctgcagttgattatcgaagtgctggccgataaaggtcgtgcggcggtggtgttgccggacggcacgctgtttggcgaaggcgtaaaaaccaaaatcaaaaagctgctcaccgaagagtgtaacctgcacaccatcgtgcgtttgccgaacggcgtgtttaacccgtacaccggtattaaaaccaatattctgttcttcaccaaaggtcagccgactaaacaggtgtggttctacgagcatccgtacccggacggcgtgaagaactacagcaaaaccaaaccgatgaagttcgaagagttccaggccgaaatcgactggtggggcaacgaagcagatggttttgccggccgcgaagaaaacaaccaggcgtggcaagtcagcatcgacgacatcatcgcccgcaacttcaacctcgatatcaaaaacccgtatcagggtgaagccgttagccacgatccggatgaactgctggcgcagtaccaggcgcagcaggcggaaatcagcgatctgcgtaatcagcttcgcgacatcctcggcgctgcgctggccagcaacaagggggctaactga

SEQ ID NO: 429171 - DNA, 2433 bp, Serratia marcescens
atggctggcgtaaacaaaacacatctgaccgaaacggacatcatcaccaaatttattctgcctgcggtcaaggaagccggttgggatgtgatgtcacagattcggcaggaagtgaaactccgggatggtaagatcgtggtgcgcggaaaactagcttcccgtatcaaagtcaaatccgccgatatcgttctctaccacaagccaaacttgccattggcggtgatcgaggcaaaagccaatcagcacgccatcggcaaagggatgcaacaggggctagattacgccggtctgcttgacgttcccttcgtgtttacttccaacggcgacggttttatcttccatgacaaaaccaatccgcagcagttggagtccgaaattgcacttagcgattttccgacgcctgaacagctatggcagaagtactgtgtctggaaagggttcacgcaggagcaattgccggtcatcagccaggattattacgatgacggcagcggcaagtccccccgttactatcagatgcaggcggtgaaccggacggtcgatgctgtatctgcggggaaaaatcgcgttttgttggtgatggcgaccggtacgggcaaaacctataccgcgtttcagatcatctggcggctgtggaaagcgaaaaacaaaaaacgcattctgttcctggcggatcgcaacattctggtcgatcagaccaaaaataacgatttccagccgtttggcaacgccatgaccaaaatcaccgggcgcaccatcgatccggcctatgaggttcatctggcattgtaccaagcgataaccggccccgacgagtatcaaaaagcctacaaacaggtggcacccgacttcttcgacctgatcgtgatcgacgaatgccaccgtggcagcgcctccgaagactccgcgtggcgtgaaattctggagtatttcggcagcgccacccagattggcctgacggcgacgccgaaagaaaccgaagacgtctccaacatcgactacttcggtgatccggtgtacacctactcgctgaaagagggcattgaagacggcttcctcgccccgtacaaagtggtgcgtgtggatatcgacgttgacgtacagggatggcgaccgcttaaaggacagttggataaatacggcgcagaaattgaagatcgtatttataacctgaaagattttgaccgcacgctggtaattgatgagcgtaccatgctggtggcgcagaccatcacagattaccttaaacgcaccaacccgatggataaaaccatcgtcttctgcaacgacatcgatcatgccgatcgcatgcgccacgcgttggtggtgctgaatccggaacaggtcctgaagaacgaaaagtatgtgatgaaaatcaccggcgatgatgacgcaggcaaggcgcagctggataactttatcaatcctaagaaagcctacccggttatcgcgacgacctccgagttgatgactaccggcgtggatgcccaaacctgtaaattggtcgtgctggatcagaacatccagtcgatgaccaagttcaaacagattatcgggcgcggcacgcgcattaacgaaaagtacggcaaactgtggttcaccattctcgatttcaaaaaagcgaccgagctgtttgcggatgagcgctttgacggcgtgccggaaaaagtgctggttgtgaagcctgacgatatttcagacgcggagtctgattttaatgaacggttggatgccgaagagaacacagaagagacctacggcgctgcgcatgaagaaccggcggaataccaggccaacccggataaacctgcggggaacggtgaattccatcaggatgacgacggcaaaacccgtaaattttatgtcaatggcgtgaccgtcagcgtgctggccaaacgcgttcagtattacgatgccgatggcaagctggtcactgagtccttccaggattacacccgtaaaaccttgctcaaagacggtgagttcgcctcgcttgatggctttgtgcgtaaatggcaggcggcaccgcgcaaacaggtcattatcgaagagctggaacaattgggtatcctgtgggatgtgctggccgaagaggtggggaaagatctcgacccgtttgatttgctttgccatgtggtgtacggtcagccgccgttgacgcgccaggagcgcgccgccaacgtgcgtaagcgtgactatttcaccaaatacgccgaaccggcgcagcaggtgctcagcacgctgctggataaatatgccgatgaaggggtacgggaaatcgaggacgttcaggtcttgaaactgaagccgttcgatacgctggggcgcccgctggaaatcatcaaaacccgcttcggtgacaagcaggcttacgaacaggcggttaacgaactggaaaacgaaatctatcggttaccgccgcgtttcgcctga

SEQ ID NO: 429172 - DNA, 249 bp, Serratia marcescens
atgagcggcaacccattctacgacgcagcaaacgccgtcatcgctcaatacgacaagcgcatgcagtacatgaaaccagatcgcgcggtcggcgaatcggcgaatgcagtgatcaatctcggacgtatcgcagacgccgcacgctatgccggtcaccctgctgccagcatcattatcgagaacgccgcgaagtattggcagtgctacggcaaaaaaccggcgccattttcagaggacacaccagcatga

SEQ ID NO: 429173 - DNA, 1128 bp, Serratia marcescens
atgggcgagttgagcggaattcagtcagatttagcccagttagtcagactggtgatcactgaacagtatgatgacgtgcgcctctatgtcgcacgcttggttcgtaagtaccgtgagtctatgccagctctttccgaacaattggatttgtatttacgaagcaaaccacagaaacctacccaaggtttgagaaaagctaacaccccggatctagcgccgcagactatgcctgttgacgaagattctagattgaccttgttgaaagctccatcggataaggcgcagatttccaaaccgatgctaacaagcagtatcgaagatgcattggatcaactcatccttgagcgcaaaagtattaagaaacttgaggatctaggtctaatgccgactcgctctgcaatctttgtaggtcctcctggtgttggtaaaacccttacggctagttggcttgcgcagaaattaggtgttcctttctatgtgcttgacctgacagcggtgatgagtagttacttaggcaaaagtggtaataacttacgagcggctctggattttgcgaaaaaaggtccatgcgtattacttttggatgaaatagatgcaattgcaaaaaaacgtagcgatgattcagatgtaggtgaacttaaacgcctagtgactgttattttacaagaggttgatgaatggccgtcatcgagcctacttcttgctgctactaaccatgcagaactgatagatccagcgctctggcgtcgatttgatcttgtcctaaattttgataaaccagatcaagctgctatacgtgacgcagtaacaagatttttggggcctgattacgccatttttggacgatggatggacgttttggccttagcatttaaagacgagtccttcagtaatatagaacgttctataaatagatttagacgctctgttgctctaggtatcgcatctgatgaagaactaattgaagagttcataaaagggaggttatctgagcttgacagaaatgaaaggatagagatagcagttagtcttactaaaaactctaagttacctcagcgcgcgatatcagatttgaccagcgtcagcagggatacgattaggaagtatcgttcagttaatattgattag

SEQ ID NO: 429174 - DNA, 2226 bp, Serratia marcescens
atgccaaaaacaaactttttaattggtagaggtgaattgttaacccatgacattcccggcccaagaagaagaatggataaatctgaggtatacactttagctgaagcaaagcaaagacttgtacctcaggtgaaatctacaattgaggcttttgataccttaccgtcctccgcatgcccgaatgactatgcggttgcgaaactcaccctaaaccctagctacattgcacgatcatttttcccgtcagcgctgttaaaggatacggggttagagtctatcggcagcaaaaccgtaaaaatcactcctgacagttggaaaagaaaaatagaagttactgaatacccgacaactcagatatttgttgcaggtaaaaggacatcattcactaacttaaagaaatggatcgatgagttaaaggtaaactctgatgaagcaattgactttgcaagagtagagcaattccagccttatctaccagaagagagaattgtaagcaacttgccggataataactcatactttgaagttggcattcatttattggccgatgacggtcgtgacttcattcaacaacatttcataaagtatgccacatcattaggtattactgttcataatgaactggcctttaccgcaggaacgctttggttcctaccagtcaaaggtcatattacagaaatcaataaattagctaagtttacatttgtacgggtaattcgacctgtaccaaagctacgtggcatccgtcctatgcgtcgagcagggggagctgaggcgcagtgcattcttccatcagaagggccactatccccagaaattagggttgcgattcttgatggtggattgccagaaaagcaccctatttcgccatggctgagatcgtatcgagtaatggatgatcatgccgacgatgatccggatgcacttgatcacgggttggctgtctcctctgcatttttattcgggccaatcaataccaaaggagaaatacctcgaccgtattcctccattgataatttgagggtgcttgacaataaaacatgtgaagaagacccattagaactataccgaaccttaggctttatagaggaagtattgctttctagacaatatcaatttttgaatcttagcctagggccagatttacctatcgaagatacagatgtccacgcatggacctctgtgatagacgatttattgagtgatggcgatacactgatgaccgtagcagttggaaacaacggcgaaagagatcgtcaatcgggtaatgctcgaattcaagtaccctctgactgtgttaatgcgctcgctgttgggtcaagtgactcaactaatgacagtcaatggaaaagggcttcatatagtgctatggggccaggaagaagtcccggtgtcatgaagccggacctagtggcttttggtggtgaaaccactgaatatttccatgtgcttagtaagggagaaaagcctgtagtatcgccagaaagaggaacgagtttcgcggctccttacgctttgcgatctgctgtgggaatacgttctatattgggtagtgaactaagtcaacttgctattaaggcattacttattcatgcctccaaacctcttgaacacccatgtactgaggtaggttggggaaaactaccggaaaatttaagtgaagtgattataagcccagatggagttgccagaatcgtctaccaaggggaattaaaaccgggaaaatacctacgagcgccggtgcctattcctgatggcggattaaaaggaactgtaaacctgacagccacattctgttatgcaacggctacagacccgcaagactcagcctcttatacaaaagcagggttagaaatatcgtttaggccaaatgatgccaaagtaaaagaaggtagcaaaaatgcagacactgccggtttctttgatttgaagaagttttcaacagaaagtgaacggcgttctgacatggggaaatgggaaacagtgttgcatagcacaaaaaacatgcgcggttcttcattaaagaatccagtgttcgacattcactataatgcgcgcgaagctggagcaagcatcgttagccacaaagccgacaaaattaaatacgcgcttatcattacagtacgagcggcaaaacatcaggatctctataacgagatattgcgcgcttacaatcagatactggttccaattcaacctcaaacatctattaccatcagaccgtaa

SEQ ID NO: 429175 - DNA, 1722 bp, Serratia marcescens
atgacggttcaggaaacattcactaggcaccgcgcacgacagctttactggcaggggtatccgccggcggaaatcgcgcgcctgatgggtatcaaccagaacacggtttacgcctggaagaagcgcgacgaatgggatgaaacgccacctatccagcgcgtcaccacctcgatcgatgcgcgcctggtgcagctgaccggcaaggataaaaagagcggcggcgacttcaaggaaatcgacctgctgacgcgccagctgaagaagctggacaacggcacgccagccacccagccgaaaaagaaggtgcgcaagaagcaaaacttcttctctgagtcgcagatcgcgcagctgcggcagaacatcctggggtcgctgcactggcaccagcaaggctggtatgacaatcaccaccaccgcaaccggatgatcctgaagagtcgccaggtgggggcgacctggtattttgcacgcgaggcgctgatccgtgcgttatctgacgatgtgaagtacaagcaccagctcaaccagatctttctgtcggccagccgccggcaggcgtatcagttccgcagcttcattcgttcggccgcggcggaggtcgacgtcgagctgaagggcggagatatgatccagcttttcaacggcgccgagctgcacttcctcggcacgtctgcagcgacggcgcagtcctacaccggcaacctgttctttgacgaatttttctgggtgggccagttcgccaacctgaaaaaagtcgccggcgccatggcgacgctgaaagggctgacgcgtacctacttctccacgccatcggcggaaagtcatgaagcgtacccgttttggacaggggaggcgttcaacaaggggcgcgccagcagtagtcgcgtggagttcgatacgtcctggaagacgctgaacagcgggctaatgtgcccggacaagatctggcgccagatcgtcaccttgcaggacgccatcgatcacggctgggatttgaccgatatcgatgaaatccgcgacgagaacagcccggaggaatacgacaacctctacggctgccagtttatccgcaacggcgaatcggcctttgactacaacatgctgctgacctgcggcgccgatggttatgacgactggctcgactggaaaccctatgccatgcggccgctggccgatcggcctgtctggattggctacgatcccaacggcgccagcgggaagggtgacagcggggcgatttccgtcaacgccgtgccgctggtcgccggtggcaagttccgcaccatcgagacgcagcgcatccgtggcatggagttcgaggcgcaggccaatctgatcattggcatgctggatcgctataacgtgcagcatatcggcattgacgggcaggggattggcgaggcggtctggcagttggtgaagaagaagtttccggcggcggtctgctaccagttcaacccggccagcaagcgcatgctggtactgaagatgcagcagctggttcgcggcggtcgctgggagttcgaccgcggggagcgtgacctgatcacggcattcagcgcggtgcgcaaagtggtaacgcctggcggggttatcacctatgacaccgaccgcagccgcggcgtcagccatggcgatcttgcctgggcgacgatgctggccattatcaacgagccgctgggacaagatggcggcagcacaatgacggttatggagtattaa

SEQ ID NO: 429176 - DNA, 462 bp, Serratia marcescens
gtgaaaaaagccgaactgctgcgcgacgcgctgatcgcggcctgcgactggtgcaaggccaatcctgaactgttcacggtatgggtggaaaaaggccatatcgagatccaggccaccggcgaaagctcgttcatgtacgtgtacccgatccaggtgctggcaatggacttttccggtcaactggatgacctcatgctgccgctgctggcttggatttgggagaatcagcccgacctgctactgaacccggacagcaacaaaaagattgagtttgacgccgatatcgtgagcgacgacagcgccgacattctgctgaaggtgcctgtgtgggagcgcgtgatggtcactatcgagaacggcaagcccgtcgcgcagcaccttgcggaagacaagccccgcatcaacggcggcgactggcaaatcgtattcgatcctgagagcggcggggagctggtgccatga

SEQ ID NO: 429177 - DNA, 1044 bp, Serratia marcescens
atgactgtccgtaagattcctgctggcggatgggtatgcgagctatatccgaatggggctaggggtaagcggatcagaaaaaagttcgcaaccaaaggtgaagccttagcctttgagcaatacaccatacaaaacccatggcaagaagagaaagaggatcggcgcacagtcaaagaactcgtggactcatggtatagcgcccacggcataaccctgaaagatgggttaaaacgacaattatccatgcatcatgcttttaactgtatgggggaaccgctggctcgcgatttcgatgctcaaatgttctcccgttacagggaaaaaaggctgaaaggtgaatatgcccgttccaacagagtgaaagaggtttcccctcgcacgctaaacctcgagttagcctattttcgggccgtattcaatgaactaaaccgccttggtgagtggaaaggcgataatccgttaaaaaacatacgcccttttcgtactgaagaaatggagatggcctggctcaatagagatcagattgccctcctgctggctgaatgccaacgtcacgagaatactgatctcgaaaaggttgtaagaatttgtcttgctaccggcgcacgctggtcagaagctgaagggctcagaaaaagccagctgtcaaaatacaaaatcacatatatcaatactaaaggcaggaaaaaccggacagtgcctatcagtaaagatctgtacgattctctacctagccagaacaaaccacagacggggctttttactagttgctatggagcgttccgagctgccctagaaagaactggcatagaacttcccgcgggccagttaactcacgttctacggcacacattcgccagccacttcatgatgaatggaggtaacatactggtactacaaagagttttaggtcatacggacataaaaatgacaatgcgctatgctcactttgcccccgaccatttagaggacgcagtacggttaaatcctctggctacaaatggcgatagaatggcggtagaactggcacatgatgtcatatga

SEQ ID NO: 429178 - DNA, 579 bp, Serratia marcescens
atgagtatcagagagactagttttgaacctatcaaaatcctcgagcgcatctgcgatgtctatggttttacgcagaaagttcagctagcccatcactttgatatttctgcaagttctctccaaaatcgctatacgagaggcactatctcttatgactatgcagctctctgctccatagagactggtgcaagtcttaaatggcttcttactggtgaaggctcgaaatttgagaataaaaccacggaagaatccccacttgagattgagttattcactcttgaggacggagagctaagagacgatgaccgtttgagcatcgatcctaactttttccgtaagaagcctactgacggcattgcagttcgaaccgatggaaagttgcacttcatagataaatcagcctcgctagcagatgggacttggctggtagacattgagggggcaattagcatccgagagctaaccgtattgcccggtaaaaagctccatgtggctggcgggaaggttccatttgagtgcttaactgatgagatccgcatacttggacgtattgctggcatttacagcgaggttaactaa

SEQ ID NO: 429179 - DNA, 264 bp, Serratia marcescens
atggcttctgagatcgcaatctacaaaatcgcctcccccattgtgacgttaaaggaattcgcggagctagaaggcgtttctactcgtactgctcgtcgctggagtactggtgaaaccccgtgtttacctattgaaccccgcgttatccgtaaaggatgcaagaaagcaggcggcccgatccgtatctactacgcacgctggaaagaagagcagttgcgtaaagcgttagggcattcacgttttcaactcgtcatcggtgcgtga

SEQ ID NO: 429180 - DNA, 225 bp, Serratia marcescens
atggccgacttgatggactacgaacaggagcggcaagcgctggtactaaacgcgcagatcgccaacgcacgcaaatcctccgcgctgccttctgctttcgtttgcgaagaatgtgacgcgccgattccagccgcgcgccgcgctgccgttcccggcgttgatacatgcgtaagctgtcagcagatccgcgagacgcaaaatcacctttacgcggggaaggcatga

SEQ ID NO: 429181 - DNA, 282 bp, Serratia marcescens
atggaaattaaaatcggctctgagtttgttatcaccagcgataacctgcaattcattcttaatacggtgaaggtagggaaaacaggaaaaagcgaaggtcaagagcgttacgaggctatcggctattaccctacgattaaccagcttgtgaacggccttatacatcacagcgtccgtaattccagtgttaatagcattgcatcattgggcgcggaaatcggccgtattggcaacctgtgccaagaggcttttgcggtgtgtgaggctgcaaatggacaataa

SEQ ID NO: 429182 - DNA, 417 bp, Serratia marcescens
atggacaataagctgagcaagccggttatgtattccataacatgcaatggcgttgttgaggagattggtggagatgcgcaggggttttcgcgcgaagaggttcaggcagagttagatagctgggatgctgtagtgcacggagtttattcagtatccgccctctactcgcaagagtacgtctccgctctaacgcagcgcatcgaagagctggaagccaagctggccgcgccggtgcggttgccgctgccgtattcgcctgatccatggatgtcaccagacccagatggaacatggctggataaagaagatgtgaaaaaatccattcgcgccgctggctttgttgttgagctgtgttctgcttgcaatgagcgttactgcggcaactgcgcccacgccaatgacgcgaaagtgcaatga

SEQ ID NO: 429183 - DNA, 894 bp, Serratia marcescens
atgtcacaacttgatttcggcagccagaaccctttcgaacgtgcgatttccccttttgaggagatggcggcgtacgaagcgctgtggaccgaaaaaggggcgacgttcaaaactatcgccgataagttccgtcaggctccgcaaggcgcggttccttctgatttagtctccgacagcacgattgcagccttcaagaccagacttaaagaaatcatgtcacgctacgctctcgagaatatcggtatccggattcatggtgctagcgaatatccagagaagctaagagacgctcatcatccgatcgaagttctctactatcaagggtggtgggatctggtcaacacccggtcagtcgcagttgtcggttcaagaaaagtatcggaagaaggcgctcgccgtacccgtcgactggtgaagtgtcttgtggaagatggctttaccattgtctcagggcttgctgagggtgtggatactaacgctcatcagaccgcactcacgcttggcggaaagaccattgccgttatcggtacaccgctttctcacaattatccgaagcagaatagcgagttgcagcgcaaaattcgtgataactatttgctcatcagccaggtgccattccagcgttatctggatcaggattatcgcagtaatcggattttcttcccggagagaaatatcaccatgtctgcgctgacagaggccacgatcatcattgaagcctcagaaacgtcaggtacgctgactcaggctcgtgcggcgctggctcagggccgtaagctattcatcctggaatcctgtttccataacccgtccattacgtggcccgcgaagtttgaggcactgggcgctatacgggtgaaggattacgaagacatcaggaaaaatctcgcatga

SEQ ID NO: 429184 - DNA, 651 bp, Serratia marcescens
atgacattcaggttgacacagattgatgagttgatccgcgggcagcattatcaccttgacgctggtgacttatgctattttttcggagaatataccgccagacaacacgcagcctacagcgaaaccaatcagttgatcatgaacctcaagaagggtaacgagcgtcgcgggttgcaggactactactataaaggggttgcaattaatcgcgttgcacaaatgatcacccgcacaattggtaatattagtgattttacgtttgtccccgtaccgccttccaaatgccggactgacgcagcctatgatgacaggatgacggccattcttcgtacggctcaggctatgaactcgtctctggatttcagagagctggtactgcagaaccagtcaacgatcgcttcccatgcttcaacagcaagccgcccgacacccgatgaaattatggtaaactatagtcttgatgccagtctgcttgcagggatcagaggtaatatcgtcatttttgatgatgttcttactgctggtagccattttaaagcgatgaaacaatttatacgccaacacttacctgaggcaagcattttgggtctattcgtggcgcgaactgcacgcgaggcagatgtaacaagcctatttgatcttgaagtctaa

SEQ ID NO: 429185 - DNA, 582 bp, Serratia marcescens
atggtggcaagtatagacgccaataacggaggtgttgcagttagtaacacgggtaaaggtactgtcaatgtctccgtaacaacacagttagctcagttgccgtcttttcttaccccattgcttgtaagaatcgttgagcaccataaaccgaaatatacaccagatttgatcttggaaaaatcgcctaaaattgaagataaaataacgtttaataacttaatttatttttctgaggatgttagattaaatagtgaattcatggctattgttgaagatgcgttgtctgcgatcgataatgagtcgccgggagcaaaaggggcaattcagtggacaatcaatcgtagttacaaagaaattagacgaactcttttaatgaaaaatagagttaagatgtctgatgaagaagaggtgcggagggttatttctgataattcagattttatattccaaactgttatggaagaatttttctcagtaaatctagatggtttaaattgcaatcgtgagtcattgatggcagcaaaagagattttagtttgctatggttttatcagttgtatgattttggatgagccaaaataa

SEQ ID NO: 429186 - DNA, 1695 bp, Serratia marcescens
atgcagctagtttcacttaaagtataccataatggtgatgttattagacatatgacctttaaagaaggtgtcaatatcattactaatgttggtgaaggtggtaatcaaattggcaagagcactgctttaagagttattgcattctgtctagggtcagacggtaaggatatgtggaaggatccagataataacaatgagaatattgaagttaaaaacttcatcgttaacaatgatgtgctttttgaactgagaataaaaaataccattgagcatattttgattagaaagttatatgaagttgaacagaaaagagggagggtgataaaaacagagtgttggattaatgatgttcatttgacttctttgaatgcctataaaaaagagctgtcaaataccgtatttggttattctcaagataatccatcgtttaactcaataaagagcaagttcacgagaatcgatagaagtacatcgaataattcactgaggtatcttagcctgtttacttctgacgcggattatacattgatttactctgctctttttggatttgaggggcatagttatttaaagcaagacgttcgtataaaaaacgaggctgaaaaacataagcggagaattgatgctattctcgatggtagagacttgatggaagttagtgatgcaattaaagatattgatatcgaaattgagcattacagagcagaagagtccgaagttgatatgtcagctgttcaaggtaaaattatcgatgagttgaagcatgctagaggggaaatagcagaggtctcttcagaaatagcagggctagaaactagattgatctataataatagaactattgataaatatcatgagaatatcgtttctattgatctatctaaagtacatgagatctacaaagaagctttaggatatgtaccggatataaataaaacaatagaggaaacaataagtttccataatgcgatttttatagagaaagctaatcaatcagaaaagagaaatgaaaaactaaaaagtgaaattgctctaaagaaagaggtattgtctgagttgatgctgattgagcaaaagataattaaggagctatcctctgatggtcaattgggcgggatcgttttgattgaaaaggaaattcaatctcttagtgaagatcgtggtcggttagcttatgtatttgatgaagtgaaaaaacttactagacgtttaagagagttatctttagagcttcaagaggttaaagataaaattgaagatttaacaaatagccttaaggggaatattgatagatttaatgagtatttttcgcatctcacacggatgctttttaaaaagcatgcgaattcactaaatgtaaatttagatgaaaaaaatgatctgagattctcaattgttaatgcagataagaatactggtgatggggctccaagggcagaggctatggcttttgacttgtctattgcagagtatatgagagatactcgtgctaaattgccatactttaccttgcaagattatttggagtctgttgatgaggataagttgaaaattttacttgactattcaaatgaccataaggtccaagtcgtattggcggttcttaacgacaagcttcaactattatctgaagagtttatgaagaaaaacacaatattagaactatctccagatgataagttttttaaaatatga

SEQ ID NO: 429187 - DNA, 1035 bp, Serratia marcescens; identical to SEQ ID NO: 425312

SEQ ID NO: 429188 - DNA, 2712 bp, Serratia marcescens
atgtcacacaccactatgctggcattgcaggggctgtcctgcatgaactgcgcgcagcgggtgaaaaaagccctggaaagccgcagcgatgtcgaacaggcggacgttaacgtgcattacgccaaagtgaccggcgacgcaccggacagcgcgctgatcgacagcgtgatcgccgccggttatcaggccgaagtcgcgccgcgcgccgataccgaactgcagctgagcggcctgagctgcatgcactgcgtcggcaccacccgcaaagcgctggaagcggtgccgggcgtgttcgccgccgacgtcgctatcgacagcgcgaaagtgtacggcgatgccgatccgcaggcgctgatcgccgcggtggaagatgccggttatcacgccggcgtagcgggcgccgccgccccaaaaactgagccgttgactgacgcaacaccttcgttgccggacgttcagccagcggcgcaatctccccttccggcaaccgacggcgcggacgacagcgtacagctgctgctcagcggcatgacctgcgccagctgcgtcaataaagtgcagcaggcgctgcaaagcgttcccggcgttgagcacgcgcgcgtcaacctggcggaacgcagcgcgctggtgaccggcgccgccgatgcgcaggcgctggtggcggcggtggaaaaagccggctacggcgccgagatgattcaggacgagaccgaacgccgcgagcgccaacagcagaccgcacgcgccaacatgaagcgctttagctggcaggcggcgctgggtctggcgttgggtatcccactgatggcctgggggctgttcggcggcagcatgacgctgacgccggaaacccagcgcccctggctgctggtcggcgtcatcaccctggcggtgatggtgttcgccggcgggcacttctaccgcaacgcctggcgcgcgctgatgaacggcagcgccaccatggataccctggtggcgctcggcaccggtgccgcctggctctattcgatcgccgtcaacatctggcccgatttcttcccgatcgaggcgcgccacctctattacgaggccagcgcgatgatcatcggtttgatcaacctcggccatgcgctggagcagcgtgctcgccagcgttcttcgcaggcgctggagcggctgctggatctgacgccgcctaccgcacggctggtaaccgacgacggcgagcgcgatatcccgctggcggaggtgcagctcggcatgacgctgcggctgaccaccggcgatcgcgtgccggtcgacggtgaaatcgtgcagggcgaagtctggctcgatgaagcgatgctgaccggcgaagcggtgccgcagcagaaaggccccggcgatacggtgcatgccgggacggtggtcgacgacggcagcgtgctgttccgcgccgccgccatcggcagccaaaccacgctggcgcgcatcatcaaactggtgcgccaggcgcagagcagtaaaccggcgatcggccaactggccgaccgcgtctcggcggtgttcgtgccggcggtggtggcgatcgccctgttcagcgcggcgatatggtacttcttcggcccgcagccgcagctggtctatacgttggtgatcgccaccacggtgctgatcatcgcctgcccgtgcgcattgggattggcgacgccgatgtcgatcatctccggcgtgggccgcgcggcggagtttggcgtgctggtacgcgacgccgacgccctgcagcaggccagccagttggacaccctggtgttcgacaaaaccggcaccctgaccgaaggaaagccgcaggtggtggagatcctgaccttcaatcaggtcagcgaacggcaggcgatcggctgggccgccgcgctggagcaaggctccaatcacccgctggcgcgcgccatcatggaacgcgccgccgggcaaacgctgccgcaggtggcgcagttccgcaccctgcgcggcgccggcgtcagcggggagatcgacggcgtgcagttgctgctgggcaacgccgcgctgctggagcagcatcaggtcgcgatcgccgaactggaagcgccgatgcgcgaccaggccgaacgcggcgtgacaccggtgctgctggccgttaacggtaaaccggccgcgctgttcgccattcgcgatccgctgcgcgaagacagcgtcgcggcgctgcagcgcctgcaccagcaggggtatcagctggtgatgctgaccggcgacaacccggtgaccgccaacgccatcgccaaagaggccggtatcgatcgggtgattgccggggtgctgccggacggcaaagcggcggcgatcaaacagctgcaggcgcagggccaacgcgtggcgatggtcggcgacggcatcaacgacgccccggcgctggcgcaggccgacgtgggcatcgcgatgggcggcggcagcgacatcgccatcgagaccgccgccatcaccctgatgcgccacagcctgcacggcgtggcggatgcggtggaactgtcgaaggccacgctgcgcaacatgaagcagaacctgttcggcgcctttatctacaatacgctgggcatcccgatcgccgccggcgtgctctacccgctgaccggcacgctgctcagcccggtggtggcgggcgcggcgatggcgctgtcgtcgattaccgtggtcagcaacgccaaccggctgctgcgttttaaacccaggaagtga

SEQ ID NO: 429189 - DNA, 591 bp, Serratia marcescens
atgccagaacgtgatatagaactgtttattcgtgattacgttaatgatatcaaagccggcagcgccgcgctatttgccggcgccgggctgtccatacccgccggtttcgtcagctggaaagagcttatcggtgatatcgcttatgaattggggctggatatagaaaaagaaagtgaccttatttctctggctcaatatcatctcaatgaaaaaggcaaccggcataagataaatcaaaaaataattacagaattcgctgagcaagcggaagaaactgaaaatcatcggatcattgccagattgccgatagcgtcactctggacaaccaactacgacgatctgattgaaaaaacctatgcccgttataatcgcgtctgcgacgttaaaaccacgccggaaagtctgaccaacaatattcacaagcgcgatgttgtcttatataaaatgcatggtgattatagaacccccaaccaggcgattatcacccgcgaacaatacgaaacttactcccgtacacaccttcccttttatcaacatgctgatggcggagttgaccgccaaaaccttcctgtttatcggtttcagctttga

SEQ ID NO: 429190 - DNA, 261 bp, Serratia marcescens
atgaaaaagctgatcgtggtttctgttctggcactggccagctgctcgaacgagccgccggcgccgtcctacgttgaagtgaaagtgccggtggccgtaccatgcaaaacggtagacgttgcgcgcccggcgttcgcagttgaccagttgcctatcggtgctactatcgacgtccagatgcgagcgctgcgcgccgagcgtcaccagaggattggctacgaaagagagctgatagctgccaatgaggcgtgcaagaactga

SEQ ID NO: 429191 - DNA, 2601 bp, Serratia marcescens
atgaccgtatcaactgaagtcgatcgcgaggagtacaccgggaatggtgtgacaacggactttgattacagatttcgcgtgttcactgaggatcagctttctgtgtcagttgttgatttgtcagagaatatcatcaacctaaccctgaatactgactactctgtcaccggcgcgggcttgcggtcgggtggcaaagtgaagctggcaagcccgctcgctgcagggtggaaaatcaatatcgagcgtgatttaccgcttactcaggaaacggacgtgcgcaaccagggcaacttcttcccggaagtgcatgaggatgcctgggataagctgacgatgctgatccagcaaacctggtcatttgcatcattggctctgcgaaagcctaactggttggcgaagttctatgatgcccaaggcaaccgcatctctaaccttggcgatcctgtggctaaccaggacgccaccacaaagcgttatgttgactccgaaatcgcagacgcggaagccggcgcgtctgatgccttggcgcgtgagcgtgcagaacgcatcgcatctgatatcgacatccgtactgaaaccggtgtcgctctggggaaaactgtcaggttcccgtacgcgcagccaatcctgaccggagatacggcaaacaaggctttcgttactgatgcccaggggattgttcatcttgttaatcttgacgatgcgacgcgcaccgacctggccgccgatcttgcttctcgtggtaatccaggtggggccggtttgataggtcacaagggaacaacgcttgccgagatcctcaatctgatttcgtcggttaccgttgagcctatcaccgatgcggggatgtactgtgcctggccccaggggaaggtgttcagccacaaaaacaaggcgtactgcctctataacgtcggcgacacccacagcaatgcctcgttgagcgtctatcagcagtttacagaggatggttctgagtggtcgcggccggcgccgcgcttgtcaaacactgattccgttacgtggccgcagggagtatctgcctggggggctggttctgacggtgctaatatttggatggctgctcgcttccgtcgcgtttcagacgaatcacaaagcaagtgcgttctctacaaaagcaccaatgatggctcgacctatacgccggttcttgatccggtcccattgtatgactccaccggcaaagctcctgttctcatgcattcatttgccgtgcttcccaacggcaacattgctttcgggtatcacttctacgatggcgaagtagggattgttcagttcaacccgaacaacctggcatcaatgacgaaggctgtgattttcactgccgctgaaatgaacaacacgccaatgctcgttgagccaactatgcaggtttacggttcgcgagttgtcgggtttcttcgtacccaaagcaatgcaacgcgctcggccgtcatgtggtacagcgatgacagttgccagacttttcagatacgtgagatcgacggcgtgccaaatcaatcgccggtttcgatcacgtcatataacggcaagacctatgttttctactgcggcagatatcgtgacggcaatacaaacagcgcgcgaacaaacagcccggtgttaaccatgcgcgttggaaacgatgatgacgcactaaatctgctctgggaaaacttcgtcgaaattcccatcgcagcagtgccaagcatttacaacgatgttggcgcatcagcaaccggtgttcaggatgtttgcgtgcgcggcaccaagctggtggtttgcctctcgatgaacgttggtagcaatgttgaccagtctgacgtttgttctgtgaccatcgatcttggtgagcctcgacagaacaaattcttcctcagcgagggcgcatttaaaaagcctcgcgcaactgactacccatctaactatcgcttcggcagcgtaaatattgtcggcctgggcaatacctccgcgacactgcgcatgaatggacaggtcattgttcaagacttaacggatgcagtgagatttggctcgactgttgccggcggcagtaaatcacatgtgtggaataacggccctgcgccagcctacatcgatgttgcggccagcagcactaacgtgagcatttcagcctactcgggatatgcgcggctgcgcgctggacgcggcccggaggggtacgcctctattgagctcaaccgagatacgaaagcggtcactgttagcaaccccaataacgttggcggtttcgggttaacgcccgaggggtacatcgcactttcatgcaactggcagcacccgatggttctcgacggcggatccggcgggaaaatatatctctgggtttccggcacaaacaacatcatgaagcacagcatgacgccgcctacgtcggataacgacggtgagtttttggtcccgaacaaaacaaccactgttgcgggtcttggtactggtacggataccgcgcgatatgcatacgcaacgaacggtcgaaaggctggggagggtgcaggggcgggaaccgggacgccggtgtattgggacggttcagtatggcgcgtatatcgcgatgactcgatcgtagcggcttaa

SEQ ID NO: 429192 - DNA, 249 bp, Serratia marcescens
atgaagaggtacagctacccggccagcaggatgctggagaaaagcgttaacacgcgcgaagggatcgcgggattagctaaggcttcactactggaaacactgctgaaggaactcgatgaggacggctcagagataggcggtgctatgctggaactgaatgctttagtgaactatgtcacacaaaatgaaaaaatgaaggaacaaatcaaaacacattcgcaatttattactcaccagttggaacaataa

SEQ ID NO: 429193 - DNA, 741 bp, Serratia marcescens
atgacagctcaaaacgcacctacagttttctctttcgactcaaacgtaaaaatcaacgtcatcaccagattcggcgcgccatggttttttgctgctgaagtctgcaaggcgatcggaatcgctaaccatcgagacgcagtgagaaaactggatgatgatgagaaggccgtcggtttaaccgacacccttggaggcgagcaggaatcagttatcatctccgaatccggactctacacgctgatcctgcgctgccgcgacgcggtgacacctggcactatcccctaccggttccgcaagtgggttacttccgaagttctgccggccattcgccagactggccagtaccagcaccgggcgccggagacgttatctgacctggccggcactggaaccacgatgacagttcgcgacgcgcgccgcggtaagaagaagaccagcggcaagaccgccagccgtatcgccgatgcctgcgtgccggttatcctggaagccatgcgcgaccagtatcactacgccaacacgaacgttggaccggaagaagtgatccccgccctgctcagcgacgagcgcaacctgcagatcaccgcgttggttgaagagctggccgacaatggccacaacgtcgccggcgtcgtgcgagaagtcgaggtgatgcgctactatatcctgcagtgcgccaagaacatggccgcgatcgccacgcacgcagcgttcatcgcgaagcagacgaaggtgcagtaa

SEQ ID NO: 429194 - DNA, 456 bp, Serratia marcescens
atgtctagctatatatcagaattaataaatgacaagacaattattggggcttgcattggtgctattttttctataattggcgcctttgttgcttatggattgaatttgaagttagagagaaggaagttaataaaagacaagaaagagtccctgtttaattacaaccaatcactcttaataataattgccgaaataaattcttacgacagaagattttcaagtgatatctcatcactggcaaaatcattggaaaataaaaagaacgaagaaaaaagcaatataaaattaatgacaaatctatacttcaaacaccttgataacgaattctcaaccgccttctttgaaattgattcaattttcgagcaggttaagtttaataaaaaccctggaattgacgcattcatttctgcaattgggaaattaaccaacctgtcagataaaatactaaagatataa

SEQ ID NO: 429195 - DNA, 567 bp, Serratia marcescens
atgtgtgagccaacaacaatccttgcaggctctgcgctggctctcggtgcagttagcgcttatggccaataccaaacagggcagcaacaggcgaggatagccaacgccaacgcagatgcacaagagatcgccgcgcgcgacacgattaatgcgggcaatgatgcggcctatcagcagcgccagcaaactcggcagttacagggtcagcagacagcagccttcggcgccggcggtactgatatgaccagcggcagcgcgctgaacatcttcggtgacaccgcggccggaggtcaactggatgcactaacaacgatcaataacgcagagcgccaggcggctggccttaacttccaggctggtgttagtcgcgcccaagggcagatcgaccgcaacgcggcaaaccttggagcagcaacgacaatcctgaattcctcacttaccgcatatggcgcttataaatcgtctggcgcgctggataagccagctaccaaagccggcagtggttccagcaacatgtttagcaatgcccgcagcagtcgctacggctctaacgcattcacgttttaa

SEQ ID NO: 429196 - DNA, 474 bp, Serratia marcescens
gtgcgcaaggttgaagttgttgaagccaccttggaacacgttgcggcgctcttgccgcacgttcgccaggctgacgccgatgagttcgatgcgatgagcggcaagacgccggcgcaggttcttgagctggcgctgcgcacttctgcatttgctttcgccgggctgatcaatggcgaggtggtgaccatcttcggcgtggcgccgcggtcaatgataaccggctcaggggttccgtggctggtgggttctgacctgcttgaacgataccaggccactttcctccgccggtgccggccagttctgcgtcttttcctgcagcactatccggagctggaaaactacgtcgacgcgcgcaataccgctgcgaaatgctggctgcactggctcgggttcaccatccatgaagcgcagccagttggccgtgccgggcttccattccacagatttgaaatgagacgaggtgatcatgtgtga

SEQ ID NO: 429197 - DNA, 984 bp, Serratia marcescens
atggctattaaaagcaccaacgcgctgacgctggcagaccacgcaaagcgcatggacccggacgggaagatccccgcaatcgttgagttgctttcacaaaccaaccctattctgaccgatatggtttatgtggaaggtaacttgccaactggtcaccgaactacgatccgaaccggtttgccggctgctgcctggcgcctgttgaactacggcgttcagccaagcaaatcgaccaccgcgcaggttactgactcatgcgggatgcttgaggcgtatgcagaagttgataaagcattggccgatctgaacgggaataccaatgctttccgtttatctgaagatcaggccttccttgaggccatgaaccagcagatggcagaaaccctgttctacggtgacactcgcatcaacccacagcgttttaccggcctgtccgcgcgttacaacgacctgaccgccaagaacgctcagaacattatcgatgcgggcggcactggctctaatctcacctcaatctggctggttgtgtggggcactaacacagtgcacggcatcttccctaaaggccaggcggctggcctgagccacaaagacaagggcgaggttactctcgaagatgctgagaaaggcaagtatgaaggctaccgcactcactacaagtgggacaatggcctgactgttcgtgactggcgctatgtggtgcgcattgccaacatcgatacgaccaagctgggcgccgacgacggcccgaacctggccacgctgatggtgcaggctctgcatcgcatccctaacctacagatgggcaacgcagtgttctatatgaaccgcgatgcagctgaatacctggacattcaggcaactgaaaaagcctctctggcgatcagcgttaaagaaaccgaaggcgtgtggtggacttcgttccgcggcgtgccagtgcgcacctgcgatgctctgctgagcactgaatcacaggttcaataa

SEQ ID NO: 429198 - DNA, 264 bp, Serratia marcescens
atggcaacacaacgccagaaattgatccggaatgacggcggcgtgcaagtcgttaaggttctgagcggcggcggttcttccgtggcttggggcgacatcaccggcaaaccaaccacattcgcaccgccgccggcaactgcttcggtagtcggcggcgtcaagcagggcgcagcggtggctaacgcagcggcagccccaacccaggccgaatataacgcactgctggcgagcctccgcgctgccggcattatcgcaacaagctaa

SEQ ID NO: 429199 - DNA, 192 bp, Serratia marcescens
atgaccaaagcaaaaaccgaattcaacccatccccaagtgaaatagcaatggaggctgcaacgcgataccacgccaagcttgatgcgctgcgcagcatacttatcgaccgcggcggccatgagagcaaggaaagcctggaagcgattgctgagaatatcagtgcagcgttcgacaagattaagctgttgtga

SEQ ID NO: 429200 - DNA, 555 bp, Serratia marcescens
atggcgagagacggtaagcttaacgcgcagatggaacgcttctgccaggaatacatcaagaaaccggacaaccagaccgcggcggcggcggcggccggctataagaatgcggccgtgtcggcgtcgcgcaacatggacaacccgaaggtgcaggagcgcatcgcggagctgatgaagcaacgcaacaagcgaacgaagatcagcgctgactatgtgcttaaccgactgattgaaatcgatcagatggacgtgctggacatcttaaatgatgacggcggccttaagccaatcagtgattggccaaaggtttggcgaacatcattaagcgcaatggatatcaaccgtatccgcatggcaggtaaagatggggacgacgatattgaatctacactgcagaaagttaaatggcctgacaaggtgaagaacctcgagctgatcggtaagcacgtcgatgttcaagcattcaaagatcgcgtagacgtcaatgttaacgtaaccctggccgatcgtatggccaacgcccgccggcgcgcactggagaaaaataccaagtga

SEQ ID NO: 429201 - DNA, 465 bp, Serratia marcescens
atggagaataagctgagcgaactgggcaagccaacagcattacgcaataagcacacgggcagaactttcaacgagaccgaaaacacggagccgcagatttacgaatcgctctactcgcaagagtacgtctccgccctgctggcagagctggaagcgaaggatgagcgaattggcgagttggaggtcatcgccaccgaatacgccggtaaattccagaaggcgcaggatgcgaacaagcatctgattatcatgagcaacgatgacaagaagcgcatcgccgagctggaagccaagctggccgcgccggtgcggttgctgggtgagatgctaccacacgagtgggagagcgccgaacggcaggccgctttcgagcacaggaaaatagcgtgggacgcccgcttagcggaagacaagaaagccattctggcagctggatttaccttcaccgtagagggggatgagtag

SEQ ID NO: 429202 - DNA, 240 bp, Serratia marcescens
atgagcacgctggtgaaaatactcatcaatgatgacggcgaaaaaacgcctctcggagagagattctggcacctgtcgatagaacgatcaggcgatccaatgctgttgtgctccggtgaattttattcatttggctgctgtacaaacgttgtcgccaagacaaaggttgtagagcgcggaggaataacctgcccgctttgcctgaaatacatcagagaaattaaggcggtgaagctgtga

SEQ ID NO: 429203 - DNA, 207 bp, Serratia marcescens
atggctaagcgtaagagcaacagagcggcgcggagaatcatgggaatgcctcattggcgcagcaattctcagtttcaggccaaagagcgccacacaggaatgtggttcgtcactcagacgaatagctgggaggttttcgagtcattccacctttcacggaaagcaatcgctgcacggcgggccgaggcccaggagaaagcattatga

SEQ ID NO: 429204 - DNA, 261 bp, Serratia marcescens
atgaaagagcacccagtgatgccagcaaatgaacttaagccgggaatgaaatgctacgcgaagcaattgagcatccatatcgacgggcatgagcttatctatagtgcgccacgaggaacgaaattcgccgtaatcataatgaatgcggaaaagccagataacgcagcgggaatatcagcaaatgacttcattcgcagcaacggctggagtcatgaatctgatggaaaaagtgacagcgctagggaggtggagcgtgggtaa

SEQ ID NO: 429205 - DNA, 513 bp, Serratia marcescens
atgaaaaatatcgttgaaaatcaaggtataaaaactgataagccgctggcgatgagttatgaagcattgaaggctgagcgcgatgcgctggctgtggagaatgcggaaatgcgcggcgttatcgatgctgcagtggcagtggctaataattcagccggtattgcgggctggcatctgaacggcgaaatagccggttgggacgaaatattgcctgagctgaatatcgaaaccccagccactgacgcagcacttgcagctatccaggcgctgggggtggagaatgcggcgctgtccgcagcactatcgttgatttccggtagctatggattatcgccacacattcaaagcatgtgcgctgttgatacccccaccactgacgcagcacttgcagctatccaggcgcagggggtggagatggctgctgtgaaaatgcaggagtctggcgctcagacattcggtgattgctacatcgcattggttcagtacgccactgagctgcgggaggccaaatga

SEQ ID NO: 429206 - DNA, 267 bp, Serratia marcescens
atgccagggcagggcacggcaagcacgtttaactttgggcacgcagccggtgttgttgaagggatcctgcaggggtcattcattccttacaccctggtaacccctcaagcctggaagaataccgccggactgatcggcagagacaaagacgcggctcgcagccgggcaatccagctttacccgtcactgcgaatccttgaccagaaagccaaaggccaggccgtagccgacgcgctgctcatcgcccgccacggaatcggagcgtag

SEQ ID NO: 429207 - DNA, 900 bp, Serratia marcescens
atggccggcgactggataaaaatgcgttctgaccttcacacacatccgaaaattgtccgcatggcgtccgcattgaaagcggacagacttcggattgttggcggactacattccgcatggtgtctttttgatgtccattctgttgacggattccttgacggttacagtcctgaaacgctcgacgacatgatcggatttcctggattttctcgcgcaatgatggctgttggctggctggaagttgacggcgaaaacctcgtaatgcccagatttgacgagcataacgggcagtctgccaagcgccgcgcgcaggatgcggcgaggaaaagaagcgtccgcaaaatgtccgcatcgcaagcggacaaaatgacgaccagagaagagaagagaagagaagatctaaaagataaagatccccctcttactcccccaaaggaaaaacaagcttatccctatccggaaggattgaacgtatccgcctgggaggagtggaagcagtatcggcgtgacttgaagatcaaggcgtatgcaccaacgccaagaagcgaaggggcggcaatcacgaacctgttgaagctgtcaggtggagatctgcaggtgcaggcagaaatcatcaagcaaagcatggccaatagttggcatgggttatttgaacttaagaccggaggcaaccatgagacaggcgggcgatatggtgcgggacctgattacaaaggcaacgcagtcgaagcagttcacgcagcaacagccaggatgcgagagcaatacggactcacaatccctggacagaacaatcaggatttgggatcgcatggtggaactgtattcggacaaatggaccaggcggaacgggctgaccccgccatcactctggatcaacgcgattggaaagctgtctga

SEQ ID NO: 429208 - DNA, 207 bp, Serratia marcescens
atgaaaattgttacccgggccgaggccataaatctcggtcaactccggttctataccggcaagccttgccgtaatggtcactactctgagcgctttacgagtaacggcgtttgtgtggaatgctccgcgcaacactcatccgcttaccgcaagcacatcaagaaactgatccacgacgccagggcaaaagtagcggaggtgagctga

SEQ ID NO: 429209 - DNA, 186 bp, Serratia marcescens
atgaagccaaatgttatctacgggtcaaagatgaacgatcgccaatggatgctcgttgatggctacatgaaaacccgcctgaccggcgacatctggcgcgacgcagtatggccgcaaccgtcaatgagaatgagcgacatcgcttattaccttgaaatcggacaaatgcacgaagtgaacgaataa

SEQ ID NO: 429210 - DNA, 957 bp, Serratia marcescens
atgagtaacgaactaattgaagtcaacaaccagccatcaaccatgaccgccagcaacgcggtatttaaccctcaggcgctgggccaattgacatcctttgccaacctgatggcggattcagttgtgagtgtccccgcgcactttgttggtaaaccagccgattgcatggccgtggtaatgcaagcgatgcaatggggcatgaacccatacgctgtggcccagaaaacgcacattgtaaacggcgcccttggttatgaggctcaacttgttaatgccgtcgttaccagctcaaacgctgttcgcggccgattccattacgagtacgccggggactggtcaaaatgtaccacctctaaagaggtcaccgttaaaaaacccgccaaagggggaggaacttacgacaaggttgaacgtgttagggggtggggtgatcaagatgaagttggattaagtatccgcgttggcgcggtattacggggagaagaagaaataacctggggtgagccggtttatctttcaagcgtagcaattcgaaactcacctctgtgggcgacaaatccaaaacagcagatcgcctatctggcagttaaatactgggcgcgcctgtactgccctgaagtgattctcggtgtgtacacgccggatgaattcgacgcgccgcaaccacgcgttgaacgcgacgtcaccccacccgcaaccagcgccgccggcgtaaatagccttatcaacggcaagaagccggaaaaagagatcaagacggtgaaccaagatgagcggtcgcctgacgatctgctggctgcatttactgaagcggcaaacaaagccgcaagcgttgaagaactggataaagcctataaatacggcgcccacgttctggcgccacatgaagaacagttgcaggcagccaccgacgtttacaacatccgtcgcgatgagttgaacgaagtcccaatgtaa

SEQ ID NO: 429211 - DNA, 129 bp, Serratia marcescens
atgaatatcaaacgtcacatgatgcgtaatgtgtgggcctatatgcttgctggcctgttcgtattttggtttctgtcgatcggcctgactgtgctggtcgttaagatggcggaggcaatcagtggataa

SEQ ID NO: 429212 - DNA, 792 bp, Serratia marcescens
atggtgatgcctttggaatttgacaattctttctttaataaaattgatccattttcacttccattggaaatttgggaagaaagggagccaacagaagtagaaaccgatgagttattatcgagaggagagtggaggccatgttgccaaataaaggtgaaaatagatttaatattaaattctgcacatgacgctgcaaggttaattgcagggaacaaagatgagaataggattgataatcatgttattagttatcttgaaaaaaacatggaatataaaaaatggcgtgaatgcatgcctcattcaacaccaaagcaactaattgattatcaagaaaattaccctccaaaagactttgaagttataaattctttgatttcaaagcatggcatgctgattccagtaggtcaggcgctatttcacggaggaatatggcctctagacaagatggggggacaggtgaagtcatttctgacaaatcgcgtgttatcaacatcgttttgcccgaaagtcgctttaaataatggagactggaggggtaaggcatatgatgctggccgaatcgatcttatggtaatcactataaaaagtatagataagaaagcatttgtgttttcactagacgagggttctcatagtcatgagatggaagtgctttttgaacgaggtgtacagttgagtcttgttaggagttcaacagtgaatctgcactttaaaacttgcaaatcgacaagtgcatcagatattgactgtaaatttattgccgttaatgttcttcaaattgaaatgatatag

SEQ ID NO: 429213 - DNA, 648 bp, Serratia marcescens
atgttaaaaacagtatatcatttcacaacattaagttcggcagagaatatagtaaaaaatgagaatttacgtgtatcgcgtattaatggtctaaacgatcctttcgaattgttatcggaaaatgtcggaaataagaagtttcgactttccatgaaagaaaaaaagaggaatataaatgagtcgcatggaataatttcattcagtaattcatggaagcaccctgtccaatgggcgcattacgctgataaacataaaggtgtttgcttggttttttctgttgataaaagtttattaacggatgtttgctatcatcccgagagactacttgagagtagtaacccaaatccattggatgctttaaaatataaatataaagcttgggagtatgaggatgaaacaagattgataatagggttagaagataaaatactaacacgcatagataatcacttccttattccttttcacaataaattaaaactcaatggaattatattcggtgcatgcacaactgaaaaaaacgaagttgatttttatcaaaagattatatcaaattgcgacctaaaaattagtaaggtaagaccagcatttaagtcttttagtatgacaaataaaaatgactggagtattgaaaaacttatcacatga

SEQ ID NO: 429214 - DNA, 2709 bp, Serratia marcescens
atgaaactgaaaaaactcccccgtcagctgctgggcctgttcgcccgcggccttccgcgccgtttggtgcgccgcgacagcctgctggacggcgtcggcggcgctgcgcacgatatgccggccggcctggcgcaacagcggctggaatgcgccgccgcagagacgatgcagctgtttgagcgtttccacagccacccggaaggcatcaccgcccatgaggcggagcaggtgcgccggcgctgcggtgagaacgtcatcgacgatcagcagaaagaggcctggtggcaacacctctggcactgctaccgcaacccgttcaacctgctgctgaccgcgctcggcatgatctcgtacgccaccgaggatctcaccggcgcgctggtgatcgcgctgatggtgctgatctccacgctgctgaacttcatccaggaggcgcgctccaaccgggcggccgatgcgctgaaagcgatggtgagcaacaccgccacggtgatccgcagcgatgcgctcaccggcaagagcgaacacgtggagctgccgatcgcgcaattggtgccgggcgatatcgtcaagctggcggccggcgacatgatcccggcggatctgcgcctgctgtcggccaaggatctgttcatcagccaggcggcgctgaccggcgaatcgctgccggtggaaaaatccgcggcgccgcaggcgctggcggccgatccgctcgactgccagaacctgtgcttcatgggcaccaacgtggtcagcggcaccgcgctggcgatggtgatcggtaccggcggcggcacctatttcggccagctggcgcagcgcgtcaccagccaggagcagcagccgaacgccttccagagcggcatcagcaaggtcagctggctgctgatccgctttatgctggtgatgacgccgatcgtgctgctgatcaacggctacaccaagggcgactggtgggaagcggcgctgttcgcgctgtcggtggcggtcgggctgacgccggaaatgctgccgatgatcgtcacctcaacgctggccaaaggggcggtgaagctgtcgcgccagaaggtgatcgtcaaacgcctggacgccatccagaacttcggcgccatggacattctgtgcaccgacaagaccggcaccctgactcaggacaagatcgtgctggagcgccacaccgatgcgttcggcgccggcagcgagcgggtgctgcgctacgcctggctgaacagcttctaccagaccgggctgaaaaacctgctcgacgtggcggtgctgagctgcgcggagcagaatcggcagccggcggcgttgcaaaactaccgcaaggtggatgagatcccgttcgatttcgtgcgtcgccgcatgtcggtggtggtggcgaaagacaacgagtatcacgagctggtgtgcaagggcgcgctggaagagatgctggcgatttgcagccacgtgcgccacgaagacgaggtgatcccgctcagcgaggcgctgctggcgcgcattcgccgcatcaccgacgatctcaaccagcaggggctgcgggtggtggcagtggccaacaagatcctgccggcgcaaacccacgaatacggcgtggcggacgagtcggatctgatcctcgaaggctacgtcgccttcctcgatccgccgaaggagagcaccgcgccggcgctggcggcgctgaaacagaacggcgtcacggtgaagatcctcaccggcgacaacgagctggtggccgccaaagtgtgccgggacgtcgggctggcggccgagcacctgctgcgcggcagcgagatcgagcagatggacgacgagcagctggcccaggcggcggcgcgcaccacggtgttcgccaagctgacgccgctgcacaaagagcgcatcgtcaaactgctgcgccgccaggggcacgtggtgggctttatgggcgacggtatcaacgacgcgccggcgctgcgtgcggccgatatcggcatctccgtcgattcggcggtggacatcgccaaggaggcggcggacatcatcctgctggaaaaaagcctgatggtgctggagcagggggtgatcgaagggcgccgtaccttcgccaacatgctgaaatacatcaagatgaccgccagctccaacttcggtaacgtgttcagcgtgctgatcgccagcgccttcctgccgttcctgccgatgctgccgctgcacctgttgattcagaacctgatgtacgacatctcgcagatcgccatcccgttcgataacgtcgacgacgatcagatcacccagccgcagcgctggaactccgccgatctggggcggtttatggtgttctttgggccgatcagctcgatcttcgacgtgctgaccttcagcctgatgtggtgggtattcaaggccaatacgccggaaatgcagacgctgttccagtccggctggttcgtggaagggctgctgtcgcaaacgctgatcgtgcacatgatccgcacgcgcaaaattccgtttatccagagccgcccgtcctggccgctgtgcatcatgacgctggcggtgatcgccaccggcatcggcctggtgttctcgccgctggccggcttcctgcagttgcaggcgctgccgctcggttacttcccgtggctggtgctgatcctcgccggttacatggtgctgacccagtgcgtgaaaggctggttcgtgcgccgctacggctggcaataa

SEQ ID NO: 429215 - DNA, 729 bp, Serratia marcescens
atgacctactgtgtggccatgcgtttgtcgtccgggctggtctttgcgtccgattcgcgcaccaacgccggggtggaccatatttccaccttccgcaaactgcacgtgttccaacaggacggcgatcgcacgctggtgctgcaaagcgccggcaacctggcgaccacccagagcatcatcagtttgctgttgcaccgcagcaaggacgccgaacgccccaacctgctcaacgctcccagcctctacgacgccgccacgctggtgggggaaacggtgcgcgaggtgatccagcgcgacagcgaggcgcagcaaagcggcagcaccaccgacttcagctgtaacctgctgctcggaggccaaattagcggggaagagatgcggctgttccatatctacccgcaaggcaactttatcgaagccacccgcgacacgccctattttcagataggcgaaagcaaatacggcaaaccgatcatcgaccgggtgctgcactacgacacgccgctggaacaagcgatgcaatgcgcgctgatttcactggattcgaccctgcgcagcaacctgtccgtcgggctgccgctcgacgtgatgatctacccgcgcgacagcttcagccatgcccggcaataccgcattaccgaagaccatccgtacttcagcgccatccgcaagggctggggcgaagggctggtcagcattttcacccagttgccgccgctgcagctgtag

SEQ ID NO: 429216 - DNA, 795 bp, Serratia marcescens
atgaaactgaatattgagcacaacacccattatcgctacgcccagccggtgcagcgcagcacccaatatctgcggttgacgccgcaggattcgccccatcagcgcatcctctcctggcaactgtcgttgccggatgacgcggtgcgcaccaccgacgccttcggcaacgtactgcacgtgctgacgcttgatgaaccgcatcaggccatcaccattcgggtgctcggggaagtggagattgaagacggcgtcgaagatcgggcgctcgggcatctgtcgccgctggtatttctgcgccatagcccgctgactcaacccgatgacgccattcaggccttcgccctgcgttatcatcaaccgcaggcggtgctgagcggcctggaacatctgatgggcgaactgctgctgaaaatgccttacagccctggctccacgcgcgtgaccgacagcgccgccgaggctttcgccgccggcagcggcgtgtgtcaggatcatacgcatgtcttcctgagctgctgccgcagcctgaacatcccggcgcgctacgtcagcggctacctgtacagcgaagactcgacccatgtcgccacccatgcttgggcggaagtgtgggtggaggaacgctggcacagcttcgacgtgaccaacaatacgcgcatgccgaatcagcaccttaagctggcggtcggcatcgattatctggacgcctgcccggtgcgcggcatgcgattgggcggcggctgcgaagacatgagcgccatcgccgccgtacaaatgatgccaaccggccagtag

SEQ ID NO: 429217 - DNA, 927 bp, Serratia marcescens
atgctgagccgcaccgccagtgaactctattggatggcccgctatctggagcgggcggaaagcatcgcccgggtgctggacgtcaccaacaagctgtcgatgatgccgatccgcgacggcggcgatcaggatctgcaggtgccgctcaacctgaccggcaccggccagctgtatgccgccgcctacccggaattgacgatgcccaatctggtcagtttcttcgcgctcgacaaccgtaaccacagcagcatcttcagctgcctgcaaatgggctggaacaacgcccacgcggtgcgcggcagcctgtcatccgaagtctgggagtgcatcaacgccacctggatagagatgaaactgatccgccgccagggcatcggctcggtgggcgccgatgccttcttcgactgggtgaaggagcgcgcccatctgtttcgcggcgccatgttcggcacgctgctgcgcagcgacgccatgcgctttatccgtctcggcaccctgctggagcgggccgacggcaccgcccgtctgctggaggtgaagaacacgctgatggacatcgacggcgacccggtgcgcgaatattaccgcatggacacgctgctgcgggcggtgagcgcgcgcgaagcctaccacagcatctacaagcagccgttgagccgcgagaccatcgccgaactgatgattctgcgcaatgaaatcccgcgttcactgctggcctgcgtcggcgacatggtgcagcaattggaactgatcggcggcggcgccaaccaaccgcgacgtctggcgcacaccctgcatgccgagctgcgcttcagcagcatgaaggacctgaacaagatcggcctgggcgagtggttgagcgcctttctcggccaggtgaacggcatcgccgaaagcatccatcacacttatctggaggcgcaatga

SEQ ID NO: 429218 - DNA, 1437 bp, Serratia marcescens
atgctgaatatcaatctttccgcttcaccgttttttgatgagatgcttctggctgagggaaaacaccgtggccactacgacgcctactggcaatggctgcagcaggccgatcaccaggccgtgcaacgcaagcgggaagaggctgcgctgctgtttcaccgggtgggcatcaccttcaacgtctacggcgacgatgacggcgctgagcggttgatcccgttcgacagcgtgccgcgcattattccggccgtcgaatgggcgatgctcgatcgcggcattcgccagcgcgtacaggcgctcaatgccttcctgcatgacatttaccaccagcagcatattctgaaggccggcctcattccggcggagcaggtgctggccaacgatcagtatcaaccctgtatgcaaggcgttgatctgcatcgcgatatctatgcgcatatcgtcggcgtggacatggtccgcaacagcgacggccaatactacgtgctggaagataacttgcgcaccccgtccggcgtctcttacatgctggaaaaccgcaaaatgatgatgcgtctctatccggaactgttcgcccggcaacgcatcgcgccggtggagcgctacccgtcgcacctgctgcaaacgctgcgcgaaagctcgcccatcaacgatcccaccgtggtggtgctgacgccgggccgcttcaacagcgcctattttgagcacagtttcctggcgcagcagatgggggtggagctggtcgaaagcgccgatctgttcgtcaaggacggcgcggtcttcatgcgcaccaccgccgggccgtgcaaagtggacgtgatctatcgtcgggtggacgacgccttcctcgatccgctggcgtttcggccggactcgatgctcggcgtaccggggctgctgtcggtgtatcgcgccggcaatgtggtgctggccaacgccatcggcaccggcgtggccgacgacaaatcgatctacccctacgtgccggatatggtgcgcttctacctgcaagaggaaccgatcctcaacaacgtgccaacctggcagtgccgacataaaaacgaactgtcgtatgtgctggccaacctcgaacagatggtcgtgaaagaggtgcacggcgccggcggctacggcatgttgatcggccccacggcgagcaaggacgagctcgcccgcttccgcgctctgctgctgtctcgcccgcagaattacattgcgcaaaacacgctggcgctgtccacctgcccgaccttcgtcaacgatggtctggcgccgcggcatatcgatctgcggccgttcgccctcagcggcgcggagatccgcctggtgcccggcggcctgacccgggtggcgttggcggaaggttcgctggtggtgaactcgtcgcagggcggcggcaccaaggacacctgggtattggaggacgacctatgctga

SEQ ID NO: 429219 - DNA, 1569 bp, Serratia marcescens
atgaaagccaaactcttgccgctgttcctgctcaccgccctgcccgccgccgcgttagccgccacgccgccgaatacgctggtggtggtgcaatcgctggatgacatcgtcagcctcgatccggcggaagccaacgaactctccagcatccagacggtgcccagcctgtatcagcggctggtgcaggcggatcgcgacgatccggccaaggtagcgccggtgctggcggaaagctggcagagcgatgcggcggccaaaacgctgacggtgaaactgcggccgcaggcggcgttcgcctccggcaacccgctgaccgccgacgacgtgatcttttcctacagccgcgcggtcaagatgaacaagtcgccggcgttcatcctcaacgtgctcggctggcagccggacaacatcgacgcgcagctgaagaagatcgacgaacatacggtgcagctgcgctggacggcggacgtcagcccggcggtggcgctgaatattctttcgacgccgatcgcctcgatcgtcgacagcaaggcggcgctggccaacgtcaaagacggcgacttcggcaacgcctggctgaaaatgcactccgccggcagcggcccgttcaagatgcgcgtctatcagccgcatcaggcgatcgtgctggacgccaaccccaccacgccgggcgacaagccgcagctgaaaaacatcatcattaaaaacgtgccggatccggccacccgccgcctgctgatccagcagggcgacgccgatatcgcccgcgaactgggcgccgatcagaccgacacgctgaaaaaccaaccgggcgtcaaggtgctggagatcccgtccgccgaacaaaactacctggtgttcaacaccggcaacggcgccaatccgctgctgaacaacccggccttctgggaagcggcgcgctatctggtggattatcagggcatcacgaaggatctgctgaagggccaatacttcgtgcaccagagcttcctgccggtcgggctgccgggcgcgctggagaccaacccgttcagctacgatccggccaaggcgaaagccatcctggccaaggcaggcatcacccacgccacctttacgctggacgtagagaacaaaccgccgttcatcaccatcgcgcaggctctgcagggcagcttcgccgccgctggcgtgaaggtcgagctgctgccggctgcgggcagccaggtttactcccgcgtgcgcgccaggcagcatcaggcggcgatccgcctgtggatcccggattacttcgacgcccactccaacgccagcgccttcgcctacaacgacggcaaaagcagcacggtggccgggctgaacggctggcagatcccgcagttgaaccagcagactctggcggcgctggccgaagccgatccggccaagcgccgcgcgctgtataccgccatgcagcaggaactgcagcgcagttcgccgtacgtgtttatcgatcaggccaaaaccgaagtggtgctgcgcgacaacgtcaaaggctaccagcaggggctgaacgccgacatggtctactacgatcgcgtcagcaaatag

SEQ ID NO: 429220 - DNA, 717 bp, Serratia marcescens
atggaagacgaatacaatctcagcaatatcatcggcaagcgactggaggcggcgttgggagagttgggcgatctcctgtgggcgtatgtggtgttatccaaaaaagacattgcctgcatctttggcgtcaccaactacccgagtgaatgggtaaaaaagtatcaagagcaggggttgcagtatattgatccggtggtgcttaccgcccgcaaccgcctgaccccgttcgcctgggacgagcaaatcatggctgacgcagggctgcactttcccgagttgttcgaacaggcccgcgagtttggcgtaacgcacggctataccttcgtgctgcacgattacaacgacaatctcgtcacgctttcctttgccttcaacgttgagcagagagcggaagccatccaggcgctcaccgatcgtaaaggtgcaatctcggtattgctggcctcaatccatgagtcgtatctggcactatccccactttcagaaaaaaacgccgtagccctggagagaaatgcccgctttaccgacagggaaaacgagatcctttattgggccagcgtgggtaaaacctaccaggaaacggcgatgatcctgggcataaaaaccggcaccatcaagtttcatatgtccaatgtcgtcaaaaagttgggggtaacgaatgcccgacatgccgtgcgcctggggatggagcttcggttgattaaaccggtggagtga

SEQ ID NO: 429221 - DNA, 1332 bp, Serratia marcescens
atgagcgactctctgattaacaagggcgacatcgcgcagcacgccgcggccgaaagtatcgaccgcagcgcctatctgcccgctacgccctggctgcagctgatgctggtctgctgcctgttcgccctgtggggcatggccggcaacctgaacgatattctgatcgcccagttcaagaaggggttcgatctgtcggatacccaaaccgcactggtgcagtcgatcttcttcctcggctacttcgtgatggcgctgcccgccgcagcggtgatcaaacgctactcgtacaaggtggcgatcgtaatcggcctgtgcctgtacgcgctcggctgcttcctgtttatcccggcagcgcagatcatgacctacggtgccttcctggcctgcctgggggtgatcgctaccgggctgtcgttcctggaaacctcagccaatacttactccagcctgctggggccgctggaaacctccacccagcgcatcaacttttcgcagatcttcaactcgctggggatcatttttggcgtattgatcggccagcagctggtgttcggcaaaaacgatcccagccacgcccagctgctgcaaatgccaccggcggcggccgaagcggcacgcacccagatggtgtcgcaggtggtcacaccttatctgatcatcggcagcgtgctgatcgtgttggcactgatcttcgtggcggtgaaattccccgcctgcaaaacccaacgctcgcaccagggagcgggcaagccgctgatgcaatcgctgaagatcctgctggcactgccgcgcttccgattgggggtgctgtcgcagttcctgtatgtcggcgcgcaggtagggctgtggagtttcaccattcgttttgtgcaaatgattgaacagggcgcaaccgagcattcggccacctactggctgctggccacgctggtctgttactcggccggcaaggtggtcaccaccgcgctgatgaaaaagttcagcccggcgcggttgctcggcgtgttctgttcggtatgcgtgctgctgttgctgctggccgtcaacattcaaagcctgctggcggtggtggcgatcatgggcgtcaacttctgcatggcgctgtgctggccaaccaactttggcctgacgatcaaagggctgggcgaagaaactcaggtggccggttcgatcgtggtgatgtcgatcatcggcggcgcggtggtgccgttaatcatgggcatcatctccgatctcaacggcggcgatatgcagatcgccttcgcagtaccgctggtctgcttcgcctacgtcgccttctatggtttctactgcgcgcgcaaggggatttga

SEQ ID NO: 429222 - DNA, 546 bp, Serratia marcescens
atgcgctattttttgacaagatacagggattcgatcctcgcttttacaggcatagtcattgctagtatctcacttgggtttgctatctggcagggaaaagagcaaatcaagcacaaccatatttctgtagagccgaggataaatgcttatttttccaatgatagccgtaaaaaacagtggggaatttatgttaccaacaacggtatgggcacagcctttgttaaaggaattgcggtgatagtaaatggtaagcccgtcgatgccgttgacaacaatatcttcttcggcgctgttctggcgttaggacttcgcgcagaatgttttgcaattggtggtccgcgtcttaatgattctttcaaggtaggagaggaaatatttctggtagaggcaagagattcagataaaagctgtgcgggtgacctgttgaacttgaaatgggcttcacaacaaccactgcagctggactttgtgctggatacggagtccatctatggcgatcattttcgctatacctattcacagaatcgtcaggtaagactggattaa

SEQ ID NO: 429223 - DNA, 1092 bp, Serratia marcescens
atgaagctaactgttgatttttctgaattgattgcgttgggaaaaaaaatgcttccttccggcgctgaattttctcttgctgaagcacctgtcgtcttcgaccctattgatattgaattatccgcaggtaaagaagtcagtattgacgacctagatcctggcagtggtttaatttcctatcaaggacgccaagtccttctatatatcagggatcataccggacgctatgatgcagctattgaagatggtgagaatgggaagcgatttcatattgcctggtgtagaaaattggatgagatgcgccagaaaaaccgttttgagcgttatcatgcgacaaaccgcgttgatggtttttttgaaatagatgatggtgctggacgctatcaggatgcagacctaaaagtctgtaagttttgtttagaaagattaaattataaaggaagtattgattatcgtaccagacaaaaaatatttactcaattcaccttggatgatttcttctctcactatagcacttgctttcgccatatgccaaaaggtatttatgacaaagcaaacagtggctatgtagacaattggaaagatatttcccgctccattcgcgaacatgcaaattataaatgtaatgattgcggtgttaatttaacttcctcacgccatctctgcgacgttcatcataaaaatggggttaaatacgacaactcagcagaaaacctccatgttgtttgcaaagattgtcatcgtaaacaacctttccatgaaggtatgtttataagccaggctgacatggaaactattcaacacttgcgatctcaacaagggttattaaaggttgactcctggaaagatatttatgatctcaccgatgcatctattcacggtgatattaatattatgcagcataaaggatacccacttccggtgctaagatttgatttacaaaactccacacataagactattacaaccgtagaagcggcttggccaaaatttaaaatcgcaattaatctcacggaagtaaaagtcgagggttggaaaatattcaccgtaggtgagctcgtaaaaagcatacagtccggagttgttttctga

SEQ ID NO: 429224 - DNA, 618 bp, Serratia marcescens
atggtatttatgtttatatccatcgcttatatgcattatgtccgtattgaaaaagaaaaaataaaggaagtggcagtcgcctatgaacaggcccagcaacaactttataatgcattaaatgttgagttctcaaaggatttgcccgattgggatgcagaaatagataaacaaactctcgaagtaagatttaaatcaccggatgttctttttggtttgggtagttcggaattgaaaccaaagtttaaagagattcttaacaatttcttcccacgatacttgaaggtactagatcagtataaagaacatatcactgaggttagaattgagggacataccagtacagattggacaggggcggctaatcaagatgaagcctactttaataatatggaattgtctcaaggacgaacccgagctgtattgcaatacgtacacagtttgaaagagtcttctgcacaccaaaagtgggtgaaaagtaagttttctgcagtgggatattcgtcttcacatccaattcttaatgcaatgggcaaagaagaccaaaaccgctcacgtcgagtaacgtttaaagtaattacaaatgccgagttgcaaattcgtcgcataattcaggaatag

SEQ ID NO: 429225 - DNA, 1653 bp, Serratia marcescens
atgttagcgcaactttttgaacatctgttccgttctattgattcgatgtttgtcactaatttttttatctgggcagttgtatttatatttttttctgcctggtggtgtgactacaaaaacattcacagtaaatttagggagtatgctccaacactcatgggagcattaggtatattaggcacattcattggcataataattggattgcttaattttaacactgagagtattgataccagcatcccacttctattaggtggtctaaaaacagcatttatcaccagtattatagggatgttcttcgctattttatttaacgcacttgatgcttttttcttcgcaaacaaacgagataatttaacagagagtgtgcctgaaaccataacgcctgaacatattcatcacgaattaaaagaaaacaaccaatacttggaaaagatgatttcaggtttgagtggcaatgaagaagggtccttagttgctcaggtgaaactattgcgcaatgaaataaatgatgcttctcgtgcacaactctctcatcacactgagtttagcaataagctctgggaacaattgaaacagtttgctgatttaatggcaaagggtgcaacagaacagataattgatgcacttaaacaagttattatcgattttaacaataatttaaccgaacagtttggtgaaaattttaaagctcttgatgcttcggtaaaaaaacttgtcgattggcaggataattacaagaaccaaattgagaatatgagtgaacaatatcaacaaagtgtcgactcattagttgaaacccgcggagctgttgcaggtatctgggaggaatgtaaagaaattccacttgcaatggctacattacacgatgtgttaaaagttaaccaacatcaaatcaacgagctatctcaacatcttgatgcctttgttttattacgtgataaagctacagatgcggttcctgttatccatgaaaaattggacgaggtaggcgaattgcttaaagcaggggcattgagtgtcagttcatctctggaccaaacaggggctgaattactcgccaatgcaaatgctatgcggattgctcttgatgaaggctctgaagggttcaggcagtcggttacacagactcagcaagcatttgcatcaatggctcatgatgtaagtaactcttctgaaactttaacctcaacactgggtgaaactattaccgagatgaaacaaagtggtgatgatttcctcaagtctctggaggcacattctaaagaactgcatcgtaatatggaaaaaaatacaaccgatgtgatcgagctctttagtaaaactggcgataaatttaatcaacaattatctagtaatgcagaaaatatgtttggaacaatgcaatcgtcctttgacaaggcaagtgctggtttaacctcacaggttaaagagtctgttgaacgctttggtggtgcaattaacgaacagctacatgcctttgaacaagcgactgagcgtgaaatgaatagggaaatgcaatctctagggaatgctctcctgtcaatcagccaaggatttgtcaagaactacgaccatttgattaaagagtatcaaagtgttcttgggcaactgcagccattaattaactcaagacaacaccgtggataa

SEQ ID NO: 429226 - DNA, 2364 bp, Serratia marcescens
atggctaacacaaatttctctcaaacggctgctttcatctgggcggttgccgatctgcttcgcggtgattttaaacaatcccagtacgggcgggtgatcctgccgtttacactgttgcgtcgccttgagtgtgtgctggcgggcaccaaagaagcggtgctggcagaggcggagaaactgaaggccagccctctaccggaagaagggcgagagaagtttctgttgcgtgcgaccaaagggctgtctttcttcaacacgtcgccgatggatctcggcaagatggggcagaacgacatcaaggccaacctagagaactacgtgcagtcgttctcgaaggatgcacgtgaaatctttgaacactttaaattcagtgagtttgttggcctgctggaagatgccaacttgctttacaaagtcgttaagaaatttgccaccaccgacctgagccctaaagcgatttctaaccatgatatgggcttggtgtttgaggagttaatccgtcgttttgcggagagctctaacgagacggcaggggagcactttaccccacgcgatatcgtgcgtttaaccacttcgttggtattcatggaagatgatgaggcactctctaaagagggcattatccgcaccatttacgaccctaccgccggcacggggggcttcctctcatcgggtatggaatacgtgcacgaactgaatcccaaagccgtgatgcgtgcctttggccaggaactgaaccccgaatcctacgctatctgtaaagccgacatgctgatcaaagggcaggatgtcagccgtatcaagttgggcaatacgctttctaacgatcagcttccgcaggagcagttcgactatatgctttctaaccccccctttggcgtggattggaaaaagattgaaggtgagattaacgacgaacatcagcagaaaggttttaacgggcgttttggcccaggcctaccgcgtgtctctgatggttcgctactgtttctgatgcacctgatcagcaaaatgcgcgacagtcataatgtggatggtagcgtaaacaatggtgggcgtatcgggatcatcctcaacggttcaccgctatttaccggcggggcaggcagtggtgagagtgagattcgccgctatattctggaagccgatttgctagaaggtatcgtcgcattgcctaccgatatgttctacaacaccggcattgcgacctacgtctggattttgtcgaacaagaaagcgcgggcgcgtaaaggtaaagtgcagctgattgatggcactaatctgtgcggcaagatgcgaaaatcgctgggttctaaacgtaatctgatgggcgaggacgatatcaagcttatcacccgtacctttggtgattttgaggcggtggatgccaccccgcttgaagaacttgggatggaaaaagcggcagaacaaaaatccaaccgtgggcgccaatctaccagctctaaaaccgaagggccgaaaaccttcgccagcaaaatctttaacagcaccgattttggttatcgtcgcctgaccattgagcgccctttgcgcttatctgcacaggtcaccgatgaagcgattgccacgctgcgctttgcaccgaagccgtttaacgctcccatggagcgtttgtacgaagagttttcggcacagtggcatgacggaaactatggcgatttctccgatatcgaagcagaagcccgaacgattatcaaagcagaatttgccgagctgaaggagaagcagattaaagatctgctcgacagcaagctgtggttggcacaacgcgcattgatggctaaagctcagcaaatccagacagcgttaggagctcaggcaggtggaaaaacgctggtgagcaacgatttcaatcagttccagctcacgctaaaaggggccatcaaaacggctggcgtgaagctggatgcgaaagagaacaagcagtttatcgatgccatcaccaccaaaaacccggatgccgagccggtggtgaagaaggcgctgaaagaagccgctcagccgctgtacggtgcgtttgaatacaaaggcaaagtagtggagttcgagcaggatggtgacctacgtgacaacgagaacgtaccgttaaatcccgccgtttccaccagtgaattgattgagagctacttcacagcagaagtgttgccgcacgtggccgatgcctggattaatgccgataagcgtgatgcgaaagacggtgaaattggtattgtcggttatgaaattccgtttaaccgccatttctacgtttatcaaccgccgcgtccgttggaggagattgacgccgatctggacgtcgttagcgccgagattatgaagctgctgcaggaggttcattcctga

SEQ ID NO: 429227 - DNA, 1392 bp, Serratia marcescens
atgactaagtataagacatatccggagtataaggattctggggttgaatggttgggtaaagtcccaaaagattgggacgttattaatattaaatacctcagccaagtaaaaagaggctcttcaccaagaccgattgatgatccaaaatttttcgacgaggatggagattatgcttgggtacgcatcgcagatgtgacggcttcggatacttatttattcgaaacgacgcaaaaaatgtcggtattggggagctctttaagtgtaaagcttgaacctaatcagcttttcttaagtattgctggcacagtagggaaaccatgtatcactgcaattaaatcatgtatacatgatgggttcgtatatttcccttatttgaaagtaccgagcaaattccttttctatgtttttgctggagagcaagcatataagggattgggaaaaatgggcactcagttaaaccttaatactgatacggtaggtggtattaaagtcgcattgccatcgaataatgattttatttctaacattgtaaatttcctcgatcacgaaactgcaaaaatcgataaactgatcgagaagcaacaacaactgattgagctgctgaaggaaaaacgtcaggcagtgattagccatgccgtcaccaaagggctaaaccctgatgtgccgatgaaagactctggtgttgagtggttgggggaagtgccggagcattggagaagatcaactccaattaaatatttatcatctcttaaaggtcgtttggggtggcagggccttaaagctgacgaatatagagatgaaggcccatatgtagtcagtagtgctcattttaataactatgaaattgattggaatagctgtccgcgggtttcattagaaaggtataaattagactcaaatatccagcttgatataggcgatattttgctgatgaaagatggcgcggcaatgggtaagctttcatatgttgacaaattgcctggtgaagcttgtcttaatagtcaccttttgttatttagaccattaatgggaggcgatgaaaaaacatattatactaagttcatgttttatcttatgcagacgaatcatttccagtcttttataaaaaataatggtaccggctcaacatttttaggtatttctcagcaggctataggcaatcactctttatgtcttcctccttttaatgagcaagtggacatatctgattatctcgatgatgagcttagtaaaattgttagattagaaactatgcaattggagatgaaaaatcttctaactgaacgccgaaccgccctaatctccgctgccgtcaccggtaaaatcgacgtacgcgactgggttgcacctgatatgcaagacgctgaggagccgcaggagaccaccgtatga

SEQ ID NO: 429228 - DNA, 3249 bp, Serratia marcescens
atgagtatggataccaccaaagagctgattttccaaaatgaaatgattgctcagatggtcgaaacgggttggattgttggcaaaggcgacggctacgaccgcgaacgtgcgctatattcgcaggatgcattgacctttgtgcaaaccacgcagccgcaggagtgggaaaagttttcaaagatttatcctaccgataccgaacgtcatttcctcgatgcgctagtcgctcagctgagaaaagcggatatcaacgctaccgatatgctgtcgcgtacttacggcactctcggtgtgctgcggcacgggataaaaagccataacgcccggttttccctgtgtcagtttaagccggagcatagcctcaatcctgaaacgctcgcgcgttatcagcagaatatctgccgtattgtgccggaactggtgtatagcccacacgctgcgaaagcggcatttgaagaagcgggtacaaaagcgaaaaaatggcgtatcgatctggtgttgttcgtcaacggtttgccggtggcaacgttggagctgaagtctgagtttaagcaggcagtgcaaaacgccattacgcaatataagaaaacgcgtttgccaaaggatcccgttaccaacaagccggaaccgctgcttactttcaaacgcggggcactcgtgcactttgccgtcagtcagtacgaagtatttatggcgaccaaactcgacggtgataaaaccttcttcctgccatttaacaaaggtactcatgacggcggtgcggggaacgacatcccggaagatgccaacgaatacgccaccagctacctgtggaatgaggtactgctcccggacaatctgctgaaaattcttgctagttttgtgcatctacaaatcgaagagaaagaagagtggaatggccttaagggcaagaaagagagcctgatcttcccgcgttatcatcagtgggatgtcgtgaacaaactgattatcgctgcggcggtagaaggcactggcaataagtatctcattcagcacagcgcgggctccggtaaatctaactccattgcctggaccgcccaccaactttctcggctgcatgatgagcaaggcgagaagcaattccactcggtgatcgtggtgacggaccgtaccgtgctggatgaccagctccaggacaccatctaccagtttgagcatcaagatggggtggtcggccgtatcaacaataaagaaggtgacggctcaaagtcagagaagctggctagcgcgctggaaaactcgcagccaattattatcgttaccatccaaaccttcccgcatgtgctgaaggcgattgaaagcagcgtcagccttaagcagcgtaagtatgcggtgattgctgatgaagcgcactcttctcagagcggttccacggcgcgtcagctgaaagaagtactgatgacggaggagacggatgacgatgcggtgatgacctcggaagatattctcgatgccaccgtcgccgcacgtaaaggcagcaacaatctcaactactatgcttttaccgccacgccaaaagccaaaacgttagagctgtttggccgtcgtcctaacccatttgaacctgcctcaaaaaccaataagccggaagcatttcacgtttactccatgcgtcaggcgattgaagagggcttcattctcgatgtcctgaagaattacaccaactataaggtggcctataagcttctgcagaagctggacgatcccgatcgggaagtcgacagcaataaggcgaaggtcaaactgaatcagtgggttgcgttgcatgagcataatgtttcgcagaaggtaaaggtgattgttgagcactaccgtaagcatgtgatgcatctgttgggggggcaggctaaggcgatggtagtcaccagctctcgtaaagccgcggtgcgttacaaattggcctttgataaatacatcgctgaaaacaactatccgaagatcaatgccatggtggcattttccggtgaagtggaattctatgaaagtgaccacaatagccttgcgttgctgaaccagaagtttactgaaatcaacatgaaccctgggttgaaaggccgggacatgcgcaaagcgtttgagactgatgattaccaggtgatgttggtcgcgaataagttccagaccggttttgaccaacccaagctatgcgccatgtatgtggataaagcgctgggcggcgtggaatgcgtccagacactttcacggctcaaccgcacttatccagggaaaaaggaatcgggaacctttgtactcgatttctataatgagccggatgacattctggcggcatttcagccttactaccaaacggcagaactgactgatgtcagcgatccgcagttagtctttgagttgttcgagaaacttcgcactagcggcattttcctgtggaacgaagtggagcaattctgcgaggcgttcttcaccaagaacaaatccaatgctgcaataagcaatatctgcaagccggcggttgaacgctggaagcaccgttatacctcagcgattgatgcctatgtgttggctaaagagatgtttgaacgcaccaagaagaccggcgatgtggtgctgataactaatgcagaaaacagctttaagacgtgcaaacaggaaaaagacaagctggatatcttcaaaaaagatctcggtagctttgttcgtttttatgagtttatgtcgcagatcgtagattacgatgacaagagccttgagaagctgagcctatttgctcggcatcttcgcccgttgctgcatgaacagcgtattgaagacgatgagattgatttaagtaatgtggatatgagccattaccgcttatcgaagcttcatgaacaacatctgaagctgcaggaagatgcggaagaataccaaatcacaccgggtaacgatatgggtaccgcgaagccaaaagacaagaaagaagagtttctgtccaatattctggcgcgcctgaatgatctgtttgttacggataatcttagtgataaagacatgatcaactacgcctttaccgtgcgtgacaaactatcggaaaaccaggcggtgatgacgcagatcgctaacaatacgcgtgaacaggcgatgctgggggatttcccgaaagcgatcgatgatgccgtgatggacagcaatgaagcccagcatgagatgatggtgcagtatctgtccaaccctgaacttgccaggggattcgcccgcgtggtgtttgatatgctcaaaggtgcttaa

SEQ ID NO: 429229 - DNA, 2067 bp, Serratia marcescens
atggatatcgttgccgatattgaagcaggtaagctgactctcgatgaagtgatcggttctctggccgaatataaagactattcgcattcagagtgggatcgtcgttaccgtgaattcacggcgtcacttcagcaaacgccaacattttctgagcccgaaacggatgatctggttaaacggctttggtacgagcgtgacaacggtattgccagtatccggcagggcgttccatcgctggctgaattccaacaaagcctgccgttattcagagagctgactgagcgcattcgtcgccagcctgatgaacaaacttaccaatatgtagaagccgctttgcagcaagctaaggagagcgggctgctaaagcgcatgtattggagcttgcggaatcgtgtctttgcggcgtttacgccggcaacctgcaccagcacggtggacgagaatgcatttaccaaagcggcgacgtttctaaataatcgattttccctggcgctcacgcttaccggaaattggctgcaaaaaaaccatgaactgaagaatgcgattaacgcacggttaccagatgcggacccttactatgtcaacatggcaatctggcatctttacgaattgctgcgtgagcgcgatggcgagcagaagcaacaggaagtggctaaccatattgccgtagaaagccataaagttgtgagcccgcagataccgcagcactcacctgttaacgctatctactttggtccaccgggcaccgggaagactttcgtcttgcagcaaaagatgaaggagtacaccacccaagcggcctccgctgactatgatgcttggttagattctcgtctcgaaacgctgaactggatgcaggtgactgcgttagttttgttagatcttaatagaaaggccaaagttcgtttgctgattgagcacccttggttccagcgtaaagctctactgaatggccgcagcagtaatctatcgcaaactgcgtgggcaacgctgcaatccttcaccgtgccagagtccactacggttgaatataaagaccgccgtgagcccgcgattttcaataaaacggcagagagtgagtggttcctggttaagccgcagctagaacaagtggaagaccttatctcgctttatgatgagttaaagcgaggcccacaaaccgcagaggcgattcagcgatttgccgcagtcaccttccaccaatcctatggttatgaagagtttattgaagggatgcgagcccgtgcagatgacaatgggaatatttcttaccccatagagccgggtattttcatgcggctatgccagcgggccaaggccgatccggcgcatcgctatgccatttttattgatgagatcaatcgtggcaatatctccaaaattttcggcgagctgatttctcttatagaaatcgacaagcgcgctgggatgagcaatgcaatgagtttgcagctgtcttatagcggccaagtattcagcgttcctggcaacgtagacattattggtgcaatgaacactgcggaccgttcgttagcgctgatggataccgcattgcgtcgccgattcgactttgttgagatgatgccggatctttcattgctcagcggggcgagagtaaagggcattgagcttgagtctttgttagagaagattaatagccgaattgaggcgctctacgatcgtgagcataccttagggcatgccttctttatgccagttaaaaaagcctgtgatgcgaaggatgaagacttggcatttaaacagctgaaagcggtcttccagaagaagatcatccccttattgcaggaatacttctttgacgactggaacaaaatccgtttggtattggcggataatcagaaacaaaacgacagcctccaattcgtgatggagcaaagcgacgatctggagattctttttggcgccgatcatggtttacggcgccacgatcagcaatcaaccgcctacgaactgaaagcgtttgagcatgaagtctgggatttgccacaggcttaccgtgcgatctatcaacctgaagaagccacccaggctgtacaaaatgggtaa

SEQ ID NO: 429230 - DNA, 1287 bp, Serratia marcescens
atgggtaaggtgatctctgtttttgagtatgacctgttaggcgttgaaaaagagtcgccggttggcgctgttcctcttcctcctgaggtttttgactatttagaatcgcttagcctaaccagtgaggaaggaagccagctgcttaaactcacctcacgttctgggcgccgattgctacaggtacagaattacgcagggatactctataccccctatggcctgcaactggagatcctgccaaagataggcaaaaaccttacgttggggcaagcgcgcgaaacgctactgattatgctaagtcatctgtctggatttaggcatattcaaacccagcaggcttcagttcatgcgcaacgaatgcctttactggagatctttatcaaccagtttttgcatagcgttagccagctacttaagcagggactgcggtcagattacgtgaaagaacaggctaacttgccctttatgaaaggcaagttgatgctgtcagcgcagttacgccataacgcagtgaaccgtcataaattctatcttgattacgatgattatttacctgattgtgcggccaataggctattacgttctgcactttatcagttgggtaacctgagcctgtcctcagataatcaacgttggttacaggaattacgctttgcttttgatggtatcccgtcgagtagagatataaaaggtgacatatcgagtttgcgtttggaacgcggtatggctcattaccatgagcctttggcgtgggcgcagttgatattgcagggtatgagccccagcgctctacagggcgatgctaaagcgttgtcactcttgttcccgatggaggcggtatttgagtcctttgtcgcgtcaacgcttgctgacgaattgccggatggtttcaaggtgaagtcgcaggctgcaagctattcgttggttaaacatggtgagagggactgttttaagctgcgcccagatttgttgattcaatcacggcatccggtcagtaccaaaatggtgctagataccaaatggaagctgattaataacaactcgcaggaaaaacctctctatggcattgcacaatccgatctctaccaaatgtttgcctatggcctaaagtatcttggtggctcaggagatatgtatttaatttatcctgcgcatgatgatttcaatcacccagtacgccagcatttcgcattttcagacacactcaggttatgggttgtcccttatcaaatctccgcaaagcgtgggcagagaatgatgtggggaaaagataatccctttatctag

SEQ ID NO: 429231 - DNA, 534 bp, Serratia marcescens
atggaaaagaaagagggcgctttaagactattaacctccggggagatcggccttgcgaagtcggtatttggtggttcaattatttatgggaaagtctgggttcatcacgatagctatttcccctttggcttacaaaatcgaaatactgcgatgtcacccaatggtgagctgtattttagagactggtacgtgcccgatttctcaaaggaagggtatagtcataaacatcttttcatccatgaaatggttcatgtttggcaataccagcgtggtatgtgggttaagacccgaggcctctacagttggttggcaaattacagttatgaactggatggctccaaactcctaaagaactacgctatggagcaacaggctcagatcgttgctgattatcatttgttgacctcttcaggttatgctgtttggagaaatcgcttcggcaaggaagtgacttacagcggtaatgactatgccgatgtgagaaaagtaaaagaaaaatatgagaaagtgttagtcggttttccttacaagtaa

SEQ ID NO: 429232 - DNA, 426 bp, Serratia marcescens
atgaaggcgagattgttctgtgccgttgttggtgtgtccttgctaagcgcctgtgtaggcgatcgtctcgatcagcgctatgcgccggatatccctatcaccgcccatgctaaagcgaatggcgatatttgcatttctccgtcgccaaaggaaaatgaaaggcaagatacgctctatctcagcggtgatacggatgagaaattgattgaggtggggaatcaggatcttaaaaagggcatttgcgctacccaagaagattacccgtttcaggaaaatcatatctatagcatgaggctaaattttgtaccgattgagaagcgcagaaatctgcaggatgtttccggcagggcctttattgctcacttcaaagtgaaaaagctcaacggcgcttatgaaattgaaaatatcacgcagggcagcagataa

SEQ ID NO: 429233 - DNA, 420 bp, Serratia marcescens
atgaaacggattttccccctcgcattccccttcctgctcgccggctgtccgtcgataggcgatcgtatccccgtagactatcccgctaccgccagcctgcgtgagggcaaagtatgcatcaccgtccagccgcagggagacgaaaagctcgcgggcatctcgatctaccgattggatgaggcgcagagccgcacgttcaaattcttcgatccgctgcgggatgtcgcccccaatcagtgcgtccctgatgagggctacgcatttacacaggggcagcaataccatttctccgcgaagctggtctcccacaagaaacagcgggcgggtgagtttccctctgcgcgtgaattcgtcgcagaattcgttgtgcatcaggaaggtaatcaacttaggttggaagccctccgcaccccacgctag

SEQ ID NO: 429234 - DNA, 1005 bp, Serratia marcescens
atggaacagaagtccagcaacatcgcaccgggttattgcatcgcccaacaaaccggcccgctcgccttccacgccaactacctgttcggtggcaagccatcggaagcggcacgcttttttatgcagctcaatgccgatacgcctctggttcaaccggggcaaatgctgatcgtcgccgatccgcgcaatcatcatcaatctacgccgatcgccgccctgatgcaggccaagagccgcaccagcaaagcggtgaaagccggtgacagcgatttctccaccttcttgcaccgcaattacgccgctatcgccgccttcaccagctatggggaaacggtcgtcgggctggcttcggatgccggagaacgctacttcagccagatcaaaaatatcctggtcgagattgaaaaaacctaccaaaatcagttccgcacgagtggcgctttgattggcacgcagtttcaggtggaacgagcgcggctgttcggtacattaaaaccgttactgaatcgccttactcgtgctcaactcaatatgaaagaatatgcgcaaatcaaacacgcgctggggctctccagtaaatcgctggtgcatgaatggagcaccgccggcgtcggtgccatcaagggctattcgaactacgtcgacagcgccagccgtgcggccaagtttatgaaagccggcggctggataggcatcggattgagtgggctgaacaccaccaacgacgtctacaacgcctgcaccaccggccgtgaacaggagtgcgccaagatcgcggtgaagggatacagtcattttgcggcaagtactgcggcggggatttgggtgggaaatgcaggtgcaggtcttgcgattgcagcctgttcaattgtgttaggtgcagcaacagcaggaacaggagtgatcgtttgtggtatcgctggagccgctataggaggcgccgcaggatccacactgggtggcatgggttccgattatttgacgacgttagtggtaggtgaatga

SEQ ID NO: 429235 - DNA, 285 bp, Serratia marcescens
atgctcactgccatgattgccgcatgcgggctgtggggcgtcagctggtgcctcggcgatcgcctggccagcgcctggggcgttttgctgccatgcgcgctgatgccgctgctggccttgatcgatctcgatatgatgcagctgcgcagcctgatcgtgatagcgatgttggcgacgctggtgatgctgttcaacagccggctgcgtcattatctgctgctgccttcctgcatggcgctggcgggcggcctggcggcggtcagcctcaacttcaacttcgggtaa

SEQ ID NO: 429236 - DNA, 708 bp, Serratia marcescens
atgtccggcaaacttgaccatgccttcgctacccgcgctattcattatggctacgatcctcagcagcatcagggggcgctgagcccgccggtgtttatgagctccacttttacctttcccacggcggaatatggcggcgcttgctttgcaggcaccgaaccggggtatttctattcacgtatcgccaacccgacgctgaatctgctggagcagcgcatcgccaacctcgaagagggggaagcggcggtggcgttctcttccggcatgggggcgatcaccgcctgttgctggacgttgctcagcccgggcgatgagctgatcgtcgatgaaacggtgtatgggtgcaccttcagctattttcatcacggtctggcgcgctttggcgtcaagataacccatgttgatctgacccggccggagcggctggccgccgcgatcggtaggcgcacccggctggtgtattgcgaaaccccggccaaccccaacatgcgactgatcgatatcgccgcagtggcggagattgcacaccggcatcaggcgttgctgctggtggacaacacctactgtacgccgtacctgcagcggccagctgacgctgggcgccgacatcgtggtgcactcggccaccaagtacctcggcggccacggcgatctgctggccgggctggcggtgacgagcgaggcgctggcgcagacgatccggcttga

SEQ ID NO: 429237 - DNA, 2949 bp, Serratia marcescens
atgatgctggcaccccttacggactacaaacacggcattacgctgattcaggacagcggcattcagtttctggactttgccctgacgccgctgctggacgccgagtttcccggcaaattcgtgcgcaagaccgccagcggcccgctgctgcgcctgcaatgggaggccgagagcggcaaataccagctgccggccgtgggcgaccaggccgccgaagtggtgcggccggagttcagctatccgctgcagcagtcgctgcacctgctggataagctctggttgccgctgccctgcttgcgccacaccccggcgggcctgttcttgtcgggcccggacaactgggcgcgcctgcaggtggtgcagttggatgaaccggatcaggacggcaacctgctgcgcgtggtgctggccttcgacacccgcgctgcggcgcccggccaggaggcgctggcgccgggcgaaagcgatctcggcaccgatctccgtttcgcgctggcgcaccgcaaccacgagctgggcgagttcctcgatctgacctgggtggacggctggctgcgcgaggcgttcagccagcgcgccgccgagcgggagcagcgcgccgaagtggagatcaacgccgggctgaaaaccttcgagtatcaggcgcactacctcaatctgttgcacatgcttggccatcagctggcggtgccgcagataaagatggtggcggcgacgctgcagcaaccggcgatcgacgtcgatctggtgctggacgtcggcaactcccacacctgcggcgtgctggtcgaggatcatccggaggagagcaacggcctgaagcaaacctacgagctgcagctgcgttcgctgtccgaaccgcaccgcgtctacaacgaactgttcgagagccgggtggagttttctcgggctggcttcggcaagccgcatctgtctttccagagcgggcgcgacgacgccttccagtggccgtccatcacccgcgtcggccgcgaagccgcgcaactggcgcagcggcgaacgggccatgaaggcactaccggcatttccagcccgcgccgctacctgtgggacgaggagcgctatgcgcccggctggcgcttcaacgagcagcacgagccgatggccgccgccgcgccgttgaccaccctgatcaacgacaaaggcgtgccgctgttcgccctgccgacggcgcaacggctgccggtgttcgccgcccattacagccgcagcgcggtgatgacgctgatgctgagcgagctgctggcgcaggcgctgatgcagatcaacagcatcgcccagcgcagccgcatgccgaacgccgccgcgccgcgccgtttgcgcgccatcattctgacgctgccttcggcgatgccgaaaccggagcgcgagatcttccgccgccgcatgcaggaggcgatcgggctggtgtggaaggccctcgactggcacccgcaggatgcgccgttcgacggcgcgcacgcccgcttcccggcgccgcaggtgcagatggagtgggacgaggccacctgcggccagatggtctatctgtacaatgaaacccaggtgaacttcgccggccgcaccgacgcctttttcgccgccatggcccggcccgaccggccgctggcgccggatgagcaggcgggcaaaacgctgcgcatcgcctccatcgacatcggcggcggcaccaccgatctggcgatcacgcactattcgctcgacgacggcgtgggcaacaacatcaaaatcaacccgcgcctgctgttccgcgagggctttaaggtcgccggcgacgatatcctgctggacgccatccagcagtttatcctgcccgccgtgcagcaggcgttcgaagccgccggcgtaagcgccgccccggcgttgatggacaggctgttcggcaacgaagggcgtatggacgggctttccaccctgcgccagcaggccgcgctgcagattttcatgcccgccgggcgcgcgctgctcggcgcctatgaagaatacgacccgctggacagccgggcggaaatcgccgccagcctgggcgatctgctgccgcagccgccgacgccgcaggtgctggcgtttatcaacggcgaggtgcagcgcgaagccgacagcgacgccttcgagattctgcacaccccgctggtgatccgcctggccgatctgcacgccgccttcttgtccgatcgcatcggcatcggccgctgcctgcgcctgctggccgaggtggtggcgctgtatacctgcgacgtgctgctgttgaccggccgcccggcgcgtttccctggcgtgcaggcgctgctgcgccacctgcagccgctgcccgccagccgcattctgccgctcgagggctaccacacccgcagctggtacccgttcaacaaacgcggccgcatcgacaacccgaaatccaccgccgcggtgggcgccatgttgtgcctgttggcgatcgacctgcggctggagagtttttacttcaacgtcggcgatttccagccttactccaccattcgccacctgggcatgctggacggcaacaacatgctggcggacgataacgtctattaccgcgacatcgatctggatcgcgccgacttcgcgctcgaccccgccggcagcttccagctgcgcggcccgctgcgcctgggcttccgccaactggacaacgaacgctggccggcctcgccgctctatacgctgaccatcaatgacgcccagctggcgcgcaaactggccggcgacgcggtgatcaccctgcggctggccattaccgccagcgccgaacagggcgcggaaagcgtcaggatcgcgcaggcgttgctggccgacggcagccccgtcccggcgcaccatctgcaactgaaactcaataccctggctgccagcgcctccggcgcgacccactactggatagacagcgggagcatttacccacgatga

SEQ ID NO: 429238 - DNA, 3105 bp, Serratia marcescens
atgacaacaacaatgggttttgatagcaaaggaaatgctcgccgctcgccgtggcggctgaacgcgctggtctgctgcatggcgctggcggggtatgcacaggcggcgccgcacgaggtgaacggccaagccggcgatccggccagctggcgcaacgccgaattcaacgccaactgggggctgggggcgatccacgccgatgaggcctacgccgccggctataccggcaaagggcagaaggtgggtattttcgataccccggtcaaccgccatcccgagttcgccggcgacggcaaactgatcaacgtcgtcaccgaaggctatcgcgcctacaccgatccgcaccggccgggcattaacgccggcgaccgcttttacttcgacggcaccttccacttctacagcggctcacagggcatgctgagcaatcatggggtgcacgttgcgggcatcagcgccgccaaccgcgacggcgtcggcatgcacggcgtggctttcgattcgcaggtgatcagcgtcgataacgacaacgacggcccggcctatggtgaattcctcggcctggacggcgccgtcaccaatgccggctggcaggcgatgatcaacaacggcgtgcgggtgatcaacaacagctggggcgtcagtattcccgactttctgtccgacggcggccgcgatcctaacgcgctgcactttgagctgaaggatgcgcaggaacaattcgatcaggtcaaaccgctgctcggcagcctggccggcgcaggctatcagggcgccatcgacgccgcgcgcaaaaatattctggtgctgttcgccgccggtaacgacggcaactacaaccagccggatgtgatcagcgggctggcctacttcgtgccggacatcgcgccgaactggctgtcggtcgccagcgtggcgcaggatgcggcttcggccaacagcgtgccttacaccatcagcagcttctcttcccgttgcggctataccgccagcttctgcgtctcgtcgccgggcagcaaaatctacagcaccgtggccaacggttccgatccggccaacctggtgtcggactacggcaataaaaacggcacctcgatggcgacgccgcacgtcaccggcgcggtggcggtgttgctgcagcgtttcccgtacatgagttcggcgcagattgccgacgtgctgaaaaccaccgctaccgacatgggcgcgccgggcatcgacgcgctctacggttgggggatgatcaacctgggcaaagccattaacggcccgggcatgttctataccgtcgaggatattccggcggagttccgcatcccggatccgacgggcgtggcctacggcccgacccagtttgtcgccaatattccgggtctgggcgccgaggtggatgccggcacgctgcacgccaggaagtgtgacgacatcagctgcgaactggaagtctactccaacaacatctccggccacggcggcctgaccaagcagggcatcggcacgctggtgctgacgggtaacaacacctattccggcccgacgctggtcaatcaggggcggttggcagtcaacggctcggtcacttcgaccgtcagcgtgcagagcggcggcatcgtcggcggcagcggtacggtcggttcgctgaccgcccgtcagggcggcaccgtggcgccgggcaactcgatcggcactttgaacgtggcgggtaacgtcagcttcgagccgggttcgcgctacgcggtggaagtggggccgaacggccagagcgatcggatccagagcagcggatcggcgacgatcggcggcggcgaggtggcggtgacgctggagaacagccccaacctgctgacgcaaagcgaggtgcgcagcctgctgggccagcagtacaccatcctgagcgcgcagcagggggtgagcgggcagtttgacgcggtggcgccgaactacctgttcctcggcaccgggctgagctaccagccgaccggggtgacgctgagcgtcgggcgcaacggcaccagcttcgccagcgtggcgcagacgccgaacgagcgagcggtggcggcggcggcggatgcgctggcggcgggcaacccggtgtacgagagcctgctcggcagcggcacggcgggcgaagcgcggcaggcgttccgtcagctgtcggggcaaatccatgcggacatcgcctcggcgctggtgaacgacagccgctacctgcgtgaggcgctgaacgggcgtctgcgtcaggcggaagggctggcgagctcgtcggccatcaaggcggatgagggcggtgcctgggcgcagctgctgggggcgtgggaccacgcgtcgggcgacgccaatgctaccggctatcaggcctcgacctacggggtgctggtggggctggactcggcggcggcggacgactggcggctgggggtggcgaccggctacacccgcacctcgctgcacggcgggtacgggtcgaaggcggacagcgacaactaccacctggcggcgtacggcgacaagcagttcggggcgctggcgctgcgcggcggggcgggctacacctggcaccgcatcgacaccaagcggtcggtgaactacgggatgcagtcggaccgcgacacggcgaagtacagcgcgcgcaccgagcaactgttcgcggaagcgggctacagcgtgcagggtgagtggctgaacctggagccgttcgtgaacctggcgtacgtgaacttcgagaacaacggcatcgcagaaagcggcggcgcggcggcattgcgcggcgacaagcagcacacggacgcgacggtgtcgacgctgggcctgcgtgcggacaccgaatggcaggtgagcgcgggcacgacggtggcgctgcgcagcgagctggggtggcaacaccagtacggcgggctggagcgtggcaccgggctgcggttcaacggcggcaacgcgccgttcgtggtggacagcgtgccggtctcgcgcgacggcatggtgctgaaggcgggggcggaagtggcggtgaacgagaacgccacgctgtcgctgggctacggcgggctgctgtcgcagaaccatcaggacaacagcgtcaacgccggttttacctggcgcttctga

SEQ ID NO: 429239 - DNA, 681 bp, Serratia marcescens
atgatgaaaagcttattacctcgttccatgaccctggcggcgctggcgctgctctgtagccaggcgcaggcggaaacgctgcaaaccggcaaggacgtcgaagcccccaccgccaagtgggaaggggtggcgctcggctttgaaccgccgcagcccgggctgttgggggatatgctggggatcaggccgatcctggaggatcacggtttccactataacctcggctacctcagccagctgtcgtataacgccggcggcggttacaaccacgataaacaggcgtcgtacatcgaccaattctcgctgaccttcagccaggatttgcaggcgctgaccggcattccggacgcggcgatcgaaggcaatatcgtcaaccgcaaccatgacaacaacctgacccgcgatcgcttgcaggatccgcgcgtcggcctgaccgatctgtcgcaggagagctttggcgggcagtcgattacccgcctgggctggctgaccttcagccggtccttcctcgatcgccggctgcagtggcgcatcggcatgatgaacaaggtgcaggatttcgatcagatcatcccctgcgattttcagacgctgacgctgtgcggcggcaagtctgccaactcgttgacctggtacaactggaacgtgcattactggggcaccacgctgcaatacaagtga

SEQ ID NO: 429240 - DNA, 861 bp, Serratia marcescens
atgaacccgatatctagttttataccccatggccgtgacaggctgaaatacatagagttttcactcatctttaaaggggaggtgtcaagagcgaacctcatggatacatttggtatcaaagaggcgtctgctacaagagatctgaatcaatacattgagttaactaatgaaaagaacagtttttttgataaaaagtctaaaaaacatgtaattagagatgaaactttctctccacactttgagcttactgacatagacgcactttgctggttaaaggcggagaaagttgataagagtgaacagtattatacttacagatgccaaaggataaatttgccttcgcaaagagagtttgctccaattactagagcgatcacgcagaaatcgaaggtggagattgaatatctatcggttgataatggtatttctaaaagaattattacaccacacagtctttttgatgatgggttaaagatatatataagagcatttgatagcaatagaaagaaattcttaaacttttcaccatcaagagtggtttcctctaaactacttgactcaaagctaggtgaaggcgaaaaaattgaggatgatgaaaagtggaatttattcattgagttagatattgttcctcatccaggtataaaggtgaaagagacaatagaatatgaatataaaatgattagaggaatgctaaaaataaaagtaagagaggcaacggctgggttttttctgaggtcatggaatgttgattgttctcctgacgctacgctttcccccaaagtgtatcatttgcatttaaataatgttaaaaattttgaggggtctgaaatgctatttattgccccaacatcttggtga

SEQ ID NO: 429241 - DNA, 1170 bp, Serratia marcescens
atgctcctaactgacatacaaattcgacgttccaaaccgcaggaaaaaccctacaccctcaacgacggccaaggcctgtcccttcttatcaatactgatgggagtaaaggttggcgttttcgctatcgctatgccggaaaagccaagctgatgtcctttggcacctatcccttggtaacgctggcagacgcgcgagaaaagcgtggggaggcccgtaagcaggttgcgaatggcattgatccagtagccgagaaaaaggcgcaaaagctcgctcagaagctttctgtcgagaactccttcgaagcgattagtcgtgaatggcacacgaacaaggctgaccggtggactctggcgtacagagaagaaatcatgcgcacctttgagcaggatgtgtttccgtatattggtcaacgccccattgccgaaattaagccgttagagctgctggaagtgctgcggcgcattgagaagcgtggggcattggagaaaacccgtaaggtacgccagcgctgcggagaggtcttccgctacgcaattattaccggcagagcggagtacaacccagcaccagatctcgccagcgcgttagccgtgcccaagcaaaagcaccacccatacctttcggctgaagagctgccttactttgttaaggacttggaaggatataccggcagtattatcactaagaatgcagctaagatcgttatgttgactggagtccgcacgcaagaaatgcgttttgcaacgtgggaagagatcgatcttgagcgtgccatctgggagatccccgctgaacgcatgaaaatgcgccgcccgcacattgtaccgctctctacgcaggtggttgaactgtttaaacagctgcaaccgatcactggtcactatccttacattttcattggacgaaacaaccgcagaaagcctataagtaaggaaagtgtgaatcaggttatagagttgctgggatataaggggcgtgccaccggtcacggtttcaggcatacaatgtctactatcctgcatgaacatgggtttgattctgcatggattgagatgcaacttgctcatgtggataaaaatggtattcgaggaacatataaccatgccctatattttgaaaaaagaaaaataatgatgcaatggtttagcgattatatatatggaacataa

SEQ ID NO: 429242 - DNA, 864 bp, Serratia marcescens
atgaaaaagacagtacttataacagatttggataatacactattcgattggtttagtgtttggtaccatagtttcaacgcgatgttaaataaagtcgtcgagatttctggattccctaaagaggatttgatttctcagataagacctatccatcaaaaatatggcaccgctgaatattctttcatattagaaagcatccctttgttaaaagaaaaatatggtcatcgagattctatcaattcagcgatggatgatgctattcattcttttagaagtgagcggaaaaaatatctcaaactctatccaactgttttagaaactctaaaaactcttaaggataaggggtgttacattgtggcttacactgaatcaaaagcatattattctaattttcgactaactcgattaggcttggatggattaattgatgttcttttttcgcctgaggatcacgaaattcctgatggagagacaaaacaaggaaagtatgatctaattcatacaaagcaaaaatttacacctattgatgaaattaagcctaaccctcagcttcttctagatattatcgactcaataggagcgaagcctgaggagtgtgtttacattggtgatagtgaaatgaaagatattgaaatggcccagaaagcaaatgtatctgatgtttttgcaagttatggagttggtcattttgaagataataaagaagggtatgaattactccgcgcagtgacccattggaccgatgctgatgtagagcgagagagaaaaataaaagaaaatgcgcttggtgcaaagccaacctatgtcgcaaaacaattttcagatattttatgtttttttgattttactaaatttaaaggttaa

SEQ ID NO: 429243 - DNA, 639 bp, Serratia marcescens
atgaatgatctcgaaattagccgccatgaagaaataattaagctcgaaaaactaaagctaaaagttgacgtttggaaaactgtcattgatgtccagaaacactttaacgatctggaaatgaaagttagaaatttcggaatattaatactttcagcttttataggggcgattggtgttagttttaactccgattctacctttacttttttggggggtaattattctgtagcagttattcttgctctaggggcttcagtagtatggatgctattttattttgttgatgtctattggtaccatcctttgcttcttggggcagttaagaaaggcctcgatattgaaagtgaaatttctctcgagatccctaatataaatctaacaaaaacgattggtgataaaagtcctaaaaatattctttgttggaaaaacatgcatagtacagggaaagcgaatttattctactttggtgttttgtttgtcctgctttcctcagctatttctcttgtgtgttttaaatctccagataaatcaaatcaattaaataacctaaagtttgaggcatcttgcataaggaatgataattataacggtgttagttgcatcattgcatctccatcggatgccattaggctaaaatag

SEQ ID NO: 429244 - DNA, 1173 bp, Serratia marcescens
atgcctttaaacgatatgcagattcgccgcgctaagcctgaagctaaagcctatacacttggagatgggcaagggctgtcattgcttatagaacctaatggaagtaagagctggcggttccgctatcgctatgccggtaaaccaaaaatgatctcgcttggcgtctacccaacgatcacattagcagatgctcgttctcgccgtgatgaagctcgaaaacttgtggcagaaggaaagaatcctagtgaggttcgaaaagagcaaaagctagctctgcaaacagagtcagagaacgctttcgaaaagatagccagagagtggcaccagcttaagtctacaaaatggtcgtcgggatatgcctcggatatcatcgaagcgtttcagaacgatattttcccttatatgggggcgagaccagtaggcgaaattaaaccgttagagctgttaaatgtgcttcgtaaaatagagaaacgtggtgctttagagaaaatgcgcaaagtgcggcagcgctgctcggaagtttttcgctatgccattgctacggggagagctgagtttaatcctgcggcagaactctcaagcgccctcgaagtacatcaatctaatcacttcccgttcctaaaggctgatgagatacctgatttccttcgcgccttaaacagttacaccggaagtcggcttgttttgattgccactaaattactcatgattacgggtgttagaaccatcgaattacgtgcggccttatggtctgaatttgatctggataacgctatttgggaaattcccgctgaaaggatgaaaatgcgtaggtcacatcttgtgccattgtctactcaggcgttagatttactcaatgaactcaagatcatgacagggaactatcgttatgtttttccggggcggaatgatccgagcaagcctatgagtgaggcgagtattaatcaagttatcaagcgtattggttatggtggaaaacttactggccatggatttcgacattccttatctactatcctccatgaaaaaggatatgattcggcttggatagaaatacagcttgctcatatagataagaataatattagaggtgcgtataatcatgcccaatatattgataagcgccgggctatgatgcagtggtattcaaattacgctttaatgaatggatga

SEQ ID NO: 429245 - DNA, 3105 bp, Serratia marcescens
atgagcgtaccgcagacactaattgataaaataaaaagaggaagagttgtactatttctaggctctggagctttgattggcgcaaaattaaaaaagtttgatgtccccaaagggaatgatttaggaaatctaatatctgatcggtttcttaatggtgattataaatatgagtcactaactcaaattgcagacctcgcaatttcagagcatggtatcattgatgttcaggagtttatacgagaaatatttgaagatcttgaggttaatgatttccataaaatcatcccagattttcaatggaaagcaattttctccaccaattatgatcgaatgatagagttttgttacgaaacaaaaaaaaccaatcaaacactctctattcatttatctaataatgatggatttcaagagggtgagaaaactactgatatactgaattttgtaaagctgcatggatgcattaccagaactagagaccccgatttgccacttattttaacggtggaacaatttaatgaatatgaaaataatagaaatttactatttaaatatttatatgaattagcaatagagtatagcattgtatttataggtcatagtttacaagatgccaatataagacatattatatcaatggttaataacaatgttcctcaggggcagagacattatctattaaaaccaggcattaaggatccagaaattaatttgtgggcttcaaaaaaaataaatgctttagattttacatttgaagattttttaaggaaagtgaatgatttaattcctttatctgaaagatttaactatcttattactccaatatcgaataatgcgattcaaaaaatatttgtaactaatgcccccccatcagaagagctaaacaggatacttactgacagtatacaatatatacattctgacatgaatgtagaacatttcaaccctaaggaattttacaaagggtcagatttaggttggtatgcacaaagtgcagaattagccattaaaagaacgttgttagatcgtttcttagaagaaataatattaaagcctgaaactgagagaagtgatattacagagttaattttacttaagggcgaagcaggttcagggaaaacggttttcctcaggcaagttgcttgggaaatgagagttatggatttcggatgcgcgctttgggtcaacaacggagataatttaaccgtcgaaattattaaagaaataatagaaaaaactaatgaaaggatatttatcttttgggatgacgcgtcattgcacgcaaacaaaatggctgcgcttattaatagcgctgtaaaatccgaattaaaaataacaatcataactgcagaaagatataatgaatggagccaacgttgcgatttacttaaggaatcaattactgaagtgtattcattgcgtaacctgagtgagttcgaggtagctagtttagtagaaaagcttgagattcatgattgcttgggccctaatcttataaataaaactaaagctgagcgcatacaagaatttattgttaattcagaacggcagttattagttgctttacatgaagcaactatgggtgagccatttgaagatattatctttaatgaatatgaatctatatatcctattcaggctagaacaatctatcgtacaatttgtacgttaaacagattacgtgtcccagttagagccggtctaatcgcaaggatttttggcattaacttttcagatttcaaacaacaattctttactccattagaaaagatagttttatgggattctgaagggaatgatgattaccattacagagctcgacacgccgaaatagcagaaattgtatttaatcgtgcattcggtagtactttagaaaaatataatgaatatacccaaatattagataaaataaatattgcgtttgaatctgatcggatttcattcagacagtttatgcgcgcaaaatcactccatgagatttttcctgactatcaagacgtaaatggtatttatcaaaaggctttgaaaactatcggagaagacccgtatttgctgcaacaaatggcaaactttgaaagaatacggccaaatgggaatttatcacttgcgatcgaattgctagaaagtgctaaggaaaaagcaccttatgatagtagcataattcatacaatggctactgtatggcgagacaaagccaataatagcaatgaagcctacgaccggataaagtttcgtggagaggctcgtcatttattacaggaagcacaaagacgttggggtggaagcccatatatttctacaactcttttagagttgtctatcgataactttgaagataatatgaaggatgacaatgtttctggtaaagttatagatgatcttattcgaaggattgaggaagaaattactattagtaagcaaaaatatccagacgaaacaatgctttctaacttagaggctaggtttgctgggattatgaatgatgatggaagaattttaagttcacttatttctgcttttaatgataactccagggatccttttatcgcaatacgactctcaaaaatttatattgataaaggtgattttaacgaagcctcaaaggtacttacgcaggctttagaaagaagaagaagcgatcaccgattgaattaccaatatgctgagcttctcagaataatggatccctcgaaaagagcttcgttaatttattattatagaagggcgtttactccaaacgaccagaattttcaagcgcaattctggtttgcacgtttcgcatatgagtcaaatgatatcaaagatacttctttatctgctgatattttcgattatctccgcaccgctagaatatcaaaagatgatcggtttaaaatcagagattatataggtggacaagtttgtgcaactattttcagagggagtttgaaaggggttaatagtggatttgggtttgtgacagtcgatggaagtggaaaggatatttttttccctcgctctgaggtacaaaacgatctttgggaggcattgaaggcaggcgacaggttgaaatttaatataggtttcaattatgcaggccccgtagcatgtaatatcatcccttcttag

SEQ ID NO: 429246 - DNA, 246 bp, Serratia marcescens
atgatgcagctaaccttgggtcgccagcatttcaccctcgatgagcgcgacgcgctgtttgtggcggaagctatcctgttgcagcgtaaagagcctggcgtcgtcttgccggagcaccgcagcgaaaaacacggcgttattcgtctggcgagtcgccaggccgagccgcgcctgttccgtgccgggccggtgccgctgacctgcgcggcggccgatacccgcaacgatcagcttaccgactgttga

SEQ ID NO: 429247 - DNA, 192 bp, Serratia marcescens
atggctacgaccctcaccccgactcacccgacatactgctttttgtttgcggccgtgcgccgtgctgcgctgacggcttcaccgcgtatggtgcgcaccgtggcggatagcgaacgcaatgcccgccgcgtgctggcccgtgattacgtgttgtcctttgccggtcgtctggcggttaaggcggtggcatga

SEQ ID NO: 429248 - DNA, 264 bp, Serratia marcescens
atgaacaccctggccgaccgctactaccgcgatacccattaccctatcccgcatgccgattttctgcgtcttcagcatgcgcacgccaccggcgtgctgttccttgacctgctggacaccctcgacctcggcgggcagcgccccgatgccgtgcaacaggcgtcgtttgcctcggtcattgccttgctgaccgaccagctcggccacgtcgtcaacacctgtgaaacccaaatccttgcccgcatggaggccaccgccgcatga

SEQ ID NO: 429249 - DNA, 666 bp, Serratia marcescens
ttgcttgtcgtggttgcccccggcggcccgcgtcagccactgccagaagtgcggcgcatggtcagccagattctcaccggcacgcggcggcgtgtagtctacgctgttgacggtgcgcagccagtgttcttgccggtgagcactgaactggccgctgacgatatcaaacaccccgttacgaaaaccaatcaaccggcgggcaggctcgcccatctgcggcaccatcagcttgagggtgtccaggatgctgttgataccggcggcggagaaaggtgctcgtaccttctggaacaacgcggcaatctcccggctcagctgtcggtgtggcagcacctgccaggcgccgcgcgtatagcggcacagctcttcccctaccggcggcaccgccagggtgttgccgtaatgctcggccagcagttcggctttctcactggcactcatggctttcaggtcagcatcgctcagcgtgtcgaacgggctgggctgcggcggctggctgagcgcctggagctgcgcgcgcgtggactcagcgccctgctgacagtagacgtcgttccagtcgccctccgtgggcggcagcgccggggcgccgccggtgagtgtggccgcctcggcggcgcgggtctgcccggtgccgctgcggtcattatcggccgccagcagtag

SEQ ID NO: 429250 - DNA, 192 bp, Serratia marcescens
atggctacgaccctcaccccaactcacccgacattctgctttttgtttgcggccgtacgccggtctgcgctgacggcctcaccgcgtatcgtgcgcaccgtggcagatagcgaacgcaacgcccgccgcctgctggcccgtgattacgtgttgtcctttgccggtcgtctgccggttaaggcggtggcatga

SEQ ID NO: 429251 - DNA, 264 bp, Serratia marcescens
atgaacaccctggccgaccgttactaccgcgatactcattaccctatcccgcatgccgattttctgcgtctccagcatgcgcacgccaccggcgtgctgttccttgacctgctggatacccttgacctcggcgggcagcgccccgatgccgtgcaacaggcatcctttgcctcggtcattgccttgctgactgaccagctcggccacgtcgtcaacacctgtgaatcccaaattcttgcccgcatggaggccaccgccgcatga

SEQ ID NO: 429252 - DNA, 540 bp, Serratia marcescens
atgcagttcagcgaccgcagcggcggggtatcccgtcggcgggtgattattaccttcccggacgcgataccgctggcagaacgtgacccgcagctattggacaaaattactaatgagctgtcagtcattgtgcgccacctgatgcaacgcttcgccaacccgaatgacgcccgcgtactgcttcaggcgcagcagagttcggcggaagctctggaaatcaaacggcatgccgatccgctggtcgatttttgtggttacctgacggtgctgggtaccccggaagggatgatgatcggtaatgccaacatcaccccgccgaacccgcgccgctatctgtaccacgcctacctgtcgtttatggcggcacggggctatcagcacgtgatgaacctgacggcgttcggccaggcggtgccgcagacgctcaaagagtacgaacacacgctgctgaaacgccgcaccaagcagggaatacaaaccaacctgatattgagtgaagagtgcgaagcggactggctgccgaagtgcggggcggtgtga

SEQ ID NO: 429253 - DNA, 279 bp, Serratia marcescens
gtggcgcaggcctatctggatacctgcgccttttaccgggtgagcctcggatacacgctggacgagctgcagatgacgattgccctgcgtctggaggggcactttgtgcatcagtacggcccggaggatggcatggacatggcgtgcaccatgctgagcgacatggtgcagccggacgttctggtggccgcgccgcgcctgactgcgctggggcaaaagatgatggacgaactgtgctgcgagcgcctgtcggcggcacagaacgccaccgtacactga

SEQ ID NO: 429254 - DNA, 1203 bp, Serratia marcescens
atgacttctgaccagacaaaccgcagccaggtgagcctattggcggcgttgacgatcgctttattttttatcttgttgaacagcggttctcccacgccgttatatcccctctatcaagaaacccttggcctaagtaatatcgacctgaccttcattttctcttcctacgggtttggcgtattgctggctttgtttttatcacgcaggctcaccatcaccgataaaaatgcccggctgctggtggtggtgtcgctgatggtggtggtggtgcctacgctgtgcttttcctttgctcgttctttgcaggcgctgtgcctgttcaggtttatttccggtttaggggccggtacggccacggccatcatcaacatcttgttgattaacgtcagccgcggcgacagcgccaaacgcgccgcgctgttgggcagcctggctttggtgaccggcctggcgctgggcccggtgatcagcagcgtttacgcccagctggcgttttatccgctcacttcgccggcggtgaccatcgccgcattggttttcctctccgcgatcgccatcgtcctgctttggccgaagaaaggattgcctaccctcggcgttgcggacacgaaaacggcagaaaagggcgccggttttagccaaccgctgttctatctgcttgcgctatgcgtgtttatctcctggtcatacgccgcgctgatcctgtcgttggggccgacggccgcgatccaggtcttcgggctccagtcacccgcgggctttggctatatcgccaccggttatttactggtggccggcgtggtgcagttcacgatcccgcgttttctgaagcctgagttttctttggtgctggggctgattgcgcaggttttctccatggtgatgatgaccatggcgctcgagagcggttctgtggccagcgcggcggtgagtctggtgctgtccggcttctcgtacggcgcggtttttgtgggcggtgccatcctggtcaataagctctcgctagcggcgccagggtggaacgcggtgtcgaagttttactttatcgtctatttgttcaatatcatgccgccggccgcaggttggctggcggataaaataggggtagtgagcgctttgttcgccgccattgtcctttttatggcgatatacatcgcctttgccgtgctggcgctgtgggcgctgttgctgagaaaggcctga

SEQ ID NO: 429255 - DNA, 1857 bp, Serratia marcescens
atggactatcaaaaacttggcttagaaatactggcgcgggtcggcggtaaaggcaacgtcagcaagctgacgcactgcgcgacccgtttgcgcatggaattcaacgacgacagcaaagtggattcgaaggcgattgaagccctgccgggcgtcatcagcgtagtggtgcgcggcggccagtttcagatcgtggtcggcaataacgtgcagcaaacgttccgcgtgctgcaaaaagagattggccagccgcaaacgggcgctcaaaagcagcagccgaaaggcggcgtggtgtcgcggattatcagcgtgatttccacgacctttaccccggtgatcccggccattaccggcgcggggatgatcaaggcgctgctggcgatcctcaagctggccggggcgatagatcccgccggcacgacctatcgattactggataccgtcgccgatgcggcctttttcttcctgccggtgctgttggcttacggcgccgcgataaaattcgagtgcaaccccattctggcgatgactcttgccggcgccttgctgcaccctaatctggctcagatgctggcggcgggcaccgcgattgattttctcggcattccggtgcggctggcggattatgccggctcggtgttgccgatcatttttaccgtgtggctgatgtcttatatcgagcggtttgccgagaaggtttcgccgacgatgatcaagttcttcaccaaaccgatgattgtgctgctggtcaccgcgccgctggcgttggtggtggtcgggccgttcggcattttcctcaatgacatggtggccaccggggcggcgatcgtcgatggcaaggccggctggctgattccgatgttgatgggcgggctgcagccgtttttggtgatcaccggcaccgcctgggcgatgacaccgatcgccaccggccaattgaccaggaacggttttgagatgattaacgggccgggcatgttggcatccaatattgcgcaaggcgcggcgacgctgtgtgtggcattccgcaccaagaacacgaatttgcgccagttggcgtcctccgccggttttaccgcgctgttggggatcactgaaccctcgctgtacggggtaacgctgaaactgcgcaagccgttgatcgcggcgatgatcggcggcggctgcgccggcatttacgccgggttgagcgggttggtgcgctatgccttcgtttctcctggcctggccgctttgccggcgtttatcggtgagaacccgatgaatatcgtgcatgcgctgatcacatgcgccattgccatcgtcgtgacctttgccctgacctggatccttggcttcgacgatccgatcgaggaggcgaacgaagaggctcaggtggcggcggccgacgaagtatcgccggttttcagcccgctgaccggcaaagccgtgacgttggatcaggtcaacgatgacgtcttctcccaaggcttgttgggccagggcatggcgatcataccctcggaaggtgtgctgcgcgcgccgctggacggcgagatcgtgactttcctgccgtcaaaacatgcggtaggcatcaagggcgacaacggtgcggagctgttgttgcatatcggcatcgacacggtaaacctggggggccaacactttgactccgaactgcaggtcggcgatcgcgtcaaggtcggcgacgagctggtgcgttttgacatcgacgcgatcgccgcattaggcttcgatttgacgacgccggtcttggtagtcaacagcgaagcgtttcaggttcaggcgttaccgaagccgcatggcgttcatgccggtgagacgattatggcgctgaaggccaataaggagccggcatga

SEQ ID NO: 429256 - DNA, 1425 bp, Serratia marcescens
atgatttatcaacgcttgcacgattttcccgccgagtttctctggggcgcgtcgacttccgcttatcaggtggagggcgcatggagtgaagacggcaaaagcccgtcgatcgtcgatatgctggaacatcccgcaggcacggcggattttacggtggccagcgatcactatcatcgctttcgcgaggatgtgaagctgttcgctgaactggggttaaaggcctaccggttttcggttgcctggacgcgcgtattgcccgatggcgtcggcgcagtcaatgcgccggggctggcgttttaccggcaattgatcgacgaattgctggcgcacggcatcgagccggtggtgacgctgtaccatttcgatctgccttatgtgctggagcagcagggcggctggtccaatcgcgccaccatcgatgcttttgtcgcctacgccggcgtgctgttcgacgccttcggcgatcgagtgaagtattggctcaccatcaatgaacagaacaccatgatcctgcaccccggcgccatcggcatgcccaaaggcggcgcgttgcctgacaagcggacgctgtatcagcagagtcatcatatgttggtcgctcaggccaaagtcatggcattatgccatcagcgctgtcccggcgggaaaattggcccggcgatcaataccacgtcgatgtatcaggagacctgccatccgctggatgccattgccgcccacaactgggagacattgcgctgttggagctttctcgatgtggcggtgcatggccgctacaacgccctggcctggcgttacctcgaggatcggggctgggcgccggaccgcgagccggaggacgcggcgctgctgttggcggcgcggccggattacgtggcgatcaattactattccaccgccacgatcgccgccagccgcggcgacggttcagacgtgagcgcacgcgccggcgatcagcaaatcatgctcggcgaaccgggtgtttatcgtgcggcggaaaacccgtttgtcggcaagacgcgctacggatgggtgatcgatccggttggcttgcgcttaacgctgcgcaaaaccttcgaacgttatcacctgccgatactcatcacggagaacggtattggcgcgccggatgaattacgggcggatgagaccatcgacgacgactatcgcattgaatttatgcggcagcatgtcgaacagatgcgactggcgatcaacgacggcgtcgagctgctcggttactgcccgtgggcggcgattgacgtcgtcagtacgcatcagggctacgccaagcgctatggatttatctacgtgaaccgcggagaaggggatcttaaggatctgcggcgcatcaaaaaacgcagttttgactggtatcggcggcttatcgccgccaatggccggttaggcaagttaggcaaataa

SEQ ID NO: 429257 - DNA, 843 bp, Serratia marcescens
atgaaagtcattaaggttctcaacaacagtctggtgttaaccgcggacgacgataaccgtgaggttatcgctatgggtaagggaattggttttaacagcaaaaccggagacgagatcaacccggccgccattgagaaagtgtatgtggtgcaggaggggcaaaaggggcgcgattacctgcggctgattgaaactgccccgacggaacacatcgaaattgtgcagatgatcctcagtgaggccaaccgccaactgaacggcaacattaatgaacagattttctttacgctggctgatcacatcagtttcgctattgagcgtcatcacaagggcattgccatccaaaaccgcctgctgttcgaggtgaagcgcttctacccgcgagagtttgcggtggggctgcaggccttggcatacattaaccagcggctgaatatccatctgcccgaagaggaagcgggcaatatcgcctttcatctggtcaatggccagaccgaagtgcaaaacatggagcacacgttgctggcggtgaagatgctgaaagatgttttcaatatcatcaagtatcactttcgcatcaatatcgacaccgattcgctgaactatgcgcgctttttggtgcatatgcagttctttatccagcgcatgattgacggcaagcagatggcctcgaaggccgattttctgtttgcccagatgaccgccgagtacccgcacgcctatcgcggcgcgctactgatccgcgattacgtgaagaatctgctgcaaatggagatgtcgaacgatgagctgctgtatttgatgatccacctgacgcgcatcaccgatcagccggaggcctga

SEQ ID NO: 429258 - DNA, 1176 bp, Serratia marcescens
atgttaaatggtgaaagaagcatccctcgcccgctgcgttgggcgatgatcggcggcggccgcctcagccaggtgggctacaagcaccgttccggcgcactgcgcgacaacaccgcttatcggctggttgccggcgcttttgatatcgacgcggcgcgcggacgtgagtttggcgtcaacctcggcgtgcccgccgaacgctgctatgacaactatcaacagctgctggatcaagaagccgaccgcgaagatggcgttgaggtggtgaccatcgccacccccaacggcacccattatgcaatcacgcgcgccgcgctgaatgctggcctgcatgtcatctgcgaaaagccgctgttcttcaccacggcggaggcgagagaaatcaaggcgctggcggcggagaaaggcctgatcgtcggcgtaacctacggcttctccggccatccgctgctgatgcagatgcgcgccatgatcgcgaacggcgacatcggcgaaatacgcatggtcgaattgcaatacacccacggtttcaatgccaacgaaagcgcggacacgttcgaggcgcaaaagtggcgcgtcgatccgaaaatcgccggcccctcttttgtgctgggcgacatctccacccataccttctacatctcgcagctggtgatgcccgatatgaagattgcctccctgctgtgcgatcgccagagctttattccttctcgcgccccgctggaagacaacgccatggtgctgatgcactacgaaaacggcgccgtcggccgcatgtgggcctccgccgtcaatgcaggcgcaatggacagccaaagcatccgcgtggtgggttcgctcgccagtctgcagtggagcgacgctgctcccggcgaattgcgccatgagatccaggggcggcccaaccagatcctgcaccacggcatgccctatctggacgacagcgccctggccgaagagcggctcggtgcgctgcataccgaagggctggccgaatcctgggccaatatctacctcaagttcgccatcgccatcagcgccagccagcgcggcgatcggcagacgctggccgcgctgatctatccggatatcgacgccggattggaaggcgtgcgctggattgaaaactgcgttcgttccgccgacaacggcgccacctgggttaattaccaataa

SEQ ID NO: 429259 - DNA, 252 bp, Serratia marcescens
atgccaagcggatacggcgaaaagcttaaagcagttcgtaacgcagagaaattgacgcaacctgaattagcacagttaacagggataagcctgggcgcgattaggaattatgaaacctgtcagcgagaagtagggcttggggttctggataagattgttaaacacccccagttcgaaaaatacacgatgtggatcatgaccggaaagaccatgcccgaagtagggcaaatctccccggaccttcgcccttga

SEQ ID NO: 429260 - DNA, 294 bp, Serratia marcescens
atgaaactaagcgaaaaaatcaaggctatcagagagagcgaagatcttagtcaggttaaattttgtgaaatcatagggttatccataaataccctaaaaaagtatgagggtggcaagtttgagccaggcggtgaaatgctgaccaaaattactcaacatccgcagtttgagaagtacacaatgtggttgatgaccggaaagacaatgcccgaagtagggcaaatttcaccggctctctcccctgatgggcaaaacagcatctccaaccaccaaaccggccgagaggctggctaa

SEQ ID NO: 429261 - DNA, 351 bp, Serratia marcescens
atgaaaggccaagctcaaagaaaggtaaacgaagttaatcgaccgcgatcactggttcgtggtgggcatctggccgggcgctctacctcagaaaatcgcgctaccgagttggcgctggagtacatcacaaagaacggcatcaagccgcgaatgaccctcaaagaattcgccgaattcttcaagatgccgctggaacaggtgcaaagcgatgcgcgccgcaactacctgccgttgatgcctcgcacgaccccaggccgccgcgaactgttgcaggtgaacatggttgcgtactacgcccacagcctggcggccagcggcaactacatcgcgaacgctacggcatttcaataa

SEQ ID NO: 429262 - DNA, 201 bp, Serratia marcescens
atgcacgaattaattaaagtgagccggcattcattgagttatcgcggattcgtcattacccatcgcccacgcaccgccgtaaacaagatcgccagatatgaagtaagccagggcgatcagtcttatggcttattcgatgcgcaagcacaggcgaccggctatatcgaccaactttactcacagcaccaggcggctgcatga

SEQ ID NO: 429263 - DNA, 273 bp, Serratia marcescens
atgaaacaggcatacatcacattagtgggcgatcttctggcgcagtaccacgccaaagccaacaacatcaacgccgccacggcgatcgcgccagctgtacgcgctgtttcgctgaacgattacgcattccgtctgtgcatcggcctaactggcctgctgagtacagcagaagccgccggccacgccccggacgccgccgttatcgacagtctgatcatgcgctgcaacaacggtgatattcctcaccctcgtgctgttgaacagtccgcctga

SEQ ID NO: 429264 - DNA, 198 bp, Serratia marcescens
atgaatgatgtcgcgttaatggaattgctgacagaagcccgccgcgcttcacggctgcaacttctggagttgttgagcacgaggattgaacgccttgaggccgacaacgccacccgcgatcaaatcatttccatgctgaaaagctggatttcagcccgccaaaagatcggcactcaacaagacgatgccgcgaaatga

SEQ ID NO: 429265 - DNA, 822 bp, Serratia marcescens
atgaccagaacagtccttaagtggctgggcagcaaagccggcattattgacaccttgcgccagcacctgccagccggtaagcggctgattgagccgttcgtcggcagcggcgcggtgtttctcaacaccgactatgaaagctatttgctgtgcgatatcaacagcgatctgatcaacttccacaacgtcgccaaaaacctgccggacgtcctgatccgcgaagcgcgcaacctcttcagggagcacgccagcgaggccggatattacgccgtgcgggccgattttaacctgcgctgcgacagtaatttcctgtaccgcgccgcgcagttcctttacctgaatcgccacggcttcaatggcgtttgccgctacaacctgcgcggcgagtttaatgtgccgttcggtcatcgaaaagcgccctatttccccgaagacgagatccgagctttctctgagaaggcgcaggccacaaaagcgattttcctgtgctgcgcattccaggaagcgatcaggatggcacaggccggcgacgtgatttattgcgatccgccctacatcccggccagcgccaccgctaatttcaccagctaccacaccgacggctttaccagcgaacagcagagaaagctggcgcgcatgctgcgcattgcggcaaaacgcggccgccacgtcgtagcctcgaacagcgaaaccgacgccgcgcgggagctgtattccgatttcaccatcaccaccgccaccgcccgccgttctgtcagcgccaaagctgccagccgcgcaacagctggcgagatcatcgcaactttgaaggcaacagcatga

SEQ ID NO: 429266 - DNA, 270 bp, Serratia marcescens
atgaaaaaacacgaactaaagatcctgccggagcatttcgcggcagtggtcagcggtgaaaagaaagcagagtttcgcatcaacgatcggggctattccgttggcgatctggtgtgcctgttcgaatacggatggctgaaggattgcgatggtcttgaaggattttcaggtcagcacgtttgggtgcgaatcacccatgttaccgatttacacccgtggaaaccgggttacgtcatgttgagcatcgaacgagggccattcaaatgctga

SEQ ID NO: 429267 - DNA, 918 bp, Serratia marcescens
atgctgaaagtgagtgatctctttgccggcctgggtggttcatctaccggcgcacaaatggcaggtgctgaagtggtttgggccggcaatcactggccggccgccgtcgaagcccataaggcgaaccatcccggcgcaatccacgtttgccaagatctgcaccaagctgactggtcattgatgcctaagcacgatctgatgatggcctcaccgtgctgccaaggccacagcaaagcacgcggtaagaaggcaggaaacccgcagcacgacgcaagtcgttccacggcgtgggcggtggtatctgctgccgagtaccacagaataccgaaagtcatcatcgaaaacgtgccggagttccttcagtgggggctttacccagcatgggaagcggcgatgcaagcgctgggatattctcttgcgccgcacatcgtggattgtgctgatctcggtgttccgcaaaaccgcgtgcgcctgttcattatctgcacccgtagcaaaaaaccactgtttctgaagttaccgaaaatgccgcatgtaccggccagcacctttatcgatttcgacgctggcaaatggcaaccgattgaaaagccagggcgcgctgttgcgacgctggagcgcgttaagaatggccgcgcacaattcggcgatcggttccttttcagctattacggcaacaccaaaacaggccgctctctttcccgtcccattggcacgatcaccacccgcgatcgctgggcggttgtcgacggcgatcgcatgcgcattttgacccgcgacgaaaacttgctggcgatgacgttcccggaggactatatcaaaccgccatcgcacaagctgtgcgtacacatgggaggaaacgctgttccaccgaaagccatgtgtgaaattatcactgcgttggaaccgcaagcgtga

SEQ ID NO: 429268 - DNA, 2529 bp, Serratia marcescens
gtgaataaagcgtcacgcggccgctatgagccatcaccgccgttgccataccctggcagcggcgcgcctgcttttgaatgggcctttccgtggaacgccccacgcccggcgatcgatccacctgtagacctgctggcagaaagccaaaaacagaccgaagaacagatcgccgccaccctgcgcgcgcatcatctgcttgagcagcagccgcaactgatacagcgcgatgtgcattaccacatcagccagctggaagaatcacagggcatccgccggggcaatgcgtacttgacgaaaaactttgtcgagcgcgtattgccacggcttgatctcgtcaacgagaaataccgcattccagaaaacaacatcgacaccgatctgtgccagcggttcaatcggctgccagatgccagccgcgccgacgtcgagctgttggccaaggatatcgcgatcaccatcaagcgcgagttaagcgttatcgatgatgattccggcagtgcttcagagttcctgagcgtgttggagctatacctgggcgcagctgccttgacccgccgattcaaacagaccccgccgctgtgggatacctatcagtctgacagcgaaaaaatgatggtcgagaataccgggccggcggtgcggcgcatgctgtcagaaaactggtggctgcaccgcctgcgtcggcatgctgatcgatggaaagagcacttgcatatcgcgatcggccacgtcagcaagaaggcgacgccatacgccagccgcccaacggtcggagactggcgggagcagaagcggcgcacacgcgaatttctcaagtcgatggaactggaagacgacgagggcaaccgcatttcgctgatcgacaaatacgatcacagcgtggcgaacccggcgatccgccgttgcgagctgatggcgcgcatccgcggctttgagaatatctgcaatgaaatgggctttgtgggggagttttacaccctgacagccccctctcgcttccatgccaccaacaagcacggccaccgcaataaaaaatggcacggagccagcccggacgaaacgcagcgctacctgcgcggcgtctgggagcgcgcccgcgccaagctgcaccgcgaagacattcgaatttttgggatccgcgtggccgagccgcatgccgacggtacgccgcattggcatatgttgctgttcatgcgtcctgaggttgttgaccaggtgcgcagtattttgcgcagctacgcctgcgaggaagacgccggcgagctgtatagcgagcgcaccagaaaggcccgtttccacgctgaagccatcgacccggagaaaggcagcgccaccggctatatcgccaaatacatcagcaaaaatatcgacggttacgcgctggagggcgagctggacgacgacagcggcaaagagctgaaggaagtcgccccggccgtgtctgcctgggcggcccgctggcgtattcgtcagtttcagtttatcggcggcgcgccggtaacggtttaccgtgagttgcgccgcatggccgatcatgaaaccgccgtcggcctcagcgtcgaattcgctgccgtgcacgatgccgccgattgcgggaagtgggcggagtacgtcaacgcccagggcgggccgtttgtccgccgcgatgatctggtcgtgcgcacctactacgagccggcagaaacacccaacgattacggcgaagacgtgatccggatccgtggggttttctctccaccggtcggcatcgacacgccaatcatcacccgcacgacagaatggaagtttgtgccggcgcgcgccgttgacctggccgttgaccttaagggcgcgccagcgccctctcggagttctgtcaataactgtacggcatcgccggaaaggttgaaaaacaaacagccaccggagacaccgccaccacctgaaaagctcaattttgagcaattaaccgacaaagaacggcggttgttgctccggcggatacgcagcatatcgccagaaagagtgaaaaacccatacgcggcagtcgccgagggcttcgccttgcctgatgagggggattatctgccccaaatccgggcaaaacagcccgatccagacaacctggcacgctggcgagaacagattcaccaggaacagcagcagcgtgcgctggcgtatttctacctgggcgacattcaggatgcggtagctgacagaccggcgggctcaaacgaggggatcggcacgattcgccggccactcagcccgcaggaacgcctaatagaaagctttgctgagtcgataggcttcagcctggatgccagcattttgaaggcggcggccaaaggggcaacggtgatcgttgacggcaagcgatatagagcgcgggctgacggttgcttgtacctgcaaccgacaccagcagccacaccaagcgcgctgactcgccttactgcgctatggaaacggcaggtatccgagaaggaaaggcttgtcggcaatcatttgagaagagaagcggcaaaacaacaggaatcggaggaatag

SEQ ID NO: 429269 - DNA, 345 bp, Serratia marcescens
ttgaccacatcagcagaacgtaaacgcagccagcgccaacgcgacaaggccaacggcatcaccacgataaccctgcgtgtcgatagccaggaaatggcgatgatcctggaaggttgccagcagcgccggatcgcgagggaaccttacgaggtgacggaatacctgatcggcctcatacgacaagacaacaagctgttgcataaacagctggcagagttgcgtaaaagtagctgccggaagtgtggagataccctaccgggtgagctaggcgggtgttgcatgcagggagattctgagtgctggcagactaccggctacaaaaagctgatgctgacaacactatag

SEQ ID NO: 429270 - DNA, 879 bp, Serratia marcescens
atgaaaaaacacagtaacaatttagacttattcgatcaaacagaagagtgtttggagagcaacctgcgttcttgcaaaattattgtaggcgatgctagggaagcagttcaggggttagattctgaaatatttgactgtgttgttacatccccaccttattgggggttaagagattacggtaatggcggtcaaataggcgctgaagataacataaatgattacataaaagatttagttgatctatttagagatgtaagaagaactcttaaagatgatggaacgctatggcttaatataggtgacagctatacatctggaggaagaacttggcgtgataaagatgataaaaacaaagggcgagcaatgagctatagaccgcctacgccggaaggtttaaaaccaaaagatttgatcggtgttccatggcggctggcattcgcacttcaaaatgatggttggtatttaaggactgatatcatatggaacaaaccgaactgtcaacccgaaagcgtcagagatagaccaactagatcacatgaatatatatttctcttatctaaagggaaaaaatattactatgattgggaatcaattaaagaaccggcatctgatcctaaaatggataagaagaaccggcgaactgtttggaatattaacacagaaccgtatccaggaagtcacttcgctgttttcccacgtgccatggctaggttatgtgtgttggctggctcacgtcccggaggaaaagttcttgatccgttttttggatcgggaaccacaggggttgtttgccaagaactcgatagagagtgtgtcggtatcgagctcaatgaagaatatgcttctcttgccaaagagagaatattaaggcggcggtag

SEQ ID NO: 429271 - DNA, 744 bp, Serratia marcescens
atgagcagggatgaccaactctttacactttggggaaagcttaacgatcgtcagaaggataattttctaaaatggatgaaagcttttgatgtagagaaaacttaccaaaaaacaagtggggatattttcaatgatgattttttcgatatatttggtgatagattaattactcatcatttcagtagcacgcaagctttaacaaaaactttattcgaacatgcttttaatgactccttaaatgaatctggagttatatcctctcttgcggaaagtagaacaaaccctgggcatgacataacaatcgatagcataaaggttgctttaaaaacagaagcagctaaaaatattagcaaatcatatattcatgtaagtaagtggatggagttaggcaagggggagtggattctagaattattattagaacggtttttagagcatctagagaattatgaacgtattttcacactcagatattttaaaatatccgagtataaatttagctaccagcttgtagaaatacccaagagtcttttgttggaagcaaaaaatgcgaaattagaaataatgtcgggaagcaaacaaagccctaagcccggctatggatatgtgttagatgaaaatgaaaataagaagttttctctatactttgatggtggtgccgagagaaaacttcaaataaaatatttaaatttagaacattgcattgttcatggcgtttgggattttattctaccgccgccttaa

SEQ ID NO: 429272 - DNA, 1038 bp, Serratia marcescens
atgagcaagcgcaaccggggccgcaagcacgcccagccaacgacacagaaacagactggcgcgcgacacgtcgaggcgtttaccttcggcgacccgatcccgatgctggatcggcgcgaaatactggattatctggagtgctgcgtcgtcgatcgctggtatgagccgccaatctctttcaacggcctggcgaagacgttccgcgcggcggtgcatcacagttcaccgatcacgatgaagcgcaacatattagtaagcatgttcaagccccaccggctgctgtcaaagcaggatttcagccgctatgcgcaggatttcatggtgttcggcaacagctttatggagtcgcgttacaaccgcctcggcgggataatgaagctggttcccagcctggcgaaatatacccgccgtggcgtcaatactgattcttattggttcgtgcaatcgtgggcggaaccgcatcagtttgaagatggcaccattttccatctgcttgacccggacattaatcaggagatctacggtgttcccgagtatctttcctcgcttaactccatttggctgaacgaggccgcaacgctgtttcgccggaaatactacctcaacggcagccatgccggctttatcctgtacatgaacgatgccgcgcacaaacaggaggatatcgacaacctgcgcaaagcgctgaaggaatcgaaagggccgggcaacttccgcaatctgttcatgtatgcgccgggcggtaagccggacggcttgcagcttatcccgctggccgaggtggcggcgaaagatgaatttttgaacatcaagaacgtgacgcgtgacgatcagctggcatcccagcgtacgccgccgcagttgatggggattttgccgaataacaccggcggattcggggatgtggaaaaggccgcgcgggtatttgcgattaatgagctggccccgttgcaggaacgcctttgcgagctaaacgactgggtaggggaggaggtgatcagcttcaagccgtatgaattgctcaaaagtggtcagtaa

SEQ ID NO: 429273 - DNA, 1770 bp, Serratia marcescens
atgagcgctactactatcagcaccgatcttgatccccgccgtcaggccatgtacctgtattggcaggggcttcgcgtcactcgcatcgccgaaatgatcggggagaatcccgtcacggtacacagttggaaacgccgagacaagtgggacgattacggcccgctcgatcagatgcagatcaccacagccgcccgctattgccagctgatactgaagccggagaaagaagggcgcgacctcaaagaaattgatctgttggcgcgccaggcggagcggcacgcgcgcatcggcaaatataacggcggcggcaacgaggccgatctcaatcccaacattgggagccgaaacgccgggccgcgccagcgcacgcaaaagaacgtttttaccgacgaacagcatgcccggctgaaagaaatctttcttgaacagatgtttgcctatcagcggcgctggtatgaggcgggggtgtcaaaagattttcgtatccgcaacatcctgaaatcgcgccagatcggcgcgacgtactattttgcgcgtgaagccctgatcgacgccctggacacggggcgcaatcagatgtttgtttccgcctccaaggcgcaggcgcaccagttcaaaaactacatcaccgcctttgcgcaagaggtcgatgtggagctgcgcggggaaacgattatcctgccgaatgcggcggaattgcatttcctcggcaccaactccaacaccgcccagggccggcccggcaatctgtatctggatgaatatttctggatccccggcttcaagaaactgcgccgcgccgcatcgggtatggcgtcacaaactcgctaccgttcgacctacttttccaccccgtcgagcatgacgcatgaggcctattccttctggaatggaacgctgttcaacaaggggaaatccaaggatcgtcgccgtgaaattgacgttagctataaacgcctggccggcggcgtgctttgcgaggacaagcaattccgccagattgtcaccattgaagatgcgttgcgcggcggctgcgacttgttcgaccttgacgagctgcgggaggaaaacagcgatgaagattttgacaacctgttcatgtgtaacttcatcgacgatacatcgtctgtattcccgatgggtgaaatgcagcgctgcatggtggacagctgggagcactggacggacgttaagccgtttgcgttgcgcccggtagcgtcgcgggaagtctggatcggttatgaccctgccagttctgaggatggcgacagcgccgggtgtgcggtcatcctgccgccgctggttgccggcggaaaattccgggtgctggagcgccatcagtggcgcgggatggattttgcggcgcaggcccgcaacatcaaggcgctgaccgaacgttacaacgtgagctatatcggtatcgacaacaccggcctgggccgcgcggtgtcgcaactggtgcgccaattcttccctgcggtgaacgccatcaactacagcctggaaatgaaaaccgacctcgtgctgaaggcccgcgacgtgatccgttccggccgcctggagtttgatgccggcgcgctggatatcgcccaggcgtttatgtccatccgcaagcaaatgacggccaccggccgccgggcaacctatgtcaccagccgcgccgaaggcgtcagccacggcgatgtggcctgggccgtcatgcacgccttattcaatgaaccgctcgaaggggcaaccggtagcaatacaggttttatggagatctactaa

SEQ ID NO: 429274 - DNA, 801 bp, Serratia marcescens
atgccaatatcaaaatttttccgcgtcgccgttgaaggcgcgaccagtgacggccgcaaaatcgaacgccgtcatatcgaagaaatggcggaaaccttctcgccagcattccgcccggcgcgcgccaaccttgagcactacctgagcatcttcccggacagtgcctttaaagcccagggcgatgtcgtcgcgttgaagacgcaggaaatcacctccggccaactaaaaggcaagctggcgctgctggcgcaggtcgatgcgacggatggactggtaaagctgcacaacgaccggcaaaaaatttacaccagcatcgagtattacccgcaatttgccgacaccggcaaagcctacctgaccgggctggcgtttaccgacaatccggcgtcgctgggtagtgaagccatgaaattcactgccaacaacctggccgaaaccagcggattgcacttcggggcgatggaagaaaccgtgatggaatttgacgcgccagaaaccgaaaaaccgaaccttctgacccacatcaaggccatgttcagcaaaaaacagcactccgatgacggccgtttttccgacgttcatcaggctgtggagtttgtcgcagaacgccagcaagggcttgaaaccaaaatcgaagcattttccggcctgaaaaccaccgtcgaatcgctggaaagccagctgaaagacgcgaaaaccgagctttccgagctgaaaaccaccctcagcacgtctgaccgttctacctatcgccgcgacctgtctaccggcagtggcgatagcgtcttaaccgactgctga

SEQ ID NO: 429275 - DNA, 1095 bp, Serratia marcescens
atgaaaccgaatacccgcaagcaatataaaatgctgctgagccaggtcgcgaacctgaaccacatcgaacctgaagacgtagccgcaaaattcaccgttgatccgacggtaacgcagcgtctggaagacaagattcaggaaagcagcagctttctgaaacagatcaacatcattcccgttgacgaacagagcggctctaaagtcggtctgggcattgaccgccccattgccagtacgaccaataccgacgacaaagaacgtgaaccgatggatccaagcagcctggacgaagtgggctatgtgtgtacccagaccaactttgacaccgcgctgaaatattccaagctggacgcctgggccaagttcaaagacttccagatccgtattcgcaaccagatcgtgaaacgccaaggcctcgaccgcatcatgatcggctggaacggtatcagtcgggctaaaacctcggatatcaccgtcaataagctgttgcaggacgttaacatcggctggttgcagaaagtccgcaagggtgcgccagagcaggtgatggataaggtgctgggcgagaacggcagcgtcgtgtcggaaaaaatccgcatcggtatcgatggcgactatcacaacctggatgcgctggtgatggatgccgtcaacgagctgatcgcaccctggttccaggacgacaccgagctggtcgccgttgtcggccgctccctgttggcggacaaatatttcccgctcgtcaaccaggagcaaccgaacactgaagctctggccgccgatatcatcatcagccagaagcggctgggcggcttgcaggcggtgcgtgttccgtccttccctgacaacaccattttcatcacccgactggataacctatcgatctactggcaagacggcacccgccgccgccacattatcgacaacccgaaacgcgaccgcatcgaaaactacgagtccgtcaacgaagcctatgtcgttgaagactacgagggcgtagcgctgatcgaaaacatccagatcctgaaggcgaaagccccagcgccggccggccagcagccagagcagcaacaaacggaaaacccggagggctaa

SEQ ID NO: 429276 - DNA, 657 bp, Serratia marcescens
atgagcagcccggcacgcagacacaagcactacattgccgcgcagcagtccgcctcattggatgaggcggcaagtctgagccatctgggcaactacgacctgctgctgttcaagatgcagcaggatctggcgcggctgagcggcgtcgagtcccacgaaaccaaagccgagtttaagcgcggcatgctgccgacctacatgccgtgggtggccggtgtgctgcaaagcgacgcaggccggcaggatgcgatcctgatgcgtgtgctggtctggtttctggatattggcgagctggagtatgccctggatatcggcgagtacgccatccggcacgacctggttacgcccgacggtttcgaccgctcgaccagttgcctactcgctgaagagatcgccgccgtttcacagcgcgatctttccgccggtcggccgctgaacacggcgcagctgcaacgcgcgcagcaactgctggctaatcaggacatgcctgatcgggtgaaagcccgtctgttcaagtttgttggctatgcattgcgacaggacggcgacgccgtgctggcactggacatgctgaaaaaagccctgatgaaagatgaaaactccggcgtaagaacggatatcaagcagctggaaaaagtcattaaggcaggaagttaa

SEQ ID NO: 429277 - DNA, 522 bp, Serratia marcescens
atggtcagcatcgcaatagaacccgcacccggcgacaaaaagcccggcaacgcgctggaaatcgacatcgccaagcagccgacgccgccggccagtaccgtcatcaaaaatacggaattttggccggatatcgacctgaaacagtaccgcgaagacatgcggcaggacggcaccatcacccagccgcgcctgcttgaagcagcgcgtaacgccatcaacgaagtcaacgatcggctggcaggctggcgcaagcagcagcaacgcgcgggctacagcgaactggaacaggttcccgccgatcacctggacgacgagagcacccgcctacaactttatcgccgtgctgtgttctgtctgactcaggccagcgttaccgagcgttttcgcagtttcgacgccacggcctccggttcaaagctcgccgacgctatcgaaccgtcgatcgatgatctccgccgcgatgcagattgggccatcaatgacctgcaatcgctgccgcgcatgacggtagagctgatctga

SEQ ID NO: 429278 - DNA, 204 bp, Serratia marcescens
atgaaggtctatgcgcaccagggcgacaccgttgatgcgctgtgccagcgctactacggcaagacgcaggacgtgaccgagcaagtattgctgaataatccaggtctggcagaccaggggccgatattgccgcacggctacccggtcgacatgccggacattgttcaatccgaatcggttcagaccctgcaactatgggattaa

SEQ ID NO: 429279 - DNA, 267 bp, Serratia marcescens
atgaaaatcatgactgaaaagattgctgccggtatcaactactgcattgccggcagcttatgcactggcgggcttgtcgactggtttcgccacgttgactggaatcaggttgcggtgatcggcggctttctcctgggcctgatcacctatctcacgcagacctatttcgactggcggcgcacgcgggcctatgagaaaggcgtcgacgccgggatcattaccgagccgccggcgaaacgcgggcttttcaataaggaagccgaataa

SEQ ID NO: 429280 - DNA, 480 bp, Serratia marcescens
atgtcacctgccctgcggaaaaagttgctcggtgcggccggcactggtgcgctggcgatcgccacgttgatgatcccagagcttgagggcatcagatttgaaccctatcgcgacgtggccggcgtgctgaccgtatgttacggccacaccggggccgatatcgtgccaggcaagcgctacacccaggcagaatgcaaggcaattctggacaaagacctgatcccctttgcgcgatcggtcaatcgttcggtaaaagtgccggcgacggagtaccagaaagccgccctgatcagtttcagctataacgtgggcgtcagcgcctttgagcgctcgtccctgctgcgcaagctgaacgccggcgactatgccggcgcatgcgacggcctgcgccagtggatttatgccggcggtaagccgtggaaaggcttaatgaatcgccgcgatattgaacacgaggtctgcacctgggggcagaaatga

SEQ ID NO: 429281 - DNA, 438 bp, Serratia marcescens
atgacccgcctggccgccggcgtcacgctgatcgcgttttgtgcgctggcgtttctggtttacagcaatcaggggctgcgccaggcccgcgaaacgttgcaacgcgacaacaagaggctggccggccagatcgagtggcagaataaaacacaaatagccgttgccactatcgacgaaaaccgaagccgagagctgaccgatgcaaaaaataaaattgatgatctgcaacgcgatgttgatgatggccgccgccggctgcgcctcaacgcctcatgccatgccgccggcaccgccggcatggctgatgcaaccgccgcccgacttactgacgccgctcaacgggattatttcaccctcagaaagcgaatagaaaccgccaatagccagatcgccgggctgcaagactacattcgcgacgtctgcctgacgcaaccgtag

SEQ ID NO: 429282 - DNA, 468 bp, Serratia marcescens
atgttaaaacccgactccctgcgcgccgccctgggcgacgccgtcaatcacatcagagaaaaccctgatttcctgcatatttttattgataagggcacgatttacagcaccttcgccccgtcgctgtcgtttgagtatcaatacaccctcaacatgatcgtgaccaactacgccgacgacgccaatctgttgatcgtccctattctgcattggctacgcaccaatcagccggacattatggcgaacccggacaagcgcggcgacggcttcaccttcgaggcggatttcttgaataacggggtgagggatatcagcattgatctgaaactgacggagcgcgtgatcgtcaaagaggaaaatggcaagctgcacgtcagccacgccgaggaaccgccaccgccgccgaacaacgtcaccgagtttgaaatctggatgcagggcaggaaggtggcagcatgggccgcttag

SEQ ID NO: 429283 - DNA, 456 bp, Serratia marcescens
atgggccgcttagacgatttccaggcgctggacgataccctttctgtcttgctccaacagctttccccgcagtcgcggcgcgtattcacccgccaggtggcgaaagaattgcgccagcgccagcaaaagcatattcaagagcaaaaaaacccggacggatccccctacgttccacgcaaaaacaagcgccgagacaaacagggccgcatccgccgcaagatgttcacgcgcttgcgcaccgcgcgctttatgaaaacggaatccggccccgatgaagccgccgtcacattcgccgccggcgtgacgaatttgtctgccgtccaccattatggcctgcgtgataaagtcagccggaacggcccgacagtgcgttatgagcgccggcaactgctcggctttactgacgatgatatcgaatggatcaaggatctggccttgacccacatagccaaataa

SEQ ID NO: 429284 - DNA, 639 bp, Serratia marcescens
atgaatgcaatcctcactgaactacgccgccgcctggctaacatcgtgcgcatcggcaccgtgtccgacgtggatacggcgaaaggcctttgccgcgtactaaccggagcgaatgaaaccgactggttgaactggctgacgctgcgcgccggccgcgtgcgcttctggtcggccccgtcggtgggcgaacaagtgatcgtgttgagcattttcggtgagatgaccaccggctttgtgctgcctgccgtgttctccgatcagcaccctgcgccatccacttcacctgacgccgtccgcattgattttcccgacggcgcggtcattgagtacgagccggaaaacagcacgctaacggcgcgcggcatgaaatacgccgatatccaggccgctgagaaaatcagcgccacgtcaaacgtcgtcgtcgttaccgccagccagatgatcacgctggatgcgcccgtcgtggaatgcaccaacaagctgatcgccggatcgctgctgctgaaatacggcggcgaaatgtacggaaatatcacccataccggcggaggctttaactccaacggcgtgattgtccatctgcattatcacggcaacgtgcagaacggcggcggcaacaccggggggccaacatcatga

SEQ ID NO: 429285 - DNA, 348 bp, Serratia marcescens
atgatgtatctcggcatgaaccgtaacagcggccaggctatcagcgagatcgaccacatccgccagtctgtcagcgacattttgatcacccccgtcggtagccgcgtcatgcgccgcaaatacggttcgcagctgtcggccctgatcgaccagccgcaaaatccggggctcaagcttcagatgatggccgctgtctatggtgcggtgctgcgctgggaagaccgcatatccctgaccgccgtcaacatcacatcaaacatggacggggaaatggttgttgacctggtcggcaaccgaaccgataccgccggccgcattcaattttcattaccaatcagggggcaataa

SEQ ID NO: 429286 - DNA, 909 bp, Serratia marcescens
atggcgacgattgacctgagtcagctaccccgccccaatgtcattgaagagctggactatgaaacgctctttgatgcgcgcaaagagcgattgatcagcctgtacccggaggaagaacaggaggcggtgcgccgcacgctgggctatgagtccgagccgatcgtcaaagtcctgcaagaatccgcctatcgtgaagtgttgttgcgccagcgcgtcaatgaggcggcgcaggccgtaatggtggcctacgccacgagcagcgacctcgaccaactggccgccaacaacgacgtgaaaagattggtgatcgatcagggtgatccgggtgctgtgccacccgtaccgccaacgatggaaagcgatgccgacctgcgccagcgcgtccccgccgcattcgaaggtatgagcgtcgcagggccgaccggggcctatgaatttcatgcgcagagcgctgacggcaaagtcgccgacgcctcggcgatcagccctgcgccggcagaagtcaccatcagcgtgttatcccgcgacggcgacggcacggcatcgccggagctgctggccgccgtcagcgccgcgctgaatgacgaggaagtccgcccggttgccgaccgcctgaccgtgcagtctgcaaaaattgttaactatcagattgatgccacgctctacgtttaccccggcccggcgattgagccgatcatggccgatgctgagctgcgtctaaaaaactacatcaacgagcagcgccggctgggccgcgatattcggttatcagccatctatgccgcactgcatacccagggcgtgcagcgcgttgaactggccgcgccgctcgctgacgtggtgctagatcgtacccaggccgccaactgcaccgattaccacatcaggatcggaggttcagatgaatag

SEQ ID NO: 429287 - DNA, 612 bp, Serratia marcescens
atgaatagcctgttgccgcctggttcatcgcagcttgagcggcgagcagcggaggcgtgcgccggtatcagcgatctaagcgtcccgttgcgtgacctgtggaacccggcgcgctgcccggtaaagtttttgccctatctggcctgggcgttttcagtagaccgctgggacgagaaatggacggcggcagagaaacgcaaggccgtgacggatgctttttacattcaccgccgcaagggaacggttgccgccatccggcgtgtcattgaggcaatgggtttttcaatgtcgatcgccgagtggtgggaagtcgccgacccgcgcggcacgttccgcctcaccattgacgtgaacgacgtcgggatcactgacgaaatcgtcagagagctggagcgattgattggcgacgccagaccggtcagccgacatatagcaggattgaatatcaagacagtgacgagcggaaaaatttatagcgctgtagccagttattgcggggaaattctgacggtatacccggcagggaaaacgcccgatatccccctttactacgacggcaaaattaaacacagcggccattatttctacaccgggaacgcgaacgatgagtaa

SEQ ID NO: 429288 - DNA, 1173 bp, Serratia marcescens
atggctcaagactatcaccacggcgtgcgcgtgcaggaaatcaacgaaggcacccgcaccatcaccactgtcagcaccgccatcgtcggtatggtctgtaccggtgacgacgccgacgcaaaagcattcccgttaaacaccccagtgttaattaccgacgtcctggccgccagcggcaaggccggcgaaaccggcaccctcgcccgctcgctggatgccattgccgatcaggccaagcccgtcactgtcgtggtgcgtgtcgcccaaggcgaaaccgaagccgagacgacaaccaatatcgtcggcggcgtgaccaccgagggcaagaaaaccggcatgaaagccttgctggccgcacaaagccagcttggcgttaaaccccgcattctgggggtgccgggccacgataacgaggcggttgcctccgagttgctggccgtagcgcaaagcctccgagccttcgcctacctcagcgcctatggctgcaagacagtatctgaggcgctcgactaccgcaaaaacttcagccagcgcgaagctatgctgatttggccggatttcctgagctgggataccacgaccaacgcatccgcaacagctttcgcgactgcccgcgcgcttgggctgcgcgccaagctggatcagcaggtcggctggcacaaaaccctgtccaacgtcggcgttaacggcgtgaccggcatcagcgcagacgtctattgggatttgcaggacacggccaccgatgccaacctgctgaaccaaaacgacgttaccacgctgatccgcaaagacggattccgattctgggggtcgcgcacctgctccgatgatccgctgttccagtttgaaaactacacccgcaccgcgcaggtgctggccgacacgatggccgaggcgcagatgtgggcggtagatcagccgctgcacccttcccttgccaaggacattatcgagggcatcaacgccaaattccgcgagctgaaaaacggcggttacatcgttgacgggaattgctggattgacgaagcggccaacgacaaggacaccctgaaagccggcaagctggtgctggattacgattacacgcctgtgccgccgctcgaaaacctgctgctgcgccagcgcatcaccgatcagtatctgatgaacttcactcagaacgtgaacagttaa

SEQ ID NO: 429289 - DNA, 516 bp, Serratia marcescens
atggccttaccacgcaaactgaagtatctgaatctgttcaatgacgccaacagttaccagggcgttattgaagaaatcaccctgccgaagctgacgcgaaagcttgaagcattccggggcggcggcatgaacggcagcgccagcgttgatctggggctggatgatggcgcacttgacgccgagatcactcttggcggcattgaggcgcagatttacaagcaatggggcatcgccaaagttgacggcgtactcctgcgctttgccggttcattccagcgtgacgacaccgccgagatcattgccgtcgaagtggtcatgcgcgggcgtttctccgagtttgatcatggcaactataagcagggcgacaacacgcagaccaagctgagcgccaagaatacctatttcaagctgacatgggacggcagcgtcctgatggaaatcgacaccgtgaacatggtcgagatcattgatggcgttgaccgcctggcggagcaccgccgcgccatcggcttgtaa

SEQ ID NO: 429290 - DNA, 327 bp, Serratia marcescens
atgaaagaaaaacagacgacagacggcgcagaactggcgaccaaccagacgatcaccctggacgttcccatcgtgcgcggcactacgcagatcaccgaagtgaccgtcaacaagccgaattccggcgcgctgcgcggcacccgtttgcaggcgctgatcgaaaccgatgttgattccctgatcagggtattgccgcgcatcaccacgccgaacctgacggcggccgaggttgccaacctcgatccggctgacctttatcagctgtcgcaagctgtggcgatttttttcttaccgaattcggtcaggtcagatttcctgaacagctga

SEQ ID NO: 429291 - DNA, 2919 bp, Serratia marcescens
atgagtgacaaaaacctccgattgcaggttttactgagcgcggtcgataaagtcacccgcccgtttaaatccatgcaggccagcaataaagcgctggccgcttctgttaaagccaccaaagaccaattaaaacagcttgataatcaggctgggaaaattgacggtttccgcaagacaaaagcccaggtagccgccgccgcgcaggcgctaagcactgcacgcgatagagcgcgcagcctggctatcgccatgaaatcaacggaaaccccgacggccaggcaggcgcgccaatttcagaaggccagggaggaagcggcccgccttcagcaaaaatattcagatctccggctgtcactgcaaaaccagcgcatcgcactgcaaaacagcggcatggcgactaaccgacttggtgaggcccagcgatcgctgcgcgccaatatcagcgggacaaccggcgcacttgcagcacagcagcgaagacttgagcagcaggcccagcagcaaaaacggctgaatgctgcgcgccatcaattcgacgagagtaatcagcgaaaagttatggctgccggggtaggttacacctcgatggccaccgggcgcgcgatgggccgcgggctggccaatgccttgcacgtcggttatgactttgacgcgatgatgagcaaaacacaggctgtaacgcgtatcccgtccaagtcagatccggcaatgatggctatgcgccatcaggcgagaaccctgccgctatcgtcaaaatttaccgatctccaggttgccgaggggcaatacttcctcgggaggacgggttattcaccggagcaggtattgaaagccatgccggggatgctgaatctggcatcggccggcgacattgacctgggcacgacagccgatattgcgtcaaacattcaaaccgcgatggggatcccggcggaaaaaatggacagagtggcggacgtgcttaccgcactgttcactcgtaacaacgttgatatcccaatgctgggcgagtcattgaaatattccgccggcgtcggccgcgaatatgggcaaagtctggaaaccgtttcagccgccacggcgatcatggggaacgcgggcattcaaggtagccaggccggtacggcaatgcgcgctattctcagcagaattggcaacagcccaaccgtcagaaaactaggcgtcgaaaccaaagacaaagacggcaatatgcgcgacctggtcgatattttgaaagatatcgacaagaagacgtcaaaaatggggaacgtcgatcgcggtaagattttcaaagatattgccggcatgtatgcggtcactggattcggtgagttgatgcgtgcggtatcagatggcaagctgcaaaaaatgcgcggcgcgccgggtgagtacgatggcgaagccgcgcgcgtctcaggcaccatgctggataacatgaaaggcgacatgacgatgctacatgccgccatggaaaatatcagcgttgaactgtttgaaaaaaacgacgcctggctacgaaaaacggccaaaggcatcagcaacgttttgcacggcgtcgctgagtttttaaaagcgcaccccaacataagcgccgccattgttaaggtaggggcagcagccgccattgcaacgaccgttttcggtacactggcgatcgccgtagtcgggctgctcggcccgtttgccctgctccggttcagcacccgcatgttaggtattcgcctgctgcctaacctctcactcagcatgctgaaattcgccagtacgacgcctatcactaaaaagcaagtcgggagcttcagccgctcattacttgaggcagggaaaagcgcgctgacattctctaagcaaggcttagggaataccagccgcgcagtaatgacatttgcatcctcaccactgcagacagccaccaaggggataaaaggagttgggcgtgtatttacctggctggcaacctcaccgctgagattcctccgctttgccctcggcggcttggcgagtatgttcggcatcctgctcagcccgctgggactgattgccgccgcgatcgtcggcgctggcgtgctgatttacaaatactggaagcctatcaaggcgtttctcggcggtgttgtcgaaggtttcaaaagcgctgccgcaccgatcaaaggcgcttttgcgccattgatgccggtattcaactggatcggcgacaaggttaaagcgctatggggctggtttacagatttgctgacgccggtgaaatcgacaaaagacagcctggacagcgccgcgtcggcagggaagacgttcggagaatttttagcggcgggcattgagctggcactaaccccgctgaagctgctgacggactcaatcaagtgggtgctggataagctggacgaaatcaaggtacggtcggcagaaacgcgcaaactggcgcaggaaaacccggccgttgccgacgcggcccgccgcgccggtgtaactttgacgtcggcaccacaaggcaactccgccgacgccatccgccggcgatataccggcgagcatgataatggcggccgtatcccgctgggtaaattcggcatcgtgggcgagtacggcccggagatcgtcagcgggccagcaaacatcaccagccgccgaaacaccgcagcaatggccgcaatcgccgccctgttcatgaatggcgcaacagcagcggacgccccgctacacccgcacagcctggccgggaaccaataccgctccgccggtagcgcatcatatcagcgtaccaatgcgccaattgtcgagatccacgcgccgataaccatcaatccgcagccaggacaaagcgcattagatatcgcgcgggaagtcgccagacaacttgacgcgagagaacggcaggcgcgcgccaaggtgaacagcagttataacgatttcgagtga

SEQ ID NO: 429292 - DNA, 465 bp, Serratia marcescens
atgatgatggcattaggcatgttcgtgttcatgctacaaaccgttccataccaggaatttcagcaccaaatgtcatggcgacacccgacaaacagccgtgtcgggcttcgaccgcaaagccagtttttggggccggacgatgaaacgatcacattgagcggagtcctattgccggaactgaccggcggccgagtgtcgctaatggcgatccaactgatggcggaaacaggcaaggcgtggtcgcttatcgaaggcagtggcgcgattcatggcatgttcgtgatcgagagtctgacccgaagcaaaaccgttttctttcaggacggatccgccaggcgcattgagtttaccatcacgctgaagcgcacggatgaagggttaaaagatatgttcggcgatttatcccaacaatttgaagacctcgccactcaggtatctgacactgtcggggggcttttatcatga

SEQ ID NO: 429293 - DNA, 1092 bp, Serratia marcescens
atgagcctactcgtcaccctggacaagatcggcggcagcaatacgccggcctttacgttgaaaatcgacggcgtcgatattaccgggaaggtgagcgaaaaactgcttggcttgaccctgaccgataaccggggctttgaggctgaccagttggagatcgagcttgacgacagcgacggcagcctgatgctaccccgtcgcggcgtcagcatcgccgtggctatcggctggaaagataccggcacgatcgacaaagggctgtttgtggtggatgaaatagggcattccggcgcgccggataagttgacgatcacggcacgcagcgctgattttcgacaaacgctaaacgtgcagcgcgacaactcctatcacaagaaaaccttgggcgatatcgtgaaaaccgtcgccactcgcaacaagctaacgccggtcatcaataaaaatatggctgatatcgccattcctcacatcgaccagaccaacgagtcggacgggagtttcatcacccgcatagcgaaagaaaatggcgcagtggccgctgttaagaacggtgatctgctgttcttcaaacaaggccaaaatcagacagtcaacggcaaacagatcccagaaatgctaatcaatcgccagtcgggcgacagtcatcaattcacgttgaccgatcgcggggcatatacgggcgtggtagcgaactggttaaatacccgcgccgcgaaaagcgagccggtcaaggtcaagcgccgccgcaagaaaaagccaatggttgaggaagaaaaacagggggaatatttagtcggcagcgatgaaaacgtcctggtgttacgccatacctacgcgacaaaatacaatgcccagcgcgcggcaaaggccaattgggaacggatacagcgcggcgtcgccactttctcgatccagctggcgcgcggccgtgcagagctttacccggaagcgcccgtcacagtcaaaggctttaagcgtgagatcgacgaagcaaagtggacgctggtcacagtaacgcacagtttgaacggcagcgggtttacgacgtcgctggatcttgaggtcaaaatcgacgagctggaaatggaataa

SEQ ID NO: 429294 - DNA, 987 bp, Serratia marcescens
ttgaaagataaaccgtcagatttagagaggcttattcatgagtctctagagcaactaggttgggaggctgacgccaaagctatcgctgatcgagtgcagagacttaatataggccttccgttagaagacgaattctcgattatttgtggttggctcggccagtgtaatttagtccataaattagaccagcagcagtatccaatctcctctaaagataattttcaggttccagatttactagcaaactttaatattcgtggcgcaggtaatactacggttttaattgaggttaagtcttgcgagaaaaatgttttgtcttttcggcctgattacgtgtctagattgagagcttatggtcaattattagggctgccagttttaattgcgtggagaagatatggcatttggagcttggtagatctagatgtgtttacaaaagctgagaggaatttcaatcttaattttaatgatgctatgcgaaatagcttaatgggtaagttgttgggggatttctcctatgttccgcaagttaactccggtgttcatcttagcttcaggaaagaaaagattattgaaaccgtcaaagaacacgaagagattagagaaaactggcttaccgtcgtagatgacgtgtatttcactaacggggaaaatgaaaagttaagaggcctgtcgccaatcgctcagcaactattcctttcttgggaccttactacagaagaatcacactctgattctcatgtggtgttgcataatataattgatcaggaatcggcaatgtttgcgcatatggccttaactaggttgctccatttccacggtagggaggataaagttcactggagacgtcatttgcaacatgatgcggtaatctcaacaatctcagatttcagacttgggattgaggagaatcgaaaagtaggtatcattaaatacatttttgacatccacccagtaaaagttcctgatttcctcaataaagtataa

SEQ ID NO: 429295 - DNA, 165 bp, Serratia marcescens
atggaggggttctccgtcatgttcctggctaaggccagtattgcctataactatacacaattactggtcgtttacattatttgtattaatttggagctgaaccgactctttccacaggtggaacataattttatatttggtcagtttgagagattttggacatag

SEQ ID NO: 429296 - DNA, 2727 bp, Serratia marcescens
atggactatatttccaagaaaataggcgagaagtcagaacttaatgtatttactggtaattttcgagatgcagctactcaggagcaatcgagaatagagtacattctgatgttaatgcttggatatctttggaatagaaatattttaagagttgatgatgactcaagaactgtgtgctttcaaagtgtggttagaccatcgattggtagtatccttagtttggtaagggtattggatatagatggagagatatttggaggtaaaaatattaaaacatttagggatagcattaataaataccctaacttaaggaatgaatcaataggacatggattttcatttgaagatggggctgaggtactttatggaaagttgtgtgagatttataaaaacattaaagatgctggccctgtttttttaaagttagatatggatatcataagtatattctattctaatgagtcagtttcgaaagggattcgatataaacctacaggtgagtattcgccttgcactatttctcaatctactgccaagttagaaaaaaatactttatatatataccacgataccgaatatcataagatatctccttttttgaaaacagatgaggtcgatgagttttatcttttcgcctatatagaggacaagcttgcatctagagcaatgtttaaccaacttattaaaacaaatagaaaatactttacggttgaagggattattggctctgtcatggaaatagatgagcgaagagttaaagcgagtaatgggaccataattaatagttatgaaaataattataaaaaatatattgatacagcaatagtcaagaaattagtacgatttctaaaagaaaacacctctacagttttctctaccgtttggggacatggaggtgtaggtaaaacagcttccattcaaagggtctgtgaagtattgcttagtgaagaaaggaaatactttgactacattgcttttgtttctgcaaaagatagaaagttcaactatcacactggtataatagaaaagattagcggtaatgtcgactcttatgaatctgtaataagatacattaacaatattgccttctgcaaggatagttctgatccatcagatataattaaatttcaagggaaattattggtcataatagatgattatgaaacctttactccttcagagaaagataagttacttgagttcataaaactacttgatattagccaccataaagtagttataactacacgctcggccagtaatatcacgggcgaagaaattgaagttaaagagttatctccatctgaatcattgagtttttttgatagcgtactagaaaacgaactttcaatcgagactgaaatatataaaaaaggtagggatttaaatgaattagctgaatcaattcattatttaactagtgggcgccctttatttatttttcaaagtgcaataatttatggtgaaagcggttcgattgaagcgatgcttgattccaagataaatactgggaagaatgctatagaattcctctatgggagaataaaggattatctttctgcaagtgctttaaaaatatttggagtgatgggggtattaacatcagaaagtgatctaatcaatttattgtcaaagcttcagtatatattgaacatggaaagggatgagtatggcttcgagaaggcagttgcggagttagttaaactaaaaataattaccattgttgatgagaaatattttaaagtttactcaagtgagattgctactcttatgagacaatcattccaagaagatggttctgtaactagtcggctacagttaattggaactgataaagggttggataataatctttctcttcttaatgatgcagataactctcgaattactaaaaaaccaagtgaggttaagcaaaaataccggtcgattatatcacgagcagtgactcctgtagaaattaaaattcaagctgttataaatttggcacaatatataatcgaagataatgggagttatgaagagggcatctcacttcttggtgaatatcaatatacatataataattcatctttgtttgtaaaaacatactccacatatctatggcgtggggataagaaagagaaaggtaaagcaattactttaattggtaacctgcttcaagctgactccttctcagaagagaatgaacggcttgatttgctttgtgttttgatgagatatgaagctacattctggattgatgcaagagaggaactaaaagatgattacagaattaaagagataactgaggtggaatatgagaaaacatttgcagagcaacgtcaagagttttatagaatttttaattatccagggcttgaagtattcagttgtataaaaaacaaagaacttgataagtttgcacatgatatgaaagtgaaagtactgaatggattatcatatttcatagaggtttgcttgagaaggcatcaatttgaagagattgatgaggtgttggagtttgtttttaataagcttaagtataactatcacgatattttcaaaagaaaattagataggattaatagggcgaggtcatcaaacattaggagttatgatgaatacatcactccgggtagtgttggtgatcgtttcgaagctgcacgattagggacgaaaaaaaatgaggttccgggttcttttggaagcatactttctgccgcattcaaagatgcagggggagcataa

SEQ ID NO: 429297 - DNA, 819 bp, Serratia marcescens
atggatattaaggtggatagattgaaaaaagatttattgatagaatgggttaagcggttttattctcgtttgaatgttagccaaaaattgcatttaaattatattttattatttatctatacatacgtaatatttcttgtattgagttatggtcaaatatttagggctgcactcttattagctattgtattttggtgtattgcattggtatatgatgctattcttctttataagaaagtatatgaaaatattatagggaaagcattgttaactataatattggttattgggactaatttttctatatctattgctgggggcataataaatgatgttagcggagttgagccttctaattttccgcatgtattaattattatttctattttaaccattccatttattacggccttaattgctctgtttttgtattatatcctagccttaattgttttcccctttatacttttttattttttattgttggatgctaaggtaaataattttttattccccttcaacagtaaaaaagatgatgtttttataaaaaaatctacagtactaatcaaggtttttagttttggcatattttttatttttatttatggaatatcacaaaatactatgtcctggtacgaaaataagttatcaaaattttcagagaaccttatatatacatttgagatgtattcgaaaagcccatgcgatcttgatattgatgctaaatcattgtttataaatggtgatagaattatttttgcaaaaaaagttggtgatgaagttatttttaaggttgtggagtgcaattataaaaaatag

SEQ ID NO: 429298 - DNA, 459 bp, Serratia marcescens
atgggggacgaaaagagcttagcgcacacgcgatggaactgtaaatatcacatagtatttgccccaaagtaccggaggcaggtgttctacggcgaaaaacgtagagcaataggcagcatattaagaaagctatgtgaatggaaatgcgtagcgatcctggaagcagaatgctgtccagatcatatccacatgcttgtggagatcccgccgaaagtgagtgtgtcgagctttatgggatatctgaagggcaaaagcagcctgatgctttacgagcaatttggagagctgaagtacaaatatcgcaatcgggaattctggtgtcgagggtactacgtagatacggtgggtaaaaatacaacaaaaataaaggattacataaagcatcagttggaacaggataagctgggagagcaactgtcgatcccgtatccaggcagcccgtttacgggccgtaagtaa

SEQ ID NO: 429299 - DNA, 375 bp, Serratia marcescens
atgtctggcaaaataacgtctgcggtggtgatcctgctggcgctggcggcagttgtcggcgctggtgtctgggttgccgcgcggcactaccagccaacgattgaccggctcaacgaggcgatgacgcagtgcaaagacagtaataagcaacaggaggcggtgatcgccagccagaatgccggcattgaagcgctgcagcgcaagcaggaagagctggaatcgaaggtcaaggcggcgcaggcaaaggcacgcagggaggcgcagggcgattatgagaaggccaattccgttatggccgagcgaaccactggcgaggtgtgcgccgcggcgtctgctgtgtttgacgcagagctacgcagggagcgtgctcaatga

SEQ ID NO: 429300 - DNA, 516 bp, Serratia marcescens
atgagcaagctgaataagactggcgccgctggcgcaatctgttctgtcgcggtaatcatcggcctggttctatcgagcggtgaggtaaaaactagccgcgccgggctggagctgatcggcaatgccgaggggtgccgccgagacccgtacaaatgcccggctgatgtgtggactgacggcgttggaaatacgcacggcgttaatccaggcgtgcgcaaaacagatcagcagatcgccgccgactggcaaaagaacatcctggcggctgagcggtgcgttatccggttttctgctggtgacagcttgcggcaaggtgcatttgatgctgcggtgagcttaacgtttcgtgtaggttgtggcgctgcgcagaaatcaacgctgttcatgctgaatcgacagggaaggattgatgaggcgtgcgagcagtatcctcgctgggtttatgctgcgggaactattttacctggcctggttacaagagcaggaaaggagcgcgcactatgtctggcaaaataa

SEQ ID NO: 429301 - DNA, 2709 bp, Serratia marcescens
atggcggttccaatccaaaccccttacaacatctacaccgccaacggcgtgactacggtattcccgtatgagtttttaattctggatgcaggtgatttaacagtttccataaatggcgagcccgttacttcgggctttagcattaccggcgttggcacaacgaacggcggcgatgtgattttcctgacgccgccagctgctggcgtaaccgtgatgaatcttcgcgaaatcccggctacgcgtctgcaaaactatcagaacaacggtgatctgctcgcggccaccgtcaacaacgatttcgatcggttgtggctggcaatccagcaatcctacctgtatctcggtttgtgcctgcagcgcccgctgctcggtggcccattcaatgcccacggctatcgcatcgagaatttagccgatcctgtaaatcagcaagacgcggcgaccaaaaattatgtgctggtgaaaattgctgaatcagacgcagcaggggctgaagagctggcacgtgagcgcgccgagcggatcgccgctgacaacgcagagcaggcggtacgaaccaaggcagatatcgatattcgcaacgagatcaccacgaacaacaagcgaaacctccggtttggctatgacgttgacgtgatgcctgatgccgctaccaacgcgaataagctggtaggtctgaacgctcagggtaagccggttccggtttctgccgacgcaggttcgaatactgagttgtcgctcgagctggctgatgcaggggtgcctggcggtgccgggatggttggctggaatggtgagactgtcgcggatgcgctggcaggcattatgggtaaaacgctgactcgtatcacgaacaacggattttttgcgaactggccacagggcaaaatgttttcgtggaaaggttacgcgtacatggggtggcacgctggtggtttgcacggctctgccgacgctgatgcgtacattattcgaactcgcgacggtgtaaacttcagcgatatattcacggtggccacgcacacttctaacgaaggtgccgcatggttctctgttggcgttaccgcggaagatacgctgatcgggattgtacgattccggcagggcgccagcgatgattcgccgatcagacacgtgttttaccgctcgtccaatggctcaagctggacagcgggtaacgcgtttactatgaccacagaatccggcgccactccaactttgtatcacggcttctgcctgcttccgaatggtaacttcatcaccggctatcacgcggccgatggtgaactcggttatgttgagataaacccaaacactgaggcgtataccaagcacgtcattttgacgccagcgcagaatatgtataacggtgctgtggtacacgttgagctgaacttcctgcgccgcgatgatacgaacaaagtcctgatcacatctcgctctcaattcgcctcgtatcaaaatccaggcatgtgggtgttggatgtcggcaccggcagcttatccggtatggttccgacgggcatcccgtttagcgttaacccggtgacccctgtttttgcgcctggctatcagcgtgtcctgtttgtcgtcgcaaaccgctatgactccctcgatcttactcgcgagcaggccgggctttgggtttatgaggcgtcaatttctgacgcattcaacatgaattgggctgggttccgcgggcgctgtgtggcccgtctttcaggcgacttgaattcaaatgcaggcgtagcgggcgtgcagcatgcgtgtctgcatggcgacatggtgctgatcggaagtggttgtgaagtggcgggcaatgctgatcgctctgatgtgttcatgttgaagctggactatcgcccgtcatacatccaaacgcaaacagcgttccagacctccggcgctgctgcggcggctccaaatggaacgactgaatttcgcctctacgacggcgctggccgaaatgcgcgtattcggatgaatgggttaaacctggtcaacgattcaggagcgattttccagtttggctttaccaacttgaataacggcaaccgcagcattggtttttacacgggcgagacgccaactcccgcgatctacattcgcagctcgggcgttgcgggaaatcccgttgccatggatttcaaccgcgatattaatttcgccggcggcacattccactatgcccctggcgcgcgcatccgattcaactcgaacacgtccgcgcttggcccgtcgaccattttctacaacacgacaaataaccgtttagagatcaactcaacgagcagcgataccgcggcgatcatgtattcgcgcagcaccgatattctgacgttatcacgttcagatgttggctcagcggttagccctgcggggctttatttgttggcgtcaaacgatgcgggagcgtcatcagtaaccggcggcggctcactgggtatcgcctttaatgtttccggttacaccgcaggtgcggcgatgcgtgttgcgcagaatggcaacatccttgcgaacaccccggttcaaaaagcgcgttacgcggtgaacgctttaccgacttccggattgatctctggcgctgaagcatacgccacaaacggccgtcgtgctggagagggggcgggagctggttccggttgtcccgtttggtttgatggcacttactggcgcacgtattacgacaactcgatcgtagcggcttaa

SEQ ID NO: 429302 - DNA, 2892 bp, Serratia marcescens
atgccggtatatgcaaaacccgaggaactgaataacgatttcgcgccggccggtagtatgctggcgcagccttcaggcttcgacgtttctctgcctgaaggtacaaaccctcgacctcaagaagaatcaccgtcggtatggggcgctgctttccgccagaataacgtcttggctggcatgttccagccgacaaagcaatttgagcccgtggagggttataacccttatgctgataaaactgagctgcagggttatgagcaatgggcgacggcgttttctgatgcgaattcaccgcaggaaaccgcgtggatcaaacagcagatcgatgatgaaaatgaagatcgccgggttctgtctgaagcgggtggcgtggggacattggccagtattgccgccggagctgttgatcctgtgacagtcgcttctatgtttattcccggcgcacagggcggcgcgctggcgcgtattggatcgcaggtggccattggcgccgcaggaacagccctcagtgaagtagcattgaacaaccagcaggttacacgcacatggggggagagcgccgctcacgttgccgccggtgcgttgctgagcggtgtttttgccagtgctggcgctgctatctctccatcggtaaggaccgcggccacacgcgaagtcggcgacgctctggataacctgagtgtaaccagcgccgtggataatgcagccgcctctctgccggacggtggaagcgttggcgccgctcgcataagcgaggcgacgctggaagatttgacgccggtatcaggtggcgcgatcggcacgctcgcccgtaaagccggcagctacctgacgccggtcacgcgcttgattgagtcaccatccaagaccgcccgccgcactgcgctggaactggcggaaaacaacttcacgcttgaggggaacctgcgtggtattgagacgccgatcgcggcggaaacccgcgttcgtggttggcgtcgtgaagaggccgcggtcgtagtaaccaacaagcaggcctatgcaaaatataaggccgatggcggcgatctcggtttcgcctcatttcgggaagaggtgggtaacgccatgcgcaacggcgacattcacggcaattcagcggtgcaggatgcggcgcgcgcgatgcgccaggtggtggatagggtgaaggtggcgcagcagaaacttggccttttacccgcagacgaagagcttaaagctattgggcaaaccagctacttcccacgcgtttacaaagtcgggaagatcatcagtgagcgcgataagtttcgcaacatgctggtagattggtggtctcgcggtgaaaaaaccatgtcgcgtgaagaggctgaaattactgctgacgcgaccattaacaaaatcgtgggcgccaaaattccgcaggatttcgccaacgtgttcacggtcaaagcggccggcagcaccaggtcgagaacgcttagcgttcctgaccgactgatgaaagactatctggaaagcgacgctaattacgtcctgcagcgccatatccgcgaggcgtcggcggaagtcgagttaacccgcactttcgggaataagagcctcgataagcagttgaaggacattcaggacgaatacgacgcgctgatgcgaagcaagccagccgagcaggcaaaattggcgaaagccagggacaatgatattcgcgatataaccgcgctccgcgaccggctggttggcacctatggcatgcctgacgatccgtcgtcgttctttgtgcgcgctggcgctttcctgcgtagcgccaactttgtcacgaagctgggcggcatgaccgtttcggccatcccagacttggctcgcggcgtgatggtgaacggctttagcaactcaatgcgcggttactctgcgctgatcagccgttcgccggcattcaaagccagccgggccgagatgcagaaaatggcagttggtctggaaaccatcttgcatacgcgggcgcgcacgatgggcgatctggtggacagctcatcgcgtactacggccgtagaggccggcatggagcgcgttaccgatgtgttcggcaagctgacgctgatggggcatttcgacgacgtgaacaagtcggtaaacggcatgataacgtcggacagtattctatctggagcggccgccgcgaagaaactggcgaagctcgggatcaaccccaacatggccggccgtatccgcagcgagttccagaaacacggtgaggtgatcgacggttggcatattggcaattttgaaaagtgggacgatcagcacgttgccggcgtattccaggcggcggtattaaaggacgtcaacaacacggttattacgcccggcatcggagacacgccattatgggccagcaccccgttgggaaagacggtattccagtttaaatccttcgctacagcgtcatataaccgcgccacgctgggcggcctgcaagagggaacagctcaattctactatggcaccgcttttcagatcggccttggcgcgctgacgtatgcattgaaacaggcggccaacggtaaagaggtggagatgacgcctcaaaaattggtactggaaggtctggatcgttctggtatccttggcccactcatggaatataataatatggcggaaaaggcatcgggaggcatggttggcctgggagcaattttcggaactggaacacagtcaaggtatgccagtaggggttttataggttctgcgctggggccaacttttggcctgttggatacgctgactgatgtcacctccggcgtgctaaatggggatgcaggggatcgggttattcacaacgcccgcacccttttacctggcaataatttattttggatagcaccacttattaatcaggttgatccgggcatgcgatag

SEQ ID NO: 429303 - DNA, 2421 bp, Serratia marcescens
atggataagcaagacgcaaccgattatgacgaggccagaaaaagagtacctccaagccagcaaatttacttcgatgcgcagtggaaagccgcgcaaattcgccgcaccagtacgtataaaaatttcgaaatcagccaaaccgcatctgctcagcgccagcagcttaatgcaacggtgcaaaactcggtagagcaagaggcgtcggcctttgacgaccctcaagcggcggggctgattcgtggagcgcggcgccattcgatcgagctatatggccaggcgcaaggttggtctgcggaccaaatcactgcggcagtgtctgaggcaaatcaaaaggccatggaatggcgagcgcaaaactatgccgtaagcaaccccaccggatggctgaacggggatttcatgtccaacagcggcgccggattggatatgcgggcaatttcgatagttgagtccggcgggaagcattttaatgccgacggaagcatagtcacttcatcagagggtgcgcaggggaaatatcagttgatgccgaccacgggcaaagagttggcagccaagcgcggactgcaatacgacccgaaagacgaacagcaaaacgcgctgctggccagcgattacgccaacgagctttatggtaaatatggctcggagactttggcaggtgcggcatataactgggggcaaggccgcgttgataagttgatcgataagattggcgatccgcgaaaaggtgaggtttccgaagctgaatttattcgcaatctcccggcggagactcgcggctggctggcgcggtaccgaaaaaacaaaaccggactcgatccggtatcggtgaataaaatcgacagcatggctgaggcgcagataaaagaacagcgcacagcggttcgcaatcaaattgacccgatactaaacaacaccatgtcgcagctatacaacggtgaagtgccagatgccatgccagacagggccacaattcaatttgcgtatgggccgcagggttcaagcatggtgaagcagctcggcatcgccatcgacagcgcgcgaacgttccaggccattcagtacatatcgccggcgcaacagcagcaggagctttcgaaggtaaagccgcaggttaacgatccggactacgcgataaagatggacgcctacggcaaactcgccgccctggtgcagaaaagcaacacggcaattcaggctcagcgcgacgccagccgcttcaacgatgcgctattgatgggcgagaagctcgaccccacagacaaatcaatgcagaaagcggccgactcaacgccaacggcgcagaacttccgcattaacgacgccagcacgcatgacgctgttgtgcagcaggttgcgcaaaccgggattatccccgagaaggtcaccacgcagctaacggctatttctcgggcaaaaagtccggaggtcgtgaagcaaggcgctgaactgttcagccggctgtacgacacggatcctgcctctgtcggtgatatgccgaaagagatgcagggtttttacatgacggtcaagcaattgaccgattcagggatggcacccgatgcggcgatcgagcaagcccaaaacgtcacctacaaccaaacggatgcgctcaaggcgcaattggcatctgaacaggggacggcagcgtataaaaaagagcgtggaaaagctataggctctgcagccagcagtatggcgcaatggttccgctgggatccatccgccgatgatcaaacgccagacgctgcacgcttcaggaatgattaccagacgctctatgacctcaactatcgcactgccggcggcaatgcagatgttgccaaaaaaatgaccaaccagcagattgcccgcacctggagcatcagtgaagtgaacggcaatgcgcagttcatgaaatacgccccggaagccttgcataactacggcccatcaggctggcaggctgctcagtggaaagaggacaaattgcagttgatgtatggcgaccgcacggaaaatatcgagaccagtggtgccagtcttggaatcacttccggccgcacagctttcgtggaaaccaaaaccccaaaatctaaggtgggaggggagctagaaatcgcagccgatgtttcgacaccgcggactggcgattacgcgatcatggtgcgcatgaaggataaagacggcatagaaagtgtgcagccttattacgacaaatacgggcgctccatgcgctggaaaccctccttgcaggattgggagccataccaaaaaatgcaaaaagagcgtgaggataaaaatcaggaagagatttcaaaagggcaggagattcgagacttcaaagccaagcatagagcgcttgatgaaatgtataagcgcctgcatgacgagcgcgtaaatcgtcaaaaacagtatttttcatggagcgcagaataa

SEQ ID NO: 429304 - DNA, 453 bp, Serratia marcescens
atggctcgaccacgtaaaaaccccgaggtgcctggacaggaaaatcaacagccgaaagaaaacgccactgacgcggcgctgttgaattctgtcgtgcaacaaccagcaaacacgcctgaacagctgaacgacgccaccgctggcgccacggtgattaccgtccaagaaccgcaacgcagcgaagaagaattggcattggctgcccgtaatacgctgctggaaaccatcaacgaacagggcgccgccatcatcacgaagtttgaagcgtacgccttcatggatgtgcacggccatccgcttaccaacaatctcgaattcctcaccttggtgaagaaggccaccgatgtgactaccggcagcgctggccctatggtgacgaacgaagagggcaagaagcagccagcaccgggcaaacctgttttaactgaacacggctggcacgtaccaggctaa

SEQ ID NO: 429305 - DNA, 927 bp, Serratia marcescens
atgaaagttaaaagcattggtttttttatcgaaaacaaaaataagaacattagcaatgacgagatattcaaaaacatcattgcatgctcaaatataaatattgagagaacagattacgtaagaaagatcatggttgtagatgataacaaatactacactggattagttctcacgttaaaaaaccaaaagaaaaatccaaaatcgacaatgaaagatggaaagtttgaagtaaaggtcgaggatcttcaaggcgatgaaaaacttgttgcattcaatttcttctgcttgaaaaaatcaactatgaaaggtctgtatctatactactttggatcatgttctttaaattcactgttctccaatcttcagaccacgacaaacaaccatataagaaatcttgcaagagaagaaattcgtttgttaggtaagaacccgccagcaaaagaagtcgaaaaagtaaatgaaaaatataatgaacgagtagatttcggcgtaataattgacaagacaaatcttgaagcgatgatcgcttcatataagacgattaaatctgctacatttagatttgactcgatcgattttaaacaaaccgaattaaaaggagtcgaacaatatgcaaggaatacagacctaattttcaatatagagacagtagatcgtacgaagaccgttcccatagctcgacaggtaaaagatataataaaatctgttccaggtatttccaagggtaaagtcgttgtgacagattacgaaaacaacgaaagaataatagatttctttaactgcccaacattttttgatgaatttgatttcgacgagatggcaaataaggtagatggtctaacgaatgataatttccaagctaacgaaattatcaaactgattaaggatcaaattgaaaatggaaaacataaaagtgagtttaactag

SEQ ID NO: 429306 - DNA, 543 bp, Serratia marcescens
atggaaaacataaaagtgagtttaactagcagatacacggatctatcgatgaaagcacagcttgctgtgcttttcggtatatctattataaccataacctccggctgcgtaatttattacggcgacgccggattcgagggcaatttttttgctttctatcaaaaaaacttacgtggatatttattctcggggtttatatctgtaggctcattcctgctatctctgcatacctttgttatcgtaaatctcagggataaattattctcgacatccacatacagaaacaattacgccaaagccaacaaaatagaagttgatgagatagtggatgctaaaatttataagccgctagataatttatcatgttttataaacatatcaatttggttatcaataataaccgccatatcacaatttacaattggtctcgcgaatttcacaccatcatcaatcttctgtatatggctagcaatgttaaccatatgctttatgctaaactctctaattttaattcgcgaaaacattaaactaatgcttaagtag

SEQ ID NO: 429307 - DNA, 246 bp, Serratia marcescens
atggccgggcaatcggactatctaccgcccggcctgccattcaatcgaggcgcctggacgcaggaacaacgcgatttagagcagttcgacctgcgcgcctgtggcttggttcgcgatttattcgcgaggaagatcacccgcaccaaggtgctggtggcgattgaagaagcaccggagcaatgccgggaacatttcagagcacgcctgaattactggcgtgatcgcagagaggggaaggaacagtga

SEQ ID NO: 429308 - DNA, 225 bp, Serratia marcescens
atgctcaattcaatcgaccgcatcacctggcggaacggctacaagctgaatggtgcgccagcgcaccgggaagaaatcgagccaatttttgaaggtcggcgcgctgctgcgctgtctgtctgggaacaatacgagcagagcaaggccgcgctgcgccaactcaatttatcgccggagcagtaccaggacgcgtgccgacagatagcggatgcgctggggatctga

SEQ ID NO: 429309 - DNA, 234 bp, Serratia marcescens
atggacttaaaaagctacttgggcgacgcccgcatccggcagcaggatttcgccgtagcagttggctcctctcaaagctatgtgagccgcgtgatcgcaggttcatgcgagctcggaagtgcgagcgttatcaaatgggcggcagcaactggattcaaagttacacctcacgaactgcgcccggatttatacccaaatgctcgcgatggtttaccggagcagacagcagcttaa

SEQ ID NO: 429310 - DNA, 2163 bp, Serratia marcescens
atgcctatctacatttcactttttgagcctaagaaaaaggctcaggttaacggcgctgtgccactggtgatcgcgttggaagcgccaaacaagcgcgcggccgaaagcatcgccaccggaaaactgtacgaagcctacccggagggcggcgacaacttcttcaacccgaaaaccgtcgaagatcagaccgggcaccctcgcccggccgtcggtcagttcgatgaaaaatttgccgctgagaacgtgttcgacggcagtacatggacgccaaaagagccagagccggaagtgccggccggccctatcgaccttatggcgcagcctgccaacgttcggatcgccgccgttgtgatgtacggtgatgccgagatcgatgatagtcagttatcgctggttgtggatttgctcaatgacgaggaaacgccagatgataccggcatgcgcgcggtgatcgacgggcttgtatccgttcccgctgtcggcgccatgtaccccgcatccgtctacaaattggtttcagcactgttccaaaacactactgccatgccgaccgaagaagccaccaccgcattcgcgcaggcgtgggtcgacaagcctgacgatcgcgaaaacctgactccaaccagcaccagcaccagcaccagcaccagcaccagcaccgacaatgccggcgtcgcggcagactacaacaccctgagcatgcacacagcactgtcgatcatgggcgttaatcctgcagaagcgaaggcagctgacgtaaagaacgccaaagagattatcgcaaaccgcgataacgcctggcgcgcgtgggacaaaacgctgcgggtgatcgtcggcattctcaacgtcgaaaccgatgtgcgccacagcatcatttccgacggcctgaaaaatctcaagctgataagcgacgacgccgaacgcctgcacttcgtgaaatcgtgcctcgctggtcacactgcatgcccagagctggattcctacggcaagaacccaccaccggtatcagtggaaaatctcggcggcggccgcttctctatcgagggtctgatcggcagcggcgagcagcagcatgcggatccagacacggcgcaatctgccgcctcaaatcagggtgaaaaaacggaagtggcgcagcagcaagttaccgacgcagcggcggcacaggccaagcagcaactggatcagatgggctatggcgtttacgcaaacgcacctgcggagaaatcccagcagctgcagcaggcagaagaaaatgccgaccgtgccgaagcgctggcgcatcagctgaaagccgacgatttccagcagcgcgccgcacaggttgcgcaggtgatcgccgagcagccagcggaagcccagcagaatctcgatatttggaagcgcgttatgcgcacagatcctcgatatacgaagccgatcgatggggctggctatgtcggtaccagcatcaatagcgaatacatgtttatgcgcgcaaccgaaatttttggccctatcggtactggctggggctttgacattgtagaggagaagatgatcgccggcgcaccaatgagcgaggccgtattcgagggcgggaaaattattggtaaccgcattctgcgcgatgcagacggctctatcttgttcgagcagaaccatagcctgctaatcgagttttggtatgtcctgaacggcaccaaaggccgcgttacagcatatggcgccacaccatacatgtacaaaacgaagcgaggttttatggctgacggtgaggtgatgaaaaagagcctcaccgatgcgatcaaaaagtcgctgtccatgctgggcttctccgccgacgtgttcctgggttggcacgacctgccggaatatcgcgaagaaaacgccaccgagttcgcgatcagaaatgccagtgacaaggccgaagacgtaacgcgcctgcgtgaagaactggacgagaagctggcaaaagtcgccgacaccatcacatctgccgtaacggtcaacgaggccagcaaggttcacgcctctatcgctcgcgaggtagaaacgcatcgcaaggccgctgaggcaaaaggcgatgccgatcatgccaagtacctggccggccgcctgcgccgcctcaccgcactgaaagatgagcgaatcgcagctctgaccgaggagaaagcatcatga

SEQ ID NO: 429311 - DNA, 177 bp, Serratia marcescens
atgctgagaatgtacctggccaaaggcgatgccgtgcgcgtgcagttttccgacggcactaccggcactatctgggtcgaaagccgtagcgagctggtgtttgacttcccgaacaccgagcggtttaagcgcgagaaacaggcgtttaaaaaaccgattactccaaatcagaaataa

SEQ ID NO: 429312 - DNA, 228 bp, Serratia marcescens
atgagcaccaacaacaacgaactgatgaccgacgaggagctgatcgagatgaccgggtataaatatccgtcaaagcaatgcgaggcgctcgcccgcgctggcatatctttcatcaaacgccgggacgggcgcccaagggtaacatgggctcacgttaacgcggcgctatccggatgcctggcgccgaccgtcacggaagagaacacgcctaactttgatgcgatgtga

SEQ ID NO: 429313 - DNA, 1011 bp, Serratia marcescens
atggcaggtaaaaggaaaaatgcagcagacaacgcgttgccaaagcgcgtttaccgcggaaaaacacaatacgagtttcatccggccggtggcggctcaatctcgctttgcgcattggattctccactgtcgctggtatgggcgcgatttgaggaggaaaacgccggtgcgcagaaaaagcgaaccttcaattttctggttgaagacttttttggatcagctgatttcgccaacctgagcactgaaacgcagaaggactaccgaaagtattcaggcaaggtgctaccggtgttcgggaaaatgttacctgatgagatcaagccgcagcacatccgccaatacatggacaagcgcggcgtaaagagcaccacccaggcgaatcgtgaaaaatcattcatgtctcgcgtgttcagatgggcatacgagcgcggcatggtaaagatgaatccgtgcaagggcgtgaagcagttcaaagaaaatgagcgggaacggtatatcaccgatcaggaatatagcgcgctgtattcggtttccccgcccctcgtacaggcagcgatggagctggcttatctttgctgcgcccgacaaggcgatctgctgactttgtcaaaatctcagctgttgccggaggggatttttatcaagcagggaaaaacaggcaagaaacagatcaaggcatggactgcccgacttaaatcggcggttgacctcgccgccagcctgccgctaaaggatggcgtggtgagcatgtacgttctacaccagcctcgaggacaccgatatacgcgggatggttttaatagccgctggcaggccgccagggagcgagctgccgccgagttcccggagctgagttttgatttcactttccatgatcttaaagccaaaggcatttctgatctggagggatcactcaccgagaagcaggcgatttcaggacacaagagcatcagccaaacagcaagatacgacagaaaaaccaagattgtgccggtggtcggcgggcagtaa

SEQ ID NO: 429314 - DNA, 747 bp, Serratia marcescens
gtgaataaaatgaaatctcatttctcccggaataaatcaaaatacaaatacttagtgtatttatcatacttcatcttaagcttatcactggcgctcttaatattctcaccaatcatattgtttagctataagtttcatgatcttcaactgtcatccaaaactgtcgactgggcaaatttcggtgcttttttcggaggaagctacagcgctttattttcattcgcaagcacagttattctttgtatcactttatacttaacacagcgaaataacaataatcaactagctattcttaatcacgaacaaacaaaaaatgaaattgattttcttgtaaataccatagaaaaaagatgtgaaaaaaaaacagtgttttggatgggaaaacactggactgaaaaagatataattgaattcatgagcaaggagttaagtgataaaataaatactaaccatagtggtttatgttccatgacagaactgatcaattattccattgaaattgcaaaacctcattggaagttatattcagacgaaattccaatgttagatgaattggtttccatcatttaccgccaaaaaaacaaacaattaagagatttatataaaattctgtctttcgagcgacttgatcctgagcgcagttactggatgctggcatttgcttataacgcatcgcatttcataaagatctgctgtaaaaaagatcccctgctactctaccctccaacaagctatcagtacgagtaa

SEQ ID NO: 429315 - DNA, 1041 bp, Serratia marcescens
atgtcgataaaaaagcagccaaacggaaagtggcttttagacttttatcccgaaggtaaacctaaaggtaaaagcagtaagcgtatacgcaagacgttctccaccaagggggaggccaccgcttatcaaaaccacatattagaaaatgtccatgtcaagccttggcttgatgggaaagaagaccgccgcaaactgaaagaccttgtgacgcagtggtttgatgagcatggcgttacattagatgacggagaaaaacgcaaaggtgcaatggagtttgcctgtgaaagcatgggggatcctttcgctcatgagttcagctcaatcatgttttctgcatatcgaaaaaaacggctgtccggagaaatcgttaggacagcgcgagtaaagcaggtttcaccgcgcacaatgaatctcgaactggcttattttcgcgctttatttaatgagctaaagcgcttaggtcactggaaactggacaatccgttaacaaatgtccgctcgttcaaatcggaagaaaccgaattggcgtacctagaagatgaagagatcgcgaacttgttgggagaatgcgtgaaaagccggaacgcaagcacatactgggtggcgtgtgtatgtctagtaactggtgcgcgatgggatgaagctgaatcacttacaacgaagcaaatcaaaaactctaaaattactttcttaaaaacaaaaggtaacagaaatcgaacagtacctattagccaagagttttatgattcgttaccaaaaccggacaaacctggacgattattcaaatcatgctattcagcattcaggaaggcggtcgagcgggctgaacttaacttgcctgacggccagctctcacatgtactacgtcatacatttgcaagccattttatgataaaaggcgggaatattattatactccaacatatacttggacataccgatatcaaaatgacaatgcgctatgctcatttctcaccaaaccatttaaccgatgcaatatatcttaatccattaaatagtgggaaaataaaaagtgaataa

SEQ ID NO: 429316 - DNA, 585 bp, Serratia marcescens
atgcacatgatgaaaatcgactacgacgccaacagcacgcccgtgcttgatagggttattgaagcctatggattcagctcaaagcttatgcttgctcagcatctagacatagcagccagtagcctttccaaccgttaccggcgcggaggctttccattcgatatagttgttcgttgcatggctgaaactggtgtaacgctggagtggctcgttactgggcaaggtagaaaacactattctgatgaattggatatcatcaacttacaacataaaaaattagctgacggtcagttgattgatgccgggatggcgaaactagataaagtatttttcaagtctggatcagcgttacctatcgaccctgtttgcatccaagatgacaaagctcaatacattgtcgaccgctcttttactgaagttttcgacggtgaatggctggtaagtattgaaggaaaaataagcattcgaacgctggttcgtatacctacaaatcgcgtgagggttggtggtattggtatgtcctttgactgcagcctagatgaaatcagcatattgggccgagtagtaatgataatcacaaattaa

SEQ ID NO: 429317 - DNA, 972 bp, Serratia marcescens
atgggattaggtttaaaagacgggatcgtcgaagcaattgctttctatgataaaaaagataataagctaaatttgcctaattcacaccgtcatccagggagcattgctgtacttgctgcttttataaaccaccataaaatcaaagaggaagattgtggttttcacggcgatggatacatgcaggctataggtatgcctatggctctttggggtgaggatcgttatgttcaagatagaattaatgtgggaactaattatagtcttgttactgcattacaaaatgttgaagcagttgatactgcgacctcaagtattaatagttgtgtccgccgtttaacattccctgatagagtcgattatccgcggggtgtaacagaattaacccatgtcattggtgagcttcatgataatgtgtggtctcatgggcgttctacaggattttcctttgctcagcgatgggccgtaccaagaacaaatcgtactgaacatttcatagagtttgcgttagctgattgtgggttaggttttttgagagagttaaatcgtgcaaatatccctaatattaactcgcatcaagacgcgatagattggtgtatacaagaggggaactcttcaaagcatgctgatctcaaagatgattgggaacagcaagttcccgatgattttatgggggggagtatgtttggaaaaggagtggcggtaaaggaaaaatctaataatcatcaaggacttgggcttgctcacttgatgaaattagtaaaaacttatgagggggaattgcaactggccacaggcaatgtatgcttacaagcaaatggtgatacagtgagctatacagagttaccggtagaatggccaggcgtagctatctcgtgtagatttaaaattcacaaactagcggtcgaacatgtcgagcatgatagtgaggaagattcacaacttcttgatatcatgaaagcgttaggagggtaa

SEQ ID NO: 429318 - DNA, 345 bp, Serratia marcescens
atgtacattgtaaactataagctaccagatggtgatctggcttctcgtaatcaggctattcctcagcgccataagattgagacattgattaagcacggcgatgctataagtctggacttaagtggtgttttctcaatttcggaatcttacgctgacgaggtttttggagtgttagttgtaaaatttggttccgacaaaatcttaagccaaataaaactgaagaacgtgtctccttcaatccttaggagcatagctaaggtgatacaacgtcgcagcaatgaagttactgaaaaaaaagaaaaatatgtaaagcagtgcttttatgaggggctagcgacttgttaa

SEQ ID NO: 429319 - DNA, 444 bp, Serratia marcescens
atgagcgagcttaacccctttgacacccggctggccgggttgattgccaagctgtcgccgcagtcgcgaaagtcgctggccgttgccgtgtcaaagcgcctgcgcgccggtcaacagcaacacatcaaacgccagcaggcaccggacggaacaccttacgcgccgcgcaaaactcggcttcgcagcaaaaagcgcctgcgcgatcgggcgatgttctccaagctgcgcaccgcgcgctatctgaaggctgaaggcaccggcgaggccgctgtggtcgaatttgtcgggtgggttcagcgtatggccaatgtgcatcattatggcctgtatgaccgaccatcgccgaaaagtgattctgtgaaatatgaggaacgtccactgcttggattttctacaagtatcattaaggatattgaaagtgaggttgttcgttttttatcctga

SEQ ID NO: 429320 - DNA, 1188 bp, Serratia marcescens
atgatagactttagagtcgaggggaaatacatagtattagaatataaccctgaaatagctggtatcaagcacgtttatgaggagctagaaaaaaaactctcttacaccattgcaaaaacatttcatctttctgaaaacgaactattatcaaatttcgatgaagaagattacggcgacgtagttgagtttgtcgtagcagagaaagaggggagttactataagtttcggggcgagatacttggtttagataaagatgtatttattcataaagaagtaaatttatctcgaaaaactttcgttgccgaaaggagaatatcaattttcaaaaaaataggaaaaataaccagctcagacatctatattgggggaaatagaaaaggcagtataccttatatagaattcaaaaaattaatcagcaaatttcccaatacctacgaactagatagatatgcgttagcaagagttgaatcagtcatctcatcatatattgattcagatgggcaacatgaaaaaagttaccatgattaccttaacaagaaaattgaactcactgaaaacgaaatcagcaatcaactcgctgattatgaggaatttaaatacaaaaaaattttagaaaaacttaaaagaatgttaaaaaacgaagagaaatactctgagaaacaatggcaatccgaaattttagacatcattcttttactgtaccctaaatatctatatgcttttaatgaagctaaagttaaagatttccacagtaaaaagaatagattcatcgactatcttctcatagactcatcaggaaatatagacatcattgagataaaaaagccctttgataaatgcattgtcaccgaaaacgagtatagagataactacattccattaagagagctaagtggcactgtaatgcaaattgaaaaatacatttttcatttgagtaaaagcggcgattctggtgagaaaaaactaacccagcaattcaagaacaaaatcccagatggatttgaaatcaaaataaccaacccaggaggatttatcatcatgggaaggaaatctaatttaagaaatgaacaattacatgattttgaaataataaaaagaaaatacaagaatttaattgacatccttacctatgacgacttaatagagcgactagaatttatcttaaataaatggtcagaaaaaaaataa

SEQ ID NO: 429321 - DNA, 909 bp, Serratia marcescens
atggcaactatcgatttaagccaactgcccgcgccgatcgtcgttgaggtgctggattatgaagaaattttggcagagcgtaaggcgacgctgatttcgctttacccggaggaacagcgggaggccgtcgcgcgcacgctggcgctggagtcggagccgatcgttaagctgttgcaggaaaacgcctaccgcgaggtgattctacgccagcgcgtcaacgatgccgccaaagcggtgatgctggcatattccaccggcgaagacctcgaccagctcggcgccaacttcaacacgccgcggcttgtgatcgccccggcggatgagagcaccattccgcctacaccggcagttatggaagcggatgaagactaccgcctgcgcttgcaagacgcgttcgaagggatgagcacggcgggatcggccggttcctaccgttttcacgcccgctcggccgatggcagggtggctgatgtgacggcaatcagcccatcaccggctaacgtgaccgtcaccgtgttgtcgcgggacggcgacggcaccgccagccccgaattgttgcaggttgtccgcgatgcgctgaatgatgaggacgtgcgcccggttgccgatcgcgtcatcgtgcaagcggccaaaataacccgctatggcattgttgccacgctgtttctctatcccggcccggaggttgcgccgatcctcacggcggcgaaacaacgtttgcaaaattatgtactgaccatgcgccgcttaggccgcagtattcggcgttccggcatcatcgcagcgctgaccgtggaaggggttgaacgtgtcgaagttgctcaaccggccgccgacatcgtgcttgataaaacgcaggcgggttactgcaccggcgtgaacattaccccagggcgagccgatgactaa

SEQ ID NO: 429322 - DNA, 1122 bp, Serratia marcescens
atgtcattattccgccgaggggaaacctggtacgggagttacacgtcgccaagcggcaaaagaattaaggaatcgcttgggactaaggacagacgccaagcgcaggagttgcacgaccgcagaaaagctgaactttggagaatagaccgacttggggatttcccagaagtcacatttgaagaggcgtgcttacgctggctggaagaaaaggcgcacaagaaatcactcgatgcagacaagggccggattggattctggctcatgcattttgaaggggtattgttgaaggacataactgaggcaaagatttacaccgccgtcagcaggatgacgaacaggaaggcagaagaacgttgggcgttaagagctgaagctcttgccaagaaaggagttgaaatagagccacggaaggccgagcctgtctcaacatcaaccaaagccaagcaccttgcactcatgaaggcgctaatgcgtgctgcagagcgcgattggaagtggatagagaagtctccggtgatcaaggttccacaggaaaggaataaacgcgtcaggtggcttgagcccgcgcaggctcagcgacttattgatgaatgtcctgagccgcttaaatccaccgttgaattcgctctgaccactggccttcgccggtcgaacatcatcgaacttgcgtggtctcagatcgacatgcaaaggaaggtggcttggatttatcccgaggatagcaaatcaggacgggcaattggcgtcgctctcaacgacaccgcttgcgccgttctgcggaaacaaataggaaatcatcatcgatgggtgttcgttcacaaagacccggtgaggaagatgcgagtcgattccaacactgcgtggcgcgcggcgttaagacgatctggcattgatgatttccgtttccatgacttgcggcacacctgggcgagctggctgatacagtctggggttccactttctgcacttcaggaaatgggagggtgggagagcatagaaatggtacagagatacgctcaccttgcacccaaccatctaactgagcatgcgaggcaaattgatgcgattttcggaggtttagtcccaaatctgtcccatgaggaaattggaaagacgggatga

SEQ ID NO: 429323 - DNA, 210 bp, Serratia marcescens
atggctgacatcatcgacaacgcacaagagcaagaagaactgattatcctcgcggcattatccaaccggcctaaaccgtcaatggtgtttactggccgctgttattggtgtggagagaccatcagcaagggtaatttctgtcttggcgatagctgcactgaagactacgaacgccgtataaaagcagataggcaaagaggtgtcgcatga

SEQ ID NO: 429324 - DNA, 222 bp, Serratia marcescens
atggacactatcagcgtcaggattccccgcgcctatttcacagacgggcgcgtcagcacggatgcattgcagcagaaacttcatcaagcactatgggagcgcaccggcgtgatgcctgctcctgttcgagtattcctgcatgaagggcaagcaatcatggcgtccggctgtggcgctgatgatgtcgagagcattttaggattaggagttaaacatggctga

SEQ ID NO: 429325 - DNA, 255 bp, Serratia marcescens
atgtcatacaacatagcggataaatcaccggaagagtgcgagaaggttaacgtggatttggctgcttcaggcgtagcttacaaagagcgtatgaatatgccgattgttcctgcgcaagttgaagaagagcagccagcgcatctgcgtgaatacttccgcgaacgacttcagcattaccgtggccagagtcacaaattccctgggccgaacgacccacgctatcagcagatggccgaggctaacggcaagaagtga

SEQ ID NO: 429326 - DNA, 261 bp, Serratia marcescens
atgactacgaaaaacgacagcggctatcaggtcgtttaccgcggcgaaacgctagagcatccaaaagaaggcggttgggtgttctttcagaggttgaaggagtacggcggcgggtactggctaggacgcacctatcacgatcgcttcgttctggagtatgatcggcccacttcactacatgacggaatcaaatttatcctcgagatgcgagctgcagagctaaactttgcaacgttcgatgatgactttgagctgatatag

SEQ ID NO: 429327 - DNA, 612 bp, Serratia marcescens
atgacactaaagaccgaaagactgaaatggcttcatgacgccgccacggaactttctgccaccaaattgaagatgaccatgcggccggatgaattgctggtgctgaccagtgaactcctggctaaccgggaggcgcagccggtggcatgggaaatgcgctactggaacagcggccacaatatgtggcacgaatgggaacgcatcacagcagaacagcacgcagagatgagcgtgaagcatgcggcggacaacgattacgagtttcgtgtgctgtacgatgcaccgccagcgccagcagtgccgaaagaaatgaccgtagagcaagcttatgaaaatgttcaaacatggcattacgccaatggctggaacgcctgccgcgccgcaatgctggctcaacctgtaagtagcggttacaagttgccggagagctggatagcgtgcagcgaacagacccctgttgccgacggcgcttattggtgctggttcgggaaagagaaacctagcgttattcagcagcgagtttgcatctggaacgatagaaaccatgagtggtgtgacagcgctgtaacccactggatgccattacccgcggcgccggagggtgggaattga

SEQ ID NO: 429328 - DNA, 150 bp, Serratia marcescens
atgaccttcgaagattggttcaagcaattaactgaaatcgccacggaaaagggatttctaaatgcgggcaatccagccaactggcaggaagagttctctaacggactcacgccgcaacaggcgtgggatggtagctgggatttagagtaa

SEQ ID NO: 429329 - DNA, 456 bp, Serratia marcescens
atggacaataagctgagcgaactgagcaagccggttgcagaaattaaatgccacgaagacttatcactgagcattgttaacgtgcgagatggattcagtcttgggcgtcatccggtctactcgcaagagtacgccaatgccctgctggcagaaaacatgcgagttgcccatgatcttatcgcccgaaatggcgagatcgaagggctgaaaaagagagctgccgaactggaaactcacaatcagtgcctaatcaagaagaatgcggacttgacgcagcagaatatcaagctgggtgagcggctggctacgccggtgcggttgcctgcacgcaaggccgttagacatccagcaggttatccggaggacgccgcgagagaggttgggtataacgaggcgctcttcgatgttggcgaggctctcgacgctcagggattcgccgtagaggggggtgagtag

SEQ ID NO: 429330 - DNA, 237 bp, Serratia marcescens
gtgattgagcaactcaagttttacatgaccgaagcgtctcctgagctgcttgaggctcggcgggaatacatcgaacgcgtaatcgtcaaaaagttacgtgatggtgtggaaatacagaaaacctggtctgccgagtttgcaagtgatgcggcggatctgattgaggcatatcgcgaaggtctcgattttttcactgaaagaggtttcaacaccgaggcccaggagaaagcattgtga

SEQ ID NO: 429331 - DNA, 396 bp, Serratia marcescens
atgccagcaaatgaactgaaggcgttcagcgtgcaagccgatgagttcggatgcattcgattcgccaaaactcacgtggaagcccgtcgtgaaggtgcagcagaacttgatgttgagtttggcgatatcgtttcatgccgccgtgcaccggaattggataagtacgccgctgtgggtcacgtgccatggaaggtgcttatcgaggagcatggctggtcgcaagagtgcggatattgcaatcatcgcgtttacgacgaaaccgaaggccgtgtttttgacgagaaatgcgagcaggcattctgcgatatcgaatgccaggcacgccatgaaaacgtgctcattgatatggggattcgccgctcaggtgacagcgctagggaggtggagcgtgattga

SEQ ID NO: 429332 - DNA, 291 bp, Serratia marcescens
atgaaagagcgcccagtgattgtgaagttcactcccaccgataacaacatgctggatgccatatcgagcgactattacccagactggaacggcaactttagcatggcaacttggcgcataaagaatttcgtcaaggctgcgtatccagggttccacattgtaacgaaagaaattcgcgatcaccttagagggatgatgttgcgcggattgctgaaatcaaaaaatgaccatggcaataacatcgtctggacacttgttgttcatggagaggtgcgtgatgccagcaaatga

SEQ ID NO: 429333 - DNA, 897 bp, Serratia marcescens
atgagcttcagcatcattgaattcgtgaaacagcaggagccgttgtttagcggcgcactgactgaccaatcagttacatgggctaaggaaagccagttcgcgatgcagcttttccagaagaatgatttcctgacgaaaacggcgatagggaatccggcgagtgcgcagaacgcgattatcaacgtagcggcgattggcatcactctgaacccagctagtaagctggcctatctcgttccacgcgatggcatggtgtgcctcgacattagctatatggggcttcttcatctcgctcaggccaccgggtcgattaagtggggtcagtgcaagctggtttactcgaacgacacctacgaatcgaatgggcttgatagcgcacctactcataagtacaacgctttcggtgatcgcggtgatgtggtcggcggctactgcacggttaagactcccgacggagactatctcacagaggaaatgagcctcgcagagataaaggcaaccgaagctaccagtaaggcaaagaacggcccgtggaagacgttctgggcggaaatggcgcgtaagacaatcgtcaagcgggcaagcaaatactggccgcgtgctgagcgcttggataatgcaatccacgtcctcaatgaagaggaaggaatgcaccaagagccggtaatgccacacacgcctgaaagcgaagttatcgaaggtgagaatgcacgtaagcaggaggtttacgagctggtagaaggaatctgccagaagatggaagcgtcagaaagcatggatgagctcaagccattattcgctgatgcgttcaagttaactcgtggcatgaagcttcagcagaatgttcaggccatctattcagagcgcaaggcgcagcttgaagtggcaccgtcatga

SEQ ID NO: 429334 - DNA, 303 bp, Serratia marcescens
atgaacgcacaacaggccgtagaaattgaacgcatcgtatcaaccttcactgaagaagataacgaagcggtttatgaagaagttgagcgcctcgataagcagatgcggattggttacatggagaaaatgcttagagagcatcttccgcactgtgaagccgaggtattcgcgctggctgctgactcatccgagtttcaggagattgccagcaaagcaatttgggattgtctgacagagattgtgaagcgtgagcgggctgtcgagatataccggaacaaacacagatacgacgaggtagcgtga

SEQ ID NO: 429335 - DNA, 708 bp, Serratia marcescens
atgcaaaaagaagacaagtctcatgtatttgagcgccgcagaaagaagctgcaggagataatagattccctgggcacacaaaaggccctgtctgagaagacgggcatagcagaatcagttatttccaggatgctctatcctgctggaaagaatggaaaaagaaatataggtgagcaggctgttcgtgacatagagaacggcctgggtaaacccacgggttggttcgacggcatagttcaagatgctaattatgatgatgctcacaatatcaatacgtatggtgtgcaacacataaaaactatctcgactaagaaatatcccttgataggatggggtgacgtttccacctggtctgacaagatgcatgagatagaacaaagagcaactacatggttgccgtcaataaaagactatggagagcgggctttttggcttgaagttaaggatgacacaatggccggctccactggagtcaactatccgaagggatctttgatacttgttgagccgtatttgaaccaacatatttcctctggggacaaagtgatagcccgcaaaattggcgggagcgaatcagacctaaccttccggttcttctatgaggacggcggaaacaggtggcttagagcggccatgcctggattccctcacctcgacggagacgaatacgacatagtaggaatagtggttggagcctggttaaactaa

SEQ ID NO: 429336 - DNA, 240 bp, Serratia marcescens
atggaaaagcttcagctttacctgaactcccttggcattgagcaacagaaggccttcgctggccaatgcaacacctctgtaggctatctgcgcaaggcgatttccaataagcaaaaactaggcgcagcgctttcagtacggatcgaaagcaactctggcggccaagtatcacgaaaggatcttcacccaaatgattggttcgagatctggcctgaattaacagattcatttgcagcataa

SEQ ID NO: 429337 - DNA, 279 bp, Serratia marcescens
atggacactgcaaaaacacgcaatgacgcccgtcgcattgaaagctcgttgctcaacaagatagcgctgaaaggcgtaacaagtattgcagctgcagtaggtgttaacccatctcaaatcacacgctggaaagagtctcttatccctcgcatggcgatgttattggccgttctggagtggggtgtggaagacgaagaaatggcggagttggctaagcgcctggctggatatctgtcaccaaaagaaaacgccccggaagttgtagctttcgaggcgtga

SEQ ID NO: 429338 - DNA, 849 bp, Serratia marcescens
atggcaaatactgctgaggtaatcaaatttccgaagcttgaacctggcgagcaggagagaagagtggctgatatcgatgacggatatacccgtgtcgctaacgagctgctggaagctatcgcaggcgcagatttaacagcgcggcaattgaagcttatgatggcctacatccgtaaaacatacggcttcaacaagagggcagatcgcattgctgatgaacagatagcttcgataaccgggctatcaagacagaacgtcaacaaggcaaaaaaagaactgctttcaatgaattgcctttttatggaagggagtcaaattggtgttaacaaggaggtttctgcatggcgtttcagcaagtgtctccaagttggtaattttgtctctaagttagagacaaagagtgtctccaagttagagacagttggagtctccaagttagagacacacaaaagacattctttaaagacaattaaagacaatattaataaaccccctatatcccccaaaaaatcttctcagaagttcgacccgatgacagcagagttaccggaatggcttcctgttgaaacatggtcttcatgggttacctaccgcaaggagatcggcaagtcgattaaatccatgcagagcgtaaccatggcgattaacgtcctgctgaaaagccgtgagaagggatattcacctgaagagataatcaaccaaagcatcgccagcggatggcaggggatatttgaacccaaggttgccaagaatcatctgccagctcgaccgaatcagcgggcgattcctgagaacttcgccaccaaagattacggacaaactgacatcccttcctgggcgatggagtga

SEQ ID NO: 429339 - DNA, 849 bp, Serratia marcescens
atgaacatcgacgaaaaaatatctcaccttgagaaaaaactatccgagctgagcaagcctccggttgatattgctcacagccatgttgagctggtgtcagcaaattgcccggttcatggtgtgtatgagcaaaggactcgtatatcaatcgggatcgtcaagattccatcagttcctagcccatgcccgcattgcttgcgcgatgaactggcgtcactgaaaggccaaaaagcacgagctggcgaggatgcaaggatgcgaacgattgagaggctcaaggccgacttgcagatccccgagcgattctctgaatgcaccttcgaaaactacatacccgactgcgaagaagctaagcgcgccttgaaagtgtgccaggcctatgcatcaaaatggcctgagcgcctgaagcgtggtggtgggctggtcatgtgcggcaagcctgggactggtaaaaaccatctggcgctggctatcgcgaagagcgtcattgagtctcatcagagcccggcagcattcaccactgcactgaagatcgcccgcgaatacaaatcgacatggtctaagacatccactcggactgaagacgaagttatccgccagttcaccagaccagacctgctgataatcgatgagattggcgttcagttcggcagcgaggcagagaagctgatcatgttcgaaatcatcaacacgcgatacgagcgcatgcggccgacaatcctgataagcaaccagagtaaggaagagctatcggcattcatcggcgagcgtgtcattgaccggatgaatgatggcggcggatgcacgcttgccttcacatgggatagttacagatcacgggcagcctga

SEQ ID NO: 429340 - DNA, 672 bp, Serratia marcescens
atgggtgtggttaccttggaatcttcttgcccgcattgcttaagagagagagctacgcttgaagcagtttccgagcatagacagagcacaggatcaagatgcgccgtcgtatttatgtgcaaaagctgcgaggattttactaccgtcatcgtggagatatatgggactcatagccctatggctagtgctaagtttaatggcagaaatttgacaatttatacagaccatattcgcgccatgcagcatggttttccttttgtgaaaatgtatccatctgagatttcacacaacgctccagatcactctccagatagatgtgccaaattttttatagaagctaaagagaacttgcaacgcgggaattacgaaacatccataatgctttgtcgcaaggttattgacattgctactcgagagatacttggcgaggattccaagaaagagcaattatcccaacgaatatctatgctgcatgtcaaaggtaaaatcacggagcagatgaaagactgggctcacatcgtccgcatcgactccaacggcgcagtgcattcagatgaggaatttacccaagaagaagctgaagaggtaatcggcttcactgaagttttcttgatctactcattcactcttcccgagatggttaaagccaagcagattaagcgtgattcataa

SEQ ID NO: 429341 - DNA, 453 bp, Serratia marcescens
atggctaaacaggtcttctacctaagaagcccacagatacgccagaacctaatagagcacctcaaaaatctaccgctagaccagtccaaaccaatcgaagttgaagtatccccacccaaacgaaccctatcgcaaaatcggaaaatgtggccgctgctgcatgaccttgcgctgcaagtcgtttggtatggcgagcgatacgacgaagacgattggaaggacatgatcaccgcgcttgtcgctaagaccaaaaagcaggaacaacgaaccgcgccaggaatcggtggtggagttgtaatgttcggtcagcggacaagcaagatgcgggtagcggaaatggtggaagtcatcgaggcaatctactggttcggcactgaacagggcgtcaagttcagcgatgaatcccggctcgctatcgagtgggctaatcgatatggagacagagtcgaatga

SEQ ID NO: 429342 - DNA, 312 bp, Serratia marcescens
atgactgattacagcaagatgagtgacttttatatcaactgcgccgttgcaaagttgaaattaggtgactgtgtaagaaaagaagacattcctcagcacatatcaatatgtcgcatcgattattgcaacaacccggcagacgcatgggatattgttatccgcaatctaatatcgatagaaagccttttcgacaaagggaatacatggttggcgttctgcggtgaagattcagagtataggcatgtccactcaaacccactgcgcgccgccatgattgtcttcctcatgatgaaggatgccgaaaaatgctaa

SEQ ID NO: 429343 - DNA, 180 bp, Serratia marcescens
atgctaatcctcatctcagtagcaatcatagccgcctgcgcttactgctttgtggctggtcaattcttcgaattcctcagcaaaaacgatccaagcctaactacggttaaatcattactgatcagcctcgcatggccgggtaatgcagttctgtttctgctgatgaggtgcgtgcgatga

SEQ ID NO: 429344 - DNA, 690 bp, Serratia marcescens
atggctgcgggaagtcgcttgacgctggtgaaacctacatctgccagcagtgcaacgacgagattgatcgtcaagcagatgaggttatcggaaacgcggaggatgatgatggctaaaggcatcaagctgccgaagccgaagaaatgcagaatgtgccctacaaagttcactcctcggaactcccttcaaatcgtctgtagcactccatgtgcaatccaacacgcaaagcagcaatcagagcgcaagcaaaagcaatctgaggcatctgcacgccgtgagtggaacaagcgcaaggctgacgcgaagccgttgagtcattggatagccatgacccagcgagccttcaacgactacatacgagccagggatgagggaagtggctgcatcagctgcggcagtacaacggcaacggaatatcacgcggggcacttcaggacgacttcagcggccggtcagctccggttcaacgaaggtaactgccatctgcagtgtgcatcctgcaacgtccatcactccggcgcaatcactcaataccgaatcaatctcatcacgaaaataggcgctgagcgagtcatggcgcttgagaacgacaataacccacaccgatacacccgcgaagaacttgacgcgattagagcgcgttacagagcgaaattgcgggaactgaaaaaacgccaggaggcagcctga

SEQ ID NO: 429345 - DNA, 492 bp, Serratia marcescens
gtgagcattaaaaccctggaattaaccaaagagcagcacgactggattgatggctggatgcagctatttggcgcatgggtctactccggacgacttgagcgacgcatgagcaacatgatcgccaagttcatggaaagcgtagagccaagcaaaaatccaagtaggccaatgtgcaatgacgatgacggaatgttgatttctcaggtcgtagattccgtcatgtttatcgacaagaaagcctttggcatcctgctcagctactacgcccatggttcttctaagcgagccattgcatcttactatcacgcgactgcaaagccccgcaagattaaccgcggtcgattaggggaagggtggcgcaagccgtcagaggaaacatgccgtaaagaagtggctgaaatcctcaaagcaagcctgtttatgctctatgctccgatggtaaatgcgttcaatagtcgcaaacgtgtagagaaaattaagcatgttgcatag

SEQ ID NO: 429346 - DNA, 468 bp, Serratia marcescens
atgaacaggctaacagtaattgctattggccttatcgcttgcctgatagtttcgttgggatgggaggtcaaccattaccgagataacgccatcgaatacaagcgtcagcgcgatgagaaaaccaatgcgctgaatcaggccactgcaaccatcactgatatggaaaccaggcagcgcgatgttgctgcgctggatgccaaatactcgcaggagttagcggatgcaaaagctaaaaatgatgctctgcagcgtaagcttgataatggtggtcgggtgctcgtcaaaggcaagtgttctgtgccagccacaaccgaaaccgccagctcctccggcatgggcgatgatgccgccgtcgaactctcttcaactgctggacgaaacgttctcggtatcagagccgggatcgtcagcgaccaaacagcactgaaagcgctgcaggaatacatcaacacgcagtgtttgaaatga

SEQ ID NO: 429347 - DNA, 138 bp, Serratia marcescens
atgccactgaagaaaggtaagtcgaaaaaggtcatcagcgagaacatcgccaccgaggtcaaagctggcaagccaaaagaccaggctatcgccattgctatgagcaaggccggtaaaggcaagaagaaaggaaaataa

SEQ ID NO: 429348 - DNA, 489 bp, Serratia marcescens
atggcggcacctaagggcaatcgattctgggaggcccgcagcagtcatgggcgtaatcctaagttcgaatcgcctgaggcgctgtggtcagcatgttgcgaatacttcgagtgggtagaagagcatccgctatgggaaatgaaggcattctcgtatcagggtgaggtaacgcaagagccaatcgctaagatgcgcgccatgacgcttacagggctgtgtttgttcctcgatatagccgacagcacatggcagacatatcgagttcgcgaagatttatcggtgatcaccacgcgagcagagaaggtcatctacgaccagaaattctccggagcagctgctgacctactgaacgccaatatcatcgcccgcgacctgggcctcaaagagcaatcgcaagttgaagacgtgacacctgataagggagatcgtgataagcgacgctctcgcattcaggagttactttcccgtggaaaacgaagcgattcttga

SEQ ID NO: 429349 - DNA, 1500 bp, Serratia marcescens
gtggaaaacgaagcgattcttgatgagctgacggaagaagagcagatcgagctgttagagctgcttgaagccgaggatgaatatcgccgaagtcatcagctgtttgaatacgctccctatggcaaacagcgcgagttcatggatgccggcttggagtttaccgagcgttgcttcatggcaggcaaccagctaggcaagacgttcaccggcggtgccgaggtcgcatttcacctaactggccggtatccaggaactgcaggatatccttctgatggggcgtttgaaggagattggaacggacgtcgatttaatgagccggtggtgttctgggttggcggggaaacaaacgagacggtaactaagtcaacgcagcgcatcctgtgcggccgtatcgatgaaggtaatgagccaggatacggcatgatccccaaagacgatatcgtgagctatgtaaagtctccattcttccccgggttgatagaccgtgttctggttaaacaccacaacgctgatggagtagaggacggtgcgagcctcgtttacttcaaaccatactcacaagggcgcgcccgctggcaggctgacacagttcatggcgtatggttcgacgaagagcctccatacccgatatattctgaaggcctgactcgtacaaacaaatacgggcaattctcgattctgacattcacgccattaatggggatgtcagatgtagtcaccaagttcatcaagaaccctagcaaggcgcagaaggttgtcaccatgacaatctatgatgccgaccactatagcgaagagcagaaagaacgaatcatagcctcatatcctgagcatgagagggaggcacgtgctcgcggcatcccaacgatgggtagcggccgtatcttccagattccagaggacactattaaatgccagccattcgaatgtcctgatcacttctatgtgattaacgcaatggatttcggttgggaccacccgcaggcgcacatccagctttggtgggataaggatgccgatactatttatctggctcgagcctggaagaagaaagaacaaactgcagttcaggcttggggggctgtaaagccatgggctcagaagattccaacggcgtggccacatgacggaaatcagcatgagaagggcggcggtgaacagcttaaagcacagtatgccgatgctggattcatgatgctgcaagagcatgcaacctggccggatggcggaaatgctgttgaaccaggtatcaccgaattacgcgacatgatgcttgatgggcgcttcaaggtgtttaatacctgcgaagcgttcttcgaagaattcaggctgtatcaccgcgatgaaaacgggaagatcgtcaagcttaatgatgacgttctttcagccaccagatacggatacatgatgcgccgcttcgctaagttgatgcgtgacatcaagaagccaaaagagaaaaaggcaccggcaccaatcaggcccatcgcacggagaacctaa

SEQ ID NO: 429350 - DNA, 2172 bp, Serratia marcescens
atggccgacaaaaacagactcaattccattctgtgcaaattcgacatggattggatggcgagcgatgaagccagaaccgaagcgattaacgacctgtatttcagccgagtttcgcaatgggatgactggctatctaattacacaacacttcaatatcgcgggcaatttgacgttgttcgccccgtggtacgcaagctcgttgcagagatgcgccgtaaccccatcgacgtgctatatcggccaaaagatggcgcagaccctaatgctgcagatgtgctgatgggcatgtatcgcaccgacatgcgacacaacacagcgaagatttcggtcaacgttggtgtgcgagagcaaattgagtcgggcgtcggcgcatggcgattggtcactcagtatgaagataacgacccaaccagtaacaatcaggttattcggcgcctcccaatacatgaagcttgttcgcatgtcatttgggactccaacagcaagcagatggataaaagcgatgcaaagcactgcaccgtgattaaccctcttagcaccaatggctggaaagagtttgcaaaggaatacgatctcgacccagaaacatacccttcatttcaaaaccctgaccaaacctggcttttcccatggatgtctgcagatgttgtttatgtgggagagttctatgaggttgaggaaaagaaagagaaggttttcatctatcgagatccgctgacaggcgagccggttagctacttccagcaagatatcaagggcgttattgacgacctggcatcgcgtggatttgtgaaggttgctgaacgaaaagttaagcgccgtcgcgtgtacaagtcgattatcacttgcagcgaaatcctaaaagatcgcgagctaattgccggagagcacatcccaatcgtgccggtatatggggaatggtcatttgctggcgacaaagaagtttatgaaggcgtcgtaaggctgacgaaagatggtcagcgactgcgaaacatgatcatgtcattcaacgccgatatcgtggccaggactccgaagaagaagccaatcttcgctcctgaacagattgaaggctatgagtacatgtacggtggtaatgatgattacccgtactatctccagaatcgcactgatgagaacggtaatgatctaccaattggccctatggcatatatggataaccctgaggttcctcaggctaacgcttatatgcttgaggctgccaccaatgcagtgaaagaggtggcaagcctaggcgttgattcagacgctgcgaatggtcaggtagcatttgatacggtcaatcagctcaatatgcgtgctgatatggagacgtatgttttccaggacaatctagctacggccatgcgtcgagatggggagatttatgcgtcaatggttaatgacgtatatgacgttccgcgaactgtgctgatgacgcttgaggacggtactgagaaggatgttcagctctacgcacagatggttgattatcagtctggtaatgtggtcaccctgaatgacattcgcggtcgctatgagtgctacacggataccggcccatcattccagagcatgaaagaacagaaccgcgctgagattcaggagttgctaaccaaggttcctcagggcactcctgaatggcaaatgctgttgctgcaatatttcacactgcttgatggcaaaggcgtcgagctcatgcgcgagtatgcgaacaagcaacttgtgatgatgggtctcaagaagcctgaaacacctgaagaaatgcaaatggtagagctggcgcagaaccagcctcagcagccaagcccagaggcaatccaggctcagggggtattgctgacaggtcaggccgacctgattaatgctcaggctaagcaggcgcagattcaggtagaagcggccaaagtggaggcccagaaccagctaaattcagccaaggtggccgaaatcttcaacaacatggatctggataagcaagcggctttcagggagttcctgaagctgatgggatcattccagcaacaaagcagtgatgatgccagagctaatgcagatcttcttctaaagggcgcaaaccagaggcataaacagcaactggatgtagccaatctcctgcaatcgcagagacaaaattacccttccggctcaatcgccgagatacctcaataa

SEQ ID NO: 429351 - DNA, 909 bp, Serratia marcescens
atgaccgataccaccgaaattcaggcaactgaaggccaacccctgcacgtcgataatgcggcggcatccgcagtcgatacaacggcacatgccagtggcgatggtgtacaggattctggcttcgatattgtcctgaaagacgatgagaccaaaccagacccggcagaagccaaccgcaaaggctacgaaatgcggcttgagcgcaagcgtcaacgtgagcttgagcaacaggctgcagcagtacaacgcggtgagctgccggagagtattcgggtaactcctgaactgccagctcagccaagttacagcgacttctttactgatgaagcgctggagaaatatggctgggatagcaatcgcgctcaggccgcctttcaacaggctacaaacgactggctgttaaaggctcaggacgctcgtagcaacgctgtggccgagcagggcagaaaggttcaggagtacaccctgcaatcagcgcaatacgtcgatgctgcacgcaagcactatgacgcggcggagaagttaaacatccctgattatcaggagaaggaagaggctttcatgcaattggtgccaccacaggtgagcgctgacttgatggttctcttccctgagaaatcggccgcgatcatttatcacctgggagcaaacccagagaagactcgccagctcatggcgatgaaccagcagcaagctctgattgaactcactcgactatccgaacgtttaactctcaagcctcgagccaagcaagtctctgacgctccagcccctgatgatccaattcaggggcacgcggctgcagccaatgtttcagcaattgaaaagcaaatggctgctgctgcaaacaagggtgatgtagaggcttaccgcaagctcaaggcgcaattgaataaaggaatccgataa

SEQ ID NO: 429352 - DNA, 1299 bp, Serratia marcescens
atggcattgaatgaaggccaactggtcacttacgccctggacgagatcattgagaccgtccaaaacctgacgccgatggcgtctaaaaccacaaaatacaccccgccgtctgaatccatgcaacgttccggtaacactgtctggatgccagtagagcaagaggctccgacgcaatccggctgggatttgactggcaaagcaactggtgtgctggaactgtccgttaagtgcaacatgggcgatccggataacgacttcttccaattgcgggcagatgatttgcgcgatgagcgctcatatcgtcgccgcatccaggcatccgccaagaagctggcgaacaatgttgaaacggcaatcgccaaacaggctaccgaaatgggctcgctggtcgtgcatgatgcgcgctctatcgggccgactactggtctgaacggctgggattttgtgtccgacgctgagcgcctgatgttctcccgtgaactgaatcgcgatatggggctgagttacttcttcaacccggacgactatcgcaaatcaggccgcgatctggtgaacaaagacatcttcggtcaaatccctgaagaggcctatcgtaacggcaccattcagcgccaagtcgccggttttgatgaagtgctgcgctctcctaagttgccatcggtagtagcgtctgctgcaactggcatcaccgttaacggcgctcagaagttcaagccacaggcgtggattcaggatactgacggcaacaaagagaacgtggataaccgcgttgccgttgtaaccgtgtcagcatctgcaggcctgaagcgtggcgataaaatcagcttcaccggcgtgaagtatctgtctcagatggctaaaaacgtgctgactgatgacgcgacgttctcaatcacccgcgttatcgatggcacccatatcgaaatcacgccgaagccgatcgccctggacgatgctgcattgctgccagaagagcgtgcttacgccaacgtaaacacctctctggcaaacagcatggcagttaacgtattgaacatcgttaccactacggcaaacgtgttctgggcagatgactccatccgcctgctgtctcagccaattccggttaatcatgaactgttcgcaggcatgaaaacatcgtccttcagcgttccaggcgttggaattaacggcatctttgcaactcagggtgatatttccactctgtccggcaagtgccgtatcgcgctgtggtacgccgcgtgtgccgttcgaccggaagcaatcggcgtgggcctgccaaaccagaccgcaccataa

SEQ ID NO: 429353 - DNA, 1779 bp, Serratia marcescens
atgccaatccaacagcttccattagccaaaggccttggcaaagactaccgcaatgctgattacgtcgatttgctgcctgtgaatatgctggcgacgccgaaagaagtcttgaatgcatctggataccttcgatctttccccggcttagaaaagcgctcagacgttgccggagtatctcgcggagccgaattcaatacggtcaacagcagcgtttatcgagtggccggtgagcgtatttacaaagctggcgtagaagtagggagtgttactggtagctcccgagtgagcatggctcatagctccacaagccaggctgtagcggctaatggcgtattaaccatgtatcgctatgacggaacagttaaaacgcttcagaattggcctgaagaggttatcacaccacctaaaagcaaccccgttaaagactgggtatcaacaagcggaacagcggcaaataacaaatttagtgtcactgcagaaaacgcagttgggacattcctgataaaggttactccaaagacctcgaccggcgtctcgggaactctgatgcaaatcaccgaggatatgtggtcagccgaccagtctcagcccgtatcaactaccgcgccatatatcaccaatctaaaggttactggcgtaccgaatgcagggacagatgtcactattgaatacacgctcaatattccatctggtgtaacagggacaaacgcaagtgagtttgttgtaactcaggaaattggtgaggtagtcacaaaatacccacaatacgatatcggaagcgttcgtgatgcatgccgggcgagaggtagatatatctgggtcaaggatggtactcagacattcggagtaaccgatctcgaggacgaatcgcacccagacagatttcggccattttacaccgctgaaagccagcctgatggaatcatagggtgcggggtctggcgtgactttgtcgttatgttcggctcatcaaccatcgagttcttttcccttactggctcggccgagacaacggcagcaatctacattgcccagccttcactcatggttaataaggggatcgccgggacgtattgcaagactgaatttggcgattcatttgcattcatcagcagccaggctaccggagcgccatcaatttacatggttagcaacggccaggcatctccaatagcgtcggctaccgttgagaaggttttgcgcggatacacagcagacgagctttcaactggcgtgctagaagcaaccagattcgatggtcatgagattttaatcgtccatcttccaaggcacgttatgtgctatgacgcagcggccgcacagaatggggctcagtggtgcatcctaaagacagggctggcagacatggttcatcgttccatcgattatatgttcgaaggcaacgagataactgttggtgacaagatatctgcaataactgggaggcttatttttgacgcctcatcgcaatatggttcacaagcagagcacttgctttatacccccatgtttaaggctgatggagcgagagtttttgattttgagctggaagcgtcaactggcgtttctcaagtcgcggagaggttattcatctccgcgactgccgacgggataaattacggcagagagcaaatggttggcagcaatgccccattcatctacgacaagcgagtcatctggcgaagaatcggacgcatcagaaagaatatcggcttcaaggttagggttgtgaccaaatcacctgtgactctgagcggatgctcgataaggctggaataa

SEQ ID NO: 429354 - DNA, 909 bp, Serratia marcescens
atggctgacgagaacctaaaaaacccggtagtcatccaggctacacgcatcgacgcaactctacttccacgcaacatattctctcaaccatatctgctttatgtaatccagcagggcatggacttcggtcttgttgccaataaggccaatgaggctgggcagggagcttatgatgcccagaaaaagaatgatgagcaggatgcgatgctggaagatcacgaagttcgcattactgctgcagaggagaagctggttgaccatgaacagcgaatcactgcagcagaagcgaaactcgtcaatcatgaaattcgcattacggccgctgaggcaactcttgtaaaccatgagtcaaggataacggcgaacgaagccgagcttgccgatcatgaaacgcgaataacgcagaacacgacaaacatctccggcctaaccgttcgcatggtgacagcagagaacaacatcacatcactgcagaccaatgttgcatcacttaccacccgcgtcacgaccgcagaggggaatatcactactctgcagggcaaggtttcgaccattgaaaccaactatgtttccaaagccgtctcaaccagccagtcagtgcaagcgtccggcggttccttcctcgtaggcaacgtcgcaactccaaccacagacaagttgcaagtaggcggcagcgttaacgcagtttcctataaggtggcaggcattcaggttgtcggagcgcaacgaacaggatgggcggcggcaactggcacggcttatcgcggtacattcgacgccaaccaggcatggacgataggcgttttgaacgtcctgcaaatccagcaaatcgcagactcactcactcaggctcgccagcgtataaaagcgcttgaagatgacctgagagcacatgggttgattaactga

SEQ ID NO: 429355 - DNA, 459 bp, Serratia marcescens
atgattgaattcaaaccaacgcgaaacatcgacgtgattgaggccgtgggaaaccatcccgacatcatcgccgggagcaataacggtgacgggttcgattatcagcccgggcatcgttatttcgaggtgcatgttcatggccagttcggcggcatcatctactttcacgaaattcagccgctgacattcgactgccacgcgatgtatctgaaagaggtgcgcggattcagccagaaaatcgggttagccttctggcgattcatcctgtcgaatttcaacgtgcaatgcgtcacctctttcgccgcgcgcaagtttcgacatggtcagatttactgcacgatgctcggcctcaagcgtgtcggcaccatcagaaagtatttcaagggaaccgatgatgtcactttttatgccgccactcgcgaagagctgacggagttcctggaacagcactcaaaatag

SEQ ID NO: 429356 - DNA, 705 bp, Serratia marcescens
atgtttgatgtttttgaaaacagccgctgcggaaactccaagcggatgaaagaaagtcgtatgcgtaaaggcgggaagggtggcggtggcggggatggtggcgctggcgctgcggcagatgcaacgaaatacgctgcagatctgcaaaaccagcagttcgagcgcatcatgggaaacctggcgccattcactccgctggcgcagcaatacatcggccagctgcaaaatctctccactctgggcggtcagcaatcagctctgaacgattattacaactccggccaatacaatgatctagccaatcaggcgcgatatcagcaactggcttcagcagaagcaaccggcggccttggtagcaccgctaccagcaacggcttagcaacaattgctcctacgctggggcagaactggctttcaggccagatgaataactatcagaacctggcaaacattggactcggtgcgctacagggtcaagccaacgccggagcaaacttcgcgaacaacgctgggcagttgtcgatgcaaggcgcatcgctggccgcagccaatgccaaccgaccatctggattccagcagggaattggcggactggcaggcggagcgatgtctggcgcggctcttggtagcatcgttcctggattgggtactggattaggtgcggcgatcggtggcggccttgggctactgggagggttgttctaa

SEQ ID NO: 429357 - DNA, 1350 bp, Serratia marcescens
atggctacatggcaacaggctggtaactctggcggcctactggccgggattggcggcatgaatgccaatgctcctcaggccagcgacattaacactactttaggcctgatccgcgataacaatgatatcgctcgctctggcgcgaacaatgtcgcccttaccggcctgcgtggtctcgttggcgtcgctgatatctacaaccagcagcaacaacaagaggcacaaaacgctttcaatcaagcgcacgccgacgcatggaaaactggtgatgtgtcatcacttcgagatttcgccgcggctaaccctgcattcgtcacccaggctcagcaggctgttgctggtcttaacgatcaacagaagagcgacatgacgaatcaggctgcgggattgcgtcttgccttgtctcaaggtcccgaaacctatggccagtacctgcaggaaaacgcaggtgatttgtctcgtatcggtgcgaatccgaatgtgttggcgcagatgggcatgcagaacccgcagggtgcggcacagctctttgacacgcttggccttgctgcgcagggcgataagtatttcgatatcgtcggcaacaacgccaagctgcagcaaaccggacagatcgcgcaggcaaatctcaaccttgggcagcagcggcttcagcagcaagcagcctatcagcaaggccagttggaacaaggacagcagcagctaaatcttactgctcagaagaaccaggcggataacgccaacaaacgactcgagctaagcatgaaggcgggcgagaacagcgctaaatcccttgccacccagcaagcgtctgtgcagaagatgcaggactatgtcggcgcgcaccaaagcaatgccaatagcgtggctagcatgtatgacacagtgaatcaggtgaagagcattcctcctgaagtgtttgaccgtgtgttcgggtttggtggaacagtaaactcccgcatcccgggaaccgaatcagctgacgcatgggctaaaatcgagcagatgcaaggccaagcacggctgatgggcgtaattggcatgaaaggtactgggccagtctcagattcagaggggcaagctgcagctagggcattcctcgctataaaccaaaacatgtcaccaaaggcggcgcgctcggcaattgataactggcagcgagttctgcagcgtcagacttcatatctgcagaagcagcagcctgttgttgacacttatcagcagaaaatcgaagccttcaataattcgcagatcggtagtggatcagccccgcgcgctggcatgagagaaggcggatataccttccttggcggcgacccaagcaatcctaatagctggagaaaagactaa

SEQ ID NO: 429358 - DNA, 2478 bp, Serratia marcescens
atggcaggcccatgggaaaagtatcagaacgcagcaccggccgaatctccttccgatgggccatggactaaataccagcagcctcagcaatcgccaccacagcaaggtggcgatgttgtttctgctgctgagcagcgctttggaatccctgccggattgctcggagcggtaatcagcaaagaaagcagcggaaatgccaatgccatgagcggtaagggtgctatcggccttacacaggtgatgcctaacaccgctcgcgggatgggttatgacccagaagagctgaagcgcaatcctgctatgcaggtagaggctggggcgcgttatttaaagcagatgatcgacgcccacgatggcaacgtatctgcagctcttgctgcgtataactggggtcccggtaacgtccaaaaatatctgcgcggagagaaaactcaggttccaaccgagacggtaaattacgtcaatgatccacgctttgcccagtggactcagcaagccgctccaggctctgatgatgaactctctcaattggctcagcaatcagcgcaaccatgggcgcagcaagcgcctgcaccaactgcatcgcagaatattgagcaggcggctagagggctggcgaacatcccgttcgacatccttcagggtggggcaaacctcgtaaacgcaggtagccgagcaattggcggcggcgatgtgctagatccggtttacaggccagtaaatcgcccaacagacccttacgcacaggctggcgaggccattggtaactacctaaccccaggcgttggtccagtagctggagcaatgattggctctattgccaacgcgggtaatgaacagggtgattttgcgtctaatgcatcaaaggaaatgctgcttaatgctgcattacttggcgctcctgcagcactgcgcggcataagagctatgtctggcgctagaaccggtgcgacacaagcagctgctgcaactccagcggcgattgagacagcgaatgacgtctccaatcttgccaggacagcggcagggcgtgacgtgcttgccggtcaggcggctaaagttacagacgacatcgcaagggcagcagaaaccgccggtgtggatatcaacgccctaacgccaggcatgcgttcaggaagccgtggcgtagctcaggctgagggcgctctggcatcgacgccaggagtttctcaggatgcacatcaggctgcatttaacgagatcgcctctaagtttaaccaaaatcttgatgatctcggcgcggcagcaggaactgcatcagaaaaaagctcatccataaagcagcgaatcatgggaaaccttgacgagatgaaaaatgcggaacgcgccgcgtgggatgacgtaagggcgacaatgcccaatcagaagatgccgctaagcaacgccaatgccgttatccaaggggagcgatctgctggcgttccgcttagccctgaaatgaagcaactcttgggggcaaaccgcggtggggtaacgtttgatgggatgaaggcttggcgggcgaagtttgctgacgcagagcagaaatatatccgcagcggagaggctaacgcagctcgtcgagctggagaggtgcgcagggctatcactgatgatatgcgcaacatggcagagcagggagggttcatcgatgattggacgcgtgccaatgacctttccaaggctagattaacagcgcaggaaaatgccgaatcaatctttggtcgtgggttggcgaatgacgttctggttactaacggagttaaggctcttcagtcatcatctgccaaaggccttaatggtccatcaggatttcactcaatcatttcagcgcttccggaggctgagcgagttccagcaatatcttcaatcctgcaagacgcaatctcacatggcgtgaggggaggtaagtccgatgcggcggggattaaccatattgcgacgctactaacccctcagaacgttaatgccatcaaccgatattctaaagatttaggtcgaatcgctgatgcatacggaacccttgcaagagctgcagttaagccgcagcagtacgttgaaaggactgggcgaactactgaggttttgaaggcattagattcaggccttccaaagatcgctcaaaccgttcttgatgcgacagggaactctactgctggcgctgttgttggtgctactgggggcggagttataggtgcaacagtaggtgcaacagcaggtgcggtaatcaagagcgcagtggccaagatatccaaaacaaggagtgggcgatatgcgattgagaaagcgatccaggaggcaacaaaggctgttaaatctggatcaactcctcaggcagtggctgaagcagagcgaagattcttggctaacaaggtcgccgtgaaagcgattcgagatgcagtaggaagcgaagaatttgagaggctggtccgctcaggaattgtggcgtccctaagcggaatgaatgcgggagagtaa

SEQ ID NO: 429359 - DNA, 2211 bp, Serratia marcescens
atggctaatcccgttatcccaactgcagtagtcgcactgccgtataccccatttactgcagctcgaaagtttgctgcggttgcaaacggtaaagtgtatctggggaaaattgacaccgatccgaccatcacagaaaaccagattcccgtgttcctggaaaacgaggacggctcgtttgtcccggcagctcagccgttaaagctgaatgctggcggcttcctggtaaacaatgatcagatcgccaagtttgttgtaacagagcgccatgcgatcgccgtttatgacaccttcggcgtgcaacaattttacattccagatgcgacgagatacaccgaaggaagcggcggggatacctctatattcggcagaacgctgcgagtgccagagccattcatcccagtgttgccaccggccgcgtcgagagccaacaaggttatggggtttgatagccttggcaatcccattggcgtccttcctcaaactggcagtggtacggaactagccatcgacctggcaaacaaaagcgacccattcaagggcgcggctatggttggatacaaaaagaccacggtagcggctgttctcgatacaatttcaagcgtgaagatctcgcaaacgaccagcaacgggatgtactcggcgtggccgcaagggaaggtatttagccacaataaccaggcatattgcctgttcaacgtgggcgcatctcacagtagcgcgccgctaagtgtttaccagcagatttcacaggacggcgttacatggacgcgtttagcgccgagaatctcggcatctactacagatctgacaacgtggccgcaaggcgtgtctgcttggggtgctggttcagacggcactaatatttggtgcgcagctcgattccgccgtgtatctgatgagtcgcaatccaaatgcgtactgtataagagcgtcaacaatggttcggtatacactccagttttagacccagttccgttatacgattctaacggctgggcacctgttttgatgcactcctttgccgttctccctaacggccagttggctttcggctatcacatgtatgattccgaagtcggaattgccacgatcgaccccgttaccctggtggtgactagaaatatcattttctcgaaagagaacatcggcggaactccgatgctggttgagccgacgatccgcgtatatggcactcgtacggtgggtttcttgcgcacccagaataactcagttagaaaagctgtgatgtggtacagcgacgacaactgccagacattcacaacccgggaagtagatggagttcctaaccaatctccggtatcgctgatcagctatcagggcaatacgtacatcttctactgtggtcgctatcggaacggcaatagcaccaacggtctgacagatagcccaatgctaactatgcgtgtagggactgataatgatgcggtaaacatgctgtgggaaaactttaccgaggttccgattgcagctgttcctgctatgtacagcgatgctggcccgtcaggcacaggtgtacaggatgtgtgtgtcagaggaaccaagatcatcgtttgcctatcctcaaacatgggctcaaacgtagatcaggcggaaatttactctgtcaccatagatttggccgaccgacggaaaacaaacttcttcctgaccgaagaggcatttacaaactctgccagggcgacagatttcccatcaaactatcaatttggcagcgttaacattgtcagtgttggcggtgtaagcagcaccattcgaatgaatggccagcagatagtccaagatcaagatgcggcggtgcgttggggttcagtttcaggtgcagcaagtaagacacacgcgtttaacaatggtccgatgcctgcttatctgacggctggtgccagtagtgctgatgttttgctttggggtagttcaggggtaacagaaataagggcggggactgctttagccaatgcatctattaagttggatgttgcaacaaaacgaataaccataaccaaccctaacaacgtcaatggcgttgctctggaggcaaatgggacgataacgttcagcgcaaactggcagcatccgatcaagatagatggcggtgctcagcagacctacgaatgggtatcaggaacgggtaataagagatacaagaaaggaactccgcctacatctgatagcgacggaaccattttgtattga

SEQ ID NO: 429360 - DNA, 1206 bp, Serratia marcescens
atgccactaaatgcacgacagattgatactgcaaaacccaaagaaaaagaatacaagctcactgacggtggcggcctgtatctgctggtaaagcctaacggtgcgaagtactggcgcttgaagtatcgttttttggggaaagagaaaaagctctctatcggtgtttatcctgatatctctctggccgacgctcgcctgaagcgtgaggaggctcggaagagcatcgctttaggtggtgatcctggagaagagaagaaagctgagaggttggctaaaaaagccaatgccgaaaatacctttaaagctattgctctggaatggcatggctacaagcggcccaactggtcgaaaggttatgctgacgatctgatggaggcgttcgagaacgatatcttccccgatattggtaagcgccctattgctgagatcaagcctcttgaagtgctcagtacgctgcgtaaactcgaaaagcgaggtgtgctcgataagctgcgtaaaatccgccaggcctgcaatcaggtgttccgctatgccattgtcaccggcagagccgaaacgaacccagcttcagaattggcgagcgcgctgactgcgcctaaatctacccattacccccatctgctagctgatgaactccctgatttcttacaagcccttgctacgtattctggtagcccgatcacccgactggctactcgaattctgatgttgaccggcgttcgtaccgtcgaactccgccaggctgaatggaaagagtttgatttcgataagtgtgtttgggaggtcccagtcgagaggatgaagatgcgtcgcccgcatctggttccgctatccgatcaagttgtggcatcactccgtgaaattcagacggtgacgggccgttacaacctggtgttccctggccgtaacgacatcaccaagccaatgagcgaagcgagtatcaatcaggtacttaaaaggattggttaccacggaaaggcgacggggcacggttttcggcacacgatgagtactatcctgcatgaacagggctataacacggcttggatcgagttacagcttgcgcatgtagataagaacaccattcgtggcacgtacaaccatgcgcagtatttggagcagcgtagggagatgttgcagtggtatggggattacttggataaattagggcaggataccaatgacgtcatggtaaaaactgggtga

SEQ ID NO: 429361 - DNA, 441 bp, Serratia marcescens
atgaaaataacgcattcaggctataaaaccggcgccgccaccttattggcggcgatgctcgcactggcattaacggggtgtgccaagagcactgtccccagccaaaccgttccggcgaagaaagaggccgatgatcttttcgccaaccttggtgacccaaagacgcctgcgccgggaaaagagaaagtacattacatggcccaggtgcaagctgagattcaacgccattttaaagacgccgaagcctactcaggcaagcgttgcacattgcgcattacgtcggcaccggacggcctgccaatcaatgttcgaacagaaggcggcgatccggctctttgccgtgccgccatgcaggcaattggcgattctcgctttcctaagccaccaacggaagaggtccataaggcgttccaaattatcacgttggaatttagcccgtag

SEQ ID NO: 429362 - DNA, 216 bp, Serratia marcescens
atgaaagctaattttttacttgtccttaccggtgcgatatttctgagcgcctgcaccggcgaccgcctcgatcagtgctatgcgccggacatccctatcgtcacccatgctaaagcgaatggagacatctgcatctatccgtcaccaaaggaaaacgaaagccagatacgctctatatcagtggtgatttggatgagaaattgtttgaggtggtga

SEQ ID NO: 429363 - DNA, 1338 bp, Serratia marcescens
atgagttctgagtttcgtaaggtgaagttaaaagatattgcatcttttaaatatgggaaaaccattaggaagcaagatatccaatccagtggtgaataccctgtttttagtggctatcaagtagtgggttatcttcctaactatatgtataaggaagaacaactcataatcgtatgtcgaggtgcggggggaactggtgacataaaaatgagccccggcctttgttccattacaaatttggcaataattataagctgtgatgatacggtaattgataaaggttatctatactggagattgattttttctgacacttattctttaagaaccggctctgctcaacctcaaattacaatcaatactctggaatctttcgagattgagattgaacctgatttacggaagcaaaaagagatagcgttcacattatctaacataaataataaaataagaaaaaatgctgatataaatcaaactctcgaacacatggcacaagccctgttcaaaagctggtttgtcgattttgaaccggtaagaaccaaaatcgcggttctggaagcgggtggttctcaggaagacgcgacgcgggcggccatgacggcaatttctgggaaagatgctgatgcgctggtaatttttgagcgtggacatccggaacaatatgctgagttaaaagctacggcggaacagtttccatttgcggtgcaggacagtgagttgggagagattccggaaggatggtctattaaatcattagatacaatcgcaacataccaaaatggattagcgttacaaaaatttaggccagaaaatgaaagtaacttccttccagttgtaaaaatagcacaattgaagaaaggtttttctgatggtgaagaaaaggcatctcctaatataaaacctgagtgcattattgataatggggacgtcgtcttctcatggtcaggctcactgatggtggatatttggtgcggtggtaaagcagctcttaatcagcatttatttaaagtttcatccaccaagtttcctaagtggctttactttaaatatactactcatcacctcaatgagtttcagcgaatagctgaagcaaaagcagttacgatggggcatataaaacgagaacatctttcccaagctaaatgtgtcatccctgcatctgatacaattaactcttttacggtttttttcgaaccattaataaacatggttatttcaaaccgtctagagtgtcagcaactcgagaaaatccgcgatattctcctccctaaactcctctccggcgaaatcaccctgccggaagccgagcaggcggtaagcgaggcagaaaatgtataa

SEQ ID NO: 429364 - DNA, 726 bp, Serratia marcescens
atgcgggtacactttatcgtacatgaaagttttgaagccccaggcgcctatgaaacgtgggccagaaatcacggccatgatgtgacttactcacgcatatacgcaggtgatacattgcctgtggacgctgagggcatcgatttcctaatcgttatgggcggtccgcaggatccagccactacactggaagagtgcatgtacttcgattctaaaggtgaacaggcgctgattgcttccgctgttaaaaccggtaaggctgttatcggcatctgcctcggctcacagttgatcggtgaagcgctgggcgcgccgttcgcacacagccctgaaaaagagattggtaaatttccgatcacgctgactgaagacggcagcagtgacgagatgttctctcactttgcgaagacgctcgaagtaggacactggcataacgacatgcctggtctgacgccggatgcaaaaatcatcgcttacagcgagggatgtcctcaccagatcgtttcatactcggaccgcgtctttgctttccagtgccatatggaactaacgctggatgtcgttgaacagttgatcgcacattccgagaaggacctgagccgtgccgcagaataccgcttcgttaacacgcctgaagagctcaggagccacgattatagtgaaatgaatcaggtgctttttggcttcctggataagctcgaagcacgttacaaagcagctcaagcataa

SEQ ID NO: 429365 - DNA, 774 bp, Serratia marcescens
atgccaggtagtatagataaagcgccaagacatgatgaagcaacgggctggtcaagcacagcgataagctaccagcgtggagagacagatcctccccattatcatgttgaggggcaactgctgtttgctaccaggggggttatgctggttgaaacagagaatgaccgctgggtaatacctcctcagcgtgcattatggctaccgcctcttcagatccatagttaccacctgctttcacatacggacctacgcgctatctatttcagcagaagccttatcgctgaatgtgcgaactttgagaagagtagccaggtgcatgtaattacggctacggcactggtgaaagagctgattgcagggctattcagtgaggactacaacagaccgagccaacggaaaatggctctgttgctactggaaattctcagcgaggctccccctttagctgcagagcttccaatgccgcatgatgagcgattatcctgtgcggccagagaactattagtcaatcatcgttgggaagcatcgctgagcgatctggcctttatcgccgctatgtctgaacgtacattttcgcgactgtttattaaggatactggctttagttttagaacatggaagcagagagctaggatttgcgcttcgttagatcttctcgcgaatgacatccccatcaaacaggtcgcttaccagcttggtttttcatgcccggctgcatttacagctgcttttcgttccattctggattcaacgccgcgcgattttttgccttaa

SEQ ID NO: 429366 - DNA, 459 bp, Serratia marcescens
atgaaagagaatagtgccaacagcacatcatcaacatgtccgataatcgaccgctcaacactgaaagtgagtctcgttcgcgacgaagatcgcctgtcattttggctacagcactttggtgacattccgcaatggcttcacctcgaatcaccgatattttcctggctcaacctcctgtgtaaggactaccacggagattattgggagttttacaccctcagtaacgggggagcatttattatcccgtcgactgaaggcgagtacatgctctttaacgccctgaatggcaatagcgcaacggtagggcatgaagcagccggcattattgcttgcctcatcacttacagccaccacgcctgccgcaccgaatgcgatgccatgaccgaacactactatcgcctgcgggattacgccctcagccatcctgaaagcaacgccattatgcgcatcatcgactaa

SEQ ID NO: 429367 - DNA, 219 bp, Serratia marcescens
atgccttcttcttaccaagcgccgaagcaacggtgctggacgctctttttttcctggcaaaccctgtaccgtatttttcgcatgcttggtacgctactgactttggtcctgcgtctgtggctcatgctgcaacccggtgggccaccgtttccatcggcccccaaatcgtcctcttccacccggtccgacgtacacggacctgacaagtacaagggttga

SEQ ID NO: 429368 - DNA, 858 bp, Serratia marcescens
atgtcactttccccgcctaaaattgccttgctgtctacccatgattgggatgaatgcgattttttcatcgactatttagactggaagaatgttataagaaaaaacagactcaccaattttgatggcccggcagatatctgccgctatctcaatgactcgctccagaaacacttcagggatacccctgaaaaaattaatggcgtggtctctgacatgctttatgcgctcaacgaaaaaatcccgtctgaggaagaggtcgcctggctgaagaacgacaagcgcgcctgcttttggttatggacagaactcaacaatatcactcttggcgtcttgtcatttgaggaaattaaagaaatcattccacacagccatcaggaacggcttcgagaggttttaaaaaaacataaatcactccacctgaaagatggtcatcggcgttggggggaactggttagccagtggagtgaaataaaagaagatagttcactggttgaccatctttcgccagatgatgaggatattgtttcgtatacatggaaatacttatgctcccatgggcatgacatcgcgcagaaatatgctccattagacaatgaggaacgatacctatccatccttaattacatggacttttaccttactcatcctttagaaaaggaactgcttgtcaggaaaataaagccggcaattaatcagcgtaaccatagattgaaaaaacaaaaagccagcgtcagcaagaaattttatcttaaaaaagaaaacattgataagctaaaaaaattgctcaatgaaaacaaaatgaccatggatgaatatttcaatgcgctcattgagcaggaatctgacaaactgacgtaa

SEQ ID NO: 429369 - DNA, 570 bp, Serratia marcescens
atgaatcatgtcataaacgaaaatcaccccgcggataagtcgatacagcgtattttgttaacgcatcaggatgcgctgtttgaacgctattcaaaactgctgatgctccgtgtggatttcgcctatcggcaaagtagcttgtcattcaactttgctgatgaacatcagctggccgctgagatgacttacttaatggaacagtgcgctgatattcctgggatagtcggaagtgcatgggttatggaatacacggaacagcatcgcttccatgtccatgcagcattttatatcgatggacagcgccaccgaaaggtctggctattctgggaacagataaaggatatttgggaaagcattacaaaacatgaagggtatgcacatcggtgtgagcctaaacccttttatcgagtgaggggggagagagttgtagctgcgtctgacgtacaagcacgtgaagggatgcaatacatcctgagctatatggggaaacaggagcaacgtacggagcggcccatttatcaggtgagttccgtgccggtcgcagtccgacgggggcgacctcgtcgctga

SEQ ID NO: 429370 - DNA, 390 bp, Serratia marcescens
gtggagctgagtcgtaccacgctcgggctctggtccggcgaggtcagcgagttgctggagccgctgtatgacctgttgcaaaagtatgtgctgatgccgggcaaggtgcacaccgacgacatcccggtgccggtccaggcgccgggccgcagcaagacgcgaaccggccgtctgtgggtatatgtgcgagatgaccgcaacgcgggctcggtaatgccaccggcggtttggttcgcccactcaccggaccgcaagggcatcaatccacagcagcatcaggccgggtacagcggtatcctgaagaccgatgcatatggcggctacaacgtgctgtatgaaaacgggcgcatgcgcggcgaaaaatccacgacgttcatgtccgaacactga

SEQ ID NO: 429371 - DNA, 567 bp, Serratia marcescens
atgtgtcaaaggatggtatgttttatggaaaggtttaatattcttgtggatgatgaaaatatttatttttccatgggtttgaaacgtcttattaaaaatcatgcagatgattgccggaagagagtttttttcttgatgacaagggatatagaggtggctgacgtggtttttatttccttcagacgttttatgttatgcggggggcatattaatccgtcttgtagacaagtggtggtaataaaagataaacgtcttgcaattgattttaaaactgatggagtgttatatcgttctgcttgccaagaggatttatataggctaatgactaggatatttattggtgaactcaattccccatattcggtacctatgccattaaccccacgcgaacaggcagtgataaactgcctttgtagagggatgagtcagtcacaagcggcacgaatcatgggggtgagtcctaaaacagtgcacagccacaaacgttcaataatgaaaaagttattattaaagaagcagcgtgaatttgcatacttgcttgtttttaattgtaatcaatctatttaa

SEQ ID NO: 429372 - DNA, 933 bp, Serratia marcescens
gtgcatatgaagcccggtggagtgtatgggcaagccgtcaattgcagcttgcaggcggataattgcccattggttgaatatatggtacctgatatgaaacgaatgaaaacttacgctccaggccacgagaaccgacaatcgggccggcggtgggtgatcctactcgttacggcgatcgcgacggcagggctcgcccagtccggtcgggccgaaatgatggtgtctccttgggggagtgaggatggcagaatagtcggcacctatgactggacatcgcaatccgccgatttccccctatgcacgtcaagtggagggtgcattatcgggatttgctcctatttggacaaatggacgaaatgtgtgaacgtaagggctgctgaccattatgtgttcatcgagactggggacaccatccaggtagcccgggaaaagtggcttgggaagtaccccgcgacagggagctggaggatggtacccccccatagtgtcagggggatgtgtgtgggtcttatgatctggaaggggaagggacaagcgattaacaatgggactggggaaatcgtgccaggtagctactgtggcaaaattccgcccgcaaatgtgacatgcgaacttgagaacgatatcaggtatgagtacgggacggtgagtgggattgcggtgaatgggatgacaaagaccgagttccttgccattaactgctcacaaccggccgacattgtcgttacggtcggaggaggagggagcgtacacctggggggcggcgtgacatcacggttctctattaacggaactgacttgggcagtggggctcgcctgaccgcaccggccggtgttcgtcgggtacctgtaacgtcggtactgtattcgcaggctgaaccaaagccagggaattaccagggtagcagtgttttagtgctgggatatcaataa

SEQ ID NO: 429373 - DNA, 276 bp, Serratia marcescens
atgaccgggtatgtcatccacaataacaacagatatcgctatctgagaacattacatttcatgctcgatctttctgatagtaaggatatctacaatataagatacaccttagaacaaatacatcccagtgataacacacctaaagacatcagctatcttttgatgagctcacaatttgatggttccaacagctatatccgaattaacaaaatcaagggaaatacctacttgattaacggaatatctcaacccatagcgctttgctatcggtattaa

SEQ ID NO: 429374 - DNA, 1194 bp, Serratia marcescens
atgcgtcgaaatgtattgactggtgcgtttctggccattgtttcttctacggtggcaccgttaaatgcgatgggcactgaaagcagcgttgtgccatataaattgtcgcaattggcgagtgaggaaacgataggtgatgtcgaagttgtcgctgttttcgatggcgctatgccaacgggcgtaacggtgacggaaactggacggatatttgtctgtttccctcgatggggggataaggttccctataccgttggagaagtaacaaatcagggagtgatagcgtatccgaatctcgagctgagtaatgggggactgcctcaagccaaaacacgctttatcagtgtgcaaagtgtcatcgcggatggcaaaggttacctctgggtgctagatacggcggcacccgccttctcaacgccagaggttggcggtgcaaaacttgttgcgattgacttaaaaacgaatcagatcgtgaaaagcatcgtattctcacaagatgttgttttacccaccacctatctaaatgatatgcgttttgactttcgtgtagggaagagtggcgtggcttatatcacagattcttcgactcgtggtcccggcggcatcattgttgtcgatcttgattctggcagcgctttccgccgtcttaccggtgacccttccacttccccagaaaaagggtttatgccaacagttgaaggcaaaattttgctgcaacgttcccctgacggtaatgtttcacctctgagcgttgcctctgatgggatcgcgctttcccctgacggcaaaacgctgtactacagcccactttcgggacgacacctttactctgtgccaactgacttattacgtgatatacgcgtcactgagcaacagctttccaaaaaggtaacagattggggagagaaaggggcttcggatggattggaggcggatgctacgggcgcaatatatgccagcgattacgagcataacgcgattcgaaaaatgagcaaggatggacgttggaccactattgcccacggaccacagcttctctggcccgacactctttcaataggttatgacggttatctttattttatcgtcaatcaggtccatcgtcagccaggcttccataaaggggaagataagctacagaagccttatgcgctgctccgcatacgtatcgatgctgctcctgccgaaacgcggtag

SEQ ID NO: 429375 - DNA, 135 bp, Serratia marcescens
atgctggccgacggcaacgcctacccgtggtccagcaagccgaaagacgccgacatgaacgacagcaacaacagcgccgccaacgaggtgaaatcgctggcgaacccgcacggctggggctgcgcatcaccatga

SEQ ID NO: 429376 - DNA, 255 bp, Serratia marcescens
atggccggctgttttaaccacctcgatctcagcgattttaactcctcaaaactcatagacctggccgcactctctgccgaacagtcggaaaggctatgccacgggctgatgctgtttggccatttgctgcacaagcacccgcagccggatgccgaaggctgggagcatatgaatcactccctcacggcacatcgggttcctgcgttgtgtaacctttatgaacgtgcgctgcgggggctggaagcctgcggctaa

SEQ ID NO: 429377 - DNA, 999 bp, Serratia marcescens
atgaaaggtaaaattgcattagaagaacatgtctctacccaggaaaataatcgtttgtgggattcaaaaagcgaagcattgcgaaatggccgtaattatatggataacgttgaaaagcgccttttggaaaccgaactgcgcttaaaggatatggatgcttgtggcatccgtcatgctattttgtcactgacatcgccgggggcgcagtcgattcttgatgttgctgcagcaactcatttcgtaacctgcaccaacgactatattgccgaatattttgttcagcctcatcccgatcgtttcagtgcttttgcaacagtggcgctacaaaatcctcaggcggcagcggatgaactggaaagggcggtgaaaaagctgggtatgaagggggcattgatcaacgggtataccaatatgagcggcaccgaggaagggcgctatttggatgatcctgcggtagaagtattttggcagaaagtgagtgaactgaatgtgcctgtctatctgcaccccagagagccactccctgccgcctgtggaatttatcgtggctatgaaagcttggtaggttcagcctggggttttgcaacggaaaccgcagtacacgctattcgtctgatgatgagtgggttattcgaccgctatccgaatattaccattatccttgggcatcttggggaggggctgacatttatgttaccgcgcactgcccatcgtctggaaaaacagtttgagggcatcggtctggggggcaaccagcagcccttaacggattacctgacgaataatttctacgttacgacgagtggtcacttcacaaccagtgccctgcataatgccattgaagtgatgggaaaggatcgggtcatgttttctgttgattacccttatgaggatatgtgccaggcggctgattggttcgatccattagtcctgggcgccgacgttaaacaaagtattgcgtacggtaatgctcgtcgagtcttcagcctgcctgagtga

SEQ ID NO: 429378 - DNA, 879 bp, Serratia marcescens
atgctctatttctttcgtgctctctatctgaacggcaatgtctctttggctgccgatcagttagatctgagccaaccttcgggtagcctgctgcttaagcgcttgcgggaagagtttaacgacacgctgtttgtcagggtcggacaaaagatggcccccacaccgtgcgcgcagcaagcatttaccaccatatcaacgattttagatctgctggataatcagctcgttagctcattgcctttcgatccccgcaccagtcagcgaagctttactatcgcaatggctgatataagccaaattgctctggttccccgcctgcttgatatatgtaaacgccagggagccacccaaattaagtttgccatcaggcatattgatgacaaaatttactctgcgctagagtccggcgacgtaaaccttgtaatcggttatctaaccgatattccggaaagtttttatcaacagaggctgtttgatgaacactatgtttgtctaagcagcaggacgcatccgcgtatcagacaagcaccaacactggcatcatggcttaaagaacaacaggtcatggtgcagtgggacggtaccgggcatgcagagatggaacgctacctggcacgcagcggtattcaactgcgaaccaaaatgttgctccctagcttcttgggcgtagggaacattgtagccagtactgagttgctggccacggttcccggacaagttgccgcctggtgtgcagccgcatttccatgtgttgcctggccattacccatgccctgcccctctttcactattcgccaggtatggcaccagagatatcatcacgacccgggtctgatctggctacgccaacaattagctcaactcactcaggcaggctga

SEQ ID NO: 429379 - DNA, 885 bp, Serratia marcescens
atgaaaaccatgccaaagctggctcatctgacgatgttcaaagacattgtccactgtggaagcttgcacgaggccgcgaaaaagctggccatctcgcagccgacgctcagccgggtgctgaaagagctggaaatgaccatcggtgcgcggctgctggagcgcagcaaccgcggcgtgcgcctgacggcggtcggcgagctgttttaccggcgaatagacgccgccaccaatcagttgctcaacgcgtttgacgagctgcgcggcatgagcgctgacggcgagaagcgcctgcgggtggggatgagcgtcgatccgctgctatgctacctgcctcaggtgctcgaaggcttcaaccgccgctacccgcatacccgggtgacggtggtggaggacggcccggaaggcctgctggcccggctgcgaaactgcgagctggatttggcggtcagcagcctgaacggcgcggcgggcggcgccgatctggccatgcaggcgctgaaaagcgagcgcttctcgctctatcagggaggcgatctaaccgcagccgggcagccgccggccgaggccaaatgggtggtgccgcgctcctgctcggtggggcatgccgccatccgcgagatcgccgaacgctacacgccacacggccagatcgtcgagaccgactcctttctggcgacctggtgcctggtcaggcagcagggctatatcgcgctgctgagcgatcgggtggtcgcgcactacgccccgcagctgcacctgcagaaaatcccgacgcaggagatagacatcagcgcgcgcttttacgtctttacccgccatgagccggcgacgccgccgctcagcgccgcgtttatccacctgctgcaggccatgcagacggcctga

SEQ ID NO: 429380 - DNA, 1056 bp, Serratia marcescens
atgcgccagcagcccgctcagccgcacgtgtgcctctcttgccgccgtctccacgcctcgccgatcgatgtccagacgcagcggcaacgtgttgataaacaaccccaatgcccgttccgcgccttcgccgccctgcagacgccccagcaatacggtgccgaacacgaccgcgtctcgcccgctgacgctcgccagcacctgcgcccaggccaggtggcacaggctggccaggctgacgcccagccgccgcgcctgtcgccgcaaccgcaggttcagcgccgaagaaagcgcctggtagcggcaggcgatttgccgcccttcgccgtgcacgtcgctcaggccgaacggcagcaccggctcgcggatatccgccaacatgtcgcggaagaagctttcatgctccgcctcgctgagagccaggcgcgcctgcgccaccgcattgcggaacggctgggcgacgcccagctgtgccccacggccggcgaggatctcgccgatctcttgctccatgaaggccaacgtggagtgatcgccaatcagatgatgccactgctgcaaagcgcaccagctgccgtcctcctcctgcgtgacggtaaagttgagcagcggcgcgcgggtcagatcctgccgctgctgcaacggatcaaagctggccgccagctgttgccaaatcgggccatcagccggatcgaaacgccgctcgctcagcgccagctcagccttgcgccacaccacctgcaccggcgaggacatgccctgcgtgatgaacgcagtgcgcagaatgtcatggcgatcgatcacctgctgcatcgccgccagccaggcgtccagacgcgcacggctgtcgaaacgcagcaccgcggacagctggtacgggtcgccccgttccgccagcagatggtggaacaaaatcccctcctgcagcggcgacaaggcgtagatgtcctgtacgttggccacgccgcccggcacctgcgccaccactgcgtcgatttccggctggctcagcgtcgccagcggcaacatctccggcgtaatggaagccccgcccggtaa

SEQ ID NO: 429381 - DNA, 228 bp, Serratia marcescens
atgtatctgagtaaaaatgcctccagcacctactacactcatctcccgcagcctaactcattacgtggccgtggcttgcccttcgctacccgtacttccatttgcactaaagggagcccgaacatgctcccttatctattccctctccctgtagcagagggtgagggaatgtctgcatactctgctaaccaaatcgccggtttaacacagcagttgctcactaattga

SEQ ID NO: 429382 - DNA, 747 bp, Serratia marcescens
atgccctgctttaccctcgccgcagcccaataccccgccgctgcggccaatatcgcctgcaaccttgaacgtcaccttgaatttgtcgcgcaggcagccgaacagcaggtgcaactgctggtttttcccgaactgtcgctaagcggctatgagctggccgatgctgccgaactggcgctgacgctgggcgatccgcgtctgcaaccgctcgctgcggcggcgcaatcgcatcagatgacgatcatcgtcggcgcgcccttgcgcagcggccaggcgctgcatatcgccgccttgatctttcaccccaacggcgcggtggccgcctataccaagcaacatctgcacggcgcggaacaacaacggttcttgcccggtaatggcggcacgctgctggaaatacatcggcaacgcatcgcactggctatctgcgccgacacctcgcaacccggccacgcaagtgccgccgcgctggcgggtgcacagatttatgccgccggcgtgctggtatctgaagccggttacgcgaaagacagcgccacgctggcaggctatgcccggcgttatggcatggtcacgctgatggccaaccatgcggcgccaaccggtggctggatcccggcaggtcgcagcgccatctgggatgaaacgggagcgcttttggttgccgcaccggatgacgcccctggtcttgtcatcgccgacaagacccgcgacggttggcacggccgcctgtgccggttaagctga

SEQ ID NO: 429383 - DNA, 897 bp, Serratia marcescens
atgctacgggcgaatctcaatgacattcaggttttcatggccgtcgtcgacgccggcagttttgtcgccggcggacagacgatggggctatcgcgttcggcggcgggcaaggccatcgcgcgtctggagcagcggctgagcgtgcggctgttgcatcgcaccacgcgttcgcttggcctgaccgacgagggacgagagttttatcgacgtggcctgcagatcctcgcttcggtcgacgatgccgaggccagcgtggccggcgacaagggcaccgcacgcggagtgctgcggttgaccgccccttccgccttcggcagacggatcctgttgccgctggtgccgaaatttctcgtcgcctggcctgaggtgcaggtggagatcagtttttccgatcgcctggcggatgtcgtggaagaaggatttgatttggcagtacggatcggcgtcacggcgccggatacccggctggtgtccagaaccctcgccaggtatcgcgccctgctgtgcgcctcccccgcctacctcgccgcccgtggcgaaccgcataccgtcgagtcgctcgccgggcacgaggctctgctgttcagcagccgcaaccaaaaacagccctggcggctgcgtgacgagcgcggcgaatgggtcaaggccccagttcgcggccgcctgcggctggacagcggagaagcgctgcacgatgcggccttggccgggttgggcatcgcgtatctgccggactttatgattgcggaggatttggccgccggtcgtctgcagcaggtgctgcgcgccgtggagggtgaagaaatcaggattgtggcgctctatccgaataagcgcctgctggaaccccgcgtcaggcgctttctcgatctcttggtggatacgctcggcggctga

SEQ ID NO: 429384 - DNA, 396 bp, Serratia marcescens
atgaaaaatggcatcacgcactaccaccacggggtcatttgggaagaggagaatggcgtgtcccaaggctatcgcgtcaaggataccctctacatctctgggcagttttcccatgatatgcagggggagtttgtcggcgcgggcgatatcgaacggcaaacccaacagacgttggacaatctggatcgggtattggcgggattcggtgccgaacgttcgaaccttgcgtatgtggagatctacctgaccgatgtactggcgcactttgaaccgtgcgttgcgttgttcaagcgctatgtcggcgatcaccggcccgccggttcgctgatcggcgtcaccgggttggcttcgcccgagcaattggtggagatcagtgcgatcgcgcaccttaactga

SEQ ID NO: 429385 - DNA, 132 bp, Serratia marcescens
atgccggaatatttcagcttactcaccgcaggtaagaaggaaatcaccaacatgggtttatacaggaattcactacatgtgttctggcgttgcaaatacctcctgatctggacggcggaagtatcgatttga

SEQ ID NO: 429386 - DNA, 1011 bp, Serratia marcescens
atgctcgttaccgcctttcaccttttcctatggtccggttctttaggccgaccgctaccattcggcttcgatgtgatggggctttttggtaacgggtggatcggcgttggaatgttttttgtaatttcaggctattgtatggctgggtcaagtggaaaagcattttcaagtggcttttcagcaaagaagtatggcatctattttttaaaaagatacttgcggatagctattccattttacatatcaatcgcggtttggtttgttctaattcgaggttttggcattgcaacaaaacctacaggggtctttgatgtaatatcccatgctttatttattcacaatttttcagaaaagacatttttctcaattagtggggtttattggtcgctcgctgttgagatgcagttttatttaattctccctgctctggttgttttatttaccactgttttgggaagggttgttttgttggtcagtgtgtttgctgttagtattttgattaatgtttacagtgagaatcaattgttaacatggggcattccatcttacctttcacttttcgttttggggtggctttgcgccatatatcaaaacagaataggttcatttataagaaaattgaaagctcaatggatattgatcgcgttatttgtattgcttcttttctacaaagggcatggctttaataacaagattaaactatatgaagtgttgatttcatcggtttttgcattgttaatggtatcacttattaatcggttctcaggaaagcgtgtgccgcacgttgtgcgcagtgtagcatttgtagggaagtgctcgttttctatttatttgtataactatattttctgggcgctagacagaaccgacttaaccccggttaagttgtttatggcttttgctttcgtgataggatttggcatcttaatgtatctagccgttgaaaggcaatcagagaaattaagaaaaaaaaccataagaaaggcagaggttaaatttgcagtgcaataa

SEQ ID NO: 429387 - DNA, 1233 bp, Serratia marcescens
atgacaaaagggtatgtgtcttttttatcaattattccatttatggtggctaattatgcatgtgcattttctacggcagatgttggcgacattattaacaaagagataattgccgccaatggcaagcaaatcactatcaaagtcaatgaaccgggtgagattaaatctacaataaagctaggtgttgggcaagtaattgagttttcgccaggcgtgtggacttgcagtgcgtcaccttacattgtaattgataatgcatcccaggttatcggttctggaatctatcgaactcagttgaaattagcctcggcttcttctgggcccattattcaaagtgctgactatgaaaaactatcaagcctgagcgaaaaaaatgcattgaaaattgcatcaccattagatggtgatagaaaaagccttccaggtgttaaatacataaaaattaaagacattactattgatggtggtgatggaaaaaaagccagcgttaatggtgttgaaatatatggtttatggttctggctagaagatgtatcaatcgagcggttctctggagatgcattagttactcaatttattccaagcggttctgttcatccagatgaaaatgatgcaatggagtcttactttactcgagtaaaattaattagcaataaaggtaatggatggacgatgcgaggaccgcatgattcgattgtttctgggatgattgctgctaacaatggagggtgggggattgatgttctgcataaggagggcttttatagcggcggaggtttaatgcttactaatacccatctgtatgctaacggtaatggcatgaggactgagtcaggggcaaatattcttgcttatgggattgaaagtgaggccaataaaggtgtaggtttgctgctgcgttctaatgattctatcgtacaaggaacattttatgccaacagaacttatggtgttcaaataggtgatgatgagtcttattctggtgttaataacctcaatcttcaactccataacaataaaatagcacaactcaaatgggggaataacgcaggccataatatgattaatgctgttgtatttcctaatgactctagccagaggtactttgaggggagcccctcaaatactgactatgtggcaacgtctgggcccaacgctgttcagcagttccccggtgggatttcgatggatagcgatcggaacatgtatgggataaaagaatccataaaataa

SEQ ID NO: 429388 - DNA, 900 bp, Serratia marcescens
gtgaatgccattcccaaaatacatgccgatgaggccgaaatctctctcccccatgtccgagctatgctcgccgaacagttcccggcctgggcggcgttacccatcgaactcgtcaccaccggcggtaccgacaacgtgatgctgcggctcggcgacgcgctgttcattcgcctgccgcgtaccgcctcggcggccgaagcgctggcgcgcgagaaccgctaccccgcgttgctggcccctcatctgccggcaccgatttcagcgccgttagcccggggcaagccggatgacgcctatcctttcgcctggagcatcggccgttggatcagcggtcgcacgcccgcctgcggcgaatgcagcccggcgctggcgacgcagttgggcgaattcgtacgcacgctccataccatcccgaccgcagactatgagatcaccgcctatcgcggcggcccgatcagcgccagagatgccctcacgcgcgagtctatcgcccagtgcgcccctcacctcgatgccgccgtcctgctgcggacgtgggacaatgtgagccaggtgcgtgaaaacaccgccggcgcatgctggctacatacggacattcaacccggcaatttgctggtcgacaacggtgaactggcggcggtgatcgactggggcggcatcgccatcggcgatccggcggtcgatctgatcgtcgcctggaacctgatggggccggaagcccgcgaacatttccgccgagcggtgaaggtggacgatgagacctggcgtcgcggtcgcgcctgggcgctgtcgattggcgttatcgcttacgcctactatgtcgataaggaacctttgctgacgcgcacgtcacgctaccagctgaagcaggtcgcggcggagatgggattgacgctataa

SEQ ID NO: 429389 - DNA, 564 bp, Serratia marcescens
atgggcgctgcgccaaggatccatctgccgctgtacgtgcgttgtctgtgtttgctcattatggcgatgctgatcgtcagcaccggcgttgagatgttcatcattgtgcgggattggctgcagggcgtagcctatcgcgatatcgtcgcctcttaccgggaatattacccggagctgcttgcctacgcgatcccgcagcaacgctgggcgctgttcgccacgctgcttatcgacatgctcggttatttgccctattacagcgcgctgctgtgcggcgccgggctgttttatcaatttttccgcggcaacgtgtggcatcgcaacaatatggtgctgttgcagatcatcggcatcttgctgatcgtcgatgtgttgttcccgtcgttagccggtctgctgcaggtgatggtattgaccgccgatgaaaaaatgctgtttatcctttattatggcgtcaatagcgagtcggtgcgctcgctgatcgtaggctgcgcaatcctggtatttagccgggtatttctggaagcgttgcggctgaatgaagaacagctttctttcgtgtga

SEQ ID NO: 429390 - DNA, 189 bp, Serratia marcescens
atgttggccaaaaggaagatgcgttcaaaggagctggcggagcaggtggggatcaccgagcaaaacctgtctctgttgaaaaacggcaaggtcaagggagtcaggctggaaacgctggacaagatctgccgcattctcgactgccagcctggcgatctgttggcctggcagccggacggcgaagagtaa

SEQ ID NO: 429391 - DNA, 300 bp, Serratia marcescens
atggcaaagcgtattgtcgccatgttgataatgtcgttgttgagtctgcaagcaaatgcggcccgttacgatcggcaatgcgagggagtttctcccgtgctgtttcagaagaaattgaaagagctggcgcatggcctgcgacaagagatggcggtgccgacaccacccacggagaacgaggctgaaaccttggcgcgtctggcggaatgcgatggcgaaaacgcgaaaacgccggcgacgggagggcaacatgcgcccgatcccgcagagcctcatatgtcttcactcaatggctgttga

SEQ ID NO: 429392 - DNA, 537 bp, Serratia marcescens
atgcgcccgatcccgcagagcctcatatgtcttcactcaatggctgttgaacggttctctgcgtcatttttcgtggcgcgccccagtcggcttattcatggagcttgtgtattgaaaataccctcgttaatcgctgcggcgctggcgctgctggcctcattttgcagtcaggcgttcatcgatcgccattcctcgcccggcgcctcgacggaaagtccctctgcggcgggatgcccggcgcggctggatggcttgttgcagcatatttggttggctgaacagattcaggcggagcgcatgcagctggcgcggctgcgtgcggagcgggaagcgttggaaatgtggttgcaaacacagaaaacggcgagacgttctgcgcaggggcaccagagcgcccgatcggcctgcgaacagggagccgatattgttcgctgcctgtcgctgcgtctgcgccggacgtccctgatggggccgcatcggccgtttgtcggcgcatattgccgggcctggctgaatggtcggccgctgaattgctaa

SEQ ID NO: 429393 - DNA, 1071 bp, Serratia marcescens
atgaaatcactaaatcatcacgccctgttgccctggttgctgctcgttagcgcgcccgtctgggcggagcaagaacctgtcaccacggcggagcgcaatcagctgccgccgccgccgttgcccgaaaccgccgcgaccgccctgcgcttttacggcgagctaggcatcggcggcagcgtctatttgaacggcgaacatcagcatcaatacagcgacggcacctatatcgaaggcggcctggagatcaaacagggccactggttcggcctgatttacggcgaaggctggaccgtgcaggcggacagccagggccatgcctggatgccgggccacggctggggcggcttcgagggtgggttaaaccgcttttacggcggttaccgcaccgacgacggcaccgagatgatgcttagcgtacgcaacgactcgtcgctcgacgatctgcaatggtggggggacttcacgccggagtacggctacgtgatccccaacacccgcgatctcagctacgccgccaagctgcaaaatctgaccggacgcttccgctacagtgtgacggcggcgccggaaagtcgtatcgacgagagcaaggcgctgttgcacttcggcaaatacgatcgctattccgacaagtacacctaccgggcgatgatcaacggttacacccaatacgatctgcaggacagtctgacgttgctgaacggcctggaagtgacggacggcctggggcagctgtttttgctggggctgcgcggcaaacacctggccggccgcgtctggcaccacaccggcaaaggcgacagcggtggccaccccggcagcgagtcgggcctgatgctcagcgcgatgacggaaaccgccaaagggctgtatctctccaccgcctacagctacgcccgccaccggtttgataacgcagcggataccgccacctcatacgcccagtttggcgtctggtacgaatacgccggcggcaaactggccaccgcgctggacagcaagttctttatgcgcaatgacagcaccggcgccagcaactcggtgtttctgatgcaatatttctattggtaa

SEQ ID NO: 429394 - DNA, 1077 bp, Serratia marcescens
atgaaacttggcgcatttttaatgccggcacatccgcgttatcgctcgttgcacgatgggcattaccacgatcttgataccttgaggtttttggacaaaatcggtttcgatgaggcctggattggcgagcattatacgatgccggctgaaccgtgcccttctccagatttgctcatcgctcaagcccttttgcagactgaacgcataaaattggcgccgggcgcctttatgctgccgtttcatcatccagccgagttggctcaccgcatttgttggctggatcatatatctaaggggcgattaatggtgggaattggcgccagcggtaccactttggatctcgacatgttcgacatagatcataagtcgggtgtgcatcgggagatgacggcagaatcgatagcgatcatgatgcgattttggaatagcgatgggccattcgaatttaaaggtaagtattggacagcgcgtcggccggcggatcagtgggataaaacctccggttatcacctcaagccctatcaatcaccccatccgccagtaggcgtgaccggtctttcaccttcatcctcgacgttgaagattgccggtcgtaatggctggatccctatcagcttttgttttacgcctcagtatctccatacccattggcaagttgttgaagagggcgccgcattgaatggaagggttccgccggccagggatacatggcgtgtcagtcgtcctattctgatcgccgacacagatgcgcaagcatggcggcttgctgtcgaaggcgaaatgggacgctactttcgtgaggattacttgccgatgatcgccggtaacaaggcgcttggtttgttcaaacatcacccggatgtccccgacagtgaagtcaccgtcgagtattgcgccaagcattgctggctccttggatcgccggagacggttcgtgaacgcatagaagaaatgcaatcgctgtctggcggattcggtgtgttgcatgtcatggggttcgatcatttggatgaattggaacccgtgcgcgaaagccatcgcgcattgcaagagatcgccacgaaatatttcgcctga

SEQ ID NO: 429395 - DNA, 615 bp, Serratia marcescens
atgcaacgtcaaaaaacaactctgccccccaatcggacacgtcgatttgccgttttggtgatcgacatgcaatacgactttctggatgaaggtggtcctgttccttgcgaaggagggagggcgattatcgcgtcgcttcaagttttgttgagctttgcgcgcggcgcgggcatcccggtgatctatacccaggaaagtcaccgtgccaaccgtgtggacttcggccgggagcttgactacggcgagatacttcattgcctcgagggaagccgtggcgttgagatcatcgcagacttgtccccacaggttggcgatcatgtattaatcaaacgccgttacagtgcgttcttcgccaccgatctggatcttttgctgcgcgggatgggagtcgataccgtcgttctgaccggtgttgccacggatgtttgtgtgcgtgcaactgctcaggacgccatgcaattagattatcgcgtcatcgtgccgcgcgagtgcgtcgcggggacgcgtcatgtgcgacatgaggcggcgcttgagaacatcggttatgtatttggccgtattcagagtttgactgaggttatgaatctctttcgggcgggattggaggagacatga

SEQ ID NO: 429396 - DNA, 1089 bp, Serratia marcescens
atgagcgcaacgctgtcgataaaaccgctggaagagcgattcagaaacgtcttgcaaatcttggttgaaaaacggcttagcttgagccgggaacagacccgagatctggttcaggccatgctggaacagcaattggatgatatgcagatcggcgcgttgctcgtcgccatggcacaaaagggcgagtccgctgacgagatcgccggtgcggttgacgcaatagcggcacgttgccggccattggcaagcggtttgccgcttacgttgaatatcggtggtaccggaggagaccggagcgggaccttcaatatttccaccacggcagccttggttgtggccgcggccggtgtgccagtgatcaagcatggaaatagtcgcgtaaccagcgtcagcggcagcagcgatatgatgtcggcattgggaattgatgtttcgcgcaagggtgatgaagcatggctgcggcggtcgttggcaacgagcaacttcgcgtttctctctacttcgtcttggtatgcgtttcctgaacggctgactgtcgtacggcgagctttgggggttcgtagcctgtttaatctgagtgggccgttggttcatcccgctaacgtgacgcaccaactgataggcgttgcgcatgcttcgcttttgtatcccatggctgaggcgctggtgaggttgggcggggtgacggcttttatcgtacatggtgcaggagatttggatgaagtcagctgcctgggagaaacccaggtcctgtgtgtaagtgatggatgcgtaagtcggttttctgtgcaaccggatgattttgaagttccagcctgtgaattacgggcgctgcgagggggttctgcggagcgtaacgcgaaaatctgcctggcagtgcttaacggcgagcggggggcctatcgcaacgcgactatagtgagcgccgcgacggcgctggtgttggctggaaaaacgcactcctttggcgaggcggcgaaactcgtacggcaagtattggataacgggcgggcgtatcaggttcttaaacgattcaaggagacgatgaatgagaacgagagtaaaagtctgcggcatcacacaccatga

SEQ ID NO: 429397 - DNA, 1221 bp, Serratia marcescens
atgagaacgagagtaaaagtctgcggcatcacacaccatgaggatgctctggcggcgctaaacgcgggagccgatgcgttgggattcattttttcaccgagcccacgtcaaatttcgcccgaggacgctcgttcgatcattgaacgattgccaccgtttactcaggtggtcggtgtgtttgtcaatgagcccagggagcgggtgcagctcattatacgttattgctggctggcggcgattcagcttcagggtgacgaaacgaatgagtattgccaggcatttgatgtcccggtcattaaaagtttccatctcgaaagcactttggctctggacaggataaacgactatcaggttagtgcatacctattggacacacaggtcgaggggctgagcggcggttctggaaagccattcgattggagtttgttgaaaaacaaaacatttgtgcggccggtaattgttgcgggcggactgcataccggcaatgtcagccatctgattcagcactgcttccccacggccattgatgtctgttctggcgtctcccggtccgcgcgccgtaaggaccctgtgcgactccaaaccttttttgacgctgtcgccgatgccgatcgccttcgcgtgcaggtgccggctgagagtgggcaagaggacatcctcaaggcgtcttttgatcggcagcctttggtggagattcaagggcggcgatttctgctgaatgctctgacggaacagatcccggcaaccccggctgaactcttgcgtgaagcagccaggcgagtctgcgatgcggcgcaatttccacctggtaccaagttggtgggggaagaagacaaaggaggcggtttattggctgccgtttcgctgctttcaggcctgccatacggcattgcccgctggtacccatccggtcttgaaggacaggttcaggttgatttcgattgcgaatataccggcggcagcctctttttgaacggcgtggagcccggcgataacgtttatatcgtggacgatctcatcagcactggcggaacattggtggggttggtttgtgcagtgcggaaagcaggggctgatgtatcaggcatcttatgcgtggtggaaaaacgcaattatggtggagccaggcgcgtgttcgaggcgacggggatctcggtgcaatcgcttattgaagtggatgtgagcggcgagcattcggtcgttgtcggcgtcaattattaa

SEQ ID NO: 429398 - DNA, 1413 bp, Serratia marcescens
atgctattgcctaatgacttgcgctctgccttggcgttgttgcggcaagcaggggatgagattaccccggtggagagatcgatttctcccgaggtggagatgattgaagattttctcgatgcctatcgccagcctggcggttcctggtttgccgatgagcaaccgttacggctttatcgacgaccaacacggggcgagtttcccgttttgatggggatgtttggcaatcgtcgccgttgtaggttgtttttggatcccttcggacgttattccgcagacatatcaaatgctcagttgttgctgcaggcggcgagtaggccgatagcgcccagattactgggcggggaggaacgcaactttcacaacgtgcgtaagcctgctgaaatcctggctttgttgccgatcctacgttatctgcaagatgatcctgggccgacggtgacgttggggttgatctatgcacgcgataatcgaaccggagccgcgaattgttcttaccaccgaattaccttcaaagaggattcggtagtggtggcgattgactctcgtggtcacttgcaacgtatgctttcggcacatctggcgcgcggagagcaactgcctatttccgtcaatatcgggcttgatcctgccatttatctggcttcggtattgactcggccttgtctttcttacggtagcgacgagttaggcgttgcgggggctctgcgcggcaatgcggtggaggttgcgccatgttacgccaatacggggcgatatatcgcccatgccgagatcgttatagaagggatgttgggtgcggaaaaagaaccggagacagcggaggtggccggttttaccttacctgagtatctgggttatcgctcgccatgtggtatggccacaacactggaggttcaggcggtaagtcaccgcgccggggcgatatatcagacgctgtcgggtcctggtgtggagcaatccattttacttggtttaggccaagagtgttcgctgctcgcccgactaaaaacagagggacttgagaggctgttttgtcgcgtcgcggctctgccttccggcggcggtcacttgtttaccgtattgcaagtcgctaaacgcgcttgcagtgatgacctgcgcgttatcgacgcagctaagagattgctcggcgaggtgccatcactcaaaaatgtgttactggtggatgaggatgttgacccttattcggagcgtgatgtcctctgggctatgagtacgcgcgcccgacttgaacacgatattcacgtcagcgctttgctgcccggcacttcccttgacccctcgcaattgccgctttatggcgggagtgatgcgaatgggctcgtcaataaatgcgtcgttgattgtacggttccttttagctctcggcggcgttttcaacgggcgttttaa

SEQ ID NO: 429399 - DNA, 1695 bp, Serratia marcescens
atgacgaatactctcgatcctcgtttcgattccacccggaatatttgtgcccctaggggcaacgaattgacctgcaaaaattggctgaccgaggcggcctatcgcatgattcaaaataatctggatcccgacgtcgccgaaaacccgcaagggctggttgtgtatggcggtatcggtcgcgctgcgcgcaattggcaatgttacgatcagattttggcctcacttaaagagctcaatgaagacgaaactctgttggttcaatccggaaaaccggttggagtattccgcacccatactgatgctccccgagtgttaatcgccaattctaatttggttccacagtgggccaattgggaacacttcagcgagcttgatcgcaagggattgttcatgtacgggcaaatgactgccggtagttggatctacatcggtagccagggcattgtgcagggtacgtttgaaacgtttgccgaagcgggccgccagcactatggcggggatctgaccggacgctggatcctcaccgccgggctgggggggatgggcggggcgcaaccgttagcagcgacattggccggcgcggtttcgttgaatatagagtgtcagcagagtagcctggattttcgtttgcgtacgcgctatctcgataaacaggcaaaagatctggatgaagctatcgccttgatcaaggagcacacggcggccggacaggcggtttctataggcctgctaggcaatgccgcagaggtgttacctgaactggtcaaacgcgcgcatgcaggcggtatccgacccgatctggttaccgatcagacgtctgcgcacgacctgatccacggttatttgccggtgggatggagcgtggcgcagtggaaagcagcgcaacgcgatccggggcagcatgccaggttggctgacgccgcagccgctagctgcgccattcatgtgcaggcaatgcttgatttcgttgacatgggtgtgccggctgttgattacggtaacaatattcgccaggtcgcacgcgatatgggcgtggaaaatgctttcgattttcctggcttcgtaccggcttatattcgccccctgttttgcgagggcaaagggccgtttcgctgggtggcgttatctggcgatccggaagatatctacaaaacggacgccaaggttaaagcgctgtttcctgaaaaccagcatatccatcgttggctggatatggcgcgtgagcgcattgctttccagggattgccggcgcgtatctgttggttggggttgggcgagcgtcatctggcaggcctggctttcaacgagatggtgcgtagaggggagcttagcgcgccggttgttatcggccgagatcatctggatactggctccgtcgccagccccaatcgtgaaaccgaaagcatgaaggatggaaccgatgccgtttccgattggccgttgctgaatgcattgctcaatactgcgggcggcgctacctgggtgagtttgcatcatggtggcggtgtggggatgggatattcgcagcattcgggaatggtgatcgtgtgcgatggcagtgaggaggctgaccggcggcttgctcgggtgttggtcaacgactgcggttccggcgtgatgcgccatgccgatgctggctatgagcaagccgttgctgccgcgaaaaggtttggattgaaactgccgatgctttga

SEQ ID NO: 429400 - DNA, 579 bp, Serratia marcescens
gtgagagtgatttatatcgacggttcgtcgttgtgccggttaggtatgaaaactttattgggcggtggggtgataaccttatcctctcccaatattaatattattaaaaatataagcccggcgcctgatttaattatcatggattttccccatgaaatttatcggttcgaagcctatttgacgtttattcacctttgccgcgctgaatataaaaatgtccggatattgttcttcgtcgataagacttcgccgctgatcctggcatttatcgcggcggcgcagccggatgcgattttgcacaaacgggaagcgttgcaggtggtgcgggagacctgcgcggcgctgagccgccgggaaaaggcgggcgaacggcgcgcgctgaacaggcatcaggcggcggcgatcacgcccggcgaggcggcggtgctgtgtgaaaccgcccgtacggaagatatccgcctgaccgcgcggcgactgaatttgcacccgaaaaccgtttattcgcacctcaacaatgccggcaagaagttcggcatccgcaatcgggtggaattgctgaaaatgattgcgctgctgtag

SEQ ID NO: 429401 - DNA, 3327 bp, Serratia marcescens
atgaatatctctacctggtccattcgcaaccccattccgtctatcttgctctttgtcatcttgagcgttgccggcttttattctttcaaattgatgaagatccagagcttcccggacatggatgtgcctacggtgaccgtgtccgcctcgcttccgggcgctgcgccgccccagctcgaaacggaggtggcgcgcaagctggaggacaccgtctcttcggtgcagggattgaagaacttgcgtaccacgatccaggacgggctggtcgatatctcagcggagtttcgtctggaaaaacccgttcaggaagcggtggatgaagtccggtcagccgtgcaaagcattcgcaccgagttgccgacggatttacgtgatcctatcgttcgcaagctcaacatcacgggcaaacctatcctggccttttccatcagcgccagcaagatggatgagaatgagctgtcctggttcgtggacaataccctgtcgcggcgtctgagaggcgtcgccggcgtagggtcagtcacccgtgtgggcggcgtgaaccgcgaggttcaagtcgaactcgatccggtcaaactggaggcgattggcgccaccgctgccgaggtttcccgccagttacgcgatgtacagatggacgcgacgggcgggcgagtcgatctggggcggggaaaacaaccgctgcgtttggtcgcccgcgtcaagaacgtggatgaactagccgcggtggaactgtcgttgcccggcggacaacgttttcgcctggacgacgtggcgacgctgaaagacaccattgcggaacgcagttcacttgcgctcctcaacggcaagaaggtggtgggctttgagatcacgcgcgccaaaggcgccggtgaagtcgaggtcggcgacaaggtggagaaagttctggcgcagttgcgcacggagcggcctgatttgcacatcacgcaggtcttcgactttgtccggcctgtgcaggaggagttcgacgcctccatgcacatgatctatgaaggcgccattctcgccatcctggtggtcttcatgtttctgcgcgatatccgggcgacgctgatctcggcggcggcgttgcccctgtcgattttaccggccttcatcggtatggacatgatgggcttttcgctcagtatcgtcacgctgctggcgctgtcgctggtgattggcctattggtggatgatgccatcgtcgaagtggagaacattgagcgccacatcggcatgggtaaaccgccgttccaggccgcgatggatgccgcctcggaaatcggcctggccgtcgtcgccacgacatttgccttgatcgccgttttcctgccgacggccttcatgtccggcgttgccggaagattcttcacgcagtttggatggacggcggcgctggcggtgtttgcctcgctggttgtggcgcgcttgctgacgccaatgatggccgcctacctgatgaagccgcatacgcgccctcagcgcgatcctttctggatggcgctctacctgcgcgcctgccggtggacgctgcggcaccgcgggctcaccctggcgctggccggcgggttctttattggctctctgatgcttattcctctgctgccccagggctttttccctgcagatgacaactcccagacgcaggtgacgttggaactgccgccagggagcacgctggaacaaacccaggccatggcagaactcgctcggcatcgcctggcgcccatcccacatatccgtaacatctataccaccatcggtggcggtgcaacgggcggcgatgtcatggcttccgatgggaaaaccgatgttcgcatggcaacgctgacggtgttgttggatgcgcgtcaagcgcgcccgaagaagcaggtcatcgaaggcgagatacgcacggcaatggcagcacttccgggggtgcgcagcaaagtggggtttggcggctcaggtgaaaaataccagttggtgttggccggcgatgatccccagctgctggctaaggcggccgattcagtattaagtgacctgcggcagctccccggcctcggtaacattacctccagtgccgggctggcgcgcagcgaaatcctcctgcaacccaatttcgccaaagcggccgatcttggggtatcgggcgtcgcgattgccgatactttgcgtattgcgaccgtaggcgactacgatcagttcctgtcaaaattcaacgtggagcagcgccagatcccgatcgtcgtcaagctgtcaaaagacatccgtgaggatatgggattacttgaacgtttgaccgtacccggtgccagaggcccggtgctgctcaatcagatcgtcaacattgagcaaggcagtggaccggcgcagatcagtcgcatcaatcgcacgcgcagcgtgacccttgacgtagaactgtcggacacccaactcggggatctggccgctcaggtggcgaagctgccgtcaatccagaatctgccggtcggcgtgcaccaggttgtgcagggtgatgacgaaatgatgaaggaactgtttgccggtttcggcacggctatggtcgccgggatcctggccatctatatcgtgctggttctgctgttcaaagacttcttccaaccgatcaccatcctggccgcgctcccactgtcattgggcggcgcattcgttgggttactgttggcggggcagtctttctcgatgtcatccctgatcgggttaatcatgttgatggggattgcgaccaaaaactcgatactgctggtcgattatgcgatcgagtcacgtcgcggccacatcggtccgaatggcgaagtgctcaataaacccatgagccgaacggaagcgctgattgatgcctgccacaaacgttcccgccccgtcatcatgaccacgttagcgatgggggcaggcatgttgcctgtggctctgggtttcggcagtgccgaccccagcttccgcagcccgatggcggtggccgtcatcggaggattgattacatccaccgtgctgagcctgctggttatccctgtcgtttataccctgattgacgatcttgaaaactggctgcgcaagttgcctagcctgctggcacgcagcaagaatctgagtggtaggaaaaaagccgggttttccatgcttttcgtggttctgctgtattggcttgccttccctgtcattccgttcctcgacatcccctacaagattgtcgttgtctctacgcttgttgtggtcggtgaaaccttgtttgtcattgccatcgccctgctgggcaaagagtattggggccagatcaaacactggttacggcagaaggtctttaagcgaaaaggttaa

SEQ ID NO: 429402 - DNA, 1167 bp, Serratia marcescens
atgacacaactgatagctaaaaacacgcgtccccgcttttggtctttgcggaccctgcatgcagccgtgctggcgatgccgattgccgccgccttatcggcctgcgatacgccggcggacaaggttgccccaccgtcagataaaccgacgctgacagtggccctgacaacgccggcaatacagtccgtttcccgcaccgtcacggccaatggttcaattgcggcctggcaagaggcgatcatcagccccgaagccaatgggctgcgcgtgcaaaaactgttggtgcaggagggggatatggtacgccagggccaacctctggcggaatttacacgcgattccgtgatgaatgactggctgctggcgaaagccgatctcaacgaagcgaaagcagtcgcgttgaatgcgcaagcggatggaaaacgagcgcggttgttgcgcggcgtcggcagcctgagcgaacaggacatccaaaagttgttaacccaggaaaaaacggcgcaggcgcgtctggaatcggcgaaagcgcgtatggcggctcagcagttgcggctggaccagacgatattacgcgctcccgacgacggcatcatttcagctcgttcggccacgatcggttcagttcctatgcaaagcaccgaaatgttccgcctgatccgccagggaaaatttgaatggcgagcggaattgtcggcgcagcagctggaacaaatccaaccggggcaaaaagcgcagatcgcttcacctggcggtaacacctgggaaggcgtcgtacgcctggccgcccccaccgtcaattcaacctcgcgccgtgggattgcctatgtggacatccttccatcgacagcgaagaacgcctcgccgattcggcccggcacgtatgccagcggtctgattacggtcggcgatcggcaagggctgaccgtgccgcaatccgccgtcgtggcgcgcgacggttttcacctggtgttcaccgtagatgacgagatgcgtgcacatccgcttaaagtcgcggtaggccgtctggtgaatgaccagcaggagatcctgtccggtcttcaaggcgcggaacgcatcgtcgccagcggcggcgtattcctcaatgagggcgataaagtccaattggccaacaccaccgatgcttcccattcatcggaaccgcgctaa

SEQ ID NO: 429403 - DNA, 783 bp, Serratia marcescens
atgccacccgtttcaaaactaaaaatgctgcgaacacgggcctatccaaggctccgccgactcatattcgtttctctgtttctcagcgtgtctttgattctctgcgggtgcgcaaccgcacctgcatcagaccgtttgtcaggaacccagcatgttccaacaacatggcgggcctccctgcctggctcagcgcacgtgtctgtgtggaatgcatggccccccgcccgaaatgaatccggcgcccggcgcttgcgcgctccggccggcaagcccagtcacgtagagaatgagcgcgcagcaaaaacgccagttgcgcgcgcaaatttggagtgcgttcaagcgttatggaatgacgcccgcaaactggttgcgacagaggctgcggccctctattacgcctcgcgtacctgccggcgacaacacgcgttctctacccaaagcgcgccattgcctgaatccttcgaatgggcgatacaaacgccccctcgccgggcgtctcaatctgctcagaaggaagtcgccggtcgtggcaagaccgctgccgatggaagcgggatcaaccgccacacaaccaagcattcggttccctggacgttggatctatcgcgcgtggataccgatcccggtgaaagtgtggcgggttggcaggctgaaccgcatgagcatcatagccgcgtgcgatcgacagtgcggaagtggatacggcgtctgttcacttcgtcagagcgagcaatgcttcaacgccaggctgaaccgctgcaggacagcgccgtattcgtttga

SEQ ID NO: 429404 - DNA, 585 bp, Serratia marcescens
gtggcccgtccccgcagtgaagaaaagcagcaggcgctcttgcaggccgccaccgacatttttgccgaacaaggattagcggcgcccacatcggccatcgccaggaaggctggcgtctcggagggtacgctgttccgctactttgaaaataaggacgtactgctgagcgcagtctgcgactacctgcttgatgaaatggagtgcctgctgacgcaaagcttacagggcgttttgccgggtaaagatcacatgcagatcgcctggaatgcctacattgattgggcgctcgccaatcccgccgcgtatgcgacagggaacaaattgatggtttccggcaagttatccagtgcacagatggagagaagcgtgcggttcggtgatatttcccagctgggtattccattggtccaggggctggatttaccgctgtcgagcgagtttcagggcatgatctgcacggtaatggccaatggcgttatcgatatggccgttcaaaaacctcacctgctggatatttacaaacgcgcaggttatgaagccatggtgcgagccattgagcttcctgacgttcatacagccatctag

SEQ ID NO: 429405 - DNA, 900 bp, Serratia marcescens
atgagctttttctgggtgaatattggtagcagttttaatgaggttaaagaacaaaatttcctctgggctccacaatatggcatgaataagcacgggaaaaagtttagtaatgcctcctgggagacagtgaaggatgtaaaagcaggtgacgtcatcttttgtaataaggatcgagagattgtctatgtagcgactgctacagccgatgctgatgatgcaccgcggccacctaatcgatcttttgataagtgggagcgtgaaggtacccgagtagaagtagatttgaccgttttagagcacccgatcgatgttttgcagttcagtgacatatttctgactgtgtttaatgagttaagtcggccaacagtttttgctgaaaacgggttttgtacgcagacttacatgtgcgaaatacccgaggctgcagcaaaaatgatagcaagttttattaacgataacgtttcaatagacttcaataaacagacggccacggtaaaagaggcgagaggaagcactaaagcagccgtcattcaggctcgcgttggtcacggcccctaccgcgataaattatttaagaagtggggcggaaaatgtgcggtcaccggcattgcgcttgagtcaatgctaaccgcttctcatattgtttcgtggtctatctcaaatgacaaagagaaagttgacccttacaacggattccccctgattcctaacctggacagattgttcgaccggggcatgatcagttttgatgataatggacgcttattgcacaagaaagaatatgcaggtttgcttcatgatttaaaaattcccttggactcaaaaattgatgggctgtttggggagaataaaaaatacttaaaacggcaccgcgtgacgtttgggttcgagaaagagtaa

SEQ ID NO: 429406 - DNA, 441 bp, Serratia marcescens
atgaaaattacgcattcaggctacaaaaccggcgccgccatattattggcgggaatgttcgcactggcattaacggggtgtgccaagagtacagcccccagccaaagcaatccggaaaataaaaaggttgacgatcttttcgccaatcttggcgacccaaaggcgccggcaccgggaaaagagaaagaacgctatatcgcccagttgcaggccgtgattcaaagccatttgaaagatgccgaagcctactcgggcaagcgttgcacattgcgtatcacgctggcgccggacggtatgccaatcggtgttcgaactgaaggaggcgatccggatctttgccgcgccgccatgaaggcaattgccgattcgcgcttccctaagccgccgacggcaggggcccataatgcgttccaaattatcacgttgcaactgcgtccttaa

SEQ ID NO: 429407 - DNA, 537 bp, Serratia marcescens
atgcctttactccctgccgtgcacatcgaaaccgaacggttgatattacgtcctcacaacctggccgatttcgatgcctggtatgccatgtttacagataaggaactgttcaaatttatcagcgcccccaatctttcacctgaagacggttggaatagactactgcgctatattggccactggtcggttttcggctatgggctgttcgccatatttcgcaaagtggacggacagttcctgggcgagaccgggttggcggattttcatcggggtctgggcaatgacttcgatgggagccctgaagccgcatggattattgcccgggaggcccaaggtcagggagtcgcgcaagaagcggctgccgcagcgcatcaatggattgacagcacgttatcacccgctcaaacagtttgccttatcggtgaaaacaatcggccttccgttaaaatagctcaacatctgggttaccaaatatttggccaatgcgaatacaaaggagcatcttgcttaaaactaagacggacaataaagacttaa

SEQ ID NO: 429408 - DNA, 1032 bp, Serratia marcescens
atgagcggcaagaaaaccaccatggcggccatcgccagagaggcgcgggtcggcatcgccaccgtcgatcgggtgatcaaccaacgcgcgtcggtgcggcccgccacccagcgccgggtgattgaggcggcgaaaaagttggggttcgcgttggaaaagtcccactgcctgtcggcggtgctgggcaggccggagcgccgcctgaaaatggggtttatcctactgcggcgcgaacactctttctatgcgcaactggctgatgaactgatggtgcaagcggcgccgtatcatgagccggggcagccgccgcagttcatcttccactctctcaatgccatcggcgataccgccgccgccattagccaattgagccgccaggtggacgcgatcggcgtgttggcgctggatcaccccctgatccactatgccgtagaagaagccacgcaggcgggcatcaacgttttcgcgctgctgtcggatttatcggtgcccacccgcgccggctacatcggtctggataatcaaaaagcgggccgcaccgccggttgggcggtggaccgtctgtgccggcgtcagggagatgttggcgtgatcatcggcgacaaccgttttacttgccaggaagcctgcgagatcggttttcgctcctacctgcgtgagcagatgagcggccagcgtgtgctggaaccggtgcgcagcctcgaggacgcggaaacggcgcgccgggtcacgcgtgaactgctggcgaaccacccggagctggcggcgctgtacgcgccgagcggcggtgtagagggcattattcaggcgttacgagagagcggccggcagcgcgacatcacgctggtgtgccacggcccggtgcagggcggtgaaatggcgctgctcgacggcacggtggatctgttgctgtgtcaccgcatttctgagttggccgccacgattgtcgagacgctgctcgctgccgataaacaaccgggattacgccacatcattaatcgcttcgatgtgatcaccaaagaaaacctctga

SEQ ID NO: 429409 - DNA, 924 bp, Serratia marcescens
atgactttgcctatcgccaatgcgccctgcagttggggcgtggatgacccaaacaatccccatttgccgccctacgccacggttctgcaagaagcgtcgtcggccggctaccgcagcatcgagctggggccgtggggctatttgccgacgcagaacgaggcgctgtgcgccgcgctggagcagcatcgtctgtcgctggtggccggcacgatttttgacgatctggtcagcgaggcgaacattgagcgcctgctggccctgactcatcggatatgccgcaacctctcgcgggcgcctagggcggagccgaccgagggcgatcgcgccgcgccgccgttcttggtgattatcgatttcggcaatccgcaacgcgccaggttcgccgggcgttcagatttagcgccgcgtttgtcgcaggcagagtggcagaggatgatcgggcacattacgcgcatcagcgaattggcctggcgggaatacggcgtgcggccggtggtgcatccgcacgccggcggctgcatcgagttcgccgacgaaatcgaccggttggcggcggacattccgcatcacaccgccggattgtgcctggataccggccatctgtattacgccgggctggacccggctgcctggttgagcaagcactttgaacgtctcgattatctgcactttaaagacgtcgatccgctggtgttccgcgaggtgctggcgcgcggcgtcgattttttcaccgcctgcgccgagggtgtcatgtgcccgttgggcagcggggcgatcgattatccgcagctgcgcgcgctgttggccgagcgcggataccggggctggatcactatcgagcaggaacgcgatccgcgcaatgtgcagggcagcctgcaggacgtcaccgccagcttgcgctacttgcgcggcctcggcttttaa

SEQ ID NO: 429410 - DNA, 1173 bp, Serratia marcescens
atgatcaacggcagcaaacctttggcgagatcgttgcgttggggcatggtcggcggcggcggcaccagccagatcggttacatccaccgttcggcggccttgcgcgacggcgcgtttactctgttggccggcgcgtttgacattgacgccgaacgcgggcgtgattttggtcggagcctgggcgtggtggcggagcgttgttatgcggattatgccgagatgttccgcgccgaagccgcgcgggcggacggcatcgaagcggtctcgatcgccacgccgaacaacacccattacgccatttgccgggcggcgctggaggcgggattgcacgtggtgtgcgagaagccgctgtgtttcagcgtcgatgaggcgcaggcgctggcggcgttgtgcgagcggcagcgcaaagtcatcggcgtgacctacggctatgccgggcaccagatgattttacaggcccggcagatgattgccgatggccgtctgggggaaatccggctggtgaatatgcagttcgctcacggctttcacgccgcgccggtggagcaagataatcccagcactcgctggcgggtcgatccgcgctttgtcggccccagctatgtgctgggcgatctggcgacccacacgctgtttctggcggaaaccatggcgccgcagctgaagatccggcggttgatctgcagccggcaaagctttgtgccgtcgcgcgcgccgttggaggacaacgcctatgtgctgatggagtatcacaacggcgccgtcggctccgtgtggtgttcggcggtcaactgcggttcgatgcacggtcaaaaggtgcgcatcgtcggtgaaaaggctagcctggagtggtgggatgaacaacccaatcagctacgcttcgaagtgcagggcgagccggtgcggatcctggagcgcggcatgccgtatctcgatgcgccggcgttggcggacgatcgcatcggcggcggtcatgcggaggggttgtttgaagcctggtcgaatctctaccgccgcttcgcgctggcgatggacgccaccgatcggcgcgacgcggccttcctggccgacttctggtacccggacgtgcaggctggcgcactgggcgtgaagtgggtggcgcgctgcgtgcaatccgctgaaaccgacgccggctgggttgccttcgactga

SEQ ID NO: 429411 - DNA, 1074 bp, Serratia marcescens
atgttccgcttcagtctcttgtctttcttattgttgcgccgccggcgcgtcacccagctggccggcgccacactgcttctcggcgtcgttatgcaggcgcaggccacgcaacgcatcgagttttcgccggatcccgccggcgcctaccctgagggcatcgcctgggagccgcgcgccggtgcgttcctgatctcctccctgcgcggtggccagctgggcctggtctacccggatggccgctatcggcggttttccaccgacaagggactgattaccacctccggcatgctggtggacaccgagcgcaaccgggtgctggtatgcaacgaagacgtgggcgtctccctccattcagcccctggcacgcgcaatcgcgtggcgcaggtgctggagttcaatctcgataccggcgcgctgcagcagacgtacgatctctcatcgttaagccgtgggtcgacgctggccaacgatctgacgctcgatgcgcagggcaatatctacgtaaccgacagcttccagccgcagatttacaagatcgaccgggcaacgcgccacgtgtcgatcctggtgcgctcatcgcttctgctgcccgccgacgcacccgccgctgcgcagggcacacagccttatctcaacggcatcgtgtatcacccggatggctacctgattgcgtcggactacacccgcgggctgctgtggaaggtgacgctggataacacgcctgcgataagtgaaatcaggctgccgcatcggctgaaagggccggacgggctgcggctcaaaaacgccaacgaattggtgatcgtacagtcttttccggctgaaaaggggagcatatccggcgacgtgacgctgctcgcctcggccgacggctgggccagcgcccatgtcgccgcggtcgccacgccgccgggattggatgggccgaccggcgccgcgttgcgcgatggcgaggtgtgggtggtcaactcccgttaccccaaactgtttgctgacgtcgctcaggcggagagcatcaggacgttcagcatcgtcaaggtggcgttagcacggcctgcggctgaggcacgctga

SEQ ID NO: 429412 - DNA, 894 bp, Serratia marcescens
atgcccgctttgccctcgcgtacccgcgccacgctgttcggtttgttggccattgtgctgtggagcagcgtggttggccttattcgcagcgtcagcgaagggctggggccgataggcggtgcggcgatgatctacagcgtcagcgcggtgtttttgctggtggcgctcggcgtgccgaaatggcgcagctttccgcggccttatctgatcgtcggcagcctgctgttcgtcagctacgagatctgcctgtcgctgtcgctcggctacgccaatacccgcctgcaggcgatagaagtgggcatgatcaactacctgtggccctgtttcaccgtgctgatggcgctggcgctcaacggccaaaaggcgaaatggtggctgctgccgggactgctgctgtcgctgttcggcatcggctggatcatgagcggcgagggcggctggtcaccggcgcagatgctggccaacgtgcgcagcaatccgctcagctatacgctggcgttcagtggcgcagtgatctgggcgctgtattgcaacctgaccaagaagatcgcccagggcagcaacggtgtggtgctgttcatcgtgctgaccgcgctggcgctgtggttgaagtatgccttcagcgcagaaagcggcatgcagttcagcgctggcgtgaccgtaacgctgctgtgcgccggagtggcgatgggggcggggtatgccgcctggaacgttggcattttgcacggcaacatgacgctgctggccaccgtctcttatttcaccccggtgctgtcggcggtgttcgccgcgctggtgttgcatacctcgctgaccgccaatttctggcagggcgtagcgatggtcacgcttggctcgctgatctgttggcgggcaactcgcggaaattaa

SEQ ID NO: 429413 - DNA, 981 bp, Serratia marcescens
atgagtaaaaccatcgctattctcgccgtgccacaggtgcagctgctggacgtttccggtccgctggatgttttcgccgaggccaatctgcaagccggctatgccgcctatcatctgcaggtagtcggaaagacgctggcgccgatcgtgtcctcatccggcgtcaaactcgtgccggatctcgccatcacccaatggcgtgaacaggcgatcgacacgttgctcatcgccggtgcaccgggtatcgccgacggcgaaagcgaaacacgcacgctggactggctacgcagagtggtaccccgcactcgccgctacggctcggtgtgcagcggcgcttttctgctggcggaggccggcctgttggatgggcggcaaatcaccacccactgggcggtagccgatcaattgtgtcgccgctatcctcaggtcacggtggataaagacgccatttatgtgcgtgacgggcgcctgcagactgccgctggcgtgacctcagggctggatctggcgctgataatggtggaagacgatttagggcgtgagatcgcgcagcgggtcgcggcccagctggtgatgtttttccgccgtcccggcgggcagatgcaattcagctatcgggaacaggcgaccctggccgggcgctcaatgctgcaggaagtgcaacgctgggcgatagacaatatcgggttaccgcacaacgtagccagcctggcggaacgcgccggcgtcaccccgcggcatttcagcaggctgttcggcaacgaggtcggcacctctcccgctaaatggctcgaggaagcccgcatcgccgaagcgcgcaggttattggagctcggcgtattggcgccaaaacaggtggcggcgcattgcggtttttccagtgcagagctgatgcggcgggcatttatccgccggctgggggtaacgccggcggactatcgaaaaatgtttctcggtaaacaactgcggcgcgaaagctga

SEQ ID NO: 429414 - DNA, 642 bp, Serratia marcescens
atgagtttaaccatcaacggcatcagcgtgccggatagcgcgatggcgcgtcaggcgaccgagttagtgcgcgacaccgaatcagatctgctgtttcaccactccagccgggtgtattactgggcggcgctggcggggcagcagcgcaagctggtttacgatcctgaactgctgtacgtcggctgcctgtttcacgatatgggactgacgcacgatcactgcagctgcgacaaacgtttcgaagtggatggcgccgatgcggcggccgagtttttacgcgggcacggggtcagccgtcaggatatcgatcgggtatggacggcgatcgcgttacacaccacgccggggatcccggaatacatgcacccgctgattgcgctggtgaccgcgggagtagagatggatgtgttagggatcaattaccagggctatgacgcggcgctgcgagagcaggtagtggagttgcatccccgcggggcaaacttcaaggaagcgattattcaggcgttttacgacgggattcgacataagccggacagcaccttcggcaacgtcaaagcggacgtgctggcggataaggaaccgagctttgttcgcggtaatttttgcagcctcattcgtcgttcgatgtggccagcgtga

SEQ ID NO: 429415 - DNA, 708 bp, Serratia marcescens
atgaaaatcaaccaccttcccttactcaacggtgatgaggtgtcggcgcgtctgaccgagttggctggcggtgtcgccgatgcggttgcggaattgttgaaccggcatgatgacgatgatgaaccgccggctattcgctggcattcaggcgatctgcgcctgccggcgtttttccccgacgagcacgacggccacgattacgattacctgatcgtggacggcgatgtgatcgtggagggatgcctggcggtgtcaccgcagcgagaggacggcggcattgtcgtgctggggcggctgcaggcggatacgctgatttgctggggcggactggtcgtgcgtgacgatgtccgcatacgccatgcctattgcagctcaggaaacgacggcgcgttcgtggtggggggagacctgaccgcgctcaccctggtagagacgggggagtttatccatgtccatggcgacctcgacgcgcgatgtctcgcttcgttgcagaacttcgttcaggttgacggagagacgcgctgtgactgtcgaatcgacagcgcgcagtccgaagatctgataaagcgcatgttcacccccggcctactgaaagccttcgaggggatggatcacgacggccaacgcattgttggctggtatccggatgacgacgcctatttagcctgtttacgacaaggccgaagccccttgaggcacggagactaa

SEQ ID NO: 429416 - DNA, 228 bp, Serratia marcescens
atgaaccggttactcgcagccctcatcgtggcgtgcgcggcattggcgacgttatatgggctggtgcattttggcgcacgttcggtgccgcgcgcgattgcggtcaacgaggcgccgctggggtgtgaggatgaacctgagctcgccggcgagtgcggcgatgacgatgaggctcccgccgacgaatttcgccggccggcgacgctgaacgcccgggccgacggttaa

SEQ ID NO: 429417 - DNA, 897 bp, Serratia marcescens
atgcatcgcagtggactaacagagttggaagtcgtgttggcggtggcgcagcgacaaagctttcgcgccgccgcacggcaattaggcatgtcggccaccgccgtcagcaatgcggtggccgggttggaaagccgcctgaaaatacgtctgtttaaccgttcgacccgcagcgtggcgctgacgccggcgggcgcgcgttatgtagaacgaatcgcccccgctctggccgagattcggcgtgcatcagaagagatcgccacccagcccgacgcgccaaccggcacgctgcgcatcagcgcaccgcaggagtgcgtctccctgctctacgaaccgttgatcgaaacgtatttgcggcgttacccgcaaatgcggctcgatatcaccagcgaatcaagaatggtggacattgtggcggaaggttacgacgcggggatccgtttggcggagtccgtcccgcaggacatgatcgccgtggagctaacgggagatatccgcatgttggtggtcgctacaccagactatttcgctgaacatggcataccgcaatcgccggaggatctgttacggcacaaaagcgtcgggatgcgtatgtcacacggagggatttaccattgggaattggaacgccaccaacagaaacttcgagtcaacgtaccgccgcgcattgtattgaatgaaatgcgcgccattcatcgtgccgcattgagcggtgtggggattgccttcgtttcagattggtttgcccgtgaagatatcgcatcaggtcgtcttattagcgtactggacgaatggtgcccagctttcggcggattgcgtctctattatcccggcagacgacatgtgcctccggggctcaaggcatttatcgatttggtgcatgaaattcaggccaggtag

SEQ ID NO: 429418 - DNA, 1416 bp, Serratia marcescens
atgcaaaaaattgacagcatttatatcaacggtgaattcgtgacaccccacggtgaagaacgcttcacgctgtttaacccggcgacagaagacgtgattggcactgtgcgtctggcggacgaggtggatgccgagcgggcgattgccgcagctaaggccgcatttccttactggtccaagaccagtaaggcggaacgccttgccgtattgcgccgtatgcacaaagcggttatggcccgtgaagatgagctgatggacgccgtcgtgatggaatatggcgcgcccaaaattcgtgggcgctggatggccagctacccggcggacgctatagctcaggcgatcgacgcgctggaaaatttcgagtttacggaacaggcgggtaaggcgcaggtcatcatgacgcctgtcggcgtcgccgggctgattacgccatggaacagcgatgccgggtttatctgcaacaaactggcgacggcgatggcggcagggtgcaccgcggtgatcaagcccagcgaaatgagcgcgatgcaaacgcgggttatcaccgaagcgttgcacgacgcgggcattcctgccggggtatttaacattatcaccgggcgaggcgaggtggtgggtgaggtcattaatcgacatcccgatattgccaagatctcgtttaccggttccacggcggtgggcaaacatatcgtagaaagcggtgcagaatcgctgaaacgggtgacattggaactggggggcaaatcgccgacgctgatcctggacgatgcggatgtcatgcaggccgtgcctttggcgcttgccgccggttttatgaatagcggccaggcctgcattgcaggcacgcgaattctggtgccgcgcagccgtcaggcggagtttgaacaggcgattgccgacgcggtaggcaaagtccggtcgggcgatccgcgcgatgaaaatacggaaatcggcccgatggtgagccaaaaacagtggcaacgggtgcaggattatatccgcttgggcgaggaagaaggggcgacattgttggttggcggcgttggccgtccatcgggtatggataaaggctggtgcgtgaagcctacggtatttgcgggcaataaccggatgcgcattgcccgggaagaaatttttggtccggtgctggtgatcatcccttacgacaatgaggccgaagcgcttgcgatcgccaacgacaccgcctacgggctgagtgcgctggtgttaagcggcgatcgcgaacgcggggtgcgggtggcgcagcagattgactccgggcgtgttctgctgaacacgttggatcatgaacctaaagcgccgtttggcggtttcaaacagtccgggctggggcgcgagatgggcaaatgggggatgcaggcttatctggaagcaaaaacgttgttggtggggtaa

SEQ ID NO: 429419 - DNA, 786 bp, Serratia marcescens
atgagcggttttttttcacaatcaagattcgatgttcgtcttgaatggggaattcaggcggttgaattgatggcgcaggatttggattgcgtcgttatcgtcgatgtgatgtctttcgcaacctgtgtgagcgttgcattatctcgaggcgcggtggtttatccttacccatggaaagatgacagggtacagcagtatgccgaaacattcggggcggtagttgccaatgccaaccgacgcttcgccggagaaggctactctctttcacctgcttcactggccgcgttgaatccgggcacaaaattagtgctaccatcacctaatggctctgcactggcgtttaaggctcgtgagtcaggagccgtggtgtacgccggctgtttgagaaatctgacggcgacggcggatgcttgcaacgggtacaaaaaaatattgatcgttgccggtggagagaagtggccggacggcagtttgcgtccggcgctagaggactgggtggttgcaggcggcatagcctctctgttctcggggaaaacactgtccccagaagccttggcggccgtagcttgctatcgaacgctaccgattaacatattgttcgagtgcagttctgcccgggagctgatagaacgcggctttgccaaagacgttgagctttgtctgacacttgacgccgagaaggatgccagccggttgcaagacaactacttcatttacactgacccggccgccgccgcgctttccgccacgaaggaaccggtcgtcacctcgccggaacggaggtaa

SEQ ID NO: 429420 - DNA, 165 bp, Serratia marcescens
atgattaatatgtttgaaaataatagattaattgacaatctggtatttttgaatgaatctagtaaaaatgaaagtgtcattatgaatttttattcttggggccatattatttatggagtgattgtttttatggaagaaaaagtgaagaggaagcaagttacataa

SEQ ID NO: 429421 - DNA, 762 bp, Serratia marcescens
atgagcgcatctatccacatcaaccgggtgcggaaatccttttccggcaccgacgtgttgaaaaacatcagcctgaccattccggcaggttcggtaacggtgatcctcggcccttccggctccggcaaatccaccctgttgcgctgcatcaaccacctggaaaagctggacggcggcaccattcgtgttggcgaacagctgatcggctatcgccaaaaaggccggcatctgtacgagctgaaagaagccgaggtggccgaacagcgtaaaagcattggcatggtatttcagcagttcaacttgtttgcacaccgcaccgtgttgcaaaacgtcagcgacgcgccgctgcgggtgaaaaaggaaaaaaaagccgaggtgcaggaacgggcgaaacagctgctgacccgcgtcgggctggaacatcgcatcaacgcctggccgcgtgaactgtccggcggccagcagcagcgcgtcgccatcgcccgcgcgctggcaatgaacccacaggtgttgctgtttgatgaaccgacctccgccctcgatcctgaattggttggcgaagtgctgcaggtgatgaaagacttggcgcattcgggcatgaccatggtggtggtcacgcacgaaatcggcttcgcccgcgaagtggccgaccagattgtctttatggatcagggaaaggtggttgaaacgggcagcgtgcagcaggttctggatgcgccgggacatgagaggacgcgcaacttcctggcgacggtattgtaa

SEQ ID NO: 429422 - DNA, 906 bp, Serratia marcescens
atgagtgggcaataccctgtcgacgacgcggaactgagcatcgttggccaccggcattacgggcgctggctcagcgccctggttgtgttgctgatcgtcggcgttatcgtcaattccatgctgcacaacccgcgctttgaatggtcggtggtggcggaaaatcttaccgaggcgtccatcctcaacggcgtgctcatgacgctgaagctgacggtaatttcggtggtgttcggcttcgccggcggcgtgctgctggcgctgatgcgcctgtcggccaatccggtattggtggcggtaagctggttctacacctggttcttccgtgcagtgccgatgctggtacagctgttcctgtggtacaacatcgccgcgctttatccccgcatcagcttgtggatcccgtttctgggcgaagtcgccagcgcaccgaccaatacccttatcagcaccttcagcgccgcggtgattgcgctggtgatgcatcagtcggcctatgcggcggagatcgtgcgagcaggcatccaaagcgtcggcagcggccagttggaagccgccaaagcgctgggctaccgtcgtgggcaaatcctgtggcgcgtggtattgccgcaggcgatgcgcaccatcctgccgccggcgggcaatgaggtgatcgggcagttgaaaaccaccgcggtggtgtcggtgattgccctgcaggacgtgctgtattcggcgcagatcatttaccaacgcacctacgaggtcatcccgctgctgctggtcgccaccctgtggtatctggccatgacttcgattctgtcgattggtcaatactacgtggagcgctattttggccgcggcacgcaggcaacgcgcagcggccggttcttcctcaaccgcaaagcccctcagggaggtgaacaatga

SEQ ID NO: 429423 - DNA, 918 bp, Serratia marcescens
atgatgaaaaacacattcaaacgcaccgtactgtccctgctgttggcttcctccacgctggcgccgttggccgccggtcatgccgctgaaggcgatgttcccttcaaggcggcggtgaaagctgccgccgatccggcgctgcacgacagcctgcctgacgctatcaaaaaggccggctatatcgttgccggcaccaacccgaacaccccgccgaccaccttttaccaggcggacaacaaaacgctggccgggcgtgaaatcgacgtgatgagcgcgattgccgatcgcctgggcgtggcgatccactggaaggacaccggcggtttcgacaacatcatccccggcctgaagtccggccgttatgacgtcgcgctggccaacattgacgccaacaaaaagcgcttccagcaggtggacttcgtcggctattacaacgcttccaaactggccttgatcgcccgcaaagacgctgcgcttggcccttacaccgagctggcccagctgtgcggccagaccgtcggcgccggcgcaggtacctcgcaaatcacccgcctgcagcaggccagcgatcaatgcgtcgccgccggcaagccggccatcaccatgccgatcttcccggaccgtccggccggggtgcaggcggtgatcagcggccgcgtgccgatgtttttcggaccgtatgaagggctgcgctaccaggccacccacgtcaaaccgctgacgctggccggtgatatcaacatcgacggtaccacggtggccatcgccctgccgaaaggctccgaactggtgaaaccggtgcaggcggcgctaaattcgctgatcgccgacggcagctaccagaaaatcctcgacggctgggatatcggttttggtgccgtgaaaaccgccggcatcaatgaagagatcgcaaaatga

SEQ ID NO: 429424 - DNA, 1338 bp, Serratia marcescens
atgagtacttcaccttcaacaccatcgcgccaactccgtctcggcctgttcgttcaggcgctgggacaccacatcggaggatggcgcgcacaaggcgccagcggttcaccgaccgatatcgactggttcacctggatcgcaaaaaaagccgaagaaggcaccttcgatatgttcttcgtcggtgacgcgttggccaccagcgtgcaccgcctgccctcgacgatgtcacgcctggagccgctgacgctgctggcggcgctggcggttaacacccgccatatcgggctggcggcgaccgcctccaccactttcgatcaacctttccatctggcacgcgccatgacctccatcgaccatatcagccacggccgcgccgcctggaacgtggtgacctctttctccagcgatgcggcgcgcaatttcagtcgtgaagacctgccgtcgcacgccgaacgctatgaagtggcgcgggaattcctcgaggccagctacaaactgtgggacggctgggaaaaagacgccatcgtgcgcgataagcaaaatggcgtatacgccatcgacgagaaaatccacgccgccaaccataagggcaagcatttctcggtgcagggcccgctgaatatttcccgctcgccgcaggggcggccagtgatcattgaggccggctcttccccggccggccaacagttggcggcggaaaccgccgaagtggtgttcaccgccgccgccagcctggaagaaggacaggctttctaccgcagccagaaaaaatacgtagccgacgccggccgcaacccggaccacctgctgatcctgccaggtgtgatgccgattgtcggccgtaccaaagaagaagcgcaggaaacctggtatcagctgaatcaactggtggatatcgataacggcattgagcagctgtcggcgcgctttggcttcgatttgagcgattacccgctggacggcccggtgccgaacgtgggcgccaccgaaggcggccaaagccgcgtgaaactgctgaccgatctggccgcgcgggaaaacctgacgctgcgcgagctggcggccgtcgcggccggttcgcgtggccaccgcgtggtggtaggcaccgccgcagagatcgccgacgacttccagctgtggctggaacagcaaggcgcagacggcttcaacatcatgccggcagtgttgcccaaccaactggaactgttcgtcgagctggtgatcccggagctgcgccgccgtggcctgttccgtgaagagtatcagcatgcaaccctgcgtgaaaacctgggcctgccggaaccggcaatcaacttcgctaacgtaaaatcggcttaa

SEQ ID NO: 429425 - DNA, 1305 bp, Serratia marcescens
ttgtcattatcgataaccgcccaattcgctcatctgatattgaacagccagccggatcaaaccgccctgtcagccgctcgccgcggcgtgaaagattacttcgcctgcgcattgccgattgcccgcggggcgttgagcgatgccggtctggcagcgatcggcacgacgtttccgccgaccagcagtgagaaccgtgcactgcgctatggctatgtcagccactcgttggacttcgatgattaccatcctgcgctgcgtggccatcctagcaccgtagtgctctccgccctgctggcgctgaacggtgagagtgacaatgtcactgagctgttaaccgcctatgtcatcggtgtagaggccgctggccggctgggattggccgctggcacgcaacattacgtgctgggttttcacagcaccgccaccctgggcgcggtcgccgcctgcgccgccgtggcgcgttatctgcagcttgaccagcggcaaacgcaaattgctctcggcttggcggccacccaggcggcgggcctgcgcagccagttcggttcggcggccaaaccgctgcacgcagggctggcggcacgcaacgcggtcaatgccgccctgctggctcaggccggtttcatcggccaaccggagggcgtgctggacagcctgctgacttcccacggcggcggcaggcaaaaaccggaatgcctgaccgccgactggggcacgccctggcgcatcctgcagccggggctggagttcaagcggtatccgacctgcggtggcactcacagcgcggccgaggcggcgctcgccctgcgcgcgcggctgctggaacaaggcgacgcccttgcggagatcgcactggttgaggtcagttttccgcccggcgcagataccgcaccctatattcgccagccggccaccggtgtggaagcgcgctttagcctcgaatacgtcatagccgatgcgctataccacggcgaggtcccgctgacgcattacggcgaacagccggtcgatgcggctatcgccgccctggcggcaaaagttgagcgccatgtcgatcccgcagccccgccggacgcgctcgatccggagatgcgtttccatcgcctgaccctgacgctgcaggacggaaggcaaataagtgacatggtcacaagaaagcaaaccgccgcccggccgacagacctcgacgccaagctgcacgccattctgcagctgcttccgggcctcgaaggcgaaagcgttatccgcgactgcgccctcatgtcccctggcgcgctgccgcgactgattgcattgttaaattaa

SEQ ID NO: 429426 - DNA, 1158 bp, Serratia marcescens
atgaatgaatacggatccaccgccaacgcgattgacggcgcgatagagaaagccttacgcgaaaaacgattggttggtgtggtcgttttggtggcgcagggcggtgaaatcgtttatcgacgcgcggcgggcatggcggatcgcgaagccggccggccgatggcgctcaatacgctgtttcgtctggcctcggtgtccaaaccgatcgtgtccacggcggcgctggcgttgatggcgcaaggcgccgtgcggttagacgatccgatcacgcgttggctaccgaattttcgtccgcgactggcggatggcacccaaccgttgatgacgttatggcatttgatgacccacaccgccggattaagctaccgatttttccagccggaagggggattctacgctcagtcggcggtctccgacggtatggatgacgcgtccgtcagcctgcaggaaaacatgcggcgtattgcctgcgcccctttgctggctccgcccggcgcggcgtggcgctattctatcgccaccgatgtgttgggcgcggttattgaacaggcgagcggcctgccgctggcgcaggcagtaaaaaaatgggtgaccgggccgctggcgatgacggataccgacttcctggcggtggacgccgcgcgcctggcggccgcttacgccgaccatcccggtgggccacgccgcctgcgccaaccggatcgtttaccgttcatcgatggcagcgccggttttcttctgtcgccggcgcgagccttggatccgcaggcttacgcttcaggcggcgccggtatggtcggatcggccgaggatttcctgcgcttgctggaagcgttgcgccagggaggaaagccggtactgccaaccgagtgggtgacggcgctgaccaccaaccaaatcggcgatttaacgatgccgttttggccagggcgcgggtttggcctgggcatcaccgtgctgaaagatcccgtcgccgcacaaacgccggaatccgtaggcagctggcggatggggggcacctatggccactcgtggttcgtcgatcctgcccgacagctcagcgtggtggcgtttaccaacacggcgctggaggggatgtccggcgcctttgtcggcgagatttgtcaggcggtttatgccgcgacgggagcgaggtga

SEQ ID NO: 429427 - DNA, 195 bp, Serratia marcescens
atggaaaagaaaacggcgcggctaacggtgctgattgacccggacaagaagaaagctctggaagaactgtgcctacagcaggacgtcaccccttcccaggtggtacgccagctgatccgcgattatctgcacaagcatcaggttgactatcccagccagccgactcacgccaatccacgcgtcgaaagcaattga

SEQ ID NO: 429428 - DNA, 1200 bp, Serratia marcescens
atgagcctctcacccaccggcggtgcgctttccgccaaaaccgttttcctgttggccaccggcgccggccttagcgtcgcctctatttactacagtcagccgatgttgagcgtcatgggtgccgacttccatgtcggcgttggcgataccggattcgtgccgaccctgacccaattggggtatgccttgggtattctgttactggcgccgctgggcgatcgccacgatcgccgcgggatcattctggtgaagggcgtgctgctggccatgatgctgctgttgtgcagcctggtttcctctttttcgctgctgttgctcagcagcctgacgctcggcctggccgccaccgtcgcgcaggacatcatccccgccgccgcggctctggctcctgatgcccgacgcggtaaaatcgtcggcaccgtgatgaccgggttgctggccggtattttgctgtcgcgcgtgttcagcgggctggtcgccgattatttcggctggcgcagtgtttatgcgttagccgcgctggccgttttaccgatcacgctggtgatagggcgagctttgccgcgctttcagcctcacagcacgctgagttatcccgccttgctgcgttcgatgagccggctttgggccacctaccctgaattgcggcgcgcggcgttgtctcaggcctttttgtccgtcgccttcagcgccttctggtccacgctcgcggtgatgctggccgctcgctatcagctgggcagcgcagtcgccggcgcgttcggcctggccggcgcagcgggtgcactggcggcaccgttggcgggcagtctggctgaccgatacggcccagacgccgtcactaaaatcggcgctgcgttggtaacggtttctttcgccctgatgtttttactgccgttactaccgcaatcggtgcaatgggggctgattgcgctgagcgccatcgggtttgatctcggcattcaggccacgctgatcgcgcaccagaccattatttacggcctcgatccggctgcccgcagccgccttaacgccattctgttcacgctggtattcatcggcatggccaccggcgccgcactgggcagccgcgtactggaacacctgggatggccgggcgtagtggcgctgacgacggccgcggcgggtgttgctttgctgatccgcatgacgcgccactctttgcgtgcaacagcctga

SEQ ID NO: 429429 - DNA, 942 bp, Serratia marcescens
atgaataaaattaatttacccaacggcgaccgtataatcctgctgcaaaccctggtgcgtattgtcgagagcgggagcctgtcggcggcggcgcagcagctgggcacctcgcagccgaccatcagccgacgtctgcgggcgttggaacagctgttgggcaccaggttgatccaacggacgacgcatgcgctccatcttaccgatgacggcgaacgctgctatcagcaagcgcgcggcttgctcgcgcaatggcaaagcctggaagatgcgctgcgcggcgcgcgcgacgaaccggttggcgcactgcgcgtgcgcgctccgcacgcctttgggcaggatcagctgatcgggccgctcggggagtatttgcggcgctatccccaaaccagcgtggagtggacgctgaacgaccactctcccgatttcatttccgaaggcgtagactgcgccattcacgttggcgcggtgaccgatccttcggtggtggcggtgctgttggcggaagtgccgcgcagcacggtggcgtcacccgcactgttgactgaacgaccggcgatcgtcgatctcgacgatttggcatcattgccgtggctggcggtaaacagtttttatcgcaatgaggtcgtcctgacccacgcgaccagcggcgagcagcggcgtttcggcatcgcacccaggttgagcaccgacagcctttatgcggcgcgtaaagcggcgctggaagggctgggcgtagcgatcgtgtcgtcttgggtggtgaaagaagagttggcgcaaggatctctgcagacgctgttgcccctgtggcgagccgagccactgcctatctacctgctgtatccttacgccagctattatcccgcgcgtttacgcaaattcatggaaatgatgaaagaaacgatgccgcgcattatcggcgcgcagccgccgacggggcgctga

SEQ ID NO: 429430 - DNA, 1485 bp, Serratia marcescens
atgaatgatgcaacgattcgctaccatcaggtgcggcaaaagagcacccacaactcgtatcaacgcacggaaagctacccggctcaggcgctgtactggcgcatccgttcccttgagatcgatatccacaacagtaataacgccgccggttggccgcagttaaacggcaactggtacgtttatcatctggcggtcatcgatcaggtcagctcagtcaacaccttggcggatgcactggacgcgctgttggcgtttcatcgcgcggtgccgcagcacgaagtcgtcaccctgtggctggatttgaaagacgacttcaacgccgcccgagatcaaacacccgaatcgctcgatcgtttgttggccgagcgcctggggcgcgaacacatttggggaccacccgatctgatcggcgactgcaccgatctgcaagcagcgatcgccgcctatgggtggccgtcgctcgacaccctgcgcggcaagttcattgttggctgcaccaccggcgatctcgcctcgccgaattcggtgctcaatcagtatgtgcaaaacggcgccaccgccaatcaacggctggcgttcgtcacgccggaaatcacccaggcgcaacaaatcgaccaacacgcctgcgccgtgatgttcaacctctcggccgcccacaccgccctggcgaacgcggtgtttaccgccggctttgtcggccgcgcctacggcctgaacgacgcaaacagttgggctaccggctggaacagtcgcgcgcaccatctggccaccaacaaggttaacgccgattgggacgggtgggcgcgcaccgatctgccgatgaccggctatccgtttaccggcatcgacgtcacgctaccgccggatctgaccgaatccggtgcactctgcgccatcaaggtcgactccggcgatatctggaataaacgcgacagcggctattttcgtttcgatcgtgccactatcggtgccgaacgcacgctcagcgccttcgtcaccaacccgcagtcacataccgacggctttatcaaaggcggagtgatggcgcgggccacgaccgccgatgacgccgcctatatcgcaatatttcaaaccgctgctcacgaaatccgcatgcagtaccggcgggataacggcgccggtacggaaaaaatcgatgcccgtctgccaaatggcgtcaacggcaagcccgtcgtcagcagcaatacgccgatatggctgaagctgacggttcggggcgatggccaccaggcacaaggcagttattcaatcgacggcctgatctggcacgccgtaggggagatcggcgtcagccaaacgctgccgctgcaaggctgggcggcctcttcacacggcgccggctccgtaaaatggctgttcggcggcgcaaaggcgccgacagagagcaccgtcttcggcaactcggccaccggcgaattcatcgccgacagcgcccctgccgcgagcctcggcccctaccgttag

SEQ ID NO: 429431 - DNA, 8181 bp, Serratia marcescens
atgagtgacaaaaccaacggtcagatcccgccagtacggccaagccaattcgaaagcaatgaaaaaaacatattcgaagacagcgtcaatctgtttcgcggcgatgtgaatttatcgcttgatttggttgcgttaaccggaaggaatcaactcgacgtcaaagtcactgcattttatggcagcaacatcaaaaatgaaatttatcaatcaaatgttagcgcaccaaccggaattatgggattaggctggcaattgcctttcgaacgcattgaagtcgatcaccgggataatgcaacacccggtgacaacctttatcgaatttataccaacaacgcctcatcagaattaattcgcgcgcccaacgattggctgagagcgaaattaccaatcgccgccaccaccgcgctcaatagcggcaaagtggacaccgaaatccaatccgctttcatcgccgccggcctgcagttgggttgccatgctcaggtcgtcacgcggttcgacgatcgacaatgggaaattatcgacccagtctatcagcgcaccttcaacgtgctgcgccaggacgccgaactcgccgtcttctccggcggtgaagcgtttgagtgcttccactatgatttcagcaaggtcctgtattatccgcagttcgaacgctgggagctggtcaaggacaacggggtcagctacttctacggcggcaacgcgcaggatgatcagagcattcaatggaaagtgcgctggggcaactggtcgggacaatccgctttgacccactctccccagggcgatgccttgcagtctcgctttgcggcaatctggaatctggcgcaggtggaaagcctgtggggcgatcggatcgccttccgttacgaggccgttgaacagccggttggcgaacgaggcttaagttttaccaaagcctgctacctgacgcgcatcaccgacatgttcgatcgcaccgtcgattttggctatcaggagaagcggtacgacacgcagtcgcccgcaggcccacgggaatacctgtctccgcattgggataccccctacagcaaggcccccgccaacgccgcttcagcctatcaggatcgctacgaaacgcgctatctggacaacatcgtcgtcaaaaactcgcagggcacattgctctatgcggtgcagctgagctatgacacgcagagtaatttcagcggttacccgcaaagcgatccgctttacggtgataccgtcaaacgcacgctcaccggcgtccagcggcgctatgcggaaaattgtgcgctgccgcagatgcagttcagctactggccggcgggtacggtcaatgccggcgcgctcagtggcgccgtcacgccggacagtgcgaaaatcgcctaccggtataagcaacaaacgctgccgctgtgcgatcgccagcggcagatcgtcagtccctggccgcgcagcgccaaaccgcgcgtatggttcggcggcgattacgcggtctgcctgtggcttaacgagtcgagcgaccaaatccacgtcacgttttacacctggcttgggcgctggcaatgctgggctcccgagcagcaaacgatcaaggccgctttcgacatcaacagtgtcaacgtcgtcactgccggtgatttcgcctgcctgacctatgccaccccgcagagcggcaaatcctatgcgcatgtctatcacaaggataaccgcaaatggggcgagtggttcgacagcgcgccaatcgccgccaacaccacccaactgcagctggccgccggcgacaacttttttgtggtctgcgacaaggatcaacggacgctgctgcgctacacctgggataacttcaccaaacggtgggcgatcgccgataggtctggcgatctcaacgccaccgcccgcccctacatcgcggcggccaacggctattacgccgtcctggattatgcccccctcaccggcggcgaacaccgtaatcggctggcgctttattatcaggatagccaagaacaatggcgaaacggcgcctcactcccgctggtgttcaccctcggcggcgatgcgtcggccacccgtttcggttttgccgccggcgcctcgtttatcgcgctgacctacatcacgcaggaggtttcgctcagcgttgattacaccgtcaaggtcatcggatgggacgcggcattcggcgccatgaccagcactgactttccctgccgcctgccgaaaagcgcgccgtcgcaaaccctcaccattccgttcctggcaaaattcgtcaacaacgccatgattgcgtccggcccctatctgctgcgctataacggcgcagactggctgcgtaacgacagcctgctgttacgcagtacctgcagcgatcaggacatcaactggttcgcctacggcgccgattacgcaatcgccgtcagcaaccgcgaattcgcggctcaggcgcgcatggtagcctacgatcccaaccggcaaatcatcgcctggaacgatgcggcgcgcgatctctatacccgtgacgatccgacttcggaaagaaaaagacactacttcccgacggcaggcgcggatatcgccaccatgggcaaccgcgtctatcaccgcggttcctggtgtaattggttggacgcggcagccggatatgccgaagtgccctacgcgatagacagcaccaccatgatcaatcagggaccgcgctttatctcttatctgaacctggacggcacggcagccaaaaacaccaccgtgaaaaccttccgcaatcaggccttcgccggcgatgacacgctcacgcaacgttatttcacgcagattggcgtctccggcatggtcaaacccaatatcaacggccaatatcccgccggcctgtccgcgttcgttacctatctaccgctgaacaaagacttcgataatgcggaaagcctgacgctgaatcgctacctcgacaacacgctgcaaggcgcactggtggattactgcgtcgacacggtcagcatcgatgacggctacgccgtcagcaccacctgctacgtgttcgacattgcgacagcgacctgcgaccctaccggcgcggtcttcaagtactacaagagtgccagctatcccggcagcgagagcatgtccgcgccgcgcttcggctatcgcgagaactattacttcaatggcctgacgcgccaggatccgcaggtcggccagcgagttcgcgctgcagatcaagcgtcatccgggctgttggacggccaattgatcgagcaaaaggtgtttgacgccgacggcaatctgttggttcacgaacaaaaaaacctgatggccttcacctccgtagcgatcgacggcgtcgagcgaccgctgttcggcggttatacacgctgcatcgccgacaacagccttaatgatggcctagcgatacgtaccgattatcgctatgactcacgcttcggcaaattgatccgcgagcgctttgacaatgtgaccgccaccggagaaacgcagggcgttgccaaactctacggctatgcgttcgaagcctatccctggttcttactgaaaaatgcgatcgacgcgcccttcagccaattcgacgcagcggggagcgcggcgctgggagaggcgctgccaatctacgccggcagtctgcaacgctacggcgctctgcaacggcaacagccgcttgccgatgaagctgcgccgacagtgtgggccgccacgcaagcctatgtgctgcaagccgcgattggcgcccagccccccagcccgccggcgctggcaagcgatccgggtgacgcgtggttgccggtaggcacaatactggccagaacattctatggtgcgatcctctcccagaaaaacagcgaaagccaggtcgaaagcacgctgtgggacaacaaccagatcctgccggtggcggcgttcgtcagcggcgcggcggatgagtgcgatttcatcggtttcgaaccctatcaacacagcaccgatccctggcggctcgacggcgatacggcgatcgtcgacgacgacgcctatgtcggcagccgcagcctcaaactcggcgtcggtgcgaccctgacccgaacggcgccgctgcggcaaacgcagccggtcgttgtctccgcctggatcaaaacctcgcccggtttcaacgcggcacccggtgcggcaaacttgatcagccgtagtggcaacgccgcgccgcacaccacgccgatcgtccccacggcagaaggcgcttgggtttactggcaaagcgtcatcccctatagcggcgatccggagcgtccgctcgcgctcgccttcgacaaccaaaaaacggtcggctatgtgctgttcaacaccgtcagcgtcacgccgttggccagcaagatggaggcccgctgctacgatccgctgtatctggatgagatcgccgttatgggcaacaacgccgatgtccagcgctgcggctacgatccgctgcggcaaaagttcgttgagaccgggccacaaggcgaaagcaagaaaggcgtggtgaactatgcgccacgcagttggcacgatacgctgccattcagctacccgcagcacgatcccgccagcagctgcgaaattctggccgccgacggtgggcaatacgaaaccttcacgcagggcgaacaaacctggacgcgctggcggcgcgacgacgacagcgcctggcgtctcagccagggccggctactgcattgcggtacgacgctcaaccgcctgcgttggttggccaccgccggccgctacgcggtgggcttcaccctttcgtcgccggcgacgcagaacctcgccttcggcctgacgatcggcgacagtctgagcgcccagtgggacgccatcgcgggatggcggctgacgctggcgggcaacacctacactgacgacgcgaccaacggctgcctgcccacctcggtgctgctggtaccgggcgacgatgccgttctgttatatgccgacggtcgtcaggttttcgcccttcagaccgatgcaaggatcgacggtgaattcagcctgcaggcacagggggaaatctattttgccaatgcggttaccttccgatcgccgcagctggccatcacgtataaaaacgccaaccggcaggaaacgcagcaccaggtgctgaatgaaggacgatgcctggtgcgtgaaacgctgtacgacgcgctgggcaatacggttgccgaaaccaagatcgccgcctttgaacgcacgttgttcggctaccgggcggcctttgtccgcacactggacgccgcaaacggcgtgatgaccggtgaagtgagtgattattacccgcaggacgaaggttacccctatagcggcacccgttatgaggcttcctcgctgaaacgcccggtggccaaaggcatgccaggcaaaatcttcgccattaccggcgacaacccgcatattacacggttcatttacgccgtcaccgatcacacgcaggtggcaggtatcgcctgtcgccctggagaattgcgggtgagcgccctgtacgatgccgatggcaccggcgtgctgtcactcaacgatcgccgtggccagacgctgagcaagcagaccgaggccggcggcgttgttcgcgacgctgtccaacagatctacgacgcggcgggcaatatcgtgcaggttcgccacccgtcgtcttccccggcggatgacgccttcatcagccacaatcgctacaacttcctgtgtcagctcgctgcacgcgtcacgccggatgccggagaaacgacgtatatctacgatcccgccggacgtctgcgtttcagctcaacgccgctgagccgcgcgaaagaccgcgtgttgtataaaaaatatgacgttctggggcgcctgagcgaggatggcgaagtggcgcaagcctggggtgacggttcggcgctgcaggcgatcgccgataacgatccgcactacccgcaccatgatgactggcaaacgcaaaacgtctatgacggcgaaggcgacgagccgactctgcgcggccgcctgtggaaaatgtaccgtcgcgccgctgacggactctgcgtcgaaaactgctatggctacgatacgggaggcaatgcgaccctgtcgcaactgcgtctgccggacgctggcgattacatcacgggctatgcctacgacaacctcggcaacgtcatccgcatcgattatcccgccggcgcgccgctcgccagcgtggcctatcgctataacgacatgggacaaaccgccgccatcggcacgccggacgatccggagaagttcgttcgctaccgttaccatgccgacggcagcctggctgaagagcagttgaattcacagggggggcgggcgctgcgacgcaccatgagttataactctcccggctggttgaatgaaatcaacaaccactatgccgacggcgcaccgctgttgaaacatcgcttcagctacaccgacggcggctacgagggcgccggttacttcaacggcaatatcgccggcgtagtgcacgacaatgcggtcaggcccgaaaacagcttcgcttatcgctatcgctacgatccgcgcggccaattgacggtcgccgagcacagcgtcaattccgcttacagcctcggcgtcggcgcgccgctgaccttcgacgccggcggcaacatcctccggctgcaacagggagacaccctcttcagctacgagtatcagccgaacagcggcaaagtcgccgccgtgctcgccaatgacgcggtcgcgcagcgttacgagtatgacgtcgtcggtaacgtcacgctctccgccagtcgcggtattcagcgtatcgattacaacccactgaataatcttccgttaacgatcgcactggatgacggccgccagcttgcgctgtgctacaacggcatcaatcagcgggtgcaaaagcggttcgccgacggcagcaaactcgcttacgtacacggcctgagcgacgcgccgctgatggagttcggcgctcgtacgacgcaatatctctatggcgtcggcggattgctgctgctcatcgacggtggtgaggcccagtacgtgctgaaggatcagcaaggttcgatccgtgccgtagtggcggaaaacggtcaggtcaacgcattgctcgactacatgcccttcggccaatcgttgccgactggcgtcggcacgtcctcgttactgcgctatcgctacaccggccaggagttggacgaagatttgggactctataactatcgggcgcgcttctacgatccgcaattggggcgcttttactcctgcgatcctagattccagtatggcggcccttacgtctactgcggcaacaacccggttaatcagaccgacccttccggtgagatcgccccaatcattatcatcttgctgatcggggccgccgtcggcgccgtgctgggcggcggggtcgccctgtacagcggctatcagtccggattgcgcggcggcgcgctagccggttatgtattcgccggcgcagggataggagccctcgccggggctctgtccgccgccggcggagtcggcgcctttgccgcagggtcggcagcggcggcggcagcttccaccaccgccggcggcattgcggcgggcctggcggccggcgcaggggtcggagccaccgtaggcgcggcagtaggtgcggctcagggagtgagccaattcttcatcaacgacgcctttggcgtcgccaacagcggcagttggcaacagtcgctgctgaaaggcgccgttaccggtgccgtcggcggcgcgatcagtggcggcgccgcaggggttggcggtgcggccgccttccagcaggctgcgcgtttcgccgagctgaccggcggcaacggctgggccttcagcccgacctcgctcacccaggtcagcaacgcctacaacgctttcggtagcctgggcatcgtgccgttgccagccttcgtcagccgcatccccaactacaacctgccactggtcgggggaatgcaaagtttcgtcctggggaaattcagcctgccaactttcagcagtctcggcggtgcggtggccaagcaggccgtctcgccgctgctgccgagcggcggtggcacggcgacaggaaccccgccgacggccttctatggacaacaggcctacagcccggcgatgaccggcagcatcgggctgcaaacggcgctggtattggatcccgccggctggagcaacggcaaagcataa

SEQ ID NO: 429432 - DNA, 282 bp, Serratia marcescens
atgtcgacgacacaatttaaagttattagcgtcagttccggctccactcaaagtttggattttggttcacgggtgattaatgcttccgtcgccgttcaggggtttaacgtttcttacggcaacaccgaccaccacctgaaaacaatcgacgtctccagcgcgatcgccggcctcagcggcagcagtgtcacggtgtccgccacctgctttatggaggacaaatccaacaataaaacctcaggtacggtaagagtgctggtgatcgccgaatgcgaatcctga

SEQ ID NO: 429433 - DNA, 3138 bp, Serratia marcescens
atgatacttaataaaagattgaagttagcgtattgcgtttttctgggttgttatggcttatccattcattcttctcttgccgcttatcaggatcccggtcggttgggcgtacctgacagttggaaaaccgcggagtttaatcgccaatgggggcttaaggctatttccgccgaattcgcctatgccagaggctataccggaaaaggtataaccatcggcattatcgataacgccattctttcccattctgaattcgccggtaaactgacgcgcctggataacggcagttataacttctcgtatgataaacaagataatatgtctttcggcgatcacggcacgcacgtagccggtatcgcggcggctaaaagagatggcgcaggtatgcacggcgttgctttcgacgcggatattatcggcaccaaattgaatgattacggtaatcgcaacggccgtgaagagctgattcagagcgcagcccgcgtcatcaataacagctgggggatcgcgccagatatacggcgagacgccaaaggcgatatcatctggttgccgaacggtaggccggactacgtggcatttgtaaaaaacgaagtgatcgccgagatgatgcgcagcaaatccagcgtggaatggggcagcgaacaaccggtgcccaccggcgggcacagcgccatgtcgacgctgctgcgggcggccaggcacggcaagctgatcgtcttctcggcaggaaattacaacaactacaatatcccggaagcgcaaaagtcactgccttacgctttcccggacgtactgaataattacctgattgtgaccaacctgagtgacgaaaatcagttaagcgtttcctcgaccagctgcggacaaacggccagctactgcgtttccgcgccgggttctgatatttacagcaccgttggccggctggaatccaataccggtggcgccgtgaatcgcgaagcttataataagggcgagttgtcggttaatcccggctacggcaataaatccggcacctcaatggcggcgccgcacgttaccggcgttgccgccgtattgatgcaacgtttcccttatatgagcgccgatcaaatatccgcggtaattaaaaccaccgccaccgatttgggtgttgccggtattgataatctgttcggctggggacgtgtcaatttacgcgatgcgatcaacggtccgaaaatgtttattacccaagaggatatcccgcaggaatattatgtaccgggctcctacagtgaaaaacagttcgtggtgaatatccccggcctgggaaatatcgtcgaacccggtacctctgttgagcggcgctgcacgtcgagcgaatgcgacttcgattcgtggagtaacgacatcagcgggcacggcggcttgaccaaaacgggcgccggtacgctggcgttgttgggtaataacacctatcgcggtgatacctgggtgaaacagggcgtgttggcgatcaacggttcggtggcctccaacgtctatatcgaaaatagcggcacgttgtccggtgagggtaccgtaggcgccttcagagcggttcggggcggcagcgtcgcgccgggtaacggcatcggcacgctgcatgtgttgcacgacgccatttttgatcgcggttcgcagtataacgtggaagtggcggacaatggccgcagcgataagatcgccgcgcggcgcgctttcctcaacggcggcagtgtgaatgtcagcctggagcgcagccaaaacctgctgtcgcagaatgaggcgcagagtctgctgggcaacaagtacaccatcctgaccacgacggacggcgttaacggccggttcgaaaacgccaacccagcgtatccgtttgttaaagtcgcgctggattatcagggcaatgacgtcggtcttggcatcacgcgcaccgacgcccgctttgacagcctggccagcactgagaacgagaaagcggtagctcgtgcggtggagacgctcaacgcgacggaaccagtcacggaaacggtgaagcgcagcgtggctgcccctaccgctgaggcgctaagcgcactgcaaggtgatgaaggcaaagcgcaagccgctaccgaagatgcgggcgtcgtaaccggccatccggtgtatgaaagcttcctcggcttcacgtcggccagagagctgcaacaggcgacccgtcaactgtccggccagatccacgcggatatggcttccgcccagattaacgaaagccgttacctgcgcgatgccgccaccgagcgcttgcgccaggtggaaggccgccgtatcgcttccgatatcaaggcggatgataatggggcctgggcgaaactgctgggcaactgggggcatgcttccggcaacgacaacgccaccggctaccagacctctacctatggcgtactgttaggtctggacagcgaactgtttgacgacggccggcttggggtgatgaccgggtatacccgcacttcgctggatggcggttatcagtcagatgcccacagcgacaactaccatctggggctgtacggcgacaaacgcttcggcgcgttggccctgcgagcaggcggcacctatacctggcatcgcatcgacacctcgcgctcggtgaactacggcgcgcagtcggatcgcgagaaggccaagtataacgcgcgtaccggtcagctgttcatcgaaagcggctacgattggtcgagcgatgcggtcaaccttgagccgttcgccaacctggcgtatacccattaccgtaacgaggagatcaacgagcaaggcggggcagcggcactgcgcggcgacaaacaaagtcagtccgccaccgcctcgacgctgggtctccgcgccgacaccgagtggcaaaccgacagtgtggcgatcgcgctacgcggcgagctgggttggcagcatcaatacggcaagctggagcgcaaaacgcagctgatgttcaaacgcactgatgcggcgttcgacgtaaacagcgtgccggtttcccgcgatggcgcgattctgaaagcgggcgtcgatgtgtcgattaacaaaaacgccgtcctgtcccttggctacggcgggcagctgtcgtccaaccaccaggataacagcgtcaacgccggtctgacctggcgcttctga

SEQ ID NO: 429434 - DNA, 828 bp, Serratia marcescens
atgaacggacaggaaggcgtcatgaaaccgtcagaattgaccggggaaatcccaatatcgatttggttcagaaataaatcctggccggcaggaacgcaattccctttacaggcgttgccatggggcaaactgatgtattccatgaaagggttggctgaaataaatattgaggacaatatttatttatccacaccggaatatgccatttggctccccgttaataccgaacatgaatccgtagcaaagagtgcaattgactatgtcattcttcatgtcagccccccgctatgccaatccttaccgagcagaccgcagaccctgcggctgaataagatcgtcaaagcggtgctggccgatttttcagaaaggcgcattggctatccgcacacgcctcaggaccagacgttggttaccgcattgcttgagcagctggcactgtcggagcgttttgacagctacctgccgctcggcagcgatgacgttgtcaagatcatgaccgaaaagatgagtgccgcgccgcacgatttcaacacgctggcgcaatggtcgggcatgctgggcttgagcgagcgtacgctctcgcggcgatttctcgccgccaccggtatctctttcaatgaatggaagctgagaagcaaaaccctcatggcgatgacgctgttacaggaagggaaagccgtcaaatatgtcgcctctaccctgggatataacgatccgtccgcgtttatcgccatgttcagacggcaaacgggccagtccccctccggttttttagcggtaagtcatggcacagcgaaaacaggctcaggcataatgcatggcgactga

SEQ ID NO: 429435 - DNA, 840 bp, Serratia marcescens
atggggaaagcttactctgggcaggtcattcccctggataaaggtaacaatatgtacggtaaaatcattgatctttcggtgccgctgatgagcgggatcgcttccgatccggagcggtttctgccggaaatcgagtatgttgacaacaagcgcggagcgttgcagctggcggaatcatttcccggcctggatcccttagcgctgccgcgtcaggagggctgggcggtggaatttgtccgcatgagcacccacgcggggacgcatatggacgccccgtatcactaccattcgcatatggacgacggctctgcatcaaaaaccattgatgaaataccgctggaatggtgtatcggccctggcgtcaaattggattttcggcattttcccgacggctatgtagccactgcacatgatattgagcgtgaattagcgaggatcggccatcctatcgccgccggcgatattgtcctggtcaacacggcggccggcgggcgttacggcagcgaagattttattcatcgcggttgcggcatgggccgtgaagcgacgctgtatcttactgaacgtggtgtcagggtggtgggcaccgatgcctggagctgggacgcgccattcagccatacgcgcaccaaatttgaacaaagcggcgatatttcgcttatttgggaagggcactatgccggcagtcaatatccttattgccagattgaaaaactgtgcaatcttgaattgctgccgccctgcggatttaacgtgatcagtctgccggtgaaggtttataaggcatccgccggctgggctcggccggttgcaattatcgatgaacgcgcaggggaataa

SEQ ID NO: 429436 - DNA, 528 bp, Serratia marcescens
atggccagaataaaactgccggtagtgagtgaattaacggctgagcagcagcagcaatatgcccgttttcccgccaatcttacgctgggtctgttgaaaaccagccgttcggcgcagggatatctgtccctgggcgcttcttttccggccgggcgactgtgtgataaagatcgggaaatgatcatattaagggttggcgcgttaagccacagcgcttatgagcgtatgcaacactatccgctggcgatccttgcggggtggcgcgatgacgacatcgagaaaatagagcagggtgtgggcatcgacgccagagggacggccatcttgcattttgtcgatgaatgcgtgaagcaggtgaaggtctctgccgacacatttaacgcggtcaggcgctattatgacgaggttcaactggctgaactggcattaatgattgggcactacatgatgacggcgcgctttttggaaacgctggaaatcgatctggacctacaagcgacatcctgggaaaacatgtcaacggattga

SEQ ID NO: 429437 - DNA, 1221 bp, Serratia marcescens
atgtttaccccactgattctgcccaacggcagccgcttacccaaccgtctggccaaggccgcgttggaagaaaatctggccgatgagggccaactgcccggccccgcgctatggcgcctgtatcgccactggggtatcggcggcgccggcctcatcatcaccggcaacgtgatgatcgacggacgcgccatgaccggccccggcggcgtagtgttggaacaggatacgccgctcgaggcgttcaaaacctgggcggcggcctcgcgccaagaaggcgcgcaggtatggatgcagctcagccacccgggccgtcaggtgatggccaacatgggcggcaacgcctgggcaccctccgccatcccaatggcgatgggcaagtacagcaagcagtttgccccgccgcaggccatgagcgaagcgcagattgccgaggtgatcgcccgcttcgccgccagcgcgcacgccgccgaacaggccgggtttaccggcgtgcagatccatgcggcgcacggctacctcatctcccagttcttgtcgccgttgtccaaccagcgcagcgatcgttgggggggcgaactggcgaatcgcgcccgcctgctgctggaggtggtgcgcgcggtgcgccagcgtgtctcgccaggcttttgcgtggcggtcaaactgaactccgccgattttcagcgtggcggcttttcgccggacgaggcccgacaggtattgttgatgctcaacgaactgccggtcgatctggtggagttgtcaggcgggagttatgagagcccggcgatgcagggcgaagcggcggacgacagcacgctggcgcgcgaagcctattttctgaccttcgcccgcgatctcgccgcagtggcccgcatgccggtgatgactactggcggcatcgcccgcccgtcggtggcacaacgggtgctgaacagcggcatcgcggtggtcggcatcgccaccgccatggcggaaattcccgatctgccgcaccgctggcaaaccggcgaagcccctcatgcgctgcccgcgtcggtaaaatggcgcgataaaacgctgacgctgctcgcccgtatggcgctgatcaagcgccgcatgcacgccctgagccgcgatcggacgcgcaacgtgcgttactcccctctgtggtcgctgctcatcgaccggtggcgcacccgccgcactctgcggcgctatcacgcctggttacggcaacgttaa

SEQ ID NO: 429438 - DNA, 408 bp, Serratia marcescens
atgaaaatcggagagttggcggagcgcgccggcatggccgcctcggcgatacgttactacgaacagcagggtctgctgcccaaagcggtgcgcggcgttaacggatatcgggtgtatagcgaaagcgcgctggagcggctgcacctgatccaaatcggccagaatctggggttttcgctgcaggcgatccgcggggtattggcgctgcagggcagcgcctatcaggatgggttgatacagggcgtcgacagccggctggcggaaatcgaacggatgatggcgacgctgaacgagcagcgtgagacgttgatggcgacgcggcgtattctgttggaatccggcgtggcgggattatgccgcgcaaaaaatgaaaaacaggccggtgcgtggccggcctgcaaagattaa

SEQ ID NO: 429439 - DNA, 849 bp, Serratia marcescens
atggcgtctaatcatcaacacaaagactggctggaactgcggcgcgatgacgaaaccggcatcgaaagcgtcaatgcccactttcaggggcatgcctacgatccccacgatcatgacgaaatgctggtgggcgtgacgcagcaaggtttacaacgtttcaactgtcatcgttccttgcataccagccggccgggacgtgccatgctgatcgagccgggcgcggtgcacgatggtcatgcgccgcaggccgaagggtttacctatgccatgctttatctgccgcagcattgggtttccgatgcgatgaaccgccgcggattaggggacgtttctgtgctggaaggcgccttccacagcacgttgaccgacgatccgatgctggcgaccgcgatacaacaggctttttttgcgttgcatcagggggaaggccggctggcgcgcgatcaaagcctggatcaactgctgacgcttttggcgcggcatatacgcgtcaggccaacgtcccaaagcgatgatgctttgattgtgatgaatcgcttacgagactacctgcacgagcacatggcgggtaaccccagcctggatgaacttgcgcttcagtgcggcctggaccgcttccgcctgactcgccagttcacccgggccttcggccagtcgccgcatgcttacctggtccggctgaggctgcgggctgcacgctttttgttggcgcagggggaagaaccggcgcaggtcgcgatgcaggtgggctttgccgatcagagccacttgggccgctggttccagcgcgcctaccgtttatcgccggcggcctatcaacgtcagtgcacaaacgttctataccgctga

SEQ ID NO: 429440 - DNA, 615 bp, Serratia marcescens
atgactaaacagatgaatgaaaccccttccaggggaccttccgaccacagtgtccgcgatcaggtcgttgacgcggccactgagcatttcggtcactatggctacgaaaaaacaacggtttccgacctcgccaaagcaattggtttttcaaaagcttatatctataaatttttcgattccaagcaggcgattggagaagtgatctgcgctaatcggctggcgatcataagggatattgtccacgcagcgattgcggatgcgccgacagctgcagagaaaataaggcggttattcaaggcattgtcagaatctggctgcgatttattttttcatgaccgtaagttgcacgatattgcggctgttgctgtgcgtgataaatggccctcagcacaagctcatgagcagcacctgcggcagctaatcgagcagatcattgttgaagggcgccaggcaggtgagttcgaaagaaaaacgccactggatgaggcggcggatgcgatttttatggtcatgcgtccctatatcagcccggttcagctgcaatataatttggaaaccgtccaagcagcggcggtgttgctgccatcactgatcttgagaagtttgtcaccctga

SEQ ID NO: 429441 - DNA, 1110 bp, Serratia marcescens
atgctcggacttaaacctgtcacctttgctgtctgtctgttgccgtttgcccttgtggcctgcggtgaggcttccgataaccgcgatccacgcagtctgccacctctggtcaggtctgccgcagcgatcaatgcaaccgacttttcccgtgcttttacgggggtggtggttgcacgaattcagagcgaccttggtttcagggttcaaggcaaaatcctggaacgtctcgtcgataccggccaggccgtgaaacgtggccagccgttaatgcgtctggatccggttgatctgagcctacaggctcaggctcaacagcaggcagtcgccgcagcaaaagcgcgagcccgacagacagcggatgatgaatcgcgttatcgcggtctggtcactacaggtgctgtgtcggcatccgcttacgatcaggttaaggctgccgcagagacggccagggctgacctcagtgccgcccaggcgcaggcgaatgtggcgcaaaacgccatgggctatgcagtcctggtcgctgacgccgacggagtggtgatggacacgctggccgagccaggtcaggtggtcagtgccggacagccagttatcaggctggcgagggctggacaacgcgaagcggtcgtccaactgcctgagacgctgcgcccggtaattggaagcgtggcacaggcctctctgtacggcagcgatacaccctctgtttccgcgaagctacggttactctctgatgcagccgatccgctgacgcgcacgtttgaagcaaggtacgtgctcgacggtccattgtctggtgcccctctgggggccactgtcaccatccatattgcgcagagcagagcatcgcagccgttgctgcaggtgcctttagcggctgtttttgacgcgggtaaaggtccgggggtctggagcatttcaggaaatcccgccagagtgacctggcggtccgtacaggtcgtgagcctcggggatgatgcagcaagcgtaaccggcagccttaagcctggcgaacaggtcgtagcgctgggcgctcatctactgcatgatggtgagacagtccggctggcgaagcagagcgatatccgtgtcgccgggagtcgtccatga

SEQ ID NO: 429442 - DNA, 3099 bp, Serratia marcescens
atgagtcgcggacgtttcaatctttccgcgctcgccgtacgcgagcgttccgttacgctgtttcttatcctgttgatcaccgttgccggtattctctcgttccttgggctggggcgcgcagaagacccgccttttacggtcaagcagatgaccatcatttccgcctggcctggagcaacggctaaggaaatgcaggatcaggtggccgaaccgctggagaagcgtctccaggagctcaagtggtatgaccgcacagagacctacacgcgtcccggtctggcttttaccatgctctcattgttggacagcactcccccctcagaggtccaggaagcgttctatcaggcacgcaaaaaactcagcgacgaggctaaaaacttgccggcaggggtgtctgggccgatggttaacgatgagttttcggatgtcacgtttgcgctctttgcgctgaaggcaaaaggcgagtcacagcggctactggtgcgcgatgccgagtcattacgccagcgcttattacatgttcccggggtaaaaaaagtcaatattatcggtgagcaggccgagcggatatttgtctcattttcccatgaccgtctggcaaccctgggggtctctgcccaggatatctttgcagccctgaacaaccagaacgtgctgacacctgcgggctcgatagatacccgtgggccgcaggtttttatccgtctggatggggcttttgacacactggaaaaaattcgtgaaacgccggttgtggtgcaagggaggacgctgaagctttccgatgtggcgacggtcgagcgtggctacgaagatccggcgacctttatggtgcgtaatcagggcgaacctgcacttctgctgggtatcgtgatgcgtgagggctggaatggtctggagctgggtaaagcgctggataaggaagccgccagcatcaatgcggacatgccactcggcatgacattcgtgaaagtcaccgatcagtcagttaacatcagttccgccgtagatgagttcatgatcaaatttttcgtcgcgttgctggtcgtgatggtggtctgctttctcagtatgggttggcgtgtgggtgtggtggtcgctgctgctgtgcccctgacgctggctgtcgtctttgtggtcatggaggcgtcaggtaaaaacttcgaccgtattaccctgggctcgctcatcctggccctggggttgttggtggatgacgccatcattgccattgaaatgatggtggtgaaaatggaggaggggtacgaccgaatcaaagcctcagcctatgcatggagccacactgctgcgccgatgctggcaggcaccctggtgacggccgttggctttatgcccaacggttttgcacaatccacggcgggtgaatataccagcaatatgttctggattgtgggaattgcattgattgcctcctgggtggtggcagtggtgttcaccccttaccttggggtgaaaatgctgccggatatcaaaacggttcaaggggggcactcagctatctacaacacccgccgctacaaccgttttcgtcagttgctggcgcaggtcatcgcgcgaaaatggctggtcgcggcttctgtcgttgcggtattcaccgttgctgttctcggcatggcgctggtgaaaaaacagtttttcccgacgtctgaccggccagaggtccttgtggacgtccaaatgccgtatggctcgtccattgaacaaaccagcgccgccgtgacgaaaattgaggactggctgaagcaccagaaagaagcaaaaatcgtgacggcttatatcgggcaaggggctcctcgtttttatctcgccatggcacccgagctacctgatccctcttttgcgaaaattgttatcctgacggacagtgagggagcccgtgaggcgctcaagttccgtcttcgccaggctgcggctgatggactggctcctgaggcgcgagttcgcgtgacccaactggtgtttggcccttactcaccctatccggttgccttccgtgtgacagggcctgatccgacggtattacgagacatcgcggacaaggtgaaaatgctgatgcaggccagcccactgatgagaacggtcaacacggattggggctcacgcgtgccaacactgcatttcaccctgaatcaggaccgcctgcaggccgtggggctgacgtcaaatgccgtggcccagcagcttcaattcttgctttcgggtgttcctatcaccgcggtgcgcgaagatatccgttcggtgcaggtcgtgggacgcgctgccggcgatatcagacttgatccggcgaaaatagagggtttcaccctggtcggttctgcagggcagcgtattccgttatcgcaggttggcgaggtcgaagtgcgcatggaagacccggtcctgcgacgtcgtgaccgtatgctaaccattaccgtgcgaggcgatattgccgaatcccttcaggcacctgatgtttccactgcgatttttaaacaactgcagcccatcatcacaacgcttccgaatggataccaggttgaacaggcgggctctattgaggagtcagggaaagctacccaagcgatggtgccgttattccctatcatgatagccatgacattgctgatcattatccttcaggtgcgttcgatgtcggcgatggtgatggtctttatgactgcacctctggggctgatcggtgtggtgccaaccttgctgctcttcaaccagccctttggtatcaacgcgctggttggtttgattgctctgtcagggatcttgatgcgtaacacgctgatcctcattgggcagatccatcacaacgagcaggaagggcttgaaccctatcatgcggtcattgaggcaacggtacagcgctccaggcctgtactgctgacggcgatggcggccattctggcctttatcccgttaacccactcggtattctggggaaccctggcctataccctgataggcgggacactgggtggaaccattattacgctggtgttcctgcctgctatgtatgctatctggttccggataaagagcccaacgacaaccttgccaaccgaaagccattccacgtctgaaggataa

SEQ ID NO: 429443 - DNA, 132 bp, Serratia marcescens
atgcgcgaggtccgcttggaaaacgaaaaatatcttacgttactatccaaatcatgccagttgcgccgtattgcgcaactggcatatctatcggctttaatttattccagcttaggcatgatgcttaaatga

SEQ ID NO: 429444 - DNA, 357 bp, Serratia marcescens
atgacgataacgaacctggcagagccccatgaggtggcccatttcctctatgatgcggataaacccaaggggcagcgggccatcctctacttttccgcctcctggtgtcgcccctgccagaatatgcaggggatcgttgaacagctgcaccgtcacgccaacgagatcgccttcggcagcattgacgtcgcgcaggcgccgacgctcgcccctgcattcggtattaaatccgtgccctccctcgccctgtttgaggatgcgtgcctcatcgcgatcatcgcgggcgaggttcccttgcaacggctctctcaccgggtggcggcggcattcgccggcgttacaacatccactcaatag

SEQ ID NO: 429445 - DNA, 423 bp, Serratia marcescens
atgaatatgccaaccctggtactgctggcgtttgccggctggaccttattgattctattcggcaccgtcggcgtttatcgctggtccagaattttaaccggccgtgccacggtgagcgaatggcaagcgaacaaaccacagggcagcgatagctaccagcgcgccattgcggcgcatcgcaactgcattgaaaatttgccggtttatacggccctcgtcgtggcgatagccgtatttcaggtggaaagcacgacgctgaatgtcttgtctctggtgctgctcggcgcgcgcatggcgcagagtctggttcacatcggtttcgagcagacggaaaacgtcgccacatggcgtttcgctttctttttcacacaaatcgtcacgatgttttggatggggatagagatcgtcgggagcctgccatga

SEQ ID NO: 429446 - DNA, 315 bp, Serratia marcescens
atgaatgcaaaagctaaccaagatccctttctgatcgaaggggcgattgaagccgccaggctgttgaaagcgataggcaacgaacaccgcttgctggtgctttgcctgctattgaaacacgatgagattgccgtgggggagctacaacaattggtgccgctaagccaatcggcgctgtcgcagcacctggcgaaaatgcgcaatgaaggtctggtgacgtaccgacgcgaagcgcaaaccttgttttaccgcatcgataacccaaacgtggcgaaagtgatcgccacgctcagagagatttacgcgccgaagtga

SEQ ID NO: 429447 - DNA, 414 bp, Serratia marcescens
atgtcacgactcaccctcctcccgctgagcctggcatttgccggctgcgtgccaatgcagcctgatggctgtgaaaaagccagtgcggtgaatgattgcgtttatgcctggcgtgcaggcagcgatgttccaacggcaaagcaaccgcctaacttgggatgcgacggacaagttttttatgagcggccgcactattccgcctctgcgaaggcagaaaaacgcgaaggcgaagtgagcgcaacgtttgatgttgatgataagggtaaagccagaaatatcgtgctgacgggcaccccagagttctatcgcgacaccaaaagcgccatcgcacgcagctgctggacaccgggccgtgttcatgaaacggcgttgtttacttttaaactctctggtgatgcagaagccaaccgataa

SEQ ID NO: 429448 - DNA, 2067 bp, Serratia marcescens
atgtttaaaccgacttataaaaagaacgccgttacccgcgccatcaccgccgccatgccgctgttcctgctggccggctacgcggcgcaggcgcatcagccccctaccggcgcacaagttaatgatggcgacgtgatcaccgttaccgcaccgctctactctccgctgaccatcgtcacctcaccaaaaaccccacgccagccggtgccggccagcgatggctcggactacctgaaaaccatccccggcttttcgcagatccgcaacggcggcaccaacggcgatccggtgtttcgcggcatgttcggctcgcggttgaagatcctcaccgacggttcggaaatgctgggcgcctgcccagcgcggatggatgcgccgacctcttacatctcgccggaaagcttcgatctgttgaccatcaccaaagggccgcagacggtgctgtgggggccgggatcgtcggcaggcaccgtgcgtttcgaacgtgaacggccgcgcttcgacaagccgggcatcaagggcaatgccagcgtgctgaccggctccaacggccgctgggacgagaatatcgacgccagcctcggcgccgaacaaggctacctgcgggtgatggccaacaaatcccgctccaacgattatcaggacggaacgaatacgcgcgtgccatcgcgctgggacaagtggaacggcgatctggcgctcggctggacgccggacgccgacacgctgctggaagtgaccatgggccgcggcaacggcgaagcgcgctatgccggccgcagcatggacggttcgcaattcaagcgcgaaagcctgggcatgcgggtggaaaaatccaacatcggcgaggtgctggataagctggaagcgcaggtctactacaactacgccaaccacgtaatggacaacgtgaccctgcgctcaccgggcagcggcggcatgggggggcacggcggccatggcggtatgagcatgggtgggcatggcgggcacatgatgtcttccggcatgacgatgcagctcgatcgccgcaccgtcggcggccgcgtgatgggcacctggcagtggcaggacgtgaagcttgaaagcggtctggacacccaaaccaacacccaccgcagcatgagccgcggcagctgggaaaaagacgcccagttcaacagctacggcgccttcagtgaactgacctggtccaccagcgagcaggataaactgatcggcggcgcgcgtctcgatcgcaccctggtggagaatttccgcagcggcagcgatggggagcgttcagataccctgccgagcggctttatgcgtcttgagcatacgctggccgacctgccgctgatgctgtatgccggcgtcggttataccgagcgcttcccggattactgggagttgttctcgccgaagctgggcccgaacggcagcaaggatccgttctccagcgtcaagagcgagaaaaccacgcagctcgacatcggcgcgcagtacaacggcaagcgcttcaacggctgggtctccgcttacgtgggccgcgtcgatgatttcatcctgttcaaatacgatccgcacaatgcgcgtctcagccaggccgataacgtcaacgccaacatcatggggggcgaaatgggcatgggttaccagctgagcgagcactggaaaaccgacgccagcctggcctactcctggggcaaaaacacccgcgacggccggccgctgccgcagatcccgccgctggaggcacgcttggggctcacctatgagtacggcgactggagcggcaccggtctgtggcgtctggtcagcagccagcaccgtgtggcgatcaacgaaggcaacgtggtgggcaaagactttgccgaaagcgccggcttcggcgtgctctccgccaacgccgcctacaaggtgaataaaaacgtcaagctgagcgccggtctggataatatcctgaacaagacctacagcgagcaccttaacctggcgggcaacagcgccttcggctattcggccaacagcgcggtgaatgaaccgggccgcaccctgtgggccaaggttaacgtcaccttctaa

SEQ ID NO: 429449 - DNA, 162 bp, Serratia marcescens
atgcaaaagctcactcgttttctggccctgctcggcgagctgatgatcgaaaaagccgacgatgtcgcgccacaggctactcagccagacgatcgcgacgacgcgttgccaccgcgcctcgaacgcggcgttccgctggccgaccgcttcctgttcatgtaa

SEQ ID NO: 429450 - DNA, 579 bp, Serratia marcescens
atgatgctcacgctggcccggggtatcggccaaggccgtcgcatcgcgctgctcaatgttttcggcatggtttttgtcgccggtatggtgcaggtttccatgctggtgctcggcctcgccacgctgttgcatagttatccgctggcgttggacgtattgcgttgggttggggccgcctatctggtctggctggggataaaaatgctgaaggtaagccggcagcgttccgatgccgtgctgaaaccccggatgatgaccgggtggcaggcggtgaaagaaggggcaattaacagcctgaccaaccctaagtcgctgctgttcatgtttgctttcctcccgcagtttgttaaccctgaaaccgggccggtttggttgcaattgctcgttttaggttccattcagaagctggccgggatcctttcgctgggctctgtcgctatggcctccggcaccgtggggcaatggctcgcccgcaatcctcggttgttggtgtggcagcagagatttacgggcttggtcatgatgggattgggcgccaaactcctcctcgggggcggcgctgcgtcagcaccgcgataa

SEQ ID NO: 429451 - DNA, 777 bp, Serratia marcescens
atgaatacatcttttgctggcaaaaaactgttagtggtcggcggtacaagcggtatgggcttcgaaacggcgaagcgggtcctgaaaagcggcggcagcgtggtgcttgttggccatcgtcaggacaaagccgagcaggcccgtcaggcactggctgcagacggccaggtttccgtcatcgttgcagaccttatgaaagaagaaggtctgcagcatgtagtgaacatcattaacgccgaacacaaagatatcagcctgctggtcaatgcggctggcgtgttcttcccgaaaccgtttacagaacatgaagcgtcagactatgacatgtacatgagcattaaccgcgccacgttttttatcacccgcgacgtagtgcgcaatatggtcgaggccgatatcaaaggcgctatcgtcaatattggctctatgtgggcacgacaggccatcggtgccacaccgtcttcagcctactcaatggccaaagccggtctgcacgcgctgaccaaaaacctggctattgaactgggtgaaaaagggatccgtgtgaatgcggtttctccagctgtcgttcacacgccgatttatgagggcttcattccgaaagacgacgtgaaggatgtgatgaacagcttcgacagctttcatccgatcggacgcgtgggttcaccggtcgacatcgcggaaaccatcactttcctgctttctgacaagactggctgggtgaccggcgctatctgggatatcgatggcggcgtgatggcggggcgtaacgcctga

SEQ ID NO: 429452 - DNA, 915 bp, Serratia marcescens
atgcgatcgttaaaccgacttaaatggctgcacgcttttgaagccaccgccaggcatggcagttttaccggcgcggcacaggagctgggtgtcacacccgccgccgtaggtcagttggtccgttcgctggaagactgggtcggacacccgcttcttcaccgcacccgctccggcaaggagcgactgacgctggtagacgaagcgcaggaggccctacaagatatcactcaaggtctcgataaactggaaaccggtttaagtaagcttcgtggtcgccggtcacgctcggtggtcgtggtgacggcgtcccaggtactgatgatgaactggctgatggaccgcctgaaccggtttgcggaaacgcatgagaatatcgatctgcggcttaacgtcacggaaaagctgatggacgtgtcgtatggcgaggcagatatcggcattcgctgtggacagggagagtggcccggcgtgagtaaaacctggctaatggatgaggaagccgtgctggtctgcagtccacgcctggctccccccgagaaaatggcctgcagtgaatggctcgccacgcaaaaactcattcacgatgacacgccgcatcctggtgccgattttccatcatggggtgatgtactgagagcggtcggtgcgcccgaaacgcgggaaagcgggctgcatatcaattctacttcagcagtgatcctgtcggcgctgagcggcaggggcgtggccatcgttcgaaacgctctggtaaagcagcttatcgagaccgggcagttggttcatctccatcccgaccatcgctggccacttagatggtcctactatctggtcaccccgcagcaacatgtcatgcgtgatgaagtgaaaattttccacgactggcttcttcaggacgtcgtctcagaccgttcataa

SEQ ID NO: 429453 - DNA, 990 bp, Serratia marcescens
atgcctattttaaatcgctgtgccacagcctgcgcactggcgctgagcctgctggggagctcggttgcagcacacgctggggaacaagaggaacttacccaaaaactcgatgagtcggtaatgacgtatgcttactctaagagtagtagcgatatggacaccattaatgaactgataaaaaatggcgctcaccccactattcaaacggtatggtatgccgcctattacaaacagccggcgctgctcgatcgttttcttgatatgtcggtgaatgtgaatcaagccatcagtgacaatggagaaaccgtattgttgtcagcgttgggaaataccgaaaagtctgaattatccgatgatgaccttcacattttacagagcttgctaaaagcgggtgccaataccaatgtcattgcgcaaggggggactaatacaccacttattgccgccgcccaaagccaaggagccgcgcccgcgctggtaaaactgttgctgcaatctggtgcggatgccaagcaggttaccccgcagggattctcaccgataatgggggaaggggcggctaatctggaggtcatcaaactgctggtagccgccggaacagacccttatggcgtcagcaaggtaggatcaacgcctttacactttgtttgcacgcgggatgcttcccaggacggccagccggacccgcaagcggcacagcgtatcgccttgttgcataaacccggaacctctatcgatgctcaaccgccccagcaacaggcctggcctgttggcacaccactgctggaaagcctgaccagcaataatcctgactgcgtcaaggcgttgttggctgcgggtgccgataaagatgcgctggctttcccggcagagtatgtggcagcagatccaagcgtaaaaggtaaaacggttcgtcagaatatactcgggtcggcagaaaaatatcccgacctgtattcgccagaaatcgtggccttgtttcaaaaatag

SEQ ID NO: 429454 - DNA, 1158 bp, Serratia marcescens
atgaaagctaaaactctcctctcgacggcagcggcggtaagcatcgctttcgccgttgccggatgcaacgacagcgcaccgtccgccaccgcaccgccgccacccgccgtaccggtggccgaggtgctggtgcgtccggtcaccccttttgtcgaattcagcggttacctgaccgccgtccagcgcgttgagctgcggccgcgggtcgccgggtacatacaggccgtgaacgtccctgaagggcgcgtcattgaaaaaggccatccgctctttcgtatcgatccgcggcccttccaggcggcgctggacgccgcagcggcgcggctgcaagaggctgaagccaccgctatgctcgcccaggccgactttgcgcgcgcccgaacgctgttcaaccaaaaagtcatcgcccgcgagcgttttgatgccgccactgccgcgatgaatgtgagtaaagcgcaggtcaacgcggcaaaggcggcgttgacggcggcgcaactggacatgacctttacgcgcgtcaccgcgccaatcaccgggcgagtcgggcggacgctcatcaccgaaggcaactatgtcgccagcggcgtcacggcgctcaccaccatcgtttccgtcaccccactccacatctactttgacgtcgatgaacgcacctatttgcaatcgctggccgcctggcgcgacaagacggcaacgcatgagatcaaggtcatgacggcgttgatcggcgacaaaacatactcacgtcccggccgcgtcgactttatcgccaatgctgctgaacggacgaccggcacggtacgcctgcgcgcggtgatcgataaccccgatggacggctgtccccggggctgttcgccaagatcaagctggaaaccggcgcgccacaggccaaggtgttgatcgccgatctgtcgattggcaccgatcaaagccgtcgttatgtcctggtcgtcgataaaaacaaccagaccgaataccgcccggtagaacttggcccggttgttgatggaatgcgcgtgatagagcgagggctgcaaccgggagaacgcatcgtggtgaaagggctggtgcgccccggcatggcggtcacaccccgcccttcgatgattgacggcacgcctgcaacacaaccgaacacgatgggagatgcgacatga

SEQ ID NO: 429455 - DNA, 1479 bp, Serratia marcescens
atgagaaatcttcgtagaacctttttattgccgctgagtgcgatcgccttgttagccgggtgtgcagcggtcggtccagattactcgccgcccgccccccgggctctctccggcttcggcccatcgccggtgggactcggcgccggcgatgtcgagatcgcatggtggcgcatcttcgacgatccggcgctcaccgaattgattcggcgcgcgttggcggcgaaccatgatgtcggcatcgccgtcgcccggttagacgaagccaaggccctgttgcgtgaacaacggcaggatttcctgccgcgcggcgacgtcgcgttgagttatgagacgcgtcgactgggggaggcagaaaaaatggccgcccagccgcgccatgcggaaacctaccgcggcgcgcttgacgccgcatgggaaatcgacctctttgggcgcgttcggcgctcggttgaactcgctcaggcgcaagcagggagccgtgaagcagtgctgcggggcgttcaggcgggcgtcgccgccgaagtggccgccacttggttcgaactgcgcggttttgaggccgaacttaaggtggtcgccgacatcaaccaaagccagcgtgaaagcctggcgcaggttgaaagacaaatgcgcgccggcgtcgccagcgaagttgaccgattgcgcgccgaggcgctcttgctcagcgtcgaggcgacgacgccggaactggaacgccgccgatccgccgccgtcaacgtattggcgacgctgcttggcgaaacgccccaaacattccgtcctccggccaccgaacgggggagtcagctgcctgcgctgcggactatcgccgtgggtacgcccggcgccctgcttgcccgacgcgccgacattgcgacggcggagcgggagctggccgcggccaccgcccggattggcgttgaaacagcagatctctacccgcatgttgaggcacgaggctcgatcgggctggtcgccggcaatctcgatgcgataaatggcgccggcgtgctgtctggcttcatcgcgccaatcattcgttggtcatttcttgatatcggccgcgtgcgcgccaggatcgccgccagcgaggcgcaggcgcgacaggcgttattgatttatgaccagacggtgctgcgtgcgctgcgtgaaacggatgatgccttcaaagcctacgccgaagcggccgacctgcttgctctgcggttgctcgaagcggcggcgaaccgcgaagcggcaaggctctcacggctgcgctttgcggcgggacagggcatttacctggaggtgctcgaagccgaacgggccgacttcagcagtcggcgggctgtggcgctcgcacacacccggcagcggcttgccgtggtgagcatctataaagcgctcggcggtggctgggaagtgtgcgcaacggcgatgagcgactgccgcggcgcaggcaattcggccatagcgaaaaaagttggcggtaaaccttga

SEQ ID NO: 429456 - DNA, 471 bp, Serratia marcescens
atgaatatcggacaagccgccaaattatccggcgtttcggcgaagatgattcgctattacgagcaaataggcctgatcccgagagcggctcgctccgatgcgggatatcgccactacggtatgcctgaggtgcatagcctgcgctttatccggcgctcacgcgacctgggtttttccgttgagcagatatctgcattgctgctgctgtggcacgaccgcgaacgtgccagcgctgatgttaaagccgtcgcgctgtcacatatcgcggtgctgaaaaccaagattgttgaactgcaggcgatggcgcaaacgctggaacgccttgccggccattgccgcggcaatgcgcgccccgactgccctattctggccgatttggcggagccggaagccgccgccataccgcgccaaacgccgcgtttcgggctgatgcgcgagccgaaaccaaggcggctgcgtgaatcgccgtaa

SEQ ID NO: 429457 - DNA, 201 bp, Serratia marcescens
atgattcgttttcatattcccgccatgacctgcggcggctgcgctaaatccgtcacccagacgctgctgagcgttgacccgcaggcgcgcattcaaaccgagccggccaaacgggaagtgctcatcgagagtctgttacacagcgataccttcatcgccgcgctggacgaagccggttttcctccggccgaggcggattaa

SEQ ID NO: 429458 - DNA, 3138 bp, Serratia marcescens
atggcgcagttctttatccggcggccggtattcgcctgggtgatcgccatcatcatcatgctgtgcggcctgatgtcgatcaattcattgcccgtctcgcagtacccggacgtctctccgccacagatttccatctccgccacttacccgggcgcggacgcggaaacgctggaaaacagcgtcacgcaggtgattgagcagcagctcaccggcctggacggcctgctgtatttttcttcgaccagcagctccagcggctcggtcagcatcaacgtcacctttgatcagagcaccgatccggatatcgctcaggtgcaggtgcaaaacaaggtgcagcaggcggaaagccgtttgccgagcgcggtcactgcgcagggcgtgacggtcaagaaatcccagagcagcttcctgctgatcgtcgggctgtatgacgaaagcgacaaggcgacaatggccgatatctccgactatctggtcagcaacctgcaggatccgctgtcgcgcatcgagggcgtgggggacgtgcaggtgttcggctcggaatatgcgatgcgtatctggctggatccgaccaagctggcgagctatgcgctgatgccttccgacgtgcagacggcgatcgaagcgcaaaacacccaggtgtctgccggcaagatcggcgatctaccggccgccgccgatcagcagctgaccgccacggtaaaggcgcagtcgcggctgcaaacgccggaacagtttcgcaatatcatcctgaaaagcgacagcagcggcgcgctggtgcggctgggtgacgtggcacgggttgagctgggcaacgaagactactccgccagcgcgcacctcaatggccacccggcggcggggatcgcggtcaagctagcggcgggcgccaacgccctcaacaccgccaaactggttaaggccaaggtggcggaataccaaagcgcgatgccgcagggctacaaggtggcctacccgaaagacagcaccgacttcatcaacatctcgatcgaggaggtggtgaaaacgctgtttgaagcggtggtgttagtggtggtggtgatgttcgtgttcctgcaaaacctgcgcaccacgctgatcccgaccatcaccgtgccggtggtgttgctgggcaccttcggcgtgctggcggcgttcggctattcgatcaataccctgacgctgttcggcatggtgcttgcgatcgggctgttggtggacgacgccatcgtggtggtggaaaacgtcgaacgcgtgatgcgtgaagataaactgccgccgcgcgaggcgacggagaaatcgatgcgcgagatcaccggcgcgctggtcggcatcgcgctggtgctgtcggcggtgtttctgccgatggcgttcttcggtggttccaccggggtgatctaccgtcagttttcaatcaccgtcgtctcctcaatggtgctgtcggtggtgctggcgttgacgctggcgccggcgctgtgcgccacattgctgaaatcgacgcatgaagaacagaccgacaaagggctgctgggtagattcaaccgcggttataaccggctgcaggagaagtacgccgacaaggtcggcgcagtgatccaccggccaacgcgctatctgctgctgtacggtctgctgctgatcgccgcggccgtgatgtatctgcgtttgccgaccggtttcctgcccaatgaggatcagggttcggtgatggtgcagtacaccttgccggccggcgccaccaacgcgcgcacctcggcggtgagcgaggcggtgaccgcctatttcctcgatcaggaaaaggccaacgtcagcaccattttcaccatcaacggtttcggtttcagcggcagcgggcaaaacgccggcatggcgttcgtcagcctcaaagactggagccagcgcagcggcagcgagaacaccgccgacgccatcgccaaacgcgccatggcgcacttcgcttcgctgcgcgacgcccaggtgttctccatgagcccaccggcgatcgacggtttcggtcagtccgacggcttcaccttcgaactgcaggccaaaggggcgaccacccgcgccgagctgcaggcgatgcgcgaccagatcgtcgccgccgccggcaacaatccggcattgctggcagtgcgcgccaacaccttgccggacaccccgcagctgcaggtggagatcgacaacggcaagctgcaggcgctcggcctgagcgccggtgacgtcaacagcaccctcagcagcgcgttcggcagcacctacatcaacgactttatcgaccgcaaccgggtgaaaaaagtctatatgcagggcgacgtgcagtaccgcgccaagccggaagacctcgaccgctggtttgtgcgcggcaccaatgcgtcgggcgccagcagcatgacgccgttctccgcctttgcgtcttcgcactggatctacgggccggagaacctgtcgcgctataacgggctgtcgtcgttcgagatcaccgggcagggcgccgccggcgtcagctccggtacggcgatgagcgagatggagaaactggcggcgaaatactccgccggcagcagctattcctggagcgggctctcctatcaggaacggctgaccagcggccaggcgtcgtcgctgtacgccatttcgctcatcgtggtgttcctgtgcctggcggcgctgtatgagagctggtcgattccattcgcggtgatgttggtggtgccgatgggtgtggtgggctcgctgctggcgatcacgctgcgcgggctggaaaacgacatctacttccaagtggcgctgctcaccatcatcggcctgtcggcgaagaacgccattttgatcgtcgagttcgccgaggagatgcaccagcggggggaaacgctgattggcgcggcggtccacgcggcacgcatgcgcctgcggccgatcctgatgacctcgctggcgttcaccgccggggtgctgccgctggcggtatccagcggcgccggcgccaacagccgaatcgccatcggtaccggcattatcggcggtacgatcaccgccaccgcattggccatctttttcgtaccgctgttttatgtgttggtgcgccgcatgtttacccgccggcccaccaactcgccgtctcaggcaggagaataa

SEQ ID NO: 429459 - DNA, 627 bp, Serratia marcescens
atggactttcgtttgaacacccggttatccctgcttatggtctcgctcttggcgcccgttgttggggccagtgccgctacgcttacgctcgataatcaggatccggcggcggtgtatctcattccggacgcgaagctgattcaagaacgcgagggggtgaaaatcgccgggcagtcataccgttatttcgtacttcagctcgccgacaatctccagtatgaaggctatatcacccgatgcgccgacgacgatgccgataaattgaatgaacaagcgcggcgacaattgaaccgttgtaccgaacaggtcatcgacgacctggatcggttgatggaaaagaccgccaacttgacattcgactacggcggtacgcaaaacgtttatcggggcgaagaacattcaacgccttattattactattcattcgcccgcgtggcccactattatcagaccgaagacggacgtcatcccctgtatggtctggtttatcgttgcaaacagccggcgagcgatgctcatcgggagcaagagcctgatgcgactgaaacgacgcagccgccggctgaagtggaacgctttattgcattggcaaaaaatcgctgcgccaatgtgctgaaaccacgctga

SEQ ID NO: 429460 - DNA, 681 bp, Serratia marcescens
atgaacgactcacccttgagcattcccacctggtatcgcgatccgcacgcagaacaggccatggcagaaggccatgcgcccatctggcggcatctgctgagcctggtgccggaacacgaattgtccggcgtcagggtgctggacttcggctgcaatcagggcggttttctgcgtctgttgcaccaaatccggccatttcgtgaaggactcggcgtcgatatcgcccgccagtccgtcgaacaggccaaccgcctgaaaggaaacctgccgatcggttatcagaccgacacgcggttgacgggttatgagaaccacttcgatatcgccttcagtcatgaagtcatctacctgattgaagatatcgcgcagcatgccgccgatatgctgcgggtgctgaaaccgggcggtgtttattatgtggtgaccggttgccacaccgacaacccgctgtggccgcaatggcgcgaaagggtggctgaacagacgcataccgtggtgcgggatcgcgctctggacgactatgcgcgcattttctccgccgcgggattccaggtctctgcccgccggctgggcttttccggcttcgtgccctatgagccggacggctggatgccgaatatcgcggcggcgatcgactactattggcacaccaaaacggtgtttagactggttaaaccctaa

SEQ ID NO: 429461 - DNA, 957 bp, Serratia marcescens
atgagaaaactcacaacgccgctgatcgccgccctgctgctcggcctgtttggcctgccggccggcgcgcaggagaaaccgcaacaaatcaccatcggttaccagaaagccaacatttttgcgctgctgaaataccgcggtacgctggaaaaaaacctggagccgcagggtatcaaggttcgctggatagaattccccgccggcccacagatgttggaagggttgaacgtcggcagcatcgatctggcggcgaccggcgacgctccgccggccttcgcgcaagccgccaaggccgatctggtttatttggcacattcgccgcccagcccgaaaaccgaagccatcgtggtgccgcaggattcggcgatccgctccgtggtcgatctgaaagggaaacgcgtggcgttgaacaaagggtctgacgtcaattacctgctggtgagcgcgctggaacaggccggcttgagctacaaggacatcacgccggtctacctgccgccgagcgatgcccgcgccgccttccagcgcggcagcgtcgacgcctgggtgatttgggatccctactacgccgaggtggaaacccgtgccaacgcccgtcggctgaaagacgcggaaggcctggtgccgcactacaccttctatctcgccagccgccgctttgccgaaacgtacccggacagcgccaaacaggtgattcaacagctcggcgtgctgagcgactgggccaacggccatccgcaggaagcggcggcgatcctcgctcagagcaccggcctggatcaggccatttgggccagagccatcgcccgcatgccgttcggcagccagcgcatgtcgccggaggtgttcaggcagcaacagcagttggcggataaattcaccgccatcgggctgctgccggttaaggtggacgtcaacgccgcccgctggtccgaagataaacccgagacgccatag

SEQ ID NO: 429462 - DNA, 816 bp, Serratia marcescens
atgcaaaccgacgacgatttgacccactttgccgcgcagggtgcgccgccgttgccgccctgtaccaagcagggtgatgtcgaacatgacggcgcgcgcatctggtatgcggcctatggcgcggatccgacggtgatcctgctgcacggcggcctgggccacagcggcaactgggggtatcagctgccgacgctgctggccgccgggtacggcgtgctggtcatcgacagccgcgggcacgggcgcagcactcgcgacgcccggccgtatcgttacgctcgcatggccgatgatctgttggcggtgatggacgcgttgcggatcccgcacgccgcgctggcgggctggagcgatggcgcctgtgttgcgcttatcgctgcccatcgggcgccgcagcgggtggacggcgtttttttcttcggttgcaatatggacgccagcggcgttaaaccgcccgcgtccaaccccatcgtggagcgctgttttgcgcgtcatgcgcaggactatgccgccttgtcgccgacgccgggggagttcgacgcgttcgtcgctgccgtgagcctgatgatgagcagccagccagactaccgcgtacaggaattggcagccattcgcgtgccggtgacgatcgttcatagcgagcacgatgagtttatccgcgtcgagcatgccgtctacctgagcgacagcatccctggcgcccgtctggtgatgctgccgggtgtcagccacttcgcgccgctgcagcggccggcggtgttcaaccgcgcgctgttggattttctcgccgatgtgatgtgtcgcaaggcgttttga

SEQ ID NO: 429463 - DNA, 846 bp, Serratia marcescens
atgacttcactttccccacgggacatcgaggcgcgctaccgcttcgcgcgtgagatcgcccgcgccgccgccgatctcgccttcagcttttaccaacgccggcaaagtctggccgtcgagtttaaacagggcctgcaggacgtggtcagcgaggccgaccgccgcgtcgaagcgctgatccgccgcatgattaaccggcggtttcccctagatgggtttctcggcgaggaaagcggcggcaccgacgataacgcctcctgcgtatgggtcgtcgatccgattgacggtaccgcctgcttcctgaacgggctgcatacctggtgtatcgcgataagcgtggtgatcgacggtgagccgacgatcggcgtggtctacgatcccaaccaccgcgagatgttccgcgcctgccgcggccaaggcgctttcctgaacggggaaccgatcgccgtgcatgccgggcgcagcgttgcggatggcgtgatgggcgtcgggatttcaccgcgcgcttcggcggcggaattcagcggctttctctgtcgcctgctgcagacgggagggatgtttgtgcgcagcggctccggcgcgttgatgaccgcccaggtggccgccggacggctgctgggctattacgaaccgcacatgaatgcctgggacagtctgcctggactggtgctgacgcgcgaagccggcggcgtggcgaatgactttatgcacaacaacgggctgcggcgcggcaacccgctgctgctggccaacgcggtgctctatccgcagttggccgagctgattcaaatgccgggcttgatcggctcgacgtgccctatcgcgcgcgttatggccggataa

SEQ ID NO: 429464 - DNA, 525 bp, Serratia marcescens
atgcagacttttttgattgatcgtaccgctacgccggtgggtgaactggtgctgattgccgatgaacaggggcgcctgcgggcgattgactggaccgatcacgaagcgcgcctcatgaagctgctgaatacccactaccgcgccgatcgcttcaccctgcgcgaacagcgcgatcccagcgggctgaccgacgccatgcagcgctatttcgccggtgaactgagcattatcgatcggttgccggtgatgactgccggcaccgagttccaacgcaccgtgtggcaacagctgcgccaaatcccctgcggcgagatcctgacctacggccaactggcgcaacgcatcggtcgtccgaccgcctcgcgcgcggtcggcatggccaacggttcaaatccgatcagcatcgtggtgccctgccaccgagtgatcggttcgcagggcgcgctgaccggctatgccggcggcgtacaacgcaagcagtggctgctgcagcacgaaggctacctgccgaaaaatttgctgtag

SEQ ID NO: 429465 - DNA, 486 bp, Serratia marcescens
atggctgagaaactgctgcacgcattacctttgtttgccgcctgggaggcgctgatcgccgagggcaacacggcgtttaatcagcggcacgatcgccaggcgatgaccagctatcaacaggcgctggagggggctcaggcgatcatcgccgagaagccttggctgaatgcggactataccgccagatttgaagcgctgaatattttcgagtctgcccttgccgcgctgatcgtcacgttcaacaacatcacccatctgcgcctgcggcagaagcctctgcgcggcgtcgagctgcatgttcatcgggcccgagtcgctatcgagcaactcttggccgattcgtcgctgtgcgaacagatgcagcagatcgctgagcggcacctgctgcgcttcaggattgaaaccctgcacttactgcgcgagcaccgtctgccggaaaccagcatctgcgcgcccgctacccaccattccgccaccgtgcattaa

SEQ ID NO: 429466 - DNA, 315 bp, Serratia marcescens
atgaaaggaatcgctgttgttggattttacgcatcgttttttgcctacacagaaaacgcactggcgtttgacacgatacctgttggtctgagcgaaccgaccgaaaccgtggtactggtaccgcgcgagcaaaaagagcgtcttgatggcaaggataagggagatgcactttattgttattatgacgggaaattattctcgctgggcgccacgttcaaagacaaggtttgcgctttagcggagattaaaacggataagccgttctcagcacgcgtcatggcccaatggataaaagaaaaaagtgcggctcgctaa

SEQ ID NO: 429467 - DNA, 702 bp, Serratia marcescens
atgtttgagatcagcgccgcagatattctcaaagtcagtttgaccgttatcaccctgtttatcgccgttgttaaaacgccatttcgtattcggcgggaaaaccatgacaagctgctcaagctactcgaatccgtcgagaagccccacagtgagcgcatgcagctcttactgtttagggattacatcggtagcaaaaccgtcgggctggcggagttgcagcaattgctggcactgccggacggcgtaacggcgctggagcgctacagacctactggcggccgacagcagatcctgcgcaccacgtccgagggtttcgttttgcaacgacgcgccgacagtgcgttaaaacgctcgctgctttcctgtcgctatctgttgaaatacctgctattcgtcactctgttggtgctaatgcctgtgctggcgcaatggggcttgcggcagcttggcgtgctggttatcgcgccgtcgctggtgtttatgtccggtgcgcgtatcaccgacggctggcagctgctgttccccggctttatatttattatcaccatgctcagtctgacatacttaatcttcaggcaactggcgctggcgggtaacctcagttcggaacgcgccttttatcgctactatcaacgagcgcgtgaggaacaacgatgccgggaagtcctgagacaactgcgcactgcgctgcgccgaacctga

SEQ ID NO: 429468 - DNA, 1023 bp, Serratia marcescens
atgagctggacgattgataaagtgaaagtgctgtttaataagcctttgttggatttgctctatgatgcacaaaaggtgcatcgtcaacattttgatccgctggaaatacaaatgagcactttactgtctgttaaaacaggagggtgcccagaggactgcaaatattgttcgcaaagcgcaaggtataaaacaggattgcgggcagaaaagttgttgcaggtagaaaaagtcttacagtcagcccgtacagcgaaagaggctggctcctcgagattttgcatgggagcagcctggagtaatccgcacgaacgcgatatgccttatttggaggagatggtcagaggggttaaggcgttggggttggaaacctgcatgacgctgggaaaactgactgattctcaggtcgagcgattggctaacgttggcttagactactatagccacaatctggatacctctcccgaatattatggcagcatcatcacaacccgcacttatcaggatagattaacgacgatcgataaagtcagggcggccggcatcaaggtctgctccggtggaatattgggactaggtgaaagtaacctagaccggataggtctgcttttgcaattggccaacctgtctaaagcgccggaaagtgtgcccattaacatgctggtcaaggtggcgggcacccccctggaagacagtgagccggtggatgcctttgactatatccgcgtcattgccgttgccagaatcatgatgcctacctcctacgtgcgcatcgcggcagggcgcgagaaaatgaatgagcaaatgcaggccatgtgttttatggcgggggccaattcaattttctatggatgcaaattgttaacggcaacgaatcccgatgaggatcaggatatgaaattgatacggaagttgggtctgaaaacacaaaaagtgcaccaatcactgacagacgaggaagagggcgcttcattgctgaaagacgtaatgactatggatgatgagaagtattatcaggttatttga

SEQ ID NO: 429469 - DNA, 1245 bp, Serratia marcescens
atggcacaagtaatcaacactaacagcctgtcgctgatggcgcagaacaacctgaacaaatctcagtcttctctgggtactgcgattgagcgtctgtcttccggtctgcgtatcaacagcgcgaaagacgacgctgcgggtcaggcgatctccaaccgtttcaccgctaacatcaaaggcctgactcaggcttctcgcaacgccaacgacggtatctctctggcgcagaccactgaaggcgcactgaacgaagttaacgacaacctgcagaacatccgtcgtctgaccgtacaggcgcagaacgggtccaactcttccagcgacctgcagtccatccaggatgagatctctcagcgtctgtctgaaatcaaccgtatctctgagcagaccgatttcaacggcgtgaaagtattgagcagcgatcagaaactgaccatccaggttggtgctaacgataacgaaaccatcgatatcgaactgaaagacatcaacgccaaaaccctgggcctggaaacctttagcgttgccggtggcgtggataaaggtaagattggagcaaatgttactgaggtttctaccggtaaaagcattgctatcgacaccaacggtaagaaagcgggtggtgatgatccggcaaaatacgttaaagatgatgcaaccggcgacatctacgcagcagataccaaaggcgatttctataaagccactattggcaccgatggcaaagttaccaccatcgacactactgcagctggtgcaactctgaaaggtactttgagtactgccgcatccgtttccagcattcaggaaaaagtggctgtgtctggcgacaaagctgacaccgacaacctgaaatcttacgacaacggtaagtcttacatcatcgaagacgccggtaaatacttcaaagctgaagtggccaaagacggtaaagtcactcgtggcgcagaactgagttccgagccaaaaactgccgatccgctggcaaccctggacaaagcgctgtctcaggttgactccctgcgttcttctctgggtgcggtacagaaccgtttcgattctgttatcaacaacctgaacagcaccgtgaacaacctgtccgcttctcagtcccgtatccaggatgctgactacgcgaccgaagtgtccaacatgagccgtgccaacatcctgcaacaggctggcacctctgttctggcacaggctaaccagtctactcagaacgttctgtccctgctgcgttaa

SEQ ID NO: 429470 - DNA, 267 bp, Serratia marcescens
atgctgcggcgccggtggcccacagggttcttaattgagctgctgagcctgttcgctcagcctgtttcggttatcggccaaaatgagaagaacttgaggaaaaaaagcggcaacgcggtcagcatccagctagccttcgttaccgcctatcccctaaataattggcgtcgcagcaaggcgacaagcaagggcgtccccgagcgcttggttaagccaagtgaccggggcgagcttgtgcagtcaacgccgctgcggcgtcaagaatga

SEQ ID NO: 429471 - DNA, 360 bp, Serratia marcescens
atgagaagatacacgtactttttaatgtctctgctgctcggaagccatgtagtccttgctgaaaactcgctcaatgctttatcgcaagaggcactttataaaaattggttaaccagccgctgcattgggaagtccactgactcagaaagaaccaagcaagacgccttccgttccgcttccgcctatttagaattgagtaaactgccgatggatgcatttgaacaaggtgaaaaactggctgaacagtacgcaaataaaaatagccaaggctcagttcaagggacttaccatactttagattgtctttcactgcagaacgccagtgaagctgaaaccatttttgaacgttactctaagtaa

SEQ ID NO: 429472 - DNA, 4461 bp, Serratia marcescens
atggctgagatctgggcagcaagaaaggatgatgaactgatccacaccagcgcgttggcggacatcgccagcgccgtcgccgaagtcgcggtgtatgcggtggcgaccgccgccgtgtccgcagcagccgccgccgcagcgccggcattggcaggggtggcggtgctcggcgcagcggcgacggcggcctccggctgcgtcggcgccgggctgatcgtcggttttgccaccagcctgaccggcgtcggagaacatatcagcaacggctgcgacgccgtggccaactggctcttcccgccttccgtctccggcgtcattctcacgggctcccccaacgtcttcaccaacgccaaaccggcggcacgcgccgcaggtcgtttactcacgcccgcagagatcaaagcgttaccggcgccacagccgccgcaaagcttctgggattatggcgccgagctgctggccgccggcggtaatatcctctcgcagctatggcagcccggcgtcgccggccccagccagcccagccaaccgctggaagaagataaaatcagctgcgacaaacacccgcttccgcaatacctggcggaaggctccagtaaagtatttatcaacggccaaccggccgtacgcagcaatgaccgttcaacctgcgaggcgaaagtctcgaccgacgtctccaaaaatgtgcagatcggcggcggcacggtggtggtacgcgacatcaagagcggcaagctgccgggtatcggtttggcgctgaccgtgctgccgctgctgctcggtaatccggccaagctggttaagaacctgccttgcatgatcggcggcggtctggcggcggcgggcgttaacgccctcggcgaagcgatccacgccgcctttaacccggtgcatgccgccaccggcgccaaggtattgaacgacgaagaagatctggacctgttgctgccggcgcgctttccgctgatctggcagcgcaattacaacagccgcaatggctatcagggactgtttggccacggctggcgcacgccttttgaaatttgggtcgatcttaacgaccgggacggcgtcattgagtgttgcctgcatgatgaaaccggtcgtgagctacgcttcccgctgcctgaggtgaaccagccgagcttcagcgccggtgaagggctgatgttccgccgcggtgaagagggacagctgctgatcgccgacaccgacggcagcgtctggcggctgttcgtgccgctgccgcagaccccttcccgcctgaggctggtgtcgttgagcgatgagtacgataatgcgctgctgctgaactacgacgaacgacagcgcctgagccacatcgtcgacagcgccggcaccatgacattgcggctggaatacggcgatccgcgcttcgacgatcgcgtcaccgccttgcggcataacgacgaaccacgcgtgcgctaccgttatgacgacggcggcgatctgcatcaggtgatcgacgccggcggcctggtcacacgcgaatttcactataacgcccaacacctgctgacccgccaccaacaggccggtgggcccagcttcgagtatcactgggcgatgttcgacgactggcgcgtggtggaacaccgcgacagcgccggcggcggctgtacaatcgactacgatttggccgccgggttaacgacggtcaccgagaatgacggcttgcggcaccagcaccgctggaacgcccaacggctgatcgtcgaatataccgacgagcgtggtgaggtctggcattaccaatggaatgacgaagacatgctgatcgccacgcgcgatccgctcggccacggctggcatttccgctacgatgaagccggtaatctggtcgaggaagaggatccgctcggccatatccgcctcaccggttggctaccgcagcgcgcactgccgatcagcgtcaaggagcccaacggcgccacacagcatttctactacgacgagcgccatgccttgattgccgagatcgatgcgctcggccatacccagcgctacctgcgcgatggctatggccaggtggtgcaagccgtcgacgccaacggcggcatcagccatttcgcttatgatgagcacgggcaattattgcgcgcccgcgattgctccggcaaacaaaccctctacaaatatacggctcaaggctggctcagcgaggtgaccgacgccgccggcgaacgcgtccattaccgctacgatgccgccggccgcctgacacagctgcagcgcgccgagggctggcaagagacgctgagctggaacgcgcggggccagctggatcgctatcagggggccgatgggcgcctgacgcattatcgctatgacgcagccggccgcctgctggccacgcgcaatccgctcgatggcgaggtggtgcgccactacgacgcccgcggcagattaacggcgctgcgcaacgagaatgccgaaagttacctgttccattggacggcctgcaatctgttgcaggaagaaatcgggttggacggcgtcagcacccgctatcgttacgacgaatgccgccgggtcgtcgagcgccgcttcgccgccaatacctccgccgccttctcgcactatttcaaccatgacggcgccggccaactggtgagcaaacagacgcccgatggagaaacccgctaccgctacagtccgctcggccaactgctgcatgccgccagtgaccgcggcaacgcatggcatgacgagccgacaacggctcagagcgaggtcagttttgactatgacttgctggggcgggtaacccgtgaacaaggtgccaacggtacgctgcgctatgattacgatccgatgggtaaccgcacgcaaaccaccttgcccgacggacgcgcgctgcgcgcgctgtactacggcagcggccacctgctgcagctggcgctggacgatatcaccctcagcgagttcgagcgtgacaatctgcaccgcgagctgagccgtacgcagggtcgcctgaccagccgagtgcattatgatcggctggggcgcaaagaccggcgggagatcttcaatgacaaccgccagcgcccggcgccggccagcagctcgcgccagtggtcctacgactatcaaaacaacctgacgcgcgaagaacacaacgccaacccgttctcctaccagcgttatcagtacgatgccaccggtcgattgctgagccgggacggcacgctgccggataccgagcgctaccggtacgatccggcatccaacctgctggatgaggggcaattccgccagcggcacaaccgcgtactgcattatcagggaattgattaccgatacgatgtctttggccgcacggtggaaaaacgcaaaggccactaccgttggcaatatctctacgacgccgatcatcgcctctgcgagatggtgcgctacagccaacatcgcagcgaagcccagcagcatgtgcagttccactatgatccgctcgggcggcgcacgcaaaagcgggtgtggcagcaaagtcaggatctgcgccaaccggccggcaaatgccaaaccaccacgtttttgtgggaaggtttccggctgctgcaggaaactcgcgacggcatgcccctcacctatgtctatgccgatcagggcagctatgaacctttggcgcgcatcgacggccacacgccggcccaagtattttacttccacacggcgccgaacggcgaaccggaaagcctgaccgacagcgacggaacgctgcgctggcagagtcacagcagcgcctggggccgcataaagtatgaggaaaatcagcaagatctggattattcccaaaacctgcgcctgcagggtcaatacctggatcgggaaacgggattgcactacaatttgttccgctattacgatccggatatcggcagatttacccagcacgatccgataggtttggccggcgggatcaacctgtaccaatacgcgccgaatccgctgggttgggtggatccgttggggttgagttgcggcaattcctggaataattttcaatcgaagtcgaaaggtgtttttgcatccagaagccaggcatctaaagcttataatctgtggaaaaaacaagattgggcggccttagaaaaattcatggggcatggctcatggcctcccaatagaggttttgtacaagcaactcctactactcttatgcctggagcaaaaattgatagatacggtggctggacaaataatggcgtattcaacgaccgaggtacctttgtctctcctgctggagcctcttttggcagccgggcattaccgttagatactctggaaaaaccgtatcgagtatacgaggtggttaaaccaatccaagcagatatggggcctgctataccgtggtttaaccaagctggtggaggaacacaatttgaactgtccaaatccatcagtcaacttcttgcagaaggccgaatccggccaatttga

SEQ ID NO: 429473 - DNA, 375 bp, Serratia marcescens
atgagcgaaaaatactttagcgtgaagaaagataagcaactatttgatggtaacgaagagcagtttcgtttatttaaaaaagaagtatccatccctaactctaacgaaaaagtactttatgataacagctctgcgatacccatatgggatatagatgaaaacatcaggaaggcgatcgcagaaaaaataagcgggataaaagtcatagagtacccatatgacccaataccttcatataaaaatgaaaatctggatatctacattcagaatgtagagtcgaaaatgcacaaaaacagaataacaataatcacggcgacgggtgagtcacaaccagcaagatataagataaagttgctgggtttcatttttcactag

SEQ ID NO: 429474 - DNA, 699 bp, Serratia marcescens
atgatgaatatttcctgggatatcgccaactttaatatatcaatgaaaagccagtacagtgatatctatgagttagaaaatgatatcagtaatttctttggaagcagtaattttagtgaaatggactcccttgactggtttttaatcaacaagaaaacaaacgagctttcttttttgttgttgagcgttccttctttttttaaagcatcaagcgagcgtcatgcccttgatgttgactcattacgagaaataaaattatcagaatgtatcgatagcttcgtatctcacgtcactattcaagacgaagcagttttccaatccaaagagaacattttaattgtcgcatcggatacatcggccatcgtttataagacaccaatcaaagagggtctttatttcttgtcgggctgtgatttttcgcatcatgggtttttattgctcagtgcgacccatcatatcccaggggaaacaccaccatcagatgagacaatttccgattcgttattcttaagaatgctagatttgtgcaaccaagatttttatgatgccatggacgagcaagatgaaagatgtttatccataataaaccagttagagaaggattgtttggcatatcaaaagatagacgttcgcttactgcaaacaatagattttataaaaaaccttaaatatacattctatgatatagacatggaataa

SEQ ID NO: 429475 - DNA, 735 bp, Serratia marcescens
atgtggtttgagcaaataaaaaggggtaccggtggggatgatgagcatattttattttgtttcccttatgccgccggaaatgccgaggtattcgtgccattctctcactacgtcaatagcaatacgtccgtgtacgccatgcaactgcccggcaatgggcgccgcttttcagaggcgttgtgcaatgatgtctgcaaaattctggatgaggttgaacgagaagccacgagcctgatgtcgggaaaaccgtactcatttcttggtcacagcaatggcggattattcgcctttgaattggcgagtcgttttatcgctaaggataaaccgccggcgcgaatttttatcgccgcagaagcaccgccgcacattacggattttaagcatgatccgatgcattcagatgatgatgaaatggccgaagtattgcgtcgttatggcggaactcaacctgatattttggatgacgttgatttcagaagcttattttttcctattatacgcaacgagctgtcgattaattttcatatgaaacgggcgttgaaggagaagacgatcaattatcctttggtgttgattcacggcagccgcgacagcactgtttccaagacggacatggcggcttgggcgcgctatacaagcgcgcatatcggtctgcataccgtttcgtcggatcatttcttcatcaatcatcagccgaaagaagtggcggatatcgtgaatcagcagctggcgtaa

SEQ ID NO: 429476 - DNA, 16047 bp, Serratia marcescens
atgatgttgacggatttattgaacaacctgaaaaaaaataacattttattgtgggctaaagcggacgatcggttgggtttttctgtcgacaaggatatcggctttgatgccgatctgaaggctgaagtggcggcacgcaaagacgaattgttgacgctgttacaggacaatggcgtgaccagcgaacaactcgcgaaggaaacgtcttttctgaggctaccgccaagtagctggccacttgcgctggactcaattcagcaaggcatgtatctgcaaagcgacatcgacggcttgccgtatacctatacggtacctttgttcattggattgccgcaggtggatatcgcgcggttgcgaaacgcgctgcaaacctttttacggcatcagcccctgttgcgtcagtcgattgatagcgatatgaagcgcgtttttctggcgcctgagcagtttgcactggaagtagaaaggatttcctggtccgagctggaaagtaagaaacgggcgttggcacaacaaaccttccctatgccggaagggcagtttgcgcgctttgtgctgctggtgcgggctgagacgcaagaggccgttttggcgtgcgttcaccatcatatgctgtctgatgccccttccgtccagcattttgctcatcaactgttgagtgcgtacgccacaccgtctgtatcggcgcagcctgaagcggggtacctggattactccgcatatcaacagtggcgggtgcggcaagatgatgttcaggcgttcagaacatcgttggccgcccgtttgaatcaggcggaaccgccggcattgcgacagcgccatctctctggcgtggagaatcgtgcctttgccgtgcaggcaggattgacgtcggaggttgtcgagcgtttgacgcaggcatgcggcgaacggggactgacgctctattctctgttgtttacgacgttcgcccatgtattacggacctttagcggccaggacagcgatttccctattggactgacagtgatgaatcgccccgaggcgttcagccgcgccattgggccgtttatcagcaccctgccggtcatcgccgcattgcgcgcagaccaaagcgtgttgagcaatgtcaaaagcattcagcacgatattttgcagttgcaggaacatccgtgggtgaacattgggcacttggcgccggagatcgacggtggcgcggtgcgcatcaatgaactggttcagctgctatttaccttccataactttgaaaacggcgatatcgccgtccccggcgtggaatatcgtctggagtcttatcccgatctggcggaaaagtttggcatgtccttatttgccgctcaacgagacggtcaaatcgatttcacgttaaccgcggcggagaatcgttacgaagaggactacgttcgcaatattctcgaggcgttagtttatgcgctgggccagtttgatcggcaatcctgggagacgccgcttgaacaaatcgatttaatcacgccagcccagcgtcggcaggtgctgtctgaatggaatgacacgcgctgcgattattcagaagatgagcatatcgcgtctttattggaagcgcaggtagcgctgacgccggacaatatcgcctgtgcggatcggcatcggcaattgacgtatcgccagttgaatctacaagccaatcagttggcggccgccttatcgtcacgtggggtggggcatggcgcctgcgttgcgctgtgtctggatcgcagcgtcgagctgttggtcggtatttgggcgatcctgaaattgggggccgcctatttgcctgtcgacccggcattccccgacgatcgtctcgattacattctacaggatagccgggccgacgtaattatctgccatcaggcctaccgacaccgggtggcggcgccagggcggcggctggtggtgttggatgatgaatcgctgcgccacgagcttgagttgttgagcgatgaaaacatggcgcgtcagatatcaccgaacgatctggcctatgtcatctatacctccgggaccacagggcagcccaagggcgtgatgtgcacgcaccgcggtttgatcaaccgtatccaatggatgaataaatcctatccgctgacggcagccgatcgggtgttacaaaaaacgccgtacatttttgacgtctccgtatgggaactgatttgggcctctctttacggcgccaacatcgtttttgccgatccggatggccacaaggacgcggattatctgattgagctgatcgagcgcgaaaccatcaccgtactgcattttgtgccatccatgctggcggcttttaccgagacattacagggcattcaacgcgatcgaaacgtcagcttgccgagcttgcgctacgtgttctgcagcggtgaagagctcaaactgactcaggtcaaagggattaagcagtgtttgcctcatatcgccctgcacaatctttatgggccaaccgaagcctccatcgatgtgctgtatttcgactgtaacgatccggatatagataacgtcctgatcgggcggccgattgataacatgaaagtgttggtcctggacaaagggcagcggcttttgccgcccggtgcggtgggtgaactctacctttccggcgtcggactggcgcgcggctatctgaataaagcggcgctgacggcggagaaattcatcgtcaatccgtattgcaccgaatgggatgagcgggcggatgactatgcctgtttgtataaaaccggtgatttggtgtatcagcggaatgatgggcaaatcgtttatgttggccgcaatgattttcaggtgaaaatacgcggatatcgcattgagttgggtgaaatcgcccagcgtctcgaagcgtttgacttggtgcgccaggcggtggcgctggtttatcaacagccccatccccgcctcgtggcctattacacggcgcaggcaccgttgccggaggcgacgctacaacactttcttgccgccgccttgcccgagtacatggtgccggagacctttatctggttgaaagaatggcccgtcacggtgaatggcaaactggatcggcgtgcgcttcctgaaccgtctctgccggtcgtacaggaacgtgtcgcaccgcagtcggagagggaagcgcagatcgccgccattgttgcggaaatgatggggatcgatgaagcgcatttcagctgtgaggctaacctgtatcagttggggctggacagcatcatggcgatcaagctggtgagcaaattgcgccaggcgatgggcgtatcgatccgggtgaaagacgtgttcgccagcaaaaccgtgcatgcactccatttacgtctcgctcagcatcagcagcaggtgatgattgaaggcaaacgggagcagggcgtattggttggcgagttgccgctgctgcctgtccaacgctggttctttgactgcgcattcccttatccgaattattggaaccaggcgtttctgctggatgtgccggcgctggacgtcgaacgcctgcgcgaagcgctgcacgcattgattcaacatcacgatgcgctacgcctgacgtttacgtctgaggattcgtcgcattggcgccaaggctatcaaccgatgccggacgccatcgaactgcggtgtcatcatgtcgaacgctcggcaccgcaatggcaagaggccctgtccgccgtgctgaccgaatggcaaagcgatatcgatctggccgacgggccgctttatcgttttggttatgtcacggggttcgacgaggggcgagcccgtattttctgcgcttgccaccatttggtgctcgatagcgtcagctggggcattctggcccgcgatctggcgaacgcctaccacggtgaaagccttggagataagggaacgagttatcgtcagtggactgagcacttcgagcaatattgtgccaatcacgcggaagaggcgtcttactggcgggccaggatggcggactaccgccccgttgcgttgccggctgcgcgcggcgctacgatggtatgcagccgcctcgcgttatcaataaaagtgacgcaggcgctgcaaaccgagggtttacgtgccttcaatgcgaaagtcgacgaatgtttgctggcgtgtgcagacggcatgctcgctcactggtttaacggagagctgacccatgtcaccgttgaagggcacggacgcgaagagattgatgccactctggacgttcatcgttgcgtcgggtggttcacgtcactttatccctgtgcgctctcatcctctcccgatccggcaatgcgtttgcaggcggccaaagcgcaactgcgcggcgtgcctcatcaaggcgtaggatttggcgcgtttgcccgtgagctagggttgccgctgcccaatgtttgtttcaactacctgggacagctgacttcgccggatgaaaaggattgggcgctggtcatgtcgccggtcggtgagacgcgccatcctgacaacggcttgcctttcggtattacgctctttagctacatagagcaaggtcggttgcagctcgaagtcgtcagcggtctgtccggtgagcaaaatcaacagttgctggaggcctgggaggcggctatagacacgctgatagcgtgctgtgaacggcagggaagaacccaatacggccttggcgatttcatcaatgttgcggatgaacgcgacttacagcatttacctctgcagggcggtgccgaaaacggcgactgctttgccatgaccgagattcagaaagcctatctggttgggcgctttgaaaactatgagatcggcaacgtcgccaaccacatctacaatgagttcgtgtatccgcgccttgatgacgaacgtctggagctggcgattaaccgattgatcgccctctgtccggtgctgcgcaccgtgtatgacgcggaaagcatgactcagcgcttcatttcggtgtcgcaggccggccattatgccttggcggtgaatgacctgcgcctcgacgatgaggctaccgcgctggcgcgcgtgcgcaagcgtctgtcccatcaggtctatcaggtcgaccgtttcccgttgttcacttttgaaatcagccggctgcgcgatcgcgacgtgctgcatatcagtctcgatctgattttgctggatgtgcaaagccgtctggcgctgtatcaactgcttaatgcgctgtatcggggaaatgtcttgccgccgctggcaaccgtgaacttcaaagactaccaggagcatctggcccatctgaaggcctcccgttggtatcaacgagattgcgcttattggcaggacaagctggccgatatgccgctgcggccaaacttaccgctcaaggtaccgtcggccacggttgaacacccgcgctttgcagagcatacgctatatatagacaaacaaatttggcaggatttcaaacggcaagcgcagcattatcaggtctcatactcgtcggtattgctgagcctctatggctacctcatcgcgcgatattccggcaacagcgagtttctcattaccatgacgctgttcaatcgctacgcggtttgcgaggacgtaaacgacattttaggtgattttacctcgaccaacctgttccactttcgcgatgccggcgaggatctgttcaccaccatcgagacgacgcataagcgcatgtgggacgacattcagcatgcgttgtacagtgggttggatgtgcagcgcgatctggtgaaactgcacggcctggatcgccattcggcggtgtcgccgttggtcttcactggcgtcgtagggcaacaaaccggcgattgggataaacaggcgtatctggaagacagcgaggtgcgcgagcagcgatattggtgtgcgcaaacctctcaggcttggatcgacctgcaggctattgaagtcgatggccgctttatgagcaagtggctttatgtcgaacagctgtttgatgaagaaaccattgcgcatctgaatcgcgcctattgccgtctgatctcgcgattagcgcagcagccttgggaaacgccggtgggatgcgaaaactatttgcctgaagcgcaaagagaaatgatgcagcgggcaaatgccgtcactcagcctctcagtgaagaaaccctgttcagcgcgttcgatctgttggcgacgcaagcacggcatcgagaaacgatcgcggtgtatgacggggaagcggcgatcggcatgacctatggccaattgaaacaagacagcgatgctttggcgcagcaggggatgggctcatctgcgccgctgattgccgtattggcggaaaaaagctacgcccaggtctgtgcctgtctggcgatcatgaaggccggcaagggctatctaccgttgcatgtggagtggccggcggggcgcatcgccgatattttacaacaggccggtgtagaacagctctggctgacccgggcacagtcggcgcgtgcggatatccggacactgagcgaagcgggttatcaactgctggtcatcgaggatatgctggatgaggcgaccgctttgccaccgtgtttcggcttgccgcacgtcagcgccgccgatgtggcctatgtcattttcacttccggttccaccgggcggccaaaaggggtcaccatcgatcaccgtggcgcagtgaatacgctgcaagcggtaaatcgacgcctctcgctgaccgctgaagatgccctgttcgcgctgtctgaattgagcttcgatctctccgtctatgacatcttcggcgcgcttagcgtcggtgcggagatcgtcttaccggctcaagagagcgtaaaagatccggagcggtggttgccgctgcttgctgagcgtgaagtcaccgtctggaacagcgttccacagcttgccgggctgctggccgatgccgtggcacggcagggatgctcactgccaaggctgcgcgcgtttttaatgagcggtgattggatcccgctgaatctgccggagacgttgcgcacactttggccgcacgctgactgcatcagcctgggcggggcgactgagggcagcatttggtccgtttggtacccgatagaggcgatcgatccggcctggcgctccatcccttatggcaccgcgatgcctcatcaggcgctttatgttttggatccgcagggacagatgtgtccggttggcgtgaccggtgagctctatcttggcgggatgggggtggcattaaattattggcgaaatccacagctcacggcggagcgtttcatttcgcaccctcgtcacggacgcctctacaagacgggcgatttagggcgctggcatgcggcaggttatgtcgaattcctggggcgcaacgacttccaggtcaagctgcgcgggcatcgcattgagctcggggagattgaaagccggcttctgcaatgcggcgggatccaccaggccgtggcactggtgatggcgcagccggcaccgatgctggtggcttattacgtcggcgaagcgaacgctgacgagaaaatgctccgttcgcgactggctgaacaattgccggagtatatggtaccggcgtatcttatcgctttggatgccttgccgctgacggcgaatggcaaactggatcgcaacgccttgccgctacccgcagccgaagagcaggcgacttattgcccgccgcgtgacgaccgtgaacatcaactgtgtcggctgtggggcgagatcctgcacgtgccggcggatgaactcagtacccaggcggatttgttccagttgggcatcgacagtatcgccagtatccaaatggcggggcggttaaggcgcgaattgcagctggatgtcacgctgaaagagttgctgacgtatcgcaccatcgcatcgttctacgacactctgctcggccgtcaaaccgttggcggcatccagaccgtgcagcgcgaaacaggggccttgagcggcgcagttccgctgctgcccatccagcaatggttcctggcacatgatctgccgcatccgcagcagtggaaccagtacgggctgttggtggcgcctggcatgacaatggcccgtctgcaatgcctgttgccgcgcctcgtggcgcagcacgacgcgttcaatctgcgcttcgaaaaagatacccagggagaatggcgtcaatgctaccagccgcaggctgcgctgccgccatgccacgctttggacattcgcgcattgtcgctgccggaagaccacccggattttgacgccgcgctgttgcagcgttttgccgactggcagcaggcgttcgatctgcagagcgggcctttggccgcgttcgccgttcttgaagggtacgcggacggcaaggccagggtgttcgtcgcttgccatcacctgattgtcgatgcggtcagtctgcaggtgatcgtcgacgatttacgacgcctgagccaagaggaaacgctgccggagaaggccagcagctatcgccaatgggtgaaccatctgcggcaacgtgcgcaaattacctctcatgaacgtgaagagtggctggggcaattgccgggcagcgaagttcatgcgttgcaagcgctgggcggaaccgcgacgacgcgtcatgcccttgcgtggggggaagggccatcctgtcgcttgatgcagcacctcgccatgttcggcatgcagccgcaggacatggtggcctgggcggttggccgcgttttgcatgatttgaccggacaaaccgcctttagcctatggtttgaggggcacggtcggcaagcggatgagcgaacgctggatatctccaggacgatgggctggttcaccagtcgttatcccgtgcgttttagctatcaacgcgatgccagggagcatttgctcgcggtgaaaaataatctgagacgttggtcgcagcgggcggaaaacttcggtgtcctgtgtggtttgcccgtggtgagagaggacggcatcagcatcaactacctgggcaagatggaggcggcgggagactgggcgctggatcaccactttgtggggctgcatcgccatgcctcccaggaagggacgcatctgatcgatatcgtcgtgttgaacgttggcgatcgtcttgaattgcgggtcgaaagccggctgcgggagcatgacgcggcctggttgacgcagcggcttattcgagagttggaagatggcctggtatcaatgaattggccattctggcgttggttaaccgaatcggatgtcgatttcgccctcccgcaaccccatctggatcggctgcaacatgcgcaggcggttgatgcggtcttcatggccaatagtctgcagcaagggatgttgcaccattcgctggcctttggcgacgccgatcgggtgtatcgcgtggctacgcgctgggattatcactgtgcgatcgagcccgagacgttcaagcgggcgtggcaatgggtgcaacagcagttctcctgcctgcggttgcggttcgattggcgcggtgaaatcgtgcaggtcgtggatcatgaagggcgcttcccttggcacgtccatgacatcagccatctgtcgcctgaagagcgggaacacgccttgcacaggctgcaggaaagtgagcagcaggccagcttcgatctccaacaaagcggactgtaccgtgtctgcctggtcaaactggcggatgatcacttcgcttgcctgttctgtgtacatcacgccatcctcgatggttggagcagtccgctgctggtgggggcgctgcatgacgcttacctggcgttttctcacggacgtgagccggcggacagaccggatctctttgcttcagtgcagcactacattcaacggcatcgcgatagggacacggatttctggcgcgactacctgagctcggtcgacacctcgccggatctgagcggatggcgccgtccggatgcggagtcatcggcgttagcagccattaagagcgtctctgctgcagggatttgccgctgtgaactgagcgccgaagagcgccggtgcgcgctcgaagctgcccagcgccaaggcatgaccctgaacgccttgctgcaatacgcctggcacaaggtgctcgcactctactccggtgctgccgtgaccgtggtgggcaccgtggtggcgggaaggatgctgccgttgaatggtatcgaaaacacgctgggcatgttcctcaatacgctaccgttgaaggtggagcatcaaagcgatgtgcctctgattcagcaggcacatcggttgcagcaagatattaatgaagccaatacccgatgcctggtcgatctggctcatctgcagcctgcgggccagcgcctgtttgactcgttgttcatttatgaaaattacccgcagcctgatgaagaccgccaccgcgaactgcgtcatcaattcgtcggtcgcaatgagcagagggattatccattggtcgtcagcgtggaggaggagccggacgttctgctgattaagctggaatatgcggcagagtactttgatgcggcgatgatgcggcaagcgatggcactgttaaaggacatcgtcggccacatggcgaaagacgcgagtacggagacggtggcgatagctccggtttattgtgagccggagcaacccttgttgcttcctgcgccggggaatgccgccaccttatcgcaagtgttggcgcactacgcatgcagccggtcagacgctccggcgctgagtgacggcgagcgcagctggagctacgcccagcttgacgcagaagtgacgcaactcgccaatctcatcgccggccgccttgagaagacgccgcacgcgcctattgccttgcgactgcacagcaaagtcttgacggtcatggccttgttggcgataggacgactgggcgcagcttatgtgccgctggacaaagactatccgcaggagcgtatcgatttcattctgcgtgacagccaggctatcgccgtattgacgatgtctggggatgaaggggccgagtacggtattccgtctattcccttgttcggcaccgcgggagaagcgctgtggcgcaaacaggccacgatgccgacgttcacacctgcggcggagaagaccgcctacatactttacacgtccggcacgacgggtaaacccaaaggggttagcgtggggcatggggcgctgctcgccacattgcgaggtttctggcagcagtacttccagggcagggaagcgctgaaaacgtacagcatgaccaaccccgttttcgacattttcggtcttgaatacggtttgccgttattgagcggcggctgcgttaccttgggaactcaccatgtcactgggctggattgccgtaagttcgatttcatccagtcaacgcccagcatgctggaaattgtcctaccggtattgcagggggacgaggaatgtttacttctggtcggcggtgaaaagcttgagccgcatttggcgcagaaggccctggctgttttcacggggctcgtcaatgtctacggtccgacggaaacctgcatttggtcaaccggtaaacattatcggcgtgccgcgacggatcgcgttttaacgataggccgccctttgccgggagaacgttgtctggtgttggacccggccggcagacctttgcctgtcggggccatcggcgagctctatatcgggggcagcggcgtggccgagggttatcacaaccagcctgagctgaccgcctcacgctttgtctcactgtcgtttgctgaggggatatggtatcgcagcggcgatcgcgcgcgcattttgccaaatcgtgaaatagcattccttgggcggcaggatcagcaagtcaagttgcacggccatcgtattgagaagggcgagattgagcaggttatattacagcacgagtcgatcttgcaggttaccgtgcaaatatgccaagtggcgggggatgggaacgtcggtcaggcgttggttgcctattatgtggcgcagggcgaaattaacgccgggcagttgaatgaacacgtcggtcgacaactgccgggttatatggtgcctgcctattggattgcgttgtctgccttgccgctgaacgctaacggcaaactggatgtgcgtgcgttgccgtcggttgacgccggtgaggcatctccagcggcgcagagcgaaatcgctacgccgctggtgaagcagttgcaggttatctggcaagaattgctcggttgcgaggcggtgggcgtcaatacctcgttctttgaactgggtgggaactccatcatgttgacccggctctatggcatgttacccgaccaggttcagcaaaaaatcggtctgatagatctcttccgtctgccgaccattgcccgcattgccgcgcatatcgaaggtcgccaacatgaagcggcgccggcaccgacgactggaccgatcaatgcccgggacgatatcgccattgtggggatggcgggccgtttcccaggcgcgcaaacgctggcggcattctggcaacggttatgcgatggcgaggcgtttattacgcattactcgcgcgaggcgctggcggcatcggttgactccgcactgctggatcatccgcattatgttcgcgcccaggggatgctcgacgatatcgatcgctttgacgccgatttcttcggctgtacggctcaggaagcgcgtctgatggatccgcagcagcgaattttcctggaatgcgcctggcatgctttggaagatgcgaactgcgatccgcagcgctttgccggtgatatcggcgtctatgcggccatcggcaacagcaactacgaaagagacgttgttctaccgaacatgccgcaggctgatttgatcgatcattaccagttgatgattcataaccaatcccacttcctggcgacaaaaacggcgtacaagttgaatttgaccgggccggcgatgacgatccaaacggcttgttcatcctcgctggtcgctgttcatcaggcttgtcgcgccttgcaggcgggggactgtcaggtcgcattggcaggcggcatctccattggtcaattagcgcgcggtggttacctgtaccagccagggatgatcttctcacctgatggtcactgccgtccgtttgatgcgcaagcggcgggaaccattgaaggacaaggggtaggtgttgtcgtgctgaaacctttggcgcaagcgctggcggacggtgatgctgtgtatgccgttgtgaaagggtcggccgtaaataatgacggacgggataaaatgggattcactgcgccaagcgagagccgtcaacaggcggtgattgccaaggcattggccgatgccgatgtcacgccggcggacatttcctatgtcgaagcgcacggcaccggcacgccattgggcgaccctattgaaattgccgggttgaaagcggccttcgccggacaacaggcggaacacgcctgcgcaatcggctcggtgaaaagtaacctggggcatttggatgtcgcggcaggcatcgccggcttgattaaaacggcgttgtgcctgcagcatcgcacgttagttcccacgctacatatgcagcgtgagaatccggcattaaaactggctgaagggccgttttatgtgaatgttgaaacccgcaactgggaaagcgccacagggctccgcaccgccggcgtcagcgctttcggcattggcggcaccaacgcgcacgttatccttcagcaggcgccgaacacgccgacaaccgcacctcggtccgctcagcgcaatatgctgtgcgtttctgcggcggatgacgcagctctcgaacggatgagtgaggctttggccgatcatttggcaacgcatcctgagcattcgatggaggcggttggctatgccctgatggcgcagcgacaccgctatgcatgccaacggtgggtatccggagattcacgggaagcggtcgtcgcgcggttgcgcgagaagggcgaaacgatggcccgacctgcgttcgaggcgcaggtggcctttatgttcccgggccagggcgcacaattcgtcggcatgacacaggcgttatatgacgccgaaccgcaattccgagtggaggtcgatcgttgcctcggattgctcgagccgatgatgggcggtgaaataacgcgggaagacgtattggcgaacggggagagcgtacaccacaccgcaatcactcaagtggcgctgtttgtgtatgaatatgcgttggcgcagtggtatcgcttcctcggtgttgagccgacggtgatgattggccatagcctgggcgaatatgttgccgcatgtatcgccggcgtattttctctggaggatgcgctcaagttgatgctcaaacgcggtgcgctattggcgcacaccgcaccgggggcgatgctggctatcaaacagtcggcggagggcgtaagcgaacaggctgccgcgttgggcgtcgatatcgccgtcgttaatgattcgggaagctgtgtcatttccggcgcggcgtcggcaatcgcctctttgcaggcgagcttgatcgcccaaggggtatcttgccatccggttaaggtttcgcacgcgttccattcgcgtttattggagcctgtgttggcagagtttaaggccgcactgcaagacattgccttcaacgagccgcagttaccgtttatctccaatttgaccggccagtgggcaacggcggaacaggtttgtcagcccgaatattgggtgcagcacctgcggcatacggtgcaatatgacgccggcctgcgtaccttgcttgaacgccgtgccgatgacaactgggtattgctggaagtagggccgcgtcaaattctgagtacgctggcgtcgcgccatccggcattggggaatgcggccgttgtcgtttcttcaccgcgcaacgctacggatgagcggcaggctgcgcagatgctgtggcgttccgttggcgtgctgcatatgtcaggtgtggaaatcaaccaggagcgtttctggcggtgtacggggcaagcgtctttgcgtctaccggcatatcctttcgcgcctcagcggcattggttcggtgtgatgaatgcacccgctcattcgcggccggccccggttccggcggaggcagccgtgcaccaaggggatatgcaacaacgggtggcaatgttgttcaacgaggttctggggtgtgagtcggtcgatccacagcgcgggttcttcgaactgggcggcgactcgctgagcgcattgcaactgattggccgcctgcaaaaaatgaccggtatacgtcttgagcttatggccatggaacagccgagcgtcgtgcaaatagcgcaatcgctagaggctcatgcgacagcgaagcctcagggcgaaagcggtttggtgaagctgcgcgacggtgaggatgaggggatgatgccacttgtgttgatccaccccatcggcggcgacatctatttctaccgggagttggctcaatgcttgggaagcagcagaacgatttatgccatacgttcacctctgctgaatggctcgggcgccttcgagagcatcgaacaattggcgggagagtatctggctttgctggagccgcatcttgagcgaggcgaatgttgcctggccggttcttcgttcggcggtattatcgcgtttgaaatggcgcggcagtaccaagagggaaaacatgtgtctctgccggtagtgatgattgattccccaggacagggaaatctgcctgcggccatgacggatgaacagattttggactacctgctttcatttggcctggtgtcactggacattgattgggatgcctggaaggcgatgacccaaatggcggataaaatccattatttatctgagatcaccaaaggaactgcggccgaaacgctcttttcctcggcgttcttacctcgttacttgagcacctggcaacggcataacgtgatgatgcagcgttaccacccgcatgcgttgatgagtgatgtgctgtttttctctcaccgtgaggtgattgcagattttcctgaaaatcaaagcaagttctggcatccctgggtgttgggccgcttcgaggtgcaggtaattccggggaaccacctgacgatgaacgcgggagaaggcgcggcaatgatggcggaaaaaatgacttcgtggttagggcattggacgctggcttga

SEQ ID NO: 429477 - DNA, 7131 bp, Serratia marcescens
atgaagattctgaacattcttgtcaaccacaccgtagaaccgttgcgcagccatattgtccgttacttgctggatgccggccactttgtctacttaatcggtctgagcgacgctgagcgaacgcgctggacaggttcgcagcacaacctcttttgctattccgacgttggcgatcagcgtatcgactatgagctctgtctcgaagaaagcgcctcggtgagaggccccatcgtccggttagccgttttcgccgatcgacaaaatgtgttgttccagattcatgctgaagaagacgggaatatcagggcgttagctgagcgtgagctgccgtggcgggaagcccgccgagcgttgtcgcagacggtgttgggcgagttgttcatcgatggcgtggtcatgctcagccgtgaggcgaaagatctggatattgctctgcccgaagggccaaaccgagttacggattggctggttgcccagcagagggtacagcaagagcagcgagcgctggaaaacgatgaaccgcgttatggctgcttcaacctgagggatgaagtgtctgccgttaacgatgctgcagtggttcaacggaccatcgatggcgttgcgcagccgcaacaggctttgctgttggctttccagttgcagtttctgctcaatgcacggcggcctgggctttatgctctgcaattgcaagataggcaacgcagcagcaaagtattacggttactcaacggaacggaaacatacgccgagctctctccttggttagtgcgggtactgcagggggacccggcgaacccattctacgaatcccatcatgacggccgttttttatctgtggttggcgtagatgtcatcatggatgagggggatgtcgacgcggcagcggccccgatcaggatcgtatggaacagcacgcgctgtacgctcagtttgcaattttacggcgaaaacccctttttcgacgttgtagccgcaaatatcgatgagtttatggcggcgctcgccacattcatgcgtaatgaaggggatatagatgcgttgaccggcgtgtctgaaaatagctaccaacgttattatgcgaaaattaatgccacgcaatgtgaatatccgagacagactatcgtcgggatgtttgaacaacaggcaagggcgcttaacgatcaccctgcagtgataacgaaaaatgaaacgctcagttatcgaatgctgcagcaacaggccagtcgcctggccgactatctgcaacggcaatatggggtagcggcaggcgacaaaattgccttgatgatgccgcgtgaggcggagttggcagtatgcctgatggccgtgcttaagctgggatgcgcctatattccgatcgacaaaaatgcgcccgtagtgaggacctattctattttggccgatgcccagccggcgttaatcatcggtgcgcatgctcagtcagctggcagcctgccgcaagggctgagttatttggattggcgtgaatatgccgcttctcctttcgctggggccgacggttgcaacgaattcccctcccaggctgaggcttcagcattggcctatattatttacacctcgggaacgacaggtaagcctaaaggggttgccgtagaacatcgcagctttgtgaatatcgccagcgatatttctcgacgcatgtctgtgacgcatcaggatcgttttctggcgatcacgacgttggcatttgatatttcaactctggaaatatttatgccgctcatgtttggcgccacggtggtattaaccgaccagaagacgttgttggcgaataatgacttgccgcactttatcgcgagtcattccgtgagcctgatgcaggggacgccttctttttggcatcaggtcgcgcagcaatatgccgagacaacgctacccgttcgggcattgtgcggtggggaagcggtgccgcatgcggtggcgcgttggttgtcagaaaacaccgagcgtgcgtggaatgtgtatgggccaaccgaaacgacggtttggtctaccgcggatgaactgttgcctggggttgatagcgtcaccattgggcgcccgctggcgaatacccagtgctttatcttggacgaacggcggcgtttacttcctcccggcgtgatcggggaaatgtatatttcggggttgggcgttgcgcgcggttactacggcaatgcgcgtcagacgcaagcaagctttttgccgaacatatgttccagcacgccgtcagcctggttcggtcgcatcatgtacaagacgggcgatcgcgtgcgttgtttgcccgacggcagatttgaatacctcagccgatgggataaccagataaaattgcggggacatcggatcgaactgggtgaaatagagtcggttttgcgaacctaccccgggatgcagcaggttgttgtaaatttacagccggccaaggaagaacaacaggcgttcctggttgcctattatcaggccaaatcgccggtggcacgccagcaactgcaggattatctggtgacgctgcttccggactacatgctccccagcgcttatatgtacctgcctgagatccccttgaatatgaatggcaaagtggatcgtaaagccttgccgcaggtacaagcgcaagataaagcgcattacgtagcgccgggaaacgagttccagcgatgcctgtgccagctattccaggatgtattggggagcgaaagcggacgaatcggcattaccgacgacttttttgctttgggaggcaacagcctgtcggccattcgcttggtaaatcgcataaacggtacgcttcagtgcgatctgaaagttaaagatattttcgaaagaaaaaatgtggccaggttaacgccattggtggccgccgggcgcggcagttttctttaccaagactaccagattgcacaatgtgatgagacccatctgtaccatcctttcccgctgaataatgttcagcaatcttattatctgggacgaatgaaaagtttcgatctcagcgaggtctctacccatatttataatgaatttgttttcgaccatattgatcacgaaaaattggagcgtgcctataatcaacttattgcacgccatcctgcgttgcgcaccgtatttgaagagggagaacagcgatttttaagtgcggcagcgcattacaaaataggctaccaccccctgagaaatgaagacgagctattggctttgcgcgccgagtactcgcacaaggtttacaaaccggattgttatccgctgttcgatattttcctgagcgagtatcaagggaaataccttctgcatgtcagctttgatgccattatcattgacatgaccagttttgaaatattattcggcgagtggattgcgttatatcacgacgaaaatctggcgctgccgccgctggatatcagctaccgcgattatcagctgcagtacgagcgcctgcgcggcagcgcattatttgagcgggcgcagcaatattggctgcagaaaatcgatgattatacgctggaggtcggattgccgctggccgcgcatcccgccaggatcgataagccgagcttccggcgtttgtctgcgacgatacccatgtcgagttggcaaaagatcgtcgacaaatgccagcgcttcaatattagtccgaccgctctgatccttgagctctacagcagaacgttatgttattggtctggtcaagagagcctttgccttaatttaacgctgttcaaccgtttgccgttacattctcaggtcgagcaaattattggcgattttaccgttttaagcctgttcaattaccaacgtcaaaatggcgttgcgatgagcgaacagctatcggctatccaccgcaccttgcttaatgacgtcgataataatttatttgacggcattgacgtacagcgtttattgaaacagcggcggaatctgcccgccaatacggttatcgcgccggtggtgctgaccagcgtgcttggcatgaacaataaagcgagcatgtttgaattgccgcttaatgaaggatatcgcggcgttcaatacgcaatctcccaaacgtctcaggtgtggctcgaccataaagcctacgaaaacgatgaagggttcgttgccgagtgggattatgtcgaacaattgtttgatgagaaaaccatcaaggccatgcacgaaggctattgttctctgattcgatgggtggcagaacacgattgggaaaccatgtcattcccgcagcctgaactgccggcggaacatgcggaagcggtcatgcgctggaatgccacgcaaagtacggtgtcggagcaaacgctgcacgggttgttcctttccagtctggaaacgccgcaaacggccgagcgcattgcggtgatcgaaaccgaaggcgaacgccactttacctacgccaggctggaacaggacagcaacacgctggggcgtgcgctattgcggcataccaagggcgaaaagggacgtattaccgctattctgctggagaaagggtatgcgcaggccgtctcaacccttgggatcatgagaagcggcggcgcttatctgccgttgcacatcgaatggccatgggagcgcatacgcgacattctgcagcaagcccggtgcgatatcttgctgctctctgctcagcagcgtcatgacctggcacatgagctgtcggcgttgccttcggatatcacgattttggtgttcgacgagatagtggcgccggcgcaggaacgtgcgtcgacggaggttgcctggccgatcgtcagggctgacgatctggcctacattatttttacctctggctctaccggtaaaccgaaaggggtagcgatcgatcaccagggggcggtcaataccatcctggctgttaaccaacgttggtcggtcggtcgggaagaccggatactggcgctgtccgagctgagctttgatctgtccgtttacgatctgtttggcttgttggccgtggggggcggtgtggtgatcccttcccagcgtgagaccaaagcgccgcaagcttgggtggccgcgctgcgccgacataacgtgaccctctggaactcggtgccgcaattagcgggcctgctggttgacgaagtcgaacctgcgacgcaggcgctaacccggttacggctgttcctgttgagcggcgattggttgccgctcaatttgcctcatcgcctgaaaacccaatcgccagacagcaagatggtgagcctggggggcgcgacggagggcagcatctggtccatttggcatgaaatcgatcgggtagacgcgaggtggaaaagcattccttatggcgtcgccatgccgaatcaacagatgtgggtgctggatgagtgggggagtgcttgtcctttcggtgtaaccggagaaatacatatcggtgggctcggcgttgctcagggatattggcaggctgaaacgctgactcgagaacgcttcatttatcatccaacctatggacgcctgtacaaaaccggcgatctgggccgctggtcggcggaaggctatatcgagttcctcggccgaagagatgcccaggtcaagcttaacggttatcgcgtggagctggaggatatcgagaataacttgagccaattacctgggatccggcagacgatcgtgcggctcagcgagggtgacctcatggcttacgttgttcccgaggcgcaacagccggtgccgctctattttgctaaccgcgacgcattcgtgctttcgctgccggcgttacgtcaagatctgcaaccttcgcgagcgataccctatccgctggatgaagcggtttaccgtgcccgcaagagcactcgccagtttaccgcggaggcgttatccgccgaaaccatcagcagtctgtacgaagcgctgccggggtggttgacgcaacagatggcgcaagagggaagcgcgctgccgcctgcgtctttggccgggctgttggccgtatgcgccgctttccgttcgccgcagcgcgcgttgccaaaatatcgctatccttcggccagcagcctctatgcggtgcaagtgtatctcgggctcccggcggcgatgggagaatatgccgcgggttattactactaccatccgctggaacagcatttgtaccaggcagaagcgtcgggagaacacaccgggccttatctggacttggtggttcggtgggaaaccatcaccgcgttatatgccgagcgcgcattcgctttggcgcagatagaagtcggccacatgttggccttgctgactgagcatctccagtctttgggcgtcgcttattacgtcaagcccgctgacgccgtttcacctgacgagggtgcattagcgtgtcggatccacctcggcgtttgcgccgtcacttcaccaccgcaagtcagcgtcgatttcagcgtgatggaaaacgaggggggaacctatgtcgctcgcgcgtcagggcgacactattgcctcggtgagacctccgtgctggccgaatcatcagacgtgtacggggtgttgcagtcgtctcaggtgttgttgcaggcccatggcgctaagaacgcgtgccattatcaggccagtggctggatgatgcagcgatttggcgcgctcgccgcccagcggcgaattggcggctgcattcttggcgtcacgccggccgaggacacgttgtgcagcatggcgatagggtatgcgcgggccgaggatgaaccggcctttgacgttcctgcgctcactgtctcgatgacccaggcgatcagacggcatttggcgcgtcgtttgccggactatatgttgccgcagcacgttactttgatcccggaaatccccttgtctaacaacggtaaggtcgatacatcacgcttgccgaaagtcgtcaagcacagcgaatgtctggctccgcgcagcgatgatgagatacggatgcgccgactttgggcggagcttctggacaagcgtgaagagcgaatcggttgtgaccaaagcttcttcactcaaggggggaattcgcttctggctatgcgactggtacgcaagatcaacctcgcgacgggaaccgagatgcgtctggaagacctctacaacaacaatacgattcaggaaatggcggcgtgggtcgccgggcaaccttgtggcaacggcagagaagaaggggcgctgtaa

SEQ ID NO: 429478 - DNA, 912 bp, Serratia marcescens
atggatagtttcgcctcgcataaaacacattctaaactggcctatttgactgaaacaaagatgttggccgatgaaataaaagcgcgtttacggaatagcaattcgcttattcttccattagagagaaatcttgaactggtcgatcaattgacggagtttgagcttggtcgtttcctcctgcataaccgcggcctcaatggctactggacgtcttacattttccagcatcccgccggaaaacccgccgaacatgttttggaagactggcttctgaatcgctcgttgctgtgccgggcgcgcgagcgttactaccgttatcagaccttgctggctgagttgattacgcaggcggagacgctggcttcaatcccgtgcggggtgatggatgatttattggatttggattacagcggccatggcgcggtgcaattgaccggcattgatcttgacccggagtcactttatcacgccaacgaaaaggccaagcgcgttggcatggcgaaccgttgccgattctcgcagcagaatgcctgggagttaaaagaaaaaaacgctttcgatgtgattaccagtaacggcctgaatatgtatgagtctgacccggacaggctggtggctttgtatcgtcggttcttcgaggcattaaaaccagggggaaccttgttgctcagtttcctcacgccaccgccggaaaagaacgcgcccaccggtgagtgggataaatatgaaacgccaatggcggaccttttgcaggagttcgcgatctttggcgacattattcaggctacctaccttaatttcacttcagaagcagagatcaggcaacagataacccaggcagggttcacggttaaagatatcaactacagctcacgcggcgtgttgccgatcctcgtggcggtaaaaccctga

SEQ ID NO: 429479 - DNA, 957 bp, Serratia marcescens
atggaaaacgaaaccatggtttcgaagggcggtttgtctgccgcctatactgataaatgggaacagcgcgcatcaataagaacccgccccggtaaatttatcgactttactattcctggcgcatttttccccgaggagaatcagccgatatttttggctgacatgatgagcggcatggacaatgagaggaagtcaaaaatacttactcagtcattgtttaaatacctcaatgatatcgttaatcttgagatcaaactcattaactcagcatgcaataaaattatctacggcgatctcgctgtcaaatttgacgaacagattaaattgaatgcctataccgtcatcatcgatgagtattaccatgtttatatcgccagacatatgatcaatcaacttagagagcatgatgccgatctcggtgcgctgagttacccggattctgacgcctatgtggccgttacagaggtgatgaaacggttacctgagcgctgccatgacattttcgagatcattgcggtgtgcattttcgaaacgaccctggtgagagagctggtggagttctttaatagtgacggcgttcatccatcgattaaatactatgttaatgaccatatgaacgatgagtccagacactatattttctttctcgaattacttggctatatctggacgaggttggatgaaaacgatcaggcgatgatcggcgggcagatcgctgatttcgtaaaaatgtatttgaatgttgaatcagagaaacagtttaacattgagctgttatcgaagataactcatgattgcgaagccagccgggagtcaatcaataaggtttatcgcggttttgaagtgacgcctgatgtccccattgttaaaaacgtgctaatggctttgaaacgaaccggcattctgaattcgccgatagtgcgccagggattcgaaaatattggttggataatttaa

SEQ ID NO: 429480 - DNA, 1182 bp, Serratia marcescens
atgttgacaggaaagtgggtgcctctgccctttatccttgtggtttccttattggctgggtgtattgaagtggatatgtccgttcccagctttccggatatggctgccagtttcggtgtttctgaagggcatattcagcgtacgatcacctataacttcttgggatttgtgtttggcgcgttgatttatggcccactgtcagagtcgattggtcgacgcaaaaccatgttgatcggtggggctatcatgctgttaggtgctctgggatgtacctacgccacttcaatcgatcttttgatgttgtcccgctttattcaggggttgggggcttgcacgccggtggtagtggcttacgcgatcatcgcagaccgttatcaaggggcggccatgtacagcatgatcggtctggttaatgcctgtatctcgattttcatgtcgctagcgccgatcgccggtggttggattaatgagcattgggggtggagaggaaactatgcggttgtcgcggtgatcaccgcagcggcggtactgctggaattgttgttcctgccggagacgaagaaagaaaaaacgccattcgatctcaaagccattgtgggaagctatgcccggctgacggcgagtttccaattcatgcgattatcgttgattccttcacttttctttgctgcttatatggtattcatcgcctccagcgcttttctttaccgtgaaacctttgcgttctcgctgtcggcatttgtcgttcacttttttatcatcgtggcgtcattttcaatccccagcctcttttccgcccgtattatcgccgcgtttggtggcgatcggcgcgctgagaaaatcggtatggcgttagccatcgtcagcattctcgctctactgacggcgacaacgccttgggctattaccctgctgatgagcctgttctgcttcggtttttctatctgctatccgacgctgttcgcacgttccatgagtgtctacccggaaatttatggtgtggcggcctcctatatcatgagcatgcgctcgctgctggttgtggctatcacggggatggccagctacgtctttatcgggcggccggaggaaatgagctatgtgatggcgagtgtgataggcgttgtcgtgttgttgtctatgttgagtatcgtggcatccccaagcaaagctgaagaataa

SEQ ID NO: 429481 - DNA, 1080 bp, Serratia marcescens
atgtcgcctcaacgtataacactgcccgccgcctcggccagaaccaaaaccctggccgaagcctgtatccgcaagatgacctccgtcagtcaaaaagccggcgcctcgcgcccttcttccagcgcctggacggcgcaaacgctggacgaacttaacgccagcggcgacatctggcttatcgacggcagaaggcgcaccgagccaccgagttcccactacgccaccgcctggccgctctggtttggccatcaatcagagcgttatgagaagccgctgttttacttcgtcaacacgccctcggtggacatgcttcgcgggcttgagccggaaaccaatcgtaaagggattttcatcagcgatgcggatactggcagtgccgatttgcccaaaggcgttcaggcctggttcccgcttcagctcacggccatgccgggctggttgcctttcgatccggccaatgcccgagaaaccggcgcgatactccatcacgccctccacgcgctctatctggagggaacgaggaagatggtgtatctcgcgaccaacgcagacaatggccccctctcttcaggggaaccgtttgtcgcagaacaggcgttcaagggaatgtatcgtgtcgccgccgcggcagactcgccgttgcaggttcgtctgtgcggcgctggccgagcgctcgcccgcgttcagcaggcggccaaggtgttgaaaaactgggggattgcgtctgaaatctggagttgccccagctacacgcggttggcgcaggacgccgaactcgccgacatgcagcgccaggacagcggcggcgaatgccatctgaaaacgtgcctgggtaccgggaatgcccccgtcgtcgccgttaccgactactcgcacctgattgccaatcagctcaggcgattcattcccgcgcgctttgccgcggtgggctcagattcacgggtgcgtggcgaaatccactacccgcaggcggaatggattgcgctctgcgcccttaaactgctggccgacgagcagaaaatcccttcggcgctgatcgccgatgcgctgcgcgttctgcacatcacgcccgatgcctga

SEQ ID NO: 429482 - DNA, 2676 bp, Serratia marcescens
atgaaccaacctgcggtaaaagcagatctcgacccacaagagacggctgaatggcttgaggcatttgaaggtgtcactgacatcgacggccgtgaacgcgcgcattttttgttggaaagaatggccgaagccgatcagcgaaaacacggtgatttcttcagcatggtcaccacgccctacgtgaatacgatcccggcctataagcaaccgacgtatcccggcgatctggccgctgaagcgcgcatcaatgcgtttattcgctggaacgccatggcgatggtgctgcgtgccggcaaacattccaacgtcggcgggcatatcgccacctaccaatcggccgcggtgctttacgatgtggggttcacgcactttttccgtgggcgcaccgatgatttcgccggcgacatggtgtatatccagggccattccgcccccggcatttatggccgcgcctatctcgaaggccgcatcgacgaggagctgctcgacaactttcgccgcgaatccgcgcgccgcggcctctcctcctacccgcacccgcggctgatgccggatttctggcaatatcccaccgtttcgatggggctggggccgctgaccgccgcctaccaagcgcgctacatgcgctatctggaataccgcgagttgaaaccgcaccaggggagaaaggtgtgggcgtttctcggcgacggcgagatggatcagccggaatcgctggcggcgattgcgctgggcgggcgagaaaaactcgataacctgatcttcgtcgtgaactgcaacctgcaacggctggatggccccgtgcgcggcaacggcaagattattcaggagctggaaggcaccttcaaagccgccggctggcaggtgatcaaggtgatctggggcagcggctgggacaaactgctgcaaaaagaccgctccgggctgctgatgcagcgcatgatggagtgcgtcgacggcgattaccaaaccttcaagtcgcaaagcggcgcctatgtgcgggagcacttcttcggcaagtatccggaattgctcgagctggtcgccgacctgagcgacgatgagatctgggcgctgcaccgcggcggccacgatccgcaaaaggtgtacgccgcctaccatcaggcggtgcataccccgggcaggccgacggtggtgctggccaaaaccgtcaaagggtttggcatgggggaagccggtgaagggcagaacatcaaccaccagctgaaaaaaatgagccaggatgcggtaaaagccttccgcgaccgtttagggctgaccatctccgacgcccaactggcagagatcccttacctgaagcccgaacccgacagcgcggcggcgaagtacatcaccgcgacgcgcaccgcgctgggcggctacatccctgcccgcttcggccaatccgctccgctggcgataccggaactatcgcgcttcgacggcctcctgaagggcagcggcgaacgcaacatgtcgaccaccatggctttcgttaatatcctcggcacgctgctcaaagacgtcaacatcggcaaactgatcgtgcccatcgtgccggacgagtcgcgcacgttcggcatggaaggcctgttccgccagattggcatccattcctggctcggccagctgtataccccgcaagacgccgggcagctcagctactataaagaggccaaagacggccagattttgcaggaaggcatcaacgaatccggtgcgatatcgacctggatcgccgccggcaccgcctacagcaaccacgatgtcgcgacgatcccgttctatatcttctactccatgttcgggctgcaacgggtgggcgatctcgcctgggcggcggccgacgcacgcaccaagggtttcctgctcggcgccacctccggcagaaccaccctgatgggcgaaggcttgcagcatgacgacggccacagccacgtgctgtcttcagtcatccccagctgcgtctcctacgatccgacctatgcctatgaactcgcggtgatcgtccagagcggcatgcgcaggatgttcgttgaacaagaggatatttactactacatcaccttgctcaacgagggctacccgcagccgccgatgccggcgggcgtggaggacgggattatccagggcgcctatttgctcaaacagagcgaaacgacaaaccaagagagcccgcgcgctcagctggtcgccagcggtgccatcatgcgcgaggcgctggcggcggcggagctgttggcggcggactttggcgtcgccagcgatatctggagcgccaccagcctgagcgagctgcgccgcaacggcatggcggccgaacgctggaacctgctgcatccggaagaaccgccgaaagttccttatattcagagcctgctggcggcgcatcccggcccggtggtggtggtgacggactatatgaagatcgtcggcgatcagatcaaaccgttcttgcccgaccgcacctttatcgccttgggcaccgacggctttggtcgctcggacacccgcgaggcgctgcgtgagttcttcgaggtcaaccgccatttcatcgcgctcgccgcgttgaaactgctggctgacgaaggccgtatcgcccgcagcgaggtcaaccgcgccatggcgctgtatggcatcgcccccgataagccggatccggcggcggtgaagtaa

SEQ ID NO: 429483 - DNA, 942 bp, Serratia marcescens
atgaataccctggaaaatctgaggatttttttgcgtgtggcccagacctgcagcttcacaaaaacggcagacgatctgggggtgaataagagtcgaatttccattgttatccgccagctggaagacgtgcttggcgtacgcctgttacatcgaaccaccagggcagtgcatctgacggaagacggcttggcgttttacgaacgcgcagtagaaatactctcttcggtagatgacctgcagacgatgtttgtcgaaaggacggaactgaaaggcaagctgagggtggatatgcctacggatatagccaacagcattattatccctaaactccccgattttttttcccgctatcccggcattacgctggaattatcttgcaccgaccggcgggtggatctggtacaggaaggcttcgactgcgttgtccgggcgggtgccgtttacgataagaacctggtggcgaaactgattggagaaatgcccgtattcaacctcgccagcccggattatctggcgagaaaaggcacgccatacagtatcgatgaccttctcaagtatcagcatgtggccgtgcactatacgccgaatattggtagtaagccgatgggctgggactacctgaaaaacggtaaatatgaatatttaaatctgccaggatcgctgaagctgaacaatgcgcagtcgtttattgctgctgggttggcggggattggcttaatccagtcaccgatgcttggcgtgcataaccacgtcgagcgtggcgagctgctgcagattctgcctgattgtgagcctgagccgatgaagttctggttcgtcgtcgcgcatcgtcataatttgtcccgtaaagttaacgtattcatggattggataaccgagcagctcgcaccgtggcttacgaagaagggcgcggtacgggataacacgccgattaatcgctga

SEQ ID NO: 429484 - DNA, 945 bp, Serratia marcescens
atgacacagacaacgtctacgccaagccgtgaagaagccgataccatcgttgaaagcatggttgctattttcagtaaacctatccgttctccggtcatcggcaaacccactgacttcggcttgcagtatgaagacgtctttttcccagcgttggacggcgtgccgctggaagcgtggttcatcccttgcgtaggttccgacaaggtcatcatctgtaaccaccctgtgtggtgcagccggactggcctgcctgccgaccgcgagccgtggcgttccatcggcgctgcaggcggtaacgattttgctttcagcttcctgccggactataaaattttgcacgatgcaggctacaacgtactggcttacgacctgcgcaatctgggtctgagcggcgaagctaacggcggtatcggcagcatcggcgtgctggaagcgcgcgacgtcgtggggtcattgaactatgtccgcagccgtcctgacctgaaaggaaagaaaatcggtttgttcagtcgctgcatgggcggtaacgcgacgttctttgcgatggcgaaatatccggagcagttcaatgatgtccgttgtgtggttatgccacagccgatttccatgcgtgccgccgtcggcgtcgcgacggaattggccggcatcccggaccgtcttgatgaaattgacgaacgtctggcgatggtcaccagtttccatctggatgagatggacccttccgtgcctgcgcggaccaacaccagcgttcccactttcatctatcaggtacatgacgacgtgatgacccggccatccgatgtgcagaacattttcgacagcatgccggttaaagagaaacagctgcactggatccgtaataccacccaccgctgggatggttatctgtacttccaacgcgagccaaagctgatgttggactggttcaataattacatgaactga

SEQ ID NO: 429485 - DNA, 186 bp, Serratia marcescens
atggtcgaccatactcggaagcatagaaagaaaattctgcaagcggcggtgaacacgcggcgcgccggcctgccgttcgcagcggatccccctgtcgccccgccctttattggcttggcccatcagacggaggcggtgctggtgcacctagtcggccatgatgacgtacaggagaagcataaatga

SEQ ID NO: 429486 - DNA, 333 bp, Serratia marcescens
atgaagattattgagataattttatatactttaaaacctaatagtggattacgatttcataacatcatgaaagatattagtataccgctacacatacgctacggaatagatgtcatcgattatgggaattccctacacgctactgattcttattatttaatacgcgcttatgacagtttggagcatctcaaatccgcccaagaagagttctataatagttctgagtggagaaatggtccgcgagaatccatcatcgaattgattgtcgtcagtgttaaatcagtgatggagtgggaagatagagttatcaaccaattacgagccgatcaatag

SEQ ID NO: 429487 - DNA, 1050 bp, Serratia marcescens
atggagacaggcccagagaattcattcgaaaaactaattaacataataaagaaaaactatggatggattataggtatcttgtcaccgatatcaattctactatgcttcctaaccttgtggacttacacccggtacattggcagacctgatatatttggtgaatctattgaggcaaccccacaaacgatattaatacttttcactgcaacactctctttgatggcttttactttcttgattttcgccccctctatctttcttgtacaaggcagattaggattggtcataagcaataataacagaaaaaaatcagtctggtatattttagctattacagtagtaaatatgattttactcgccctatctttgttaaactcctggacatcaaataactctgcgctctggctagctccaggtgccatatcatcgttacttttaacttggttgttattgaaaaaaaatccttatctcaccactggattttggacaagcttgtttatcacgggaagttctttatttatatcagccgcctgttctacgtcttcattactactgatatatgccgacaatcaagatagcgcccccttcttactgatattactgtggctttccattatgttcctgtctcttacacctggactgatctatctttattccgaaagcaatagcactgccattaaaatgaaacgaatctctcttggtataagcaccgtcacaatgttgatcattttattcgcgccatcattaattaatcatgtttctcatagggctatgagcattgcccggttaattgaccttcaacccagatattatcaagtatctcaaagtagctataacacctccaaccttgacaaagtagaatggaatattgacaacatcaataaaaacagctatcgaattatagcgtttagtctatatagttttggcagcaaacgtttattatgtccattccccttgaataaaaaacccataccagaattgagaaaatatactcaccaatgcatactctttgataaatccgcacttaaaacgttgaatagatttatataa

SEQ ID NO: 429488 - DNA, 471 bp, Serratia marcescens
atgggttctgaaaaaaaagacaggcatagcggccgacagggaatgggattgcccgacggtgcgctttacaggatgacggaggtggtgcgtcaccgcgaaaaacggctgtctgcgttactcgcattgcaagggctcagcctccatgagtggcgcgcgttgcgtattctctacagttttccgggcgacgtggccatgagcgaggtgatagcgcattcgcagaccgatcgcaccgcgctaggccgtacgatcacccaactggttaatcgggggtgggtcgcgcgcttccccgatccggaagataagcgcgcggtatatctgcgcgtcatgccggcgtctcgccccatttttgaccaggcgaggcaatgggtggcggattatgacgcccagctgatggcctgcctggatgacgcggggctcagtgccctggatgacgcgttgcaacgcatgatgttgtttatcgataccccttag

SEQ ID NO: 429489 - DNA, 1488 bp, Serratia marcescens
atgagtttgctcgattgcgcactggattttcgtcacttcattgaggagttgcgtcgcagaaacgatttggtcgacgtgcatcagcaagtttccgccgacctggagatagcggctgtctgccgccgggtctatgagcaacggctttcggctccgctatttcatcatgtggcgggcgcgatgccgggggctcgcattcttggcgcgccggccggcatgctcgcttctgcggaacatgcctattctcgcctcgccctccattttgggctgtcgccagagagctccccgcgagatatcgtggcggcgattcgccgggcggtgaaggcggaaccgcttgcccccgattattgttcgaccggcccggtgaaagagaatatttggcgaggtgacgaggttgatctggcacgcttccctgtgcctctgctgcatgaacgggatggcgggcgctattttggcacctacgggttccatgtcgtgcaatccccggacgggaagtggcacagctggggcatcggcaggctcatgatgctcgatcgcaatcgtctcaccggcccggcaattcccacccagcacatcggcatgatccgtgaaatgtggcgtcgggaagggaaacctacgccgtgggcgatggtgctcggggcgccgcctgccgcggtggcggtcgcggggatgccgttgccggccggcgtcagtgagcctgactatgtcggcgcgttgctcggtaaaagtgtcacgctcacccaagcggaaaccaacgatctctgggtgccggccaatgcggaaattgtgctggaaggtgaaatcagcctgacggagacggcgctggaagggccgatgggggagtatcacggctatcaacaccagcagggccatgaacagccggtgttccatgtgcgtgcggtgacgtttcgcgatgaccccattttgccgatttgcgtcgccggcacgccgccggaagaaaatcatacgatctggggcaccatgatatcggcccaactgctggaaaccctgcagagcgcggcattgcccgtcgactttgtctggtgttcctatgaggcggcgacctgttgggcggtggtctccgtcgatatcgaaaaactggccggaatgaataccaccgcggcggattttgccggcaaggtggcggaagtagtcttcggttcgcatgcgggctacttgatccccaaactgattctggtcggcaatgacattgatattgtcgatatcaatcaggtggtttgggcgttggctacgcgctcacatccggcgcgcgatcattttattttcccggacgtacgcgagttcccgatggtgccgtacctgtcggaagaagacaaggcgcgcggcagcggcggcaaagccatcatcaactgcctgttccccgagcagttcagcggcgtaacacgtgcgagtaccgcctctttcaggcactcgtatccggaacaggtcagggtaaaagtcgaggctaactggaaacagtatgggttctga

SEQ ID NO: 429490 - DNA, 1269 bp, Serratia marcescens; identical to SEQ ID NO: 185906

SEQ ID NO: 429491 - DNA, 1230 bp, Serratia marcescens
atgactgcgactaatcaatttgctgcacatgttggtctggactgggcagataaaaaacacgatgtctgtgttcagttcaaaaacggtgaacgcgtattccatgtgattgaacatacggcagaagcgcttgatatctggcttactgagttacaccagaaggtaaaaggcagaatcgcaatagctctcgagctgaagaagggccccgtggtatatgctcttcaaaaatatccctttatcaccgttttctccgtccacgctttgtccctggctcgttaccggcaagccttctcacccagcggcgctaaaaatgacccgcaggatgccgagctagcattagagttaatgctacgctatccccaaaagataaaagccattgaacccgacaacgcagatatccggttactccagcaattagttgagcagcgccgactgctggtcgaagacaagcgtcgctttgtaaatcggctcatcaacacgcttaagcagtattaccccctgcccctggaatggttctcccatcgggacaattcactgttctgcgagctaatcattcgctggcccagcctgcaacaactcaaacgggctcgcagcgatactgttcgtcattttatgaacgctaaaggtggtcctgctgttgcatataccgaacagcgggttgcaagtattgccaatgctattccactgaccacagataaaagtgtaatagaggcaaatgcattgatggcaacagcactcgcatctcaaatcaaactggcaggcgacctaatcagaacctacgacgaacgtattgaatccttattcggtacgcttccggatgcagaactgttcaaatcacttcctggaatgggaccgtgcatgggtccaaggatgcttgccgcactgggtgataaccgcgaccgcttcaacagcgctgaagaaattcaaaactacgcaggtattgcaccggtgacagaacgaagtggccagaaatcctgggttcactggcgatggcagtgtgctaagttcgtcaggcagacttttgttgaatgggctgccaagacggttaactcatcatactgggccagactttattatcagggactgcgagaaaaagagaaatcgcaccaatctgcaatccgggctcttgctttcaaatggataacgatcatttaccgctgctggaagaccaaactcggtacgatgaagcgaagtatttgctggctctcgaagcgcgacactcgcccttactga

SEQ ID NO: 429492 - DNA, 795 bp, Serratia marcescens
atgccagttaataaaaaatctgtgacctcgccggaagagtttaatgccgatgatttcagtcaggccgctatcgccctgcatgtatcatcgtcaggtgagtatgccgggcaaagtccgcacgctcatcgcaaggggcaacttattctctctttgcgcggtgcagtgcgctgtgaggttgaggatgcgctgtggcttgttccaccaggacatgccgtctgggttccgggagaaatcccccaccgttgccggatcacgaagaatgcagacacgtgccttttattcatcgagcccggcacggcagcgatgccgaaaatctgctgtaccatagcgattacacctctggttcgcgagcttgttctgtatcttgcagagcaggaacatgcttattctcctgacagtaaaaccgccaggcttgcagcggtgctgctggagcatattccggatgtgccggttgaagcactccatcttcctgtatcagatcatcctaaaatccggattatggctgaggcactttttaatgagccagatgaccggcgaacgttaaagcattgggctgctcatctggccatcagcgaacgatctctggccaggctgataaaagaggcgacaggaatgagctttggtcgctggcgtcagcagctgcatttgatgattgccctgagccatctgtctgaaggtcagcccgtgcagcgcgtagccggaacgctgggatatgattcggtcagtgcgtttattacgatgttcagaaaagcgctgggtaaatcaccgacgcaatatttttcttccctggattag

SEQ ID NO: 429493 - DNA, 1191 bp, Serratia marcescens; identical to SEQ ID NO: 185903

SEQ ID NO: 429494 - DNA, 606 bp, Serratia marcescens
atgacaggtaactttttagagcttgccagaaaacgacgcaccatttatgtacttggaaaagatattcctgtcccggagaacgagctgatcggcactgtcattgaggcagtgaagcaggctccttctgcttttaactcgcaaagctcaaggcttctgattttactgggtgagcagcacgctcgcttatgggaactcacgcgtgaacagttacgcaaaatcgtgcctgcagaaagtttctccggcacctcagataaaatagacgggtttgcagcggctgccggctcaatactttttttcgaggatcaggatgttgtcaagtcactacaggagcagtttgcggcctatgcggacaatttcccggtatggtctgagcacagcacaggtattgcacagtatgctgtctggctggcgctggctgaaaaaggaattggtgccaacctgcagcattataatcctctgatcgatgaagatattcgcactgagtggaatgttcctccatcatggaaactccgcgcgcatatgaatttcggtgccatcctttcacccgccagtgaaaaagcctttatgagtgatgaaaagcgattcatcgttgccaaacagtcataa

SEQ ID NO: 429495 - DNA, 576 bp, Serratia marcescens
atgaaatatcatgtactttctgcttcactgttattttcacttctctttactactgctgcacaggcgaaaacagcgagttataaacttgatgaatcgcatacgtctgtggttattagctggaaccacctaggtttttcgaacccgacggcatcccttcatcatgtagatggcacagttaagttcgatccggcaacaaaaattttatcactggttgatatcaacattcctgtagccagtattgataccggcgttccagcactgaataaagagtttggtcagccagattattttgatgcggagaaatatccggtcgcaaattttaaaagcaccagcattgaaatgaatggtgataagtatgacgtacggggaaatttaaccattaaatccataacccggccggttattcttcatgcaaccctgaacaaagcaggttttcaggctatggagaagaaaaatgcggtaggttttaacgccaccggtgtgattaagagatcagactttaaaattgataaatacgttccttatgtaagcgataatatcacactgaccgtgtcttcggaggcgtattcagattaa

SEQ ID NO: 429496 - DNA, 573 bp, Serratia marcescens; identical to SEQ ID NO: 185899

SEQ ID NO: 429497 - DNA, 516 bp, Serratia marcescens; identical to SEQ ID NO: 185898

SEQ ID NO: 429498 - DNA, 966 bp, Serratia marcescens
gtgaaaattagaaggttaggtagccaggggcttcatgtctcggaaatggggctggggtgcatgggcatggaccatggctatggctattcagttgagatccgggaaaggacaaagctgatagacaaggctgtagagctgggctgcaaccttttcgacactgcccccatttacggatttgaaaacgaaaaactgctgggggtagcgctcagcaaacacagggacaacgttgtcatcgcgaccaaattcggcgtgacaggaatggaaaatagtgatggacagctggtgccggtattagacagccgtccggcatctgtcagagagcaactggaaggttccctcaggcgcctgaagaccgaccatatcgacctgttttatcagcatcgtgtcgacccaaaagttgagccggaagtggtggcaggattaatgaaagagctgatcgcggagggcaaaataaagtactggggcttatccaatgcgcccgtatcttacatacgccgggctcatgccatctgcccggtcactgcggttgaagaccagtattcaatgatgtggcgtaaacctgaacaggatctgtttaaggtctgcgatgaacttgatattggttttatggcctacagcccgctgggtaatggattcctgagtggtcaggtcacagctaatacaacctacggggaaggcgattaccggggcatgatggggcgcttcaaaccagaggtgatggaaaataaccagacgcttcttaagctaatcgctgaaattgcagaaagaaacaacgcaacttcagcacagattgttcttgcctgggagctggctcagaagccttacattgtgccgatcccgggaacaacaaaactacaccggctggaagagaattttcacgccgcaaatgttcagctcagtgacgccgaattaaatgatatcaacgaagccttatcccggcttgaaattgacgaaacattcttctga

SEQ ID NO: 429499 - DNA, 846 bp, Serratia marcescens
atgaattttcgcgaagcggcagtcaggctggccatttctccatccgtggtgacacgcacgattgctgatctggaacatcagcttggcgaaccgctttttaagcgcaatacccgatccattgtgctgaccagctttggtgagtttttcttgccccgtgccatgcggctgcttgaagactcagaggcccttttccagacggccagagatgacaatgagatgaagggtgttgtgaggatcacgctattccggtttcccggccacgagcaggtgttatatgagcttctgaccgctctcgatccctatcctgagctgtttattgactggcggttagacatgatgaagctggatactgtccagaaccgtattgatatggggatccgtatagagcgggagccaaacccgaattttatcgtcaggcccattacgctggttcatcatgccctgatgacttctccccggctcattgacaggctgggcgcaccgaaaaattttgaagacctgcgtcagcgttaccctttcagcggtctgcttaaccctgaaaccggcaaggtgtttgaatttatgctcgacggcgtcaatacctttattccccggcacctggagttttttaccaccgactcccagtctgagattcaggctgcgttaaccggtaaagccgtgattcagtcgagtaatctggcctgcagggaataccttgaagacggcaggctggtgaatgtcctgccggaactgaaactggaaacctggcagctttatctttaccggccctatcagaccctggtaccacagcgcatcaggaccgtttttcacatccttgaaaatattttactcagacactttagttaa

SEQ ID NO: 429500 - DNA, 888 bp, Serratia marcescens
gtggatcgtattcaggctatgcaggtttttataagggtggctgaggccggaagctttgtccgggcagcggaaacactgtccctgccttcttctactgttaccagcaccatcaaaaacctggagaaatatctgcaggtgcgtctgctgaaccggaccacaagacgtgtcagcctgactccggaaggtatgcagtatctggcgcagtgccgggaaattctggccttaattgaacatacggaagccagtctggccgattcgaacaggcgcccccgtggtcgtttacgcgttgatatgcccggcggtatagcgcacttcctcgtgatgccaaacctgaaagagttctacagccgttatcctgatatttacctgatgatcggcgtcagcgaccggcaggttgacctggttcaggagggcgtggactgcgtgatcagaaccggagagttacttaactccacgcttgtagcccgtccgctcggagaatttcgctggatcacctgcgcctctcccgattatctcagggagtacggtattccgcagtcacctgaagatttatctcatcaccgggctattcattatttttccggacaaagccggcgtacagacgaattgcgttttgtaaagggaacagaaacgctgtccgtacccgtcagggggcaggcagccgtcaacgagacgggactctatataaaaatgtgcctcgaaggattcgggctggcgcagcttgctgagaacgttgtagcagaacaccttcagaaaggaacgctggttgaagtcctggccgactggcagccgtcgtctgttcctgtcgcattgctttatccccatcagcgttttctttcacccgccgtacgtgcatttgcagactggatagatgaaatattcagttga

SEQ ID NO: 429501 - DNA, 1398 bp, Serratia marcescens
atgaccgattactgcagaaatattgttaacaatcagacggcaaatgctccggtaacgctgatcagcggtgcaaccatactgagtatggatgagaatgttggtaaccatgaacgtggcgatattcttgtcacagggtcaaccatcaccgccatcggtaaggacctgaacgccgagggtgctcacgtcattgatgccacaaatatgattgccatgccggggatggtcgattctcatcgtcacgcctgggaaggccagctgcgccgcatcaacccaaacgccacctgtctggacgactatagcaatgccacgcacttctcgtttgcgaaatactatcggcccgcagatatctatgtcggtaatctcctgacggcgctgggcgcgattgatgcgggtatcactaccatgattgataactcgcacaacagccgtaccgcagcacatgcagacgccgccgttgaagccctgcttgatgccggaattcgcgctattcatgcttccggcgcgccggtagcaggcgaatgggacagagcgcactggccgggtaactggcagcgtctgcaggaaaaatatttcaaagacaatcctgagggactggtttctctgggcgtcatggcccagctggagccggaattgtgggccgaggcccgccggctcgggctgccaatcgtgaccgaattctttggcgctgaaatggcttcagagcttaaatcactgcatcagcagggcctgctgggcccggacaatatcttcaatcactgcacagcactgcctgatgagggctgggaaatcctgcgtgaagccggcgtacgagtgaacgtctgtccgcgctcagattcgcactatggcattgaaagcgggatgtttgccattgaggccgcgcagcgccatggcatcaatcctggcctgagcgtggataacgaaacgtcttacagcacagatatgtttatggaaatgcgcgtggcgttctatctgcagcgagtaatgggtatgcataagcagcactgctgtgattcagggcattctctgacaacgctcccggcagcgcagctgctgaagtcggcaaccgtcgatggtgcgacctgtgccggactacaggataaagtgggtagcctgacgccaggcaaacaggccgacctgatcctgattaacgctgctgatctcaatctctatccgaacgggaatgccttcgggacggtggtgcatgcaactgaacgcagcaacatcgatactgtcatgattggcgggcgcatcgtcaagcagaacggcaaagttctgggcgtggacagcgagcgtcttcgtgctgccatcgatgaatcacgcgaacaccttttcgccgccgccgggtatgagccggacatctttgcggagaaattcctgccgctggtacaggcaaactga

SEQ ID NO: 429502 - DNA, 861 bp, Serratia marcescens
atgttttcagtgtctgctgatgccagaaatttgctgggagagtgcccaatctggtgcgagaggacacgcaggatttactggactgacattgaaggcagcgagctgcttgcccttgaagaagacaccagtgttgtgatgcgctggtccctgcctgaacgcctcggatcgtttgctcttactgaacattctgacgttttattgatgggactggcgtcccgattcgccttctgcgatctgaatacgggtatctttacgccggttgtggcgtcaccgggaggaccgggaacacggacaggggatggtcggtgcgaccgcgagggtaatttcgtcttcgggaccatggatgacggataccccgcgaaaatcataggaagatttcacaggctaaatgcagcgacactcagcattgagacgctacccctgcctgaggtggccatcccgaacagcatctgtttcagtccggacggcagcacgatgtattactgtgactcgatgcagggccgtataatgtgctgtgattacccctccatgaataaccagcgcgtgttcactgcaacagaaggaaagggagcgcctgacggctcctgcgtggacgcaatgggctatgtctggaatgccgaatggggaggaagccgtgttgtacgttatcgtccggacggaacgacggagagtatcctgccctctccaggagttcagagcacttgcccgacactcgcgggagaagcattcacaacgctgtattgtaccagtgccagcgtgggtctttctgtgccgtcaaggcatgatggagcattgctaagagcgaaatcagccgtattccccggtttaccggagagccggttttcagcgcacacagcgtaa

SEQ ID NO: 429503 - DNA, 954 bp, Serratia marcescens; identical to SEQ ID NO: 185896

SEQ ID NO: 429504 - DNA, 414 bp, Serratia marcescens
atggatcgggaagatattcttcagtattcgcaggctgtttgtaaggggctgagagacgatgatgatggcttgcggcgggaggtgctggctcatgccggaagtcgctggtcgctgggtatcgtcaacacgcttggcgtttatggcagactgcgtcatgccgaaattggcaggcgtatgcacggagtgactcagcgcatgctgacgcgtacattacgacagcttgagcgtgacggactggttatccgccatgatttcagtgaaatcccgccacgagtcgaatacgaactgtccgatacaggtatggagttacttgtacggatgatcccgctgtggacctggattgtcgataatgctgatcgctttcgtgaagaccggttgagatatgaaaaaaataacagtaacccggggacgtaa

SEQ ID NO: 429505 - DNA, 789 bp, Serratia marcescens
atgtcttttctggttcctcgtaccaaaattttgaaaccagccatcatctattttcctgggggaggatttatgacagctgagcacaataaatttgtggaaatgcgcatggctttagcggaggctggctttgttgttgcagcggcagaatacaggacaattccggatactttccctgcgccagtgatagatgctaaagcagcagtaagataccttcgtcaacatgcccacgattatggaattgacccctcacgaattggtgtatttggcgattctgcaggaggatggctggcgcagatgcttggtaccactaatggcgataaatcattcgatcacggcgattttctcagccagtccgctgatgtgcaggctgtggctacgctttacggaatatcagatctgcgtaacataggtgacggttttccggatcaccgacaaaaagtgcatcagtctcctgcagtcgcggagtcactgctaattaatggtgtggctttcaagaattttgcaggtgcctccatcagttctgtacctgaaaaagcgataaatgcaagccccataggacgtctcaaaggatgtaaacctccgttcctaataatgcatggaagtaaggatacattagtatcgcctaagcagagcgcaacgctttacaaagcccttttggaatcggggaacaaaacggactacgtacttatcgaaggtgcagaacacggtgatgatcactggtatcaacccgttgtcataaatagggttgttgactggttcagcgggcatctttgtcctgataatacatga

SEQ ID NO: 429506 - DNA, 735 bp, Serratia marcescens
atgttgctgattcgcgccagacggatcctcgattcactggaggatacgcagcaggaactggcgtcaatgaagggcgaagtaaccggtgtgctgagagtggcgtgttatcccacatttggtaaacgctatgtgctgccggttatggcaaaactctcccgacagtatccggcgctgagcttcgatttggatctgaccgaacggttggcagaccccgtcgctgaacgccttgatgttgtcatccgtattggtaatatggccgacagcacgttgattgccagcaaaatagcaacgcaaatacgtgtgctgtgcgcaagccctgcctatctggaaagcgcggggattcccgcctcgctggacgacatcgcctcacatcggttaatcgataagctgtacggtgcggatctgctttgctggtcgagcgtgattggccatccggccagagaaaactcgggcctgcctatgtttggctgtgatgatttcgaagcaatgcgtcaggcagcggtcgaagggatggggatcgcgttcctgccggactgggtggcgggagatgagattaacagtggcgcgctggtacaactctttccggaaatgtcatcgcaaccacatgtatctacaggaatatatgcgctacgcgcgttacgtcacccacctgccagagtcacggtatttctcgacgcattgcgtgaattcatcggacatcctgcaaaatggtcaacatttcactgccagctctga

SEQ ID NO: 429507 - DNA, 1440 bp, Serratia marcescens
atgcaaaatcatcaatacgatcccctttatctattcatcgacggtgactggattgaagcgggcaatcgcgacactgtcgctgtgattaaccccgcaaccgaagccactatcggccgcttgccgctcgcgaccgccgccgaccttgaacgtgccctgtcagccacccgttctggctttgacatctggcgccgtaccgtgcctgccgaacgcgcccgcatcatgaagaatgccgctgccctgatgcgcgaacgcgctgaacatattgcctcgttgatgacgctggaagaagggaagcccctggctgaaagccgcgacgaagtattgcgtgcagccgactattttgaatggtttgcggaggaagcccgccgcattgatgggcgcgttgtaccgtcaaatcgccccggtgtactgcaactggtcaaaaaagagcccatcggcccggttgccgccttcactccgtggaatttcccggccattaccccggcacgcaaattatcagcggcgctggccgcaggttgtagcgtgatcctgaaacccggtgaagagagcccggcgacggcgctggctctggcacgctgcctggatgatgccggtctgcctgaaggcgtactgcaaattgtgtttggcgtaccggatcaggtttccgccacgctgatcgcctcaccggttattcgcaaagtggcattcaccggttctgtaccggtaggtcgactgctgtctgagcgtgctgccgccggtgttaaaccgattaccctggaactgggcggccacggaccggtgctggtttttgccgatgccgacattgatgcggcggcaactggcggagcggctaaccgttttcggggcaccggccaaatctgtatctcttcaacccgttttcttattcagcgaggtgtttacacacagtttgtcgaacgcttcgtgagtgcgacggagcaactgattatcggcgatggcatagcggaaggcactcaggtggggccgctggcgaatatccgccaactggaaaaaatggaatcgctgattgccgatgctgttgccctgggcgcgaaagtgctcactggagggaaacggctcaaccgtcctggctttttctttgaacctacggtgcttaccgatgtgccgatggaagcacggatcatgcacgaagaaccctttggcccgatcgccgtgatgcgtccgttcgacgcgcttgaggacgggctggcagaagcaaaccgtctgccgtatgccctgtcagcttacgcttttacgcgtgacgcccgtaccgtgctggatgttggcgatggccttgaggccggaatgatcggcattaatcagtaccgcatggtggcgacggaactgcctttcggcggcatgaaagaaagcggacatggttcggagggcggtcgggaaggtctcagccattatctggtgaataaattcatcagccaaatctaa

SEQ ID NO: 429508 - DNA, 327 bp, Serratia marcescens
atgaaagctgttgattttactcgcccgcgtgaagctgcacgcgcatttactcctaaactgtccggcttcgttgagcaaccactgtattccgatgtctggacagatccggacctggcaccacgcgaccgtagtctgattaccatcgcctgtcttatcgcgctgaatcattccaatgagctaccggcccacctgcgtcgcggcattgaaaacgggctgaccaaaacagaaatttccgccctgattacgcacatggcgttttatgcaggcttcccggcagcgattaccgcttctggttatgccaatgccacgtttgaagaacaggcctga

SEQ ID NO: 429509 - DNA, 981 bp, Serratia marcescens
atgaaagcaatcacttttgaacaattcggtccggccgatgtacttaatatcagtgaagtcgcagacccacagctgcgccccaatgatctgctggttcgcacgcgggcagcgggggtcaaccgggccgatctaactcaccgacgcggcgggtatggccgccctgattttggcgactcgacgattatggggctggaaatcgccggtgacgttattgccgtcggggagaatgtaaaaggctacaacttgggtgaccgtattatgggtatcgtcgggggcggggcttacgctgaaatggcccgcattgattaccggatggctatgccagtgccggaaggtatggactatatccatgcggcggccattgccgaggtctttgtaaccgcgcatgaagcgcttatccatctggggaaactgaagcccacggaaacggtactgatccacgccggggccggcggtgtgggaggtgccgccgtgcaactggcgcatgcgacaggcgcgacggtaatcaccaccgcgaatgctgcagcacacgatctcgttcgccgtctgggtgccgatcacgccattgattacgtgacagaagacttctccgaggttgtcgccagcagtacggataacaagggggttgatcttattctcgattttattggcgcgccttattttgaacgaaacgtgaatgcactcaactttggtggacgtctggtgcagattggcatcatgggggggattgaaaacgcgaagatcccgctggatcgggtgttgtaccgccatctgcagattatcggtacggtaatgaaatcgcgttcgcaagaagtgaaacatgagatgtcccgtcgctttaaagagtgctggttaactcgcttcggtaaagatgggctgagcccggtgattgacagcgtatttccgctggctgaagccagcaaagctcaccagcgtatggaagacggcctcaatgtcggaaaaattgtgttgacgatgtag

SEQ ID NO: 429510 - DNA, 315 bp, Serratia marcescens
atgaaaaagcttctggtatgttgtttgtttggtaatacagcaaattctctcgccaaaaggatgcagttgctggcagaaaaaaaggactacaatctcattattagcgctgtgggtctggataattttgccagtgtagctcccgcttttgacggttttctgattgcaccacacattcagtacaaggtctccgagattgaaaaaattgtcggggactctcgttcaattgcaattaatgaaagtctgccctatgcgtcactcaacgcggagaaagttttagcgtttgtgatggaacagatgcctgaactgacattctga

SEQ ID NO: 429511 - DNA, 720 bp, Serratia marcescens
atggaaatccacaaccggactccaaatgtatatgacctgcttgaaataaacaaaatcctactttcaacttcaaataatggtgagtcatttgagaaagacttacatctcaatggattcatagaaaaaccatggggatatgagtatagagtttattgtgattctatttttgatgtatggcgccttcatatatcaaagaatctatccacttcaatgcattgtcatatactgaaagtcaccgtccttatatgcctaaatggtgatggcgagaccagatttcttgatggtacacatcaggcgttaaaatctggcgacagcatatatattgcaaaaggtgtgttccatcagactatttctggaaaatcaggcatcgaattaattgaagttgaaaacccaagaaacaaattcgacttactcagacttaaagataattatggccggcaaaatatggcatatgaaaagaaatcacaggaacatgatcttttacctcctttgcaacagatatctgcaggcacattgatcagagaacatgacctacacaaattagcatacttctccgtcaaaaatcttgatagaaaaatgttgaatgacgaggatgattttatttttatttcattagatgtaaaaagccatctaatgggaaaaattcatatcctacgagctaaagatgccatctcagaaatgtactgtggtcagaatgtatttttaattaacgtcccgtaa

SEQ ID NO: 429512 - DNA, 576 bp, Serratia marcescens
atgtctaatccgacacgagtagtgataatcactggtccaggttttcaggatcacgatgtagtttatacttactatcgttctaaagaggaaggatacgatatatctattgcaacaaaggatggaagtgcagtgatagggaaatatggcatcactgttcctatggataaaagatccaaagacaatattaattttgatcaactcaacgccactgattttgatgctgttattctcactggcggtcatgaagcgcctgatagagttcgccaagatcagagagttaaagattttctaaaacagatggtaacacaggggaaagttgtggctgggctctgccatggtccctggattatgatttctgccggtattctaagagacaaactcgcctgcgcttatgttggtctgaaagacgatagggttaattccggcgctaacgtaattgaagcagatgtagttgtcgacgggaatatcataacttgctcctattatgccgaatgtggaaaatttatgcgtcagacattcgatgcaatagatagatggaagcgcggagaaactcttaaagaaccgctggtggtataa

SEQ ID NO: 429513 - DNA, 678 bp, Serratia marcescens
atgctaattacatggaatgtattacatgacagacctctcagtgattttaacaaaaatgtacttcaaaaaataccaagtctgatggctaaacggttcaggaaattaaggaattttgtacgtcacgacggtcactttatttcctcattcaccgaatttggtaatgaggctatagataatgacagattcactgccatatatgaatcgattccaactgaagaaaaggaaatatttagggataagttcatccagtataggaacctggcaagaagtatttaccctagtttttgtgctgaactacaccgtccgctattggatgtttcaaatttatttgaaacagctaatgatatctatattgtgttgggaaaggatgaggagtcaatatcattcattctaagtaaatatggtttaaacatacccgcgaataaaatttatgggaggatgaccgataaaaacaagactctcaccttgctaaaatcgatagccttcgataaaaacgaggagattatatttattgatgacaatatccaaaatgttattgatgcattagatcatggcattcaatcattttgggctaattggggatacaacatccctgagcataaattaatggcccttcaaaaaggaattaatgaatttaataccgaggatctcttgaaattagtcaagaaaccctcctaa

SEQ ID NO: 429514 - DNA, 882 bp, Serratia marcescens
atggcgaaagaaatactatgtggttttggagtgggtgtagatgccgttgcaggctggctatcttcttatgggggagaggattctccaagcgatatatctcgcggtatgttcgctggcgaagtaggtactccacgtcttctgaatctctttgaccagtttaatattccaacaacctggtttatgcctggtcattccattgaaacctttcctcggcaaatggaagcagttgttaatgctggacatgagataggggttcataattacagtcatgaaaacccaatatctatgtcgcctgaccaagaaagagaagtccttcaaaagggcattgatatggtcacaaaattaacagggaagagacctactgggtatgtcgctccatggtgggaattttctcctgtaaccacagatcttctattagaaaatggcatcaaatatgaccattcactaatgcatcatgatcatcagccttattatgtcaggaaaggtgattcctggaccaagatagattattccaagacaccgaccgaatggatgaaaccgctggtacgcggagaagagacggaccttattgaattacccgccagttggacaatcgacgatattcctcctttcatgttcatgaaaacaaaacccaacagccaaggtttcatgaatcccagggacatcgaacagttgtggagggatcaattcgattgggtctaccgtgagcatgaatatgcgatctttactttcacgattcacccggacgtatctggacgcccgcacgtattaatgatgctcgaacgcctcttaacgcatatgcttggtcatccaggggtgaaattcctaaaattgaatgacattgcagatgactttgccaagcgattgccacggataaaataa

SEQ ID NO: 429515 - DNA, 807 bp, Serratia marcescens
atgtctgcccacattcattcacttgaggcttttaccgggtgtgttctctttactcgtcgttcacatggtgtggtggctacagtggatggggaggaattggcgagattggtggcttcagatttagaaacaattgaactgaagttgtcgatgcttagatcacgtacaagaaagtcctcggggacagtatctttcatcgggccagcagaattaatgtggtcaaaattaccgtacttggtgaaaaaactattcaatgaaggtattaaatttaaagttttgacaggaaataggaagcgcatatacacctgtcttctggacggaagttgtcaactaggtttcacaacttctatgccggataaacaaaaatttggatatgctgaaattggaatggaaaagttaatagttgtggtagcgtcacttatagcagacaacttcaaagaaaacgaggacgtgattgatacgctgtcgaagcttcctctaatagcttatgatgaacagttaccattgataagggaggttttccaggattcttcgcgattttttgcactgcttcgtccgtctattactgtaccggatttgcgaattttagaaagaatgatccgagaaaatattggttggactgtgatgcctgagtatttatgcgcccaaagcatagcaggaggtcagatcgttgaagtcaatgttcatgagagactccccataaattctatctatttggtatggattgatagctcattacgtaacccactcgtatcaggaatcagagacagaattctcgaactatcaaaaaatagcggatttatggtttga

SEQ ID NO: 429516 - DNA, 489 bp, Serratia marcescens
gtgaaacccaatcaggtctgggtaacggatattacctatatacggacctggcagggctggctctatctggccgtggtcatcgacctgtttgcccgtaatgtggtgggctggtcaatgaaaccgacgctgtcgcgtgaacttgcactggatgcgctgctgatggccgtctggcggcgtaaacctgccgaaagcgtgatagtgcacagcgatcagggcagccagtacggcagcgatgactggcgacggttctgccaggctaataacctgtcacccagcatgagccggcgcggcaactgctgggataatgccgtggcagaatccttcttcagttcgctaaaaaaagagcgcatcagaaagcggatatataaaacccgggacatggcccgggctgatatatttgattatatcgaagtgttctacaaccggacccgacgccacagtcacctgggaggcgtcagtccagaggccttcgaaaaggcctcgtcgtga

SEQ ID NO: 429517 - DNA, 285 bp, Serratia marcescens
atgggcacaccacgttttacccctgaatttaaagaagaagcggtccgccagatcactgagcggggctattccgttgctgacgtttcagaacgcctcggcgtgtcggcgcacagtctttacaaatgggtccgttcagtaaaacctgataataacgggcatcaggctcaggacttactggatgccagaacggaaattctcaggctgaaagcgcagcttaagcgtactgaggaagaacgggatattcttaaaaaggcagcgcggtactttgccagagagcccgactaa

SEQ ID NO: 429518 - DNA, 1188 bp, Serratia marcescens; identical to SEQ ID NO: 240694

SEQ ID NO: 429519 - DNA, 675 bp, Serratia marcescens; identical to SEQ ID NO: 240693

SEQ ID NO: 429520 - DNA, 426 bp, Serratia marcescens; identical to SEQ ID NO: 240692

SEQ ID NO: 429521 - DNA, 1269 bp, Serratia marcescens; identical to SEQ ID NO: 240691

SEQ ID NO: 429522 - DNA, 1404 bp, Serratia marcescens; identical to SEQ ID NO: 240690

SEQ ID NO: 429523 - DNA, 1647 bp, Serratia marcescens
atgaacaatagcaagacctatgactacatcattattggtggtggttccgcaggttcagtactggccgcccggcttgcagagcaggcagatctcaagatctgccttatcgaggccggtagccgtgatgaaaccccgcgtatccagacgcctgcgggcaccatcaccctgtataaaagcaaaaagttcagctggaacttttattcaacgccacaaaaaagcctggggggacggcaaatccacgtcccgcgcggcaaggcgctgggtggttcctcatccatgaacagcatgatttatattcgcggattaccttctgattatgaccgctgggaacagcaaggttgtgagggctggggctggaataatgtcctgccctggttcaaacgatcggaaaagaatctgctgtctcaggacccggcatatcatggttttaacggcgaattactggtcgataaaccgcgcgatcccaatccggtatcagcgctgtttgtcgcggcgggcaagcgggtcggattagcggagaacaccgactttaacggtaaatcgctggcgggggtcggcatttacaacgtcacgcaaaaggatggcaaacggttatcatgctatcgtgcatttttgcatccccatattgggcgcagcaatttgaccgtgatgactgactgcaccgtgcaaacgttgatcattgaagacaaagcggtcaaaggcgtgcgaataactgagcatggccgcgatcaacccacgtcaattctctgccgccatgaagtcatcctttcggccggctcgatcggctcaccgcatattctgctgaaatcaggtatcgggcctgctgccgaacttgaggccgcaggtattccgctggtgcaccctcttcccggggtgggcaaaaatcttcaggaccatctggatggtctggtcaccgtgcgttccagaaaccctctgacgcttggtttttccctcgccgcctggaaaccgatcctgacatcccccttccagtatctctttcgtcgcaaaggttggctaaccaccaattatgttgaagccggtggctttgccgcgacaaaactcagtagcgatgaacccgatattcagttccattttgtgccgggttatcgcagccatcgtggccgtttatttgaatggggccacggctatgcgattcacacctgcgttttacgtccgcggtcgatcggcgcgttgcagttaaagcgtgatgggcagatcgctattgattttaatttcctcgccgatccttatgacgccagcgtgctggtggaagggataaaagtagcaaggaatattctggctcagccggaattcaatgcattgcatggcgaagagatgctgccgggcaaacatatccagactgacgaacagctgcatcaatacgtcaaagaatattgcgccacggttttccatccggttggcacctgcaagatggggcgggatgaaatgagtgttgtcgcaccggacactctcaaggtatatggcgtggaaaatttgcgcgtggcagatgcatcaattatgccgacgcttatcagcggcaacaccaatgcgccttcaattatgattggcgaacgtgcggcaagcatgatcctgcaaggaacgccggtagctgagaccgagacgaataaggagaacgcttatgcataa

SEQ ID NO: 429524 - DNA, 1491 bp, Serratia marcescens
atgcataatcgtgattactggcaaggtctgctgaaccaacaacgctttagcacgcatgcccttatcgggggtaaaccttacttcgccaaagcggagaaaacctgggcggtggtgaatcccgccaccaatgcagtgttagcggacgtcaccgcttgccaggctgaggatattgacgctgcggtgcgttcagcacgccaggcatttacctctggtatctggtctgaatgtcctttagcgcaacgcaaagccgtgctgcgcaggctggcggagctgatgctggagcaccgggaagaactggcgctgctggaaagcgcaagcatggggaaaccggtgctcgatgcctataacgttgatgtgcctggtgctgctcatgtgatggcctggtacgcagaaagtatcgataagatttatgacgaggttgcccccacccgtccgggtaccctggcaaccatcacccgtgaacctgtcggcgtggttgccgccattgtgccgtggaattttcccctcgatattgccgcctggaaaattggcccagcgctggcagccggaaatagtgtgatcctgaaaccctcggagaattcgcctttcaccgcactgaaactggcagaactagcgctggaggccgggttgcccgccggggtgttaaacgttgttaccgggctggggatcgaagccggtgctgcgctgggccagcataacgatgttgatgtgctgacctttaccggttcaaccgcggtgggcaaagcctttatggcctattccggccaatccaatttgaagcaggtgtggctggaatgtggtggcaaaagcgccaacattatttttgccaattgccaggatctcgatttagccgccgaaaaatccgccttcggtatctgtttcaaccagggtgaagtttgttcagctaactccagattattagttgagcgtaagatctatcccgactttatggcgaagttgatcacgaagttgcacggctggcaacctgaccacccgcttaaccccaatgcgaggatgggcgcgatggtttcgactgcgcataaagataaggtgatggattttattcagaccgcagtgactcagggcggtattgtgcgcgcgggtggcgagcaacgcgaaatcgagacagtcgctaactacatcctgccgacggtgattgagattgaaagcgaaaacgttaacttatggcgtgatgaagtattcggtccggtgctcgcggtaaaagtctttgatgatgagtcggaagccatcgaactggcgaataatcatatttacgcccttgctgcgtctgtatggtcggacgacctgaatcaggcacatcgtgtggcgcgcaaactgaacgccggaacggtgtcggtcaacaccgttgatgcgctggatgtgaccgttccttttggtggcaatcagcaatcgggttttggccgcgacctgtctttacatgcctttgataaattcaccaaattaaaaaccacctggcttgaattacgttaa

SEQ ID NO: 429525 - DNA, 921 bp, Serratia marcescens; identical to SEQ ID NO: 240687

SEQ ID NO: 429526 - DNA, 1269 bp, Serratia marcescens
atgtcccttaacgactcaaaaatccgcactttaaaaccatccgcaaaacccttcaaagtttctgattctaacggtctgtaccttcttatcaaaccaggcggctcacgtcactggtatcttaaatatcgtataaacggcaaagaatcccgcattgcactgggtgcctatcctgccgtctccctgtctgatgcccgccagcagcgcgaaggtatccgtaagatgctggcgctgaacatcaacccggcacagcagagggctgctgaacgcagagcctgcacaccagagaaggtgtttaaaacagtggcgctggcatggcataaaaacaataaaaagtggtcgcagaacaccgctgaccgtctgcttgccagcatgaacaaccatatctttcctgtaattggtcatctgtccgtcacggagcttaaaccccatcatttcattgacctgctgaaaggtattgaggaaaagggcctgctggaagtcgcgtcccgcacgcggcagcacctcagtaacatcatgcgccatgcggtccatcagggatttatcgacaccaacccggcagcaaatcttgatggcgtgacggctccccccatgagacaccactatcccgccctgccgctggagcggctgcctgaattgattgaacacattgaagcatatcatcagggccgtgaactgacccggcttgctgtcctgctgacgctgcatctgttcattcgctccagtgagctgcgctttgcacgctggtcagaaattgatttcataaacagaatttggacgatacccgccacacgcgaagccattgtgggtgtgcgttattcagggcgcggtgcaaaaatgcgcactgctcatatcgtgcccctctcacagcaggctatagctattctgaaacggattaaggaaatatccggggcttacgaactggtcttccccggcgaccataacccgtacaggccgatgtgcgaaaacgcggttaataaagcactgcgccttatgggattcgacacgaaacaggacatctgcggacatggctttcgggcaatggcatgcagtgccctgatggagtctggcttatggtcgcaggatgcagtggaacgccagatgagtcaccaggagcgcaacaccgtgcgtctggcttacattcataaggctgagcatctggaagcccgcaaggcgatgatgcagtggtggtcagattatatcgatacatgccgggtcgcatacgtaccaccttttaacacagggcgggataaaaacaacgaagctgcatga

SEQ ID NO: 429527 - DNA, 348 bp, Serratia marcescens
atgaccaataacaaaaagctgtatcagcataccctggtacggctttattcatttctgatggcttgccaacccctccaccccgacccgtcgctgcctgtagaaagctgttacacaacaacaacacgcttgcgccgtcagccctggcgtgccatttcatttgagagcaaggatcatccctactgccccagcgacgagaacggcatcaatgagaagctcgaacgtatgcgtctggagtttctggacgagacgtttcgcaatcatcgaaccgacgaacaatgcgatgccgatggcaagtccatgtgtgaggacaggctgcgcgagtgcgcccgatataccgaacgtagctag

SEQ ID NO: 429528 - DNA, 897 bp, Serratia marcescens
atgaacactgaaatcaatacagttgttgctgttttaggtccaggtgccatcggcacaacagtcgcggcggcgttacacgaagtcggccgcacaccattgctgtgtggacgtactccccgcgatcgcctgaccttgcaagatggcaaccgctttatcaccgtacccggtccggtacagacgaatccggcacaaatcactcgcacggttgatcttatctttctggcagtcaagtccacacaaatcgacgcggcagcagaatggctcagggcgttgactggcccggagacggttatatgcgtgctccagaatggggtcgaacagttggacaggctcgctacgtactctctgcccggacagatcgttcccgctgtcgtgtggttccctgctcaagcgcagtccgatggctcggtacgcttgcgtggtgaggcgcgcctcagcgtgccagacgcaccagcttcccgtgtagtggccgcagcgctgcaaggcacgtggtgctccgtagatctggccgcgaatttcagctccctggcctggcgcaagctgatgcagaatgcggtggctggactcatggcactcacgcaccgccgctcaggcatgtttggccgtgctgatatcgccaggcttacgctggcttatctgcaggaatgcctggccgtggcacgtgcagagggcgctgaactcggagacgaagtgccgcaggagatcctcgataagttccgggcggctcctgcagacatgagcacctccatcctcacggatcgagaagctggccgaccgcttgaatgggatatccgcaacggcgtcattgcgcgtcgcggccgggttcacagcattccaacgccgatcagcgacatcctggtaccgcttcttgcggctgcgagcgatggccctggttga

SEQ ID NO: 429529 - DNA, 948 bp, Serratia marcescens
ttgcaacagaatctaattacgtggtggttgtgcccttcccaaaggacatgtaatatattacatatgaataaagaaaatggtaatagaatttcagaaggtgagcagcggttacagcaatggcttggcagcattcacgcccgaagcggcgacctcgctgcaagtgaggctaaagttgtcgatctcctgcttgtcgatcctttatttgtcggtacaagcacggcagcacaggttgccacccgtgctggtgtatcaccgccgacagtaatacgcgctgcacgagcgatcgggttcaccgggttcactgaacttaagatagagattgcccgggctcgtggcactgcccaattctttgccccgcctgaagttcttacagcggatgcgacgctggcatcagtgctggaaacatcaattcgtgctggtgtagacgcactgactgcgctcagcggtgctatcgaaatctccgcacttgatgaggcggtcgatttaatccagagcgcacgccaggtatttgcatttggtgctggtccctctgcgacggttgccgctgatgcggtctttcgtttgcggacggcgggtgtgataaccgtcagtatccaggattatttatcagcgatgattgctgctcgtctactcggtccaggcgatgtcatcatcgtcgtcagttcaacagggcgcacatcatccacactctccatcgctgatgcagcatcctcggcaggagcatcgcttattgcaataactaaccagtacgataccccactggcgacactcgccaacgtttcgctcgttgttggcggaatgccactcccggcacagatggccgctgccgggagtcgactggcccagctcgtcgttattgatacgctggtcgctgctctcactctgcgggataaagaacaaagtcgccgggctgaacgggcgggtattgatttgcccgatatgtcctga

SEQ ID NO: 429530 - DNA, 858 bp, Serratia marcescens
atgcagttcagcacggtagcaatgattcttactgctgcggtagctcatgcagtatggaatatagcctcaaaatacaagagggaagacactcttgtgttcgtctgggcgtacagctgtgcctcatcattgctgtgggtcccgttcagcctcattctgatagttgagggacaacaggaactcgactggagactcgctgtcggcgcagttatctcgtctgcacttcatatcgcttattctctaatcttgcaggctggctacgagcgcgccgaactgggtgttgtttatccgattgcccgaggaagtggaccagttctgacgatactgtttgcaacccttctcatgggagaacggatttcaccaggcgctttactcggcgcttttatcgttatcgctggtattttcgttgtcaccggcaatccgttcaggagcggaagccgaccactacagggaatgctttggggggcagcgacaggcaccgccatcgctggctatacactctgggacggttattcggtaatctctctgcacctggatccagtgcgctactacgccagcacactcctgctacagagtctgattcttacccctggtgcgatgcggcgacgaaatcgcattccaactgctgtacgtgtggatatcatcccaatccttatcattgctgtatgctctccccttgcctatatccttgtactgacagccatgcagagcatgccactggcactcgtcgctcctctcagggaaacatccattattgtcggctcccttctttcgtactggctttttcgtgaaaatcatctggcacgccggattgccggtgcagtggtggtgctgaccggcatcgcaataattagcctttga

SEQ ID NO: 429531 - DNA, 2775 bp, Serratia marcescens
atgctcaaaacagaagatctcaacaccatgatatcaattgatgagattcactttgctgactggcaaatctggccacagctaaggattctgttacatcggggtaagccagtaagaatttctgccagagcttttgatgttctggttgttctggtgagtgctggaggtaaagcggtaagtaaagaatctttacttactcaagtgtggggaaatgaaatcgtcgaagaaaataatcttcaggcacaaatttctgctatacgccgcatactgggacatgaccgccatctactgattactgaatttggttgtggttatcgctttaatatcaacaaattgccaactaaaccgctctctaaatcagaaatacctgagcccgctgttaccccttttctcgcatcgattctggggcgtgataaagctgtgcaggaattatgcaccttattggatcaataccgtctggtgacggttacaggctcagggggcgtgggtaagactcgtttggcatgggaagtcgtcagccttacacactcgcattttcctgatggaatatgtgtggctgaactggcgcatatcaccgaagcatccagcttgctatctgttatttcacaagcgctccatcttccattagctgccattcataatgatgccgatttacggcaacagcttgcacggcgtcgatgtttactgctgattgataactgtgaacatgtaattagtgaactggaaccagtgattacgttgctcctgcgcctggctccccatataaaactgttgttgaccagccaggtagcgttacaggttgccggcgagcaacaatatctactaccgccattacaagttcctgagagcgaagaggctgatacccacgagttactgacttttgacagtgtccgcctctttatcgaacgtgggcaggccaaccgacataatttccatccatcagccagcgaactgtcgttgattggcgagttatgccgtcatcttgacggtctgccgttggcgattgaacttgcggcctcccgtctgccagtcatgagtgtcaaagagatctatagccgactggaagaccgtttccagctattgagcaatacgcacagctctctggtgcccagacatcagaaaatactgaccacgctggagtggacttatcagttactcaacactcgtgaacaaagattattttgctctctggggatctataccgatatgttcagtgtgaaatcagtaagtgaccttctgctgattaaagacaagcatcgctggcaggttgttgacgatctgcaaagattgctgtctttatccctgattcaggtcagtactcaggtaccagagacccgtttccgcctgctggaaaccatgcgccagttcgcatgcgataaactcaggcaacagggtgaatatactgttcttgaagcccgttttaccggttattataaagttctggtagaagaggcccaaggtgattggtttatgctgccaacgggacagtggcgtgaacgttatagccatatgcttaatgatttgcggagcatattacagcaaacgttggctgaaggggccgctccctctaaggggcttgagatcttacaagcgatgacccctttttggattgaatattcactctacgatgaatgtcagcgccatatctatcctttgctttatgaaaatacttctcgggtagtattaacgctatgccagagaatgaatctcagcgctgtagcaggtaaggcgtcaacctgggcaaaaggccctacgcctgaaacacattcagcctggaaaaccgcgcttgcacttgcagaaaagctcgacgacaaagaaatacgtttacaggctcattacggattatggttgtattatctgcgtactggcgagttggataaagcgcttgagcatgcgcaatctatgtgcgagctggcacggtccattagtgacgaggaggcgatggcaaccgggctgcgtattctcggtgtatccctgcattttttggggcgtcattatgtcgggcgtgattatctccagcaatctcttgactggtatgaacatggcgaattaagtcactctttccgttttggtcttgatcaagagagcgccggtcaggcctttctgtctcgtttactctggttacagggtgagtataaggccgcgaaacagatggcatggcgcggtgttaaaaaagccgctcgtttgcagcatgtctgttctctttgctgtgcactggctgaaggcgcttgtatgacagcagcactggatcgtaatccgcgttgggttataaaggccgcaaactggcttattcatctggcaaaaaggcatgatttatatttctggaagacatacggcgagctgtttcttgtttgggccaaacagttcagtcataccgatgttagtcaaaccacactgtttagctcgttgcgggcgatgggattagattggcaatattcccccttgttgtcagaaattgataccgggttatcgctgagagccacccgccaggatcatgaaaactggtgcacgcctgagctgatgcgtctttctgccactcaattacctcctcagaagcaacgcctgctgttggagaaggccctggacaaagcgcgtcagcaacaggctcatggctgggccctccgtattgcttattcattggcgacattgcaggctgaagccggggaaaaatgggctgctaaacaattgatacaggacgctttacatgatgttgatgactcagacaatgcgacggatgtaagaagtgctattgcgctatgtgcccgaataggggcctga

SEQ ID NO: 429532 - DNA, 822 bp, Serratia marcescens
atgcgttcggacaatcacgagctttcttctaccaggattcttatgctggggattatttgttgtattgttgtggctaatatttattttaatcaatctgtcctgaatttaattgccggatcctttcccaatgaatggggagctgtttctttgatccccatggtcacccaggtaggctatgcggtgggcttattctttctgatcccccttggcgattatattgaacgtcagtggcttatcctgcgtcaagcgcaggtgcttttcctggcaatgatcggcatgatgttatccccaacggcgacagtgttggtgttcttctccttccttaccgggatggctgcaacagtagctcaacagatagtgccgcttgccgcctcgctctcaagaacttctgcacgaggtaaaaccgttggtacggtgatgagcggtgtcctggcaggtatccttgctggccgggctatcggaggccttattggtcagtatttcggctggcgtggcgtctttttatccggcgcgatcatgacattgctggctatatttttcatcttacgcattttgcctactcagtcgttgtcaacgccaaagtttaactatctggcggtattacgttcattaggactgctgtggaaaaacgagccgcaggtgcgtggtgcaactcttacacaagcaatgctgtttgcctccttcagcgtgctgtggaccgtgctccctttctggttagctcatcgctacgattacggtgcagggataaccggcgccctagctgctttggggttaatcggtattctgtgtgcgcctctggcgggaagtttcagcgatcgttag

SEQ ID NO: 429533 - DNA, 807 bp, Serratia marcescens; identical to SEQ ID NO: 80288

SEQ ID NO: 429534 - DNA, 690 bp, Serratia marcescens
atgtcatcaataaatcgtttatgccttcttgacaaaaaagcgtttattgaaggacataattttattgttagcactactggcaaatatatcattcccacagagagagtgattgacactctattgattggatatgaatatgttctagtgcaaaaattactttcccgatctcttaaaataccattacctgtaacaggagctattgattttaatcatggcataacagttagcttacaaggagaaccatttcaactattcgataaaatgacatgggaagaaagaataacacaaaaaattatgcaactccctaaaaacatttcaccatatgtacataaagagatattctcaaagaggataaataattacctggggaaagagtatttcccggctcatattttacctcgggatgcctggtttgttattcgacatgctgaacttgataaagtcattgacatcataaccaatagcagagtgccctcattatctgcaacgcgaatatcaacaccactatctcgttttttctggctggcctgtaaaaacaatgaagtcatccgtccattaattagtaaaccgtacaaactactatctattttcgaacaatgggcatctgacgaaggcattaccgacaggctcagtggtgatacgttaaaaactgcactcgtacgcggttcccccacatcaatgtcggattga

SEQ ID NO: 429535 - DNA, 864 bp, Serratia marcescens
atgaaatcgttactttctctactgggccgctacgtgctgacgctcagcgctgtggcggtggctacgcttttggcttttattctctggaaacattatgcgcaaaccccctggacccgcgatggtcgagttcgtgcggatgtggtacagattgcgccggatgtctccggaccggtgctgaatgtggccgtccgcgataatcagtgggttaatcggggcgatgtgctctattccattgacccgcactggttgaggttggccgtggtcagcgcacaggctgatgttgaggcgaaacgtcatgaaatgctgatgcgccaggatgcggcgagacgacgctctcagattaaaggggtaatttccagcgaggatttacaacaaacagccagcgcagccagcgtcgctgcggctaattaccacggtgcactggctgcgctggaccttgcagagcttaacttatcgcatgctattgttcggtctccggttacgggctatgtcacacatttgcggcttcgccctggtgactatgccacagcgggagaaactaaagtttccatcattgatgcccatagtttttgggtggttggctattttgaagagactaagttgcaacatatccgcacgggaaatactgcacacattacgctgatgggatttaagccggtgatcacgggtcatgttgagagcatcggacgcggaatagatgataacaatgacgagaccggggggcttggcctgcctaatgtcgagccaacctttagctgggtgcggctcgcgcagcgtatcccggttcggattcatattgacagattgccggagggaattgaattggtggctggactgtctgcgagtatatccatcacaccataa

SEQ ID NO: 429536 - DNA, 216 bp, Serratia marcescens; identical to SEQ ID NO: 271502

SEQ ID NO: 429537 - DNA, 1974 bp, Serratia marcescens
atggcttctccttcactactgaatgatgcgaacgctctgctctattccgcgaagagttttgccgcagcgatgctcgcatactacattgcactgtcaattggcctggagcggccttcctgggcaattatcaccgtgtatattgtttcccaaacctccgtcggagcatcgctgagcagaagtctgtatcgtctggtgggaacggtagtcggcgcgggcataacggtattaattgtacccacgttcgcgaattcctccgtattttgcagcgtgatattgacaggctggattaccttctgcctctatttatccttgctggaacgcacgccccgggcctatggttttgtcctggctggttacactgcgagtctgattggcttccctgcggtatccgatcctggcgcgatttttgacatcgctatcactcggatacaggaaatcatgatcggtatcttctgcgcggcacttattcatcgctatgtattgcccgcgcgcatctcaggccagttcaacagtaaattgtcgcagacgctactcgcggcgcgacagcgtatcgcagagactttagcaggcaaacccgacgctgcttccgggccgctgcatatggcactggcattacagttcctgcagggtatcagccatcatgtcccttatgattttgcgttctctgtaccggtccggcaagcgagaaaaaggcttcatgacaggcttgcgcgattagtcattgttaactgtgagttacgcgaccgtttagcgctgatagcgacgatacctgtcgatgtgcaaattctgctgggtgatgttgaggtctggttggcctgcaaagatgaaggaaaattcaaaagcgagggtgaagcgctcaaaaaaagcagtgaaaaattactgcagcgctattcagtgtatgagctgacgcttgaagaagcgctgcgtgtaagttttatgcgctacctgttagaggccattgtccttgtgcagcagtgctatcgtctttcggacgccattcatcacgcgaagcagacgcctgcgcaatcggaaaagaataccgtgagagggtatgtattccaccgcgattctctcactgctgcccgcaccgctctgggcgctttcaccatcattctgagcggctgcatggtgtggattttctcggcatggcctgatggcggtacggcggtttctatccttggcgtttgttgcacactgtttggcggcttcgatacgcctgccccgcatattgtgaaatacattatcggctccttctggggcgttgtgataagcctgatctacagtttcgttctactaccacaagtcagtgattttatcgtgctggtaacggttttagctccgatctatctgctggctggatcgctccaggccagaccgcctaccacgtttatggcgatggggatcacactgacgctgcctattttgtgcgagctgggtgcccactacagcggggattttgccgtggcggtgaataccgcaatcgcactattttctgcaactggctttgcggtattcagcatgggctttctgcaaactgtacaggcagatgcggcaataaatcgcctgcttcaattatgtcagcgcgatattaaccgcagcgtgaaaggtgtgctgaatactgatgaaactctctggatcaacctgatgatcgatcgggctgcgttgatactgccgcgtttgcagcgcagcggacagtcaccggaacgggcacatcatttgttgtacgccctgcgcatagggctgtgtgtaatgcgattacgccgatgtgatgcgcatgcgaacaaagaaataaaagaagtactcacccttcttacacactcgacagatattgacaccttacttcaacggatcgccattctgactgagcgcagcttgagcgtaacagatgaactatcgcgacattatgtcgatcaactggttgatctttactgcgcattaagcgttcagaaaatggagcctgctaatgatcaatga

SEQ ID NO: 429538 - DNA, 807 bp, Serratia marcescens
atgttacccccactcgccaatacgctgtttgatccggatgccaccccctgtcccgcagtcgcgcgtcatctggattttgtcgattacgcggccgaagtgcctgtgcatacgcaccgcaaagggcaattgattattgccctctatggggcggtcatttgtcgcgccgaaaatgatatctggatcgtgccgcctgattgtgccgtctggatccctgggggagtgccgcacagcgccaaagctacctggaatgcgcatctcaactatctgtttatcgaacccggagccgccgcgttgccggagcgatgctgtactctggcaatttccagtctgattaaagaacttgttgcccgtttaacccgcgagggcgtcggatacccaccagaaagccatctcgccagactgaccagagtaacacttgatgaattagccaccatgcctcagcagaaactgagcctccctgtgtcgtcgcatcctaaaatccgcgccatggccgatgctctggtcagtcaacctgatgaccgaagcacattcaaaacatgggcaaaaagactggcgcttagcgagcgttctctcgcgcgtttaatgctgcgcgaaaccgggttgacgttcggacgctggcgtcagcaactgcaactgataattgctctccgggaactggctagcggcgtttcggttcagaatgttgcagctaatctggggtatgaatcggttaatgcgtttatcaccatgttcaaaaaaacaatgggaagtacacccgcgcactattttgccgaacggaaaacaagcgcacacttaaccgatatttag

SEQ ID NO: 429539 - DNA, 195 bp, Serratia marcescens
atgacatcacatcagttattacgtttaaaacaggtcgaagaaaaaaccggtttgaaacgctctcaaatttacctgtatatgaaaaatggaacctttccacgttcaataaaaattggcccggccagtgtggcctggctcgaatcggaaattgatgaatggatcagccttaaattggccggacgttcaaacagttaa

SEQ ID NO: 429540 - DNA, 588 bp, Serratia marcescens; identical to SEQ ID NO: 196764

SEQ ID NO: 429541 - DNA, 210 bp, Serratia marcescens
atgccggatgagatcgatcgcgatcaggaatttaatgagcagcgcctggaggagatgattgaacagagtcgttttaagccggggtcgacaccatcattatttcactgtcgtgtatgtggtaaacccattccagaaaagcgacggcaagcactgccgggtgtaaccacctgtacggaatgtcaggaaaaacttgaacgtagtagccgctga

SEQ ID NO: 429542 - DNA, 222 bp, Serratia marcescens
atgagaaaacccgcttatcacgtctttgttacccaggaaagccagcccgatgtgcagggcgaaacaaacacgtactggacaaaagttggcgtggccttcgcgcataacggcaagcccggtctgaatatcgtgctgatacccggtattgcggtttccggcaggctggtactgctcgaaccgagagaagaaagcgacatttcacaggatgccgctgccacttaa

SEQ ID NO: 429543 - DNA, 645 bp, Serratia marcescens
atgctttccaccactgcctttctggcactggcggtgcagtgcgccgccagtattcacccgtccacgtcacttgatgtcgcacgggtcgaatccggcttccacccctacgccattgctgaaatcctgccagacagccggggcgtgatttcacatttcccctcgagcctgccggaggcgatcctccttaccagacagctggctgcacagggccgacgctattcggtcggcctgatgcaaatcaccagcatcaatttccgccattacggcgtcacggccagcgacctgcttaacccttgcatcaatctgtcggtatttgagcgcattctcgccgactgttaccggcgcggcggaacactgaaacgggcgctcagttgttactactccggcaactttgaaaccggccagcggccggaatccgcctttaaccagaccagctacgtgcagcgcattggctatgtcgtcccgtccacgcggaaagaccggcagcgtgcccctgaccggaacgcacagccgtctgtccgttatcccgccgttgtgctgcgcggcgagcctgccggtgccactgcgccgatcctgacttccctgcattatcccggttccgtcattcgcggcgctatccctgttatccctgatgaggagaaatga

SEQ ID NO: 429544 - DNA, 273 bp, Serratia marcescens
atgcgtaaacgccgttactccgctgttgtttccgtgctgctgtcttccccggtgctggcggcggacagtggttttaacaaggccaatgaaacactgagcaatacctcgaccggcctgctgggactggccgccgtcaccatcacgctggcgaccatgtgggtgggctacaaggtgctgttcgacggcaagagcctgcacgacatgcgtaacgtcatcatcggcgcgatcctgattgtcggtgcatccggcttcggtgcctactgggcgtcataa

SEQ ID NO: 429545 - DNA, 2748 bp, Serratia marcescens
atggctacgctgaataaagcgcttacgcggcctgccgccattatgggtattcctcttgtgccgttcgttcttgtcagcggggccatcgtcctgctggcggtctatgtcagctattacctggcggttctgctcattcctgcctgggcggaaatgaaaaataaagcccgaaaggatattcattatttcagcctgctctggctggcgtttaaaacccgtggacggcttttcaccaatacccattttggcgcgaatgcccttctggcaaaccagtacgataatgttgatgtctcggagtttattcagaaaatgaaattaaacgagcgtattacgctggataaatatattccgtattcctcccatattcacccctacgtcatcagaaatcgtcaccgtgattttgttgccacctgggagctgggcggcacagtctttgaatgtgaagacgaacatcacctgaccctgatggccacgcacctgaataacgttattcgttcgtatgaggggctgccggtaacattctatattcaccggctccgtgaaaaataccatgatacttttgaagcccgttcgggtattcccttttccgatgaggtaacacggcggtattaccagccggtaaaagaaaaaccgttctggcggcaccggctgttttttaccgtctgctacgcgccgttctctgcgattgagaaaaaaaccatgaaagcgcagccgcccggtaaacgccagccagcactggaggacgcgctcaaaatcatgctggaataccgcgacgcgctggagtctgcgttatcccgctatatggcaatgccgctggggatatatgaagaaaacgagcgggtgtattcctcacaactggcgttctttcatcgtctgcttaccggccagtggcagaaagtggccgtaacgcgctcaccattttatgaaacgctcagtacgccagacgtctttttcaccaccgacaccggtgaatgccagacggtcagcggttcccgcttcttccgcagcctcgagattaaggattattccccggaaacccataccggtatgctggacgcactgctgtacgccgaaagcgagtatgttctgacgcagtcctttacctgcatggcgcgggatgaagcgcaggatcatatccggctggcggaaaaacggctgaactcagcggacgacgacgcgatttcccagcgcgaagagctgattgtcctgcgcgacctgctccagtccgggcatgtgtcgtgcggtaaattccacttttccctgctgatctcctcagacagtgccgggcaggtggtgaaggacactaacgttctggcccagcccttcgccgatctgggtattatgacgacgctctccaccctgtcactgcccgccgcatatctggcgcaactgccgggcgtctatacgctgcgtccccgactggtggccgtcagcagccagaattttgccgatatggcctgcctgcataacttccatccccacaaacgcagcggcaatccgtggggggaagccatcgccatcctcacatcgcccggcggtggcgggtattacctgaaccttcacgacagccaggccggacgggatgacaccggtgagaaaacgccgggaaatacggcgattatcgggaaaaccggctccggcaaaaccctgctgatgaccatcctgcaacaactgatgcagaagtaccgtaacccggcgtcgtttgcgccttctgccaccctcaaacggctgaccacggtgtatttcgataaggaccgggcggcggagatggcgatccgccaggcgggcgggcgttatttccgcatccgtaccggcgagcccaccggcttcaacccgtttgcgctggagccaacccgccggaacatcagtttcatcaaacggctggtgcgcatgctgtgccgccgcaacggtaagccgctcgatccgcgcgatgaggagcggatcagtgccgccgttgacaccatcatgctggactatccgccggagtaccgccggttcggaatcacccggctgctggaagtgctgccggagccgccgaccacagacgcccgcaccaacgggctgcgtatccgcctgaaacagtgggcacaggggggcgagttcggctgggtgtttgataacgaggctgatactttcaccatcagcgatgtcgataacgttggtatcgacggcaccgaatttctggatgatgacgatattcgcggccccgtgaccttttacctgctgtatcgcgtgaccagcctgctggacggtcgccgcctggtgatgtttatggatgagttctggcgctggctgtccgatgtcgaattttcccgtttctcgctcaatatgctgaaagttatccgcaagctgaacggcatattcgtccccgcaacacagtcaccggatgaaatcgtcagacatcccatcgccccggcgattattgaacagtgcggcacccagattttcctcgccaacccgaaggccagtcatgcggattacgtggagaaaatgaaagtgccggacagcgtttatgagactgtcaggaaccttgatccgggcgagcattatatggtcatcctgaaaacaccgttgcgggccggggaaacccgcccgtttgtggcgttggcaaaaatggatctgtccgggctgggtaaactcacccggctcctcagcggcagtgaggacaacctgaaaatattcgatgccatctatcaggacggtatgcgacctgatgaatggaaagaaaccttccttgagcgggcaatctga

SEQ ID NO: 429546 - DNA, 729 bp, Serratia marcescens
atgcgtaccagatatacctttctggcattatcgttatttttcccgacgcagacgttcagcgccggaataccggttttcgacgccgtgcagaataccgaatccattaaccagtggatgcagaaattacagcaatgggaggatacggttacccattataaaagtgaacttgatgcgtataaaaaacagttagctactgcaaccggcgtgcgggatattcagggttttctcagcgatgcccgaagcctgaaaaccgatattgataatctccgtaagagcagtatttcactggatgatctgctgaccacgcaaaacagttcatattcttctgaactgcaaaacctttacagtaaatacaaatcattcagcgtatgcagcgaggaacaggaagggataaagtctcaggccctggccgacagttgtaaacagataatcctcaatcaggcaatggcgattgagaataccactgacgttgaaaacaggatcaacagcacactcagcgatatatcagacttatctgaccgtatatcgaatgcacaggattcgaaagagtctcaggatctggctaacgccatcgcggcgaaaagcgtacagttaaatgcgctgacaaatcagtgggagatgtctgtcagacaggctgaacagcgaacgacattgctggaacagcaaagacagaaagcctttgaacagcagcagctatcggcacctgttgctgaccttaataatttataa

SEQ ID NO: 429547 - DNA, 276 bp, Serratia marcescens
gtggtcagatccttattcaccttatgcacactctcaggcgtgatattactttccggctgcaaggaaaccaaatccgaaacctggtataagcagcatcctgacgaaacatatgcggtttacacgcaatgcctgaaggatggcgaggcaagcgataactgcgagtttgctcaacgggctgccattatgttcgctcaaattggcaaacccggaataaaagaaaaatttgagacattctttcagcaagaagccgaaaagagaaaatccgtcacacaataa

SEQ ID NO: 429548 - DNA, 1032 bp, Serratia marcescens
atgtccggtggtatttttgtgggtatggacaaaaacatcatggatggactgaatgccgtactggaaggtcagtcttccacttacggtacgatgatcagcgttatcatcgtcagctcttttaccttatttatactgtatcgcggttatcagacgctggctggcaaactccgggccccggttgaagatgtcgtctgggatgtggggcgaatgttgctgatcaccacctttgcgttaaaccgggatggctggctggatatggcggtagcggctatccagggactcaaagacggtgtcagcggcaatgataacgtctgggcgctgcttgataccgtctgggaaaaggcacagacactggggcagacactgttcagtatggacacctcgacttacgtcaaactgaatggtggctttgccgaagtgctggtatggggcggcgcgatcgttctgttactggctgccacctttgtcaacctgctcgctgaaattatcatcctgttaatgacgaccaccgcgccgctctttattttctgcctgctgtacggttttcttaagccgatgtttgataactggctgaaaacgattttcgcggcaatattaacgatcatgttttccgccttatccatccgtatcgccatcaattacctgaataaaatccttgatgcagcgacccggacatccaatgtcagcaacatggtgacgctggcggcacagtgcctgctggccgggattgcagcgggtgtggtggtctggttctcggcgaagctcgccagcgccctcagcggagccgctgtacaggcggtgttacagggggcggccatgagtggtctgaccggactggcgaacaaatccgctgacctggccgggccggggataaagggcggtgcccgcctggctgcgaaaggcggcatggccgtcgccgcggcgaccggcagactcactggcgcaggcgcgggtaaaaccgtgagcgcctggcagaaacgcgccgccgccatcgaaagcatgaaacgcctgaaccggcagcgtcaccgttaa

SEQ ID NO: 429549 - DNA, 141 bp, Serratia marcescens
atgaaattcagcatcttccttctgatgctgtgcgcgctcacgggctgcgtacagtatcagggcgaccttccgccggtatccggcgaacccgagccggtaaattcccccgccatcattcaggagctcactcaccatgtctga

SEQ ID NO: 429550 - DNA, 684 bp, Serratia marcescens
atgtctgatattcagaacattgttaatgtttcccgctcttttgaatccatcctgctggaaaaggaagagcgttcccgaagaaccgcctggcgggtggccgctgccggactgattctggccgcaatggcgattgcgaccattattattctgctgccgctgaaaaccaccgacactgaattatggtcagtggataaacaaaccgggcgctatgaatatatgacgcgcgtaaaggagcgggatatttcgtctgaaaaggcactggcgcattcactggcagcacactatgtcaggctccgcgaaggatataattatttctccctccagcgtgattatgacgacgtgcagttatttaacagcgacagcgtgaaccgggactatctggacgggtttaacggcgaccaggcaccggacgtgatttttaacaaggcggaatatattgttgatatcgacattatttccaatgtgcatgcgcctgccaccgggccggataatctggcaaccctgcgtatcaagcgcactatccgccgtattgctgataattccgtgaaaacggatgtctggaatatccgcctcacataccgctacgtcccgcaccggcaactgaccgacagccagcgcgaagtgaacccgctgggctttatcgtcaccagctaccagcgcgacaaagagctgaggggggaatga

SEQ ID NO: 429551 - DNA, 891 bp, Serratia marcescens
atgatgctgaaacacattctgctcctcacgggtttactggcgtcatgcgtggcatggagctcggcgacaccgcgcggcagcgcgtatgacagccggatgcagaacgtcacgtacaacagccagaacgtcacggtcgtcagtacccgacccggctacgtcaccatgctggtatttgatgacgatgaaacagtcatcgatgcgcaggcgggttttcccagaggctggaccgtgacgaaaagcgataaccgggtgggtgtcagcccgaatcccatcgcccagccagtcacggatgccagcggcaacaacatcagccaggtctttctgccgacggcaaaagactggaaaaccaacctgttcgtggtgacatcgaaacgcgactacagcctggagctgaacgtactggataaagactctcccgcccaggcattcattatccgctaccactatcctgacgaactgcggaaaaagtcagccgccgccagtgccacccgccagcaacaacagcaggaagcgctggaccgacagcggatagcgtcggcattccggcatccggccacgccgcgcaactggcgctacaccaggcgtgtagccgccggttcagcctccattgccccggactttgcctgggatgacggtcgttttgcttatatcggtttttctcccgcgaaaaccctgccttccgttttccgggtggttaacggtcaggagcaggcggtcacgcccggaacggttaaacggggcaactacaccgtgatggtggttccggcatctccgcagctggttctgcgctacgggagctcagtggtggggatcgaaaacgacggattcgggcgtatcccgctgaccaacagtgacaccgtttcgccgtccgttacgctggaggcaaaatga

SEQ ID NO: 429552 - DNA, 1308 bp, Serratia marcescens
atgaccgacaaatctttcccggacgaaccggaaaaaaccaccgccgaacgggaagcggaagcccgtgaacgcgcccgcgcggcaatggcatatcaggagccggagcagaaaacgccgcccggtaagccggaagtgacccgtttccgtaaagcttccggtcaccgcacgctgatcgtcagcctgctgagtctggtcctggtcatcgcgctggcatccggtggcgatcgtcttctcagcgccctgaaaaggggtgatgagaaagaatctgacaccgcgtcgccgccctcctccggggcggtgcagcaggagcgtaaaaatctgggcatggacagtaatccgtttggcctcttcgggccagggaggcaggaaagcgtagcccctgccagtcagagcccccctgccactccagccctgccgcccgggccacccgccctgaacaaggcggcagcgctggcagacgggctgaacagcggcagtacagggtcaggcgacgatatacgcacgtcccgaagcggatcgcgcagcaatgcgggaacgtcgggcagcccgtcagcctccacggcgtacacatcctgtcagtcggtactggtcagtggcgaagatggacgcctgcgctgcccggatacaacagcaccggcaggcagcaataacaacgacaatccgggcgtcgcacgcgtcaccggtgtcaggcggctgggccttgatcccgatctctatatcccggtggatcgctatattccgtgttcgatgatgcggcgcttcgtgtccgatgttggcggtcatatctcctgcctgatcggtgagaatgtctggagctccagtaaccatgtaatgctgatcccggcgggaacagttgcccgtggtatctaccgcaccggggcactgcaacacgggcgcagccggatgtttgtactgtggacggagttgcgcacgccggagcccggcagcctgcaaatcccgctcaccgatacgcaggccaccggcccgcttggcgaggcggggatcacgggctggatcgacagccatttctgggagcgtttcggcaacgccctgatgctgagtaccgtacaggacgtggcagcagcggcatcagatgccgcgccgggtaaagaccgcaataccgactataccgaaaatacccgcgccgccacggcggaaatggcgaaaacgacgctggaaaacagcatcagtatcccgcccacgatgtacctgaaccagggcgatgtgatcggcatcatgaccggcacggatattgatttttcctctgtttatcaactacggctgaaaaagaaatggtatgaacgctga

SEQ ID NO: 429553 - DNA, 1020 bp, Serratia marcescens
atgaacgctgaaaacctgtcactggactttatgaaaaaccggctctttggtgattttcttgcgcaggatggcctgacagaaattgccgttaaccgaccgggcgaactgcatacgaaaatccgggggaattggcataaacaggcatccccgatcacgctgcgtcagtgtcatgcctttgccagggcgctggcatcctggcaagacgacaatattgacgatacatcacccatcctttctgcaacattaagatccggcgaacgtattcaggcgattattcccccggcctgtgagcgtaatacggtatccattacgctgcgcaagccttcgtttgagcagaaaacacatcagtcatggattgatgcaggattttatcagcgtgtggctggtcaggagagaacggaaagccaggatgatgcactggttcagttatatcacagcgggaatatcccccgttttatggaaaaggccgtggaatatggcaaaacgatttttattgtgggtgaaaccggctccggtaaaaccacctatatgaaaacgctgctgcattatattccactgcatcttcggctgaccacaatcgaagataatcccgaaatccatttttatcaccacgccaattatgtgcatcttttttacccggcggatggcggggataatgccattgtcacccccggcaggctgatccgtgctaattatcggatgaaccctgaccggatattactggcggaaattcgtgggcgggaggcatgggacgcgcttaaaattattggttccgggcatgagggattaatcacctccctgcatgcaggcagcccggaagaatgtattgaagggatcattgaccgctgctatgaaaaccccgactgccggaatattccttttgatgtgctgttacgcaaggtacttaaaagcattgatgtcatcgtcagtattgacatacacggcgatgtgcgccggatgagtgatatttactttaagccagttcatttaaaaagcatgaaagaggcattcagacaataa

SEQ ID NO: 429554 - DNA, 1872 bp, Serratia marcescens
gtgattttgaataagctggccgtttcactgtcgccgatagtgaatggcgcgctgagcttcattgcttttatgcaacagcatcagctgatgctagcgctgttatcggggctgacgatgccgtttttcgcgtcgatgaaaagcgatgaacggcaaaaagccccgttgtggcaaaagctgattattgctttctccatagtctgttttctttgcggtacgatggggccggtacttatctggattttccagtggctttatcggggccgtgttatcgccagcattcccgttctggcatggccggtgctgattacctttaccgtaacaggttttattttccatattctgctgcgcagggtattaacccctgaattagataaaataaagaaacgcctcgtcaggaaaaccacgcttgaacgggaattacgcaccgatgtccgtactgtgaaatccctgctgccggaaacattgcattatgacccgctggattatatcgacctgaacaaagggttatttattggcatggaccgcgatattcagccgatgtacctgccgttaaaagactggcaaaaacaacacgcggatatcatcggcaccaccggcgccggtaaaggcgttgccaccgggatattactttaccaaagtattctggccggtgaaggcgtatttgttatggaccccaaggatgatgaatgggcaccacacctttaccgaaaagcctgtgaagatgcagggaagccctttgccttaattgacctgaggaaacaggcataccagttaaacctgattgaagagatcaccgccgatgaactggaagagctttttgttgctggtttcagtctggcagagaaaggtcaggagtcggacttttatcgcattgatgaccggaaagcggcccggatagccgcgcagtttgtcacccgtaatactgcctcaaccattcgggatgtgtataacggagactacgttcagggcattgcagataagataaaagcctttttcgggaaaattgaagagctggccttactcaatgccattaatgcccccaccggattttcgcttaatacgatatttgaggaaggtggttgctgttatgtgattggttcaatgcgcaacagcaaaatcattaccgcgcagcgcatgctgctggttcgcctgtaccagctggcagaaaggcgtgagcgagtgaaagacgtgccccgccccattgctatttatctttcggaactgaaataccatttatccaggcccgcgctggaaggtttaggcgcggcacgcgataaaggcgtgcatattattatggaccatcagtcgattgccgatttaaaagattgtccggcagatttgaaaggtgacgccgttgtcggtgcggtggttgagaacgccaaattcaaactggtttaccgtgtcatggacccggacaccgcggaatgggtagccaggatgtcaggcaccatattagtcgatgatgaggtccgcaaagcgaaaaccgatgccgtgctgacagagactatcgacgatgaacgcaccatcaggcaggccgagcgtttctttaccgacagcaatatgatcttgaacctacccgattttgtcagcttcatctttacgacaaaagcactcccggctgcttcgctgatttcgcccatcagggtgaaaaaacgcgaactggagatcagtgcagtgtcgcccgcgattgccgccagcgccgcaacggtaaacatcaccctggattttaacgaggaggaaacctccccccgaccgtcatcaacgccggatatcaccaaaactcggcctgatcttttttttgatacggacgaaaaagatacaacaacaccgattgccgataaagaggataacccgtcattgctggatttttaa

SEQ ID NO: 429555 - DNA, 747 bp, Serratia marcescens
atgctgatcaccgcataccgcgaacgccagacgcgacaccgcgaaaaaatacaaaaactgctgaatttcctgaaagaagagacgtacagtgactttaaaacactgatgcttctcttcggcttcagggatcataaatcgctgtattccctgctttcaaaagtcgagggcatggggttaatacaaaagcacgtcctggtatcacgcacgatgaaaatttcattgtggggcattaccagtgacgggatagccgttgtgttaacacccgacgatgcacttttcccggcgcggtttgagccgtcaaaagttaccggctggacgctggagcatcacctcgataatcaggtcgcccggatcacccttgagcaaaaaggcgcatccgggtggatcaacggcgatcgcacaaccttcctcagtcgttaccaggtcagtcaccggccggatgggctgatcacctttcccggcggcaccgtgatcgccatagagaccgagcgccgcctaaaaactaaagcccgttatcagtcgatcatcgccagccatttactggcccggacccgtaaagactggatttacgttttctatatcgtgccggatccgcagaaaaagcgcggtcttgaacggttgtttgacagcatccggcacgtcatcgttaaccaccagcacatcccgctggaaacccgccaccgaaatgtcttccgcatctacacgctcgacgagttgcaacggctggatttaggcaacttcatatag

SEQ ID NO: 429556 - DNA, 288 bp, Serratia marcescens
atgaacagagaaactgaccgactttcggacgtactaaccgaaatgagcgcaaaagcgctggtcacatggatgacgcattccgcattgcgggacataccgcgcgaagcattattggaacgcggcaacgattttgtatatgccctgcacgcaaattttgtgctgctacgtgatcttctgtcagaaacgctggaagatattgagcagcaaagtcatggcctcgaagaaagactagattgcctggagcagcggctgcagacgctccaggcagttactgataacagagaatag

SEQ ID NO: 429557 - DNA, 945 bp, Serratia marcescens
atgactatttccctgcatacccaggctagcgcccctaacaccgcagcagcgaccagcgtatccccgctggacccgtcaggctcctcaaaaacgaaattttccaaaaccaaaactgatatttatcagaccgtcactgacagcatcattgcggcactggaaactggtgttaaaccctgggcgtgtccgtggcagcgtacccctggtatgtcgggtttaccgtccaattacgcaactggtatgggttacagtggaatgaatatcatgttgttgtggtgcagtgcgtcagaacagggattcaatgattcgcgttggatgacctacaaacaggcaaaaacggaaggcgggcaggtacgtaagggagaacacggcacaacagctattttctataccatgttggaaagggaaaataacgaaggagaaactgactatatcccgatgctgaaaacttttaccgtgtttaatgttgggcaaattgacggtttgcctctgagtgacaaagcagtttgcccggcagagacctttgagtcgttaccgcgtgcggaagcgcttttccgtaacagtggtgcaaccatcattgagaagggacaaaacgcctttttcgcaccgtcaaccgatgaaatccatttaccggaacgtcgtctttttagcgatgctgccaatttctacgctacgggcctgcatgagctggttcactggagcggggccaaaagtcggctgaaccgagaaatgagagggaagtttggcagtgaggattatgcttttgaggagttgatcgccgaactgggaagcgcgttcctgatggcggacctggggattgtcggagaggttcagcatgaaagttatattgcttcctggctgaaagcactgaagaacgacaaacgctatattttcaaggccgccagcgcggcatcgaaagcgcatcgttatttaattgataaaatctga

SEQ ID NO: 429558 - DNA, 1815 bp, Serratia marcescens
atgattgatagattagaacttacaaaaaacattcaattctataacttaataataccagaagacaatcgaaacagaacaataacagacgttgaaataactaatattttggatgctgcagatgacaatattgaacctggtagtgattacctattagaggaatttagaattgaaaaaagattaattgaaaatgatatcccgtataaatattcattgcgaatcttcccaacactcaagccagtgtattttattggggagatcgagggcggagagaactaccaagataaaatttatgcttttatattaattcttgagtttgataatagtgtggcaataataaagaaaagctgtgcaaatatttcagatgatattgaaagaagttttaatttagtatcgagtaatttattggctagcacctttaatgattctgatgttttattccaaaaaatatccacaagaacaataactaattcagataaggcaatcagaaatagatctgcagaatcagcagatcttaaaggttcttactctactcatgctgctggcaggtcaataccttactacttaaaacttaggcaaggtgcaataattaagacaatctctggttcaggacgattggtagaggcgtcacagagagttaatttcgatgaaattgcgacatggtcttataatcaactttgtctgataaggcaaggtggaggggttaaggacttcctcaattcttttgcaaaacaaaaagatttaagtgaggttttaagctctactgtgccaagtgccttattaatagaaagtacttcattatatgaaaagttacaatcggaaggcgccatactaaaatacaaattgcctgatggatccgattgcattctaaatgaaatacaagtaaatcggttgcttcataaacttgaaaaagtttatgaaataaaacctgacttgactattcaagtgccgcttggtaaggctaaggtacgaaaaaacaacaaaacactaacgattgactctactgttctaaaaaaaataaaagtttcgtacaactctaaagatataactttgcaaagttttatctttaaaaatggtttctacagcattacgtttactgacccatgctatatgtattttatgggtaattgtttcgaagactcttcaggcatatcggaaatcaatagcatattagaaatgcttgtccctaaagctaatataaaaaacgttttaagtgagaaaggtttgcttttaaaaggaatggataagttctctaatgattccatgtttgatgtggtggaaaacattcatagtggggatgattacattttttgcgatgacttagggaatgaatgggcagaccatatcacatttaataaagcggattcatgcatttgtttcattcattcaaagcatggtgacaaaagcacatcagcaagtaaacttcatgacgttgttggtcagggtataaaaaatcttggatatatgtattttaacactgctgattttactgttaaattaaaaacaaaatttaataaaaactatactggagtttacaataaaaagtcagtgtcaaccaagataaaaaaggtaagaaaaggtgacactaaaaacattaaaaaataccttgacgacctttttaaggatgttaaattgcatagaaaatgcattcttagctgttcatttttatccaaaaaagagatagaacgcgagttcattaatttgcgaagaaaaaaaccggttaagcctcatgtgattcaactgctatggatcttgtcttctttttctcatgctgtaaaagaggctaatgctgttccaattatttattgcgataactag

SEQ ID NO: 429559 - DNA, 1944 bp, Serratia marcescens
atgagtcttcagatagccagccttgtgatttacaaccacgggggagaacgtcgtgaaatcacccttcatcccggtcaactgaacatcttgaccggcgcatccaaaacgggtaaatcagcaataattgatattattgattacgttaccgggcgaagcgaatgttacgtagccgatggcgttatccgcaaatgtacacaatggtatgggatcctttttcaactgaatgatagccaaatctttatcgcgcgacgcaatccagatgccggtacacagtctcacggcgacatctatattgcccgcgggagctccctgtcgattcccgatggcgcaactctccacaaaaacactacagtcaacgctgtggagaaatttctgggaacggcaatcggcattaatgaaaacgaacaccgtcccccgagtcctacgcgaccctctctggaggcaaatttccgccactcgcttcttttttgtttccaggatcagaacgatattgataacaaacagcgtctgtttcatcgccaagatgatggttttatagcgcaggctatccgggacacctttccttattttcttggcgcaatggatgaagagcggctcttacagcaagcccaattggacgatgcgcgaaaactactgcgtcagcttgaaaggttggtacgggaagctgaatcgctggatgacgccacatttccgcgtgcaaaagctcttcttgaagaagctaaaatggcagggcttaccgacgatcgaaccgtagttgtaaactatgaggcctgcatgactctgctccaaagcttgagcgagcgaggagtattttcagatgcagttgtagtaagtgatcatgatgacatattgatgcgactgcgctcagaacgtcaagggatgcgtactgagcttgagagactgaatagcgagattcgtgaaacgcgggcgtttacctcagaatcaaccggctatgagcgagaggcgcgggagcagcgtgcaagactcagcgtagtgaatttgataaagtcctcagaggtatcgcagctttgtcctctttgcgaaagtcacctcgaaaacgttcctccttctgttgctcaactcaaccattcactcagtgaattgagccgacaacttgaggcggtagaagcagaaaatccaaggctccagaagcgcttagcagccctccaaatacaggaaaatactctcctcaataatcttcgagagaatcagaaaaaaatcagtgattgcatccaacaagctgaatatctgcgagtacagcaggaaaactttatgctgcaggcgcggactctggggaaaatcgcacagtatcttgaaactgtcagcgatgcagagcagtattcgggtcttcgcacccggttagaaaatcagcaattgactgtaagtttccttgaaaaaaaattggatccgactgctgtacgagagaaacttgcggccttcctcaatataatcggccgttatatgactgaatattcggaacttctcgatctagaacatcagggaagcaacctgcgtctagatattcgcaaactcaccgttgtggcagataccttggacggaccggtaccacttttccgtatgggcagcggggaaaattgggtcggctaccatattttggctcatctggcccttcatcgctggttccgtcaaaaaaaacgccccgtgccaggatttctaattctcgaccagccatcgcaggcgcattatccacctgaaaaagataatgatgggtctattgacgctctgaagaatgaagatcagaacgctgtaaatcggctgttcagcctaatcaaccacgctgctaaaacgctcgcccctgatttacagataatagttatggaccatgcagaccttaaagatgactggtttcaggctgcagtctctgatcgctggcgtaatggcgtaaaacttattccaacaagctggataacaccccagaaataa

SEQ ID NO: 429560 - DNA, 501 bp, Serratia marcescens
atggagccttggtcttcccgtcccatcgaggagagctacctcttcaacccagctttctgcgtattgcttatagccaatacatcgtcagaattcaataaaaagaccggttgctctttaccctttgcactagcctttataatccttccgataattcttcatcagaaaacacgcaaggctctgcctgctacaaccgtaacgtcactaatggcatggtgccaggacaaccgagatacgatgattaatttccccgacagagtcaggcggctaaacggtattacccgtgagagcatattatttggcacaaggcaaagcgctctttgcttggatgaaaatggtgacttaaagaaaggagctaaactgctctcaccttcagaaaaacgaacgccgctgtttactcaggaagccggagaatgcattgagcgtgcggcatttctggggcgttggctcgcagcagctggtacaacagcgactatttatgctgcatgggggatagcgccatga

SEQ ID NO: 429561 - DNA, 1188 bp, Serratia marcescens
atgagtaacgcgcatgaggccagcgcgtcggccactggctatctgtatcagtgtcgctacgcattgctaaaaggactggaagctactctggattcaccagagttcaggatttcaattgaaaagtttgatgatatagcttttgaggcaaacggcttaccgattcatcttatccagaccaaacatcataaagccaaaactggaaagctgactgacagcagcgctgacctttggaaaacgctactcatctggataaaaagtgtagccaccgatagtggcggtttctcaagaactcgtcacttcctaataacaactggtttggcaccttcgaattcggcatcttttctattacgaacagaaagtcgtaacgaggctcaagccgattttttgttactcacgactgcaaacagttcaaataaccgcgcgctacaagaagctttcaacgcctataagctcttaccggaggaggctcgatttgctctgttaagatcaatatatgtacttgatagatctccttcgattactgatgttaaagaagatatttaccggcagttgcaccgtgctgtaggaagacagcatatcgaaattttcaccgagcgtttagaaggctggtggttcgaccaagtgatacgtatgctcagcggcaatgaggtgggcagcatcccagtgctggctattgaatcccgcattgatgaactgcgagaggagtttcgacgttcctcattacctgtagattttcggtcattttctcctcctcaagaagtgatcgctcagctagatagtcgaccctttgtcaatcaattgcgtaagataaatctcggttcggcccgtattgagtatgccatccgtgattattaccgagcttcagagcaacgctcaaaatgggtaagagaagaattattgcttaatgatgagcttaaaacgttcgagcaagacctgatagaggcttggcaaccacgattcgccgcacagaaagacgatttattacctgatagtgatgagtccgatcgtatacgttctggaaaggacctgttcacatgggcagaacagcaggcatgttttcctctccgcagcctacgagagcggtttcttacccacggaagctaccatattttggctaaccgatacgcagtggggtggcaccctgacttcatgcagaataatagtgatgaacagaaaggagaggattga

SEQ ID NO: 429562 - DNA, 774 bp, Serratia marcescens
atgctatatccacgttggtgcgacataactatccaagagcaagacaacaagcagctatggcgcttgtccgaacgcgatggaggaagggctgctatcgaagctaccctaactactcggatccgagctcactacgacaatttggacgaaatagctgaagacgtccgtgagttgggatatccaggcgcggctgcaattttggctgagcgcatgccgcgctccacccgagcacgttcgggagagcttggcgagatcctcgcgtccgagttggtcgaagaacatcttgaattcgaggttccgatccgtcgcctgcgatacaaggatggtcgagagatggcgctgcgcggcgacgatttcgtcggtctaaagctcgatgaccaacaaaatttgcactacttaaaaggcgagtctaagagtcgtgcaaaccttgccaacgccaccatctctgaggcgcgaaaagcactgtccagagacgatggcagacctacggcaacatcccttctcttcgtcgcggatcgactcatggagggtgaaggcgaacgacggcagataggtagacggattcgtaatgaagtcgccagtcgagctgcgccccaagggcgaaccagtcacatgctgttcaccttgtcgggcaacgccacgcctcaggcactgtacgacgatctcgcagcggcggatctggttcgtccccatctttctgcaaatttgcgcatagaagaccatcaggccttcattctggcctgctacgagagggctctggcacttggaaacgattga

SEQ ID NO: 429563 - DNA, 3402 bp, Serratia marcescens
ttggaaacgattgaagaattgactgcattcctgctcgacatcacacaagacggatatcgaggtcgcctgcaggcccggggtcaagcaagggctcttattcgccatgaaggaaacttgccaccagacgctccagccttcagcgaagggctcgactccgatcttgcggactatggcttctcagtactacgtgtttccttggcgctacgcgagcttggaggcgatgcagtgacttggcgaaaaggcttcgtacaggcaggtggggcttttgaggcattggttcagaacgggtcacaggccgacgcatctcgagggttctatcgaacaatgggggctgcttcctatcacttggccaactactctgcgctggcattttcgcttctgtcgcaattacaggccgatcagaatcgttcgcctgccgaggatgcgctcgcgctcctaatcgtgcgtgatcttcaaggcctggttcaacgtgcgagggattggcttagcagcccagcgaaccgagatgagggaatcgccagagctgcggccgagggagcgcttgaccccgacgatatcgtttcgcgtgtagcgacgtcgacaatgttcagagcattggtgttctttgagtttgccctgcaaaccggccaagagtccctcgttgtagaagctcgcaacctgctgagacgggcgatttcgttgaccggagcggccagcgcggtgtcactctggtggattcttcgaatcaccgtgaacctgatagatgatctttgggcaagcagtctgcacaaggttctgccctccgaagggccacttggctcgcaagactacgcacaacttcggaagctttttgtctctgagttgtactgcaggaggtcatctgaggtcgaattgtggccttctcaacttctggcggcacagcgagccgtcgatgtctccgacgacctagtggtcgcgctccccacgagcgcgggcaagacacggattgcagagatcgctgtgttgatggccctggcgtgtggtaaacgcgttttgatagtcacaccactcagggctctgtccgctcagaccgagcgctccttccgcaagacattcacacctcttggattttctgtctcgtcgctgtatggaagcagcggtgtagcaggaaatgacgaggatgcgctgcgggaacagaacatcgtcatagccaccccagaaaagttggattttgctttgcggaacgaccccgacatcatcaatgatgtcggcttgatcgtcctagacgaaggacatctgattggcccaagtgaacgcgagatccgctatgagaatctggtgcaacggttgctgcggcgcactgaccatggcgaccgacggatcgtttgtctttcggcaattctaccggcaggcgatcagctcaacgatctgactgcgtggattcgcagtgatgcgcctggcgatccgatccagtccagttggcgccctacgcgtcagcgctttggcactctgtcttggctcggaaattctgcgcggctgagcttcgaccttgagccagatggccctttcattcgacactttgtgccagaggtcccacccattcgccctcgtcgaaaggcgtttccaaaggacaacaaggagctaactctcgcagcggcatggaagttctctgagcaaggaaagagagctctcgtattttgcacccaacgagatcatgttgaaggatttgccgagactgccctggacctgcagcgacgaggctttctgccatctctgcttgccaacgcccaagaggttgaacgtgccatgtccgtaggtagggagtggctaggcgccgaacatcctgcagtacgctgtctggccatcggcgttgcgattcatcatggtcgtcttcccggccccttcctgcgggaagtggagacactacttgccgcaggcgttctacgcgttaccgtggcatcacccaccttggcgcagggactgaacctcaatgcagcggtactcctgatcccaaatctgtacagggcgggcactctgatcacgggtgaggagtttgccaacgttgcgggccgcgccgggcgcgcattcgtggatctcgaaggactcgtgatccacgtaatgcatcagccagaaaattggcgccaccagcgatggagagagttggtcacgtcggccaagactcggtcactttcaagcggcatcattgtcgtggtaaacgaggtcatacgtcgcctctcgacgtcgggtgtttttgcgcgtggggatgccatggactacctgtctagcacgcaagatgcttggttcccggacgctgtagatggtgagatggagtcagactcaatggagagcctcatcgagcggttggatacaaccgtccttgggctcgtcgaagcgcttgacgcgcaaagtgcggatctaccaaggctgctcgatgaagcccttgcgggttcactttgggcaaggcaaatcgctcaccttgacggcgtcgaaaagcagaagcaagtgtggattctcctcagtagagcacagctcatttggaacaaaacaacggtcgagcaacgcaaaggtcagttcgcgatgggagtgggcctagaatcgggccttgccatcgacgcgttggctgtcgagctgactgtgcttcttgaccgtggcgatgcagccgccctcgccagtgacgcagatgccctgatcgctgctctcattggaatgggagagcggcttcttgcgatccgtcccttcgttccagatgacccactgccggcgaactggagagacttgctgggagcttgggtgcgagggcaagacgtagcggccatcggccaagagggaatgcgcttcgtggacgacgcatttgtctatcgcctggtttgggcgattgaagccatccggatgaatcggcgcatcaatggagacgaatcagaactacccgtcgaaggagctgctgccgcctgcctggaagctggactaccgtccaacgccatggccatgcttgttcgggccggactgccctcgcgggtggccgccaagacagccgtggagcagctcgcgccctgcttcacaaatcgcgcggaaatgaaaacctggttacgatcggaagaagtagcaggcttcgaccatgttcctggatggcccacgcttgagactcatgcaatctggcagcagtttcggcacgacgttgtgtcaagcgtagatggcaggtgggcgtcgcaggagtggaccatgcaatgggcaacagactcaacagtgcctctgcgtattgaagttgatccgcaagatggacaagtgtcgatcgcgacgccagatttttcacagctcacaacaatcagacagaggcttcaggcggaactaccgagcctgcttgaagttgaatctctacagaacggaacgagtgtcaccatccgccgtattggaaaaggcgaggcgcgttgggtggataaggactga

SEQ ID NO: 429564 - DNA, 192 bp, Serratia marcescens
gtgctgtttctggatacgcgccaccggctgatcaagtaccgggagatgttccacggcaccatcgacagtgcatcggtgtatccgcgtgaagtggtcaaggaagccctggggctagttgaggtgcgtatgcaggatcaggtcattgtggccggagcaggctccgtgtcgttttcggagcagtggctgatttga

SEQ ID NO: 429565 - DNA, 882 bp, Serratia marcescens
atgatgcaaaaacattttgacattgttcaggctattatcggtaactgctttatgaacaatatggcaaacaatagatttttatacagcaagacgaatggtagctcaactacaaaatacccattaaactgcataggttttttctcatggaatagcagtttgcaaaataattacacaaaatttgtcttatttcctattttctttgattatctggatagctatgttgatcttcgttttgactgtgtcaacgaaagcttcaacaaaaaaatcctcattctcgaatccaatattgataaagattcaattgatgatttgttccttcatacgctgtacaaaatgtgttctcagattagaaataaaatgcttcaccatcggctcaactataacggtgccgaagtgacagccagcgagaccactgtcaccattccgcagtttagagttatcaatgaactgatttaccaatatgtaaaattctcaaagaccggtaattcactctttgaaaaaaacgctctctattccgggttagttgatattcttaaaaaaaataacgatagtgaacatgagtttgttcaacgagtagagttgatgtccgactacttgttcataaccccctatgaagctcgcgatttgcacactatcaacgcccccatgacttccactgacctcattatcgatcgagtctcttatcctgcaaaatgtttctacgatgacaatgaaatatttaaggaaaaatatccagatcctgaagaaaaaatcatcattggaaatcgttattattttttccaaatggaagacaaattatacttagtaccttcggaagcggtagaccatcgcaaaaagatcactttcggtgagattgatgcctgggagtttcaaacacagtaa

SEQ ID NO: 429566 - DNA, 4035 bp, Serratia marcescens
atgaattcaatcttctatcttgaacgtaattttactcacggtgacaggacgtacacagagacagagttgctggctgcatcaacgcacattgttgtgttagcagaacccggtggcgggaaaacagagctgatgaaaagtatcgctcagaaactgaatacttctgtcttaaatgccagcgtattcgcttacgtgggagcagataaagaaaatagcccactggtaattgatgccgttgatgaggtcgctaggatcgatcaatcaggtattcataaactccttgcgctagccagaacatcaaagccaactcgcgtaatcatgtcgagcaggtcaagcgaatgggggctggcctctaccggtatttttgagaaatttcttggtttctcccctatgattgtcaggctgagagaattcgatcaaaacgaacaacacgccatctttaagcaccatgcgccagaagaagacttctttacattccagaccgaagtaacacagtttagtttagaaatgttgttaccaaaccctcagtttctgaaaatgttcaccgatgcctacttagaaagtggcaggcgatttgctgacaaacgttcaatctttgctttagcggtcgaacgactggctaaggaagtcaacccagatatgccgaaagcctctatacctctttcagttgcacagaagatttcattttctgccgaggtttatgtcaaacttctgttgtcgggcgcagagggagtcagcaccatcgacgcgacggcaagccgaatgtatcccatgctgccagcattatttagcggcagtactgcctgttacgacatattgtcaactcagcttttcaaacccggcgataaggaagaccagcaccgcccggttcataagatcgtcgctgaatactgcgcagcggattatcttattaaacgaataaccgacccaggggatgttctcactttaacaaagtgcttgcctgttattgcaccgaacggtactgccagggatgagttgagaggtctgcttggatggatggcagcattgggcaacaagtcagtacaggaatctattattgagcttgacgcctatgcggttctcgcaaacggcgatccatcacaacttgaacgctcatcgaaacgacaacttcttcatcgactcaaagagattgaagccgcagacccctactttcgtcggagcgatttctggcgtcggttcagcgcggctggttttttcacgcaagacgttattgaagaaataaagcctcttttaacgatgggtaatgatggtcatctacgtgatttaattttagagcttctgacagactcaccggtaaactgtcagttgacgcctgaattaagtctgcttaccttaaaccctaacgagtctgaacacattcgtaccttagcaagcaaatgcttactaaatgtcaaagaatacgatttcattggcgctttagccattttgatttttgaggccagtaatatttcactcaatattgcagctaaagccatcgaagtcacagggccagaaaaatttaaccacacatatctctctggattcttacgcgtctgtgcgaacctctaccctgctcacgaagaacaatttgaaagagtggtcggctctcgttattttattaaaaagctcatttcctgtttttcacagcatactctcgaatctcttctggatgagctaacccataaccttcattgccactgtgggaaaaaatcctatgaatgtaattgtcgcaatgggataagcaagatcgtcggttcaatggtcgatcgctattttgaactgactcaagcaccgtttgaccctgtcaggatctggcaatggataggtaatctcaattttcatcgccaatgccaacccgatcaaagcaaatcggtacaggtgcttcgggaaaatgacacacttcgtcaggagatcattgcttatatattcgggccattaacggatcgtaaagaaatattcaacataagagtagaaaaattcgacggacacctgcactcacattcaggccttcatttatggaggaatgactataaattcatcctcaatctggcgtttgaaacagataacgttgacctgtgggcaagttttcttgtcaaccatcaacgttacaaaaacaaggaagaatatggccctgatgatttgcggacacaaatgcgtcagcacgccctttccaaacccgaatttatgcacgaatgggcccgatacaacaatgcaatgaaattatccgaacaggagcaccagttatggagattcagacatagccgaagcaggaaacgccatgaaaaaaaacaacgagagattcacgctaaaaacataaaatttgttaatgaaaacagagatattgtagaacgcggtcgtcactggagttgtctggtgcgttttgcagaacttgtgctcatgcatccagaaagaattgaattagaatttggtgacgagaaactggttcggactgcgttaagaaattgtctggattttattactcccgtggttcccgccctacccgaactagcggctctacaatgtgaatctaagcacaggtattctgagacagttttatatgcagcctgtctggagattttacgtgcagaaggcaatcttgaatgcgtcaataccgaattgcttacagcattaagaaccaacattcacatgggatatgactcagtttcgacggaagaacgtgacgctctacagactgaaatagaccgcctcatttttcctgatagtgaaagtgctgaaaaatatctccagcaatacgttgaaccccaactcgctcaaccatgccctcaccctgaaatctggatgttaagtggagaagaggtctttcgtgattcacgcgctaaactttctattgaatggcttcatcgttttactgatttatcccttaactcagtagatacactttttgaaattgctgctcaatacggcgatcgtgaggatttaaaagagattattgcagagcggtgctcagatatgatgtcaggctggcccaatccgacagaagatgaggattttgaacgcaagcgaatattctggctgatacgggagttctactttctcgagagcattacagctacttattgggcatggttaaaatctgccaaaaataacttactgcatttttatgagcgttctggccgcatgagccgaagcgagcatcgtgcctggccggaactgacctcaattaaaattgaagccattttatacgctttctttgaacaatggccgcgtgttgaactgccaagtagttgggacagcgatagtcctgaagaggaaaaagcctaccgctttttgactgatttaatttggtcaattgaatcagatattcctgacaatgcaatacctgtactggatcgccttcttgacgatccacgtttcacgagtcagaataaagggctgcaaagtatatatgctggtcagctcaggaaaaaagcactcagggattttgaaccacctacgccagatgaaatagtccaacatctggattgtgattcagtggttactgttgaaagcctgcgtcagttagttcttcaggagcttcatgatttccagaaagcgattgatggcggggagtttaactcggcagatcgcttctatgaaaaaaataaacgccttgatgaggtaaagtctacggagatcattgctgaacgtctcaatttaagactcgaacctcagggcatatcgataacacctgagcatcagttgaaaggtcaaaacaggagtgacttcacggcatctaagttgattggtggaaaaagacggctgctggttacggaagttaaaggccagtggcacagagagttatattcggccgcgtcagcccaactctatgaccgttattctatccacccagatgccgagcagcagggtatttttcttgttatatggtttggagagagtgagaccgttgcaggccgcaagctccacggcatcaaaaccgctcaggaacttaaaatcagtattgaagcagtgttaccggttgatctccgtggtttaatcgatgttttggttttagatgtttcacgacagagtaaacattag

SEQ ID NO: 429567 - DNA, 1218 bp, Serratia marcescens
atgacgcaacacctgttatccaccggagcagactacgcacagctggccgcgcgttttcggccgatcttcgccgaaatcgccgccggggcggtggagcgagagctgtcgcgcacgctgccgcatgaaccgatccgttggctgaaagaggcggggttcggcaaggtgcgcctcccgcgtgaaaagggcggcgacggcgcttcgttgccgcagctgttcgaactgctggccgaactggcggaggcggactctaacctgccgcaggcgctgcgggcgcatttcgccttcgtggaagatcggctgaacgcgccggacggcccggaacgcgatcgctggttcgaacgctttctcgacggcgagctggtcggcagcggttggaccgagatcggcggcgtgaagctggggcaggtcaatacccgggtaacgccgcaggccgacggctggtcgctcaacggcgagaaattttacagcaccggcagtctgtttgccgattggatcgacgtgtatgccgagcgtagcgacaacggcggcccggtgatcgctttggtgaacgtcacccagccgggcgtagagcgcgacgacgactgggacggatttggccaacgcactaccggcagcggcaccacgcgttttattgatgcgcaggtcgagcaggcgcacgtctacgcctttgccgagcgcttccgttaccaaactgcgttctatcagcatgtgttgctggcgacgctggcggggatcggtcgcgcggtgctgcgagacgtcggcgagggcgtgaggcaacgtaaaaggatctatagccacggcaacgccggttgggtgaaggacgacgtgcagatccagcaggtggtggggcaaatcagcgcctgggcctatgcggttgaggcgacggtgctaaaagcgacttcctcgctgcagcaggcttacgaggcgcatcgatccggcgatgaagcgctgctgcaggcgcttaacgtgacggcggagctggacgccgccagggcgcaggtcatcgccggggagtgggtgcagcgcgccgccggtgaattgttcaatgcgctcggcgcttcagatacccgtaccggcaaggcgttggatcgccactggcgcaatgcgcgcacgctctcttcacataatccggtgatctacaaggcgcgcaatatcggtgactgggaaattaaccgccatacgccgacctttatctggcaaatcggcagtggcggttga

SEQ ID NO: 429568 - DNA, 1434 bp, Serratia marcescens
atgagtaccttaaatatcgataccgcgccgccgttatctgcgcccatcggctcggccagcgatgtggcgcgtttgattaaccagcgcagcgagaaaaatacccatgcgcgcatgatcgtgctgttggcgctgggcggtgtttttctcgatgcctatgacctgaccacgctgtcttacggcatcgatgacgtggtgcgtgaattcagcctcagcccgctgctgaccggggtggtaacttcttcgatcatggtcgggaccattctcggcaacctggtcggcggctggttgaccgacaagtacggccgctatcaggtgtttatggccgatatgctgttttttgtggtttccgccatcgccgccgggctggcgcccaacgtctgggtgctgataggcgcgcgctttttgatggggatcggcgtcggcatcgatttgccggtggcgatggcctatctggccgaattctccaaattcaccggcaaggccaacaaggcgtcgcgcctggcggcctggtgcccgatgtggtacgccgcttcgtcggtgtgttttctgatcatctttgcgctctattttctattgccggccgaatatgcgaactggttgtggcgcgcctcgttgattttcggcgccgtgccggcgttgctgatcatcatggtgcgcagcaagtttatgaacgagtcgccgctgtgggccgctaaccagggcgatctgaaagaggcggcgcgcatcctgcgcgagtcatacggcattgccgcccatgaggcggaacctgacgccgcccaaccggcggcgccgccgaaggtcagcttccgcgtgctgttccgcaagccgtaccgcgagcgcacgctggtcaccagcgtgatgaacgtttgcatttcctttgaatacaccgccatcgccttctttctgccgtcgattctggcgcagtttctcggcgccggggtgtttgaaactatctccgcttcgctcgggctgaacgtgctgttcgcctttaccggtggcctgctcggcatgcgtctggcatggaagtatccgtcgcgccaggtggcgatcgccggatttgcgctgcagtttatcgcgctgattgccctggcgttgatcggacatccgcaggcggcgttcggcgttgggctggcgatcctgatgttgggcctatggctgttcgccgaaggattcggccccggcgcgcagatgatgatttatccggcgctctcttacccgacggcgatccgcgccaccggcgtcggtttcggccgttcgctgtccggtatcggcagcgcgctggcgctgtttattctgccgattttgcaggcgcgcttcggcaccgacatgttttggattgtttcactggcggcggcgatccccatcgtcttcctgctgatcattcgctttgaaccgacggcgcacgatatcgacgatctggccgatcgcgcttaa

SEQ ID NO: 429569 - DNA, 876 bp, Serratia marcescens
atgcctaatcacgattttgagatagtgaagaagaaacgctggccgtggccggtgggtatcgcggcggtggcgattgtcgccgccgcggtttggcacttcagcgccggccagcagcagacggtgcagttcggcagcacgttgaaagtgcactttgagccggcgatggccggagagcagcgggtgatcgagtacgtcggcgaccatatcgcgccggattacggccttaggctggaggcggttggcctgcaggatccggtgcaggccgatcgtgcggtggcgcaggggcagtacgccgccacgatctaccagcaccaatggtggctaaagcaggtggtagatgccaatggttttaagctgaccccgacgctgccggtgtttcagtgggcgtttggcatttattccgaccgctatacgtcgatcgcggagttgccggacggcgcggagatcgtggtgcccaacgacggcgccaatcaggggcaggcgttgtggctgctgcagcgcattggactgatcgggctggatccggcgatcgaggcgcgcaccgccaggctgaaagacattcgcgagaacaaacgccattttaacttcaaggagctggatttgctgaccatgccgcgcgcgctgaattcggtagatgcggccattggctatgtgtcgcagttcgacgccggcaaggtgccgcgtgagaagggcatcttgttcccaccggcgccgaaaaccttcgcctcgcagctggtgattggcacgccctatctgcaggacgaaaatattcgcaagctgcagcgggcgtttgccgatcccaggttgcaggcgtggctgaaaagcaccgacgacccgctggtgaaaggcgtgctggtgccggtctcggcagaataa

SEQ ID NO: 429570 - DNA, 705 bp, Serratia marcescens
atgaaaaatctgtctgacagcgtgatgagccaggacacaccctggcgcgagatccatcggttgatgctgccggcctacggcgaaacctggctgatggtcggcatcgtgatgctgtttgtggtggcgatcggcggcgccgtcggcgtggtgttgttcaacacctcatcgcgcggcttgtttccgcgcccggcgctgaatcgcgcgctgagctggttggtgaacatgggccgttcgctgccgtttctggtgctgatggcggcgattattccgttcaccttctggttgaccggcaccaccatcggcattccggcggcggtgatcccgatgatcgtcgccggcattccgttctttggccggctggtggagaacgcactgcgcgaactgccgccggaggtgacggcggtggggctggtgtccggcggttcgatctggcagatagtcacccgcgcgcagctcagcgaggcgctgccggcgatcgtcgccgccatcacgctgaacgtcatctcgatgatcgagtattcggccatcgccggcaccattggcgcgggcggcatcggctatctggcggtggtgtacggctaccagcgtttcgacaatcacatcatgatcgccaccattgtggtgctgatcgccacgattcaactgattcagtttattggtgaccgcctggtcgccgcgttgcgtcatcatcaggaaaccttttaa

SEQ ID NO: 429571 - DNA, 1020 bp, Serratia marcescens
atgatagagattgaaggattgcacaaggcttaccgcgcgccggacgggcgacggattgaggtgctgaagggcgtttcgctgcaggtgccggccggatcgattaccgccgtggtcggccccagcggggcgggcaaatcgacgctggcgaaatgcatcagcctgctggagcggccgagcagcggcagtatccgggtgaacggccaggacttgtcgcggcttgcgggcgaggcgctgcgcagggagcggcgggcgataggcacggtgttccagtcttccgcgctgctgcagcgtaaaaccgcctggcagaatgtggcgctgccgttgacctatctgggcgtggtgccgcgcgatatcgacaagcgggtaaagagcctgctggcagcggtagggttggcggacaaggcggcgttttacccggctcagctgtccggcggccagcgccaaagggtcggcatcgcccgcgcgctggcgctgaatccgtcggtgctgctggcggatgaggccacctccgggctggatccggacgccaccggggccattctcagcctgcttaaacagctgcgcgatcggtatggcctgtcgatcatcctgatcacccacgagatggatgcggtgcgcgacgccgccgacgcggtggccgagatccgcgacggcgtgattgtgcagcaagggccggtgcgcgagctgttggcggcgcccgattcctcgctgggccgccagctgttcccgctgaagacgctggcgtccgatgccgcgttgcggctgcaggtgacctattccgcccgtcagccggcggccaccgactggatcagccgcatcagccgccaactcgacctgcagatcgatctgctgggcggccacgttgaagtggtgggcggcagcctggccgggcggttagagattgcggtgcgttttggcggcggttcgcgttcggtggctgaactgcagggcgagctgcgacggttgggcattctcgccgaggtgctggaacagccggcggccttgcaggaggcggtatga

SEQ ID NO: 429572 - DNA, 1407 bp, Serratia marcescens
atgtcatcgcaacgtgaaattcgtcttaacgcttttgatatgaactgcgtcggccatcagtcgccggggctgtgggcgcacccgcgcgaccgttcctggcagtataaggatctcgaatattggaccgatctggcgcgcctgctggaacgcggcaagttcgatggattgtttatcgccgacgtgctggggatttacgacgtgcttaacggcagcggcgacgcggcgatccgccaggcgacgcaggtgccggttaacgatccgctggcgctggtgacgccgatggcgctggttaccgaacatctcggcttcgggttgaccgcctcgctgtcatttgagcacccttatcctttcgcccgcagattgtcgacgcttgatcacctgaccaaggggcgtatcggttggaatatcgtcacttcttacctggagagcggcgcgcgcaatattggccaccgggcgcagaccgatcacgatgcgcgctacgactacgccgatgaatacctacaggtggtttacaagctgctggagggcagttgggaagacggcgcgattttgcgcgatcgtcagcggcgcatcttcagcgatccggcgaaaattcatccgatcaaccacaaaggcgagttcttccaggtgccgggcattcacctgagcgagccttcgccgcagcgcacgccagtgttgtatcaggccggcgcttccagccgtggcaagcaatttgccgcggagcacgccgaatgcgtgtttgtcgcctctccttcgaaaaccttgctgaaaaaaaccgtggccgatatccgccgccgcgccgccgaggccgggcgcgacccgcgcagcatcctgatcttcaacctgcagacggtgatcgtcggtgaaactgaccggcaggcgcaggaaaaatggcgggaatacaaatcctataccagctacgaaggcgcgctggcgctggtgtccggctggaccggcatcgatttcggtcagtatcagccggatcaggtgctgaagcatctgcacaccaatgccattcagtcggcggtggaaactttctccagcgccgatcccagccgtgaatggaccgtacagggcatcgccgaatgggtcggcatcggcggtttcggcccgctgttggtgggcggcccgcaaaccgtggccgacgaactgcaggcgtgggtggaggaaacggatgttgacggtttcaatttggcctacgccgttacccatgaaaccttcaccgacgtggtggaactgcttatccccgagctgcaaaaacgcggagtgtataagcgcgactacacagcgggcactctgcgagaaaaattgttcaatcaggggccgcgcctggcagagccgcacccggcggtgggctaccgctggccggccggcgcgctcttggccgatgcactgagcgtcaagtga

SEQ ID NO: 429573 - DNA, 1380 bp, Serratia marcescens
atggcgaagcgtgcccatattatcgttatcggcggcggtttcaccggcgcggcgctggcgatccagctggcgcacggagcggtggatgtcacggtgatcgaaccgcgcgccgcgccgggctatggcgtggcgtattcgaccaccgagccgacccaccgcatcaacgtcccggccgataggatgcagctggcggatgagcccgcgggggattttgaccgctggttccgtcagggcggcgggctgacggccgatccgcaggcgctatggcgcgacggtaaggcctatccgcagcgcggcgccttcggccgctatgtcgaggaacgttttcatcaggcggcgcagtcgggccaggcccgcttgcggcacctgcgcgatcgggcgcagtacctgcagccgcaggcgcagggcgcgtctgtcatcaccgccggcggcgaacggctgtggggcgattatgtggtgttggcgaccagccatccgccgcccgcgctgccgcggcagatcgccccggaactggcgcgcgacgcgcggttaatcgccaatccctgggcggagggggcgctggatgagattgaacccgatgaatcattggcgatcgtcggcagcgggctgacgatggccgatgcggtggcggcgttgcaccgccgcgggcatcgtgggccgattaccgcgttctctcgtcatggtttgttgccgcgtgccaatgccgaaggggagtacccgacgtggtcgtttaccccgccatccggactgcgtgacggggtgcggcaggtgcgccttgaagtggcgcgcgccgctgggcaacgggtgccgtggcaggcggtgttggacgaggtgcgcgcccagggccagcgtctgtggcaagcattgacgccgaccgaacagcagcgctttctgcggcatctgcgcgcctattgggacgtgcaccgctatcgcattgcgccgcaggtgagcacgttgctggcggagcaacaggcggcgggcacgctgcaggtattggccgctcgtttgcggcgggcagaacccacgccgcagggcgtgcgtttgacgattctgccgcgccagggcgcagagcgggcgctgcaggcgcagcggctgctgatcgctacgggtccggcccatgccggcctgatcgccgccagcccgttgctcagctcgctggcggagcagggggcgctgcgcgccgatccgctgggattggggctgtgggtcaatgccgacagccaggcgatcggcggcgacggccttgccaacccgcgcctgctggtggccggcccggcggcgcgtggccgcttcggcgaactgatggggctgccgcaggtggcggaacacgcccaaagcgtcgcgcaatatctgctggcgcgatgtccggctgcaaactga

SEQ ID NO: 429574 - DNA, 1173 bp, Serratia marcescens
atgactgagtcagtgaaagagcgcatcaacgttttctggtttctgccgacccacggcgacggccgctatctgggcacggcgcagggtgggcgcccggtggacctgccttatttgcagcaggtggcgctggccgccgacaacctcggctattacggcgtgctgatcccaaccggtaaaagctgcgaggattcctggctggtggcggcggcgttggcgccgatcacccgccggttgcgctacctggtggcggtgcgccccggcctgcagccgccgagcctggcggcgcgcatggcggcgacgctggatcggctgtcggacggacgcctgctgatcaacgtggtgaccggcggcgatccggtggaaaacaaaggggatggcatcttcctcagccatgccgaacgttacgaagtgacacaggaatttctcacggtgtatcaacggctgctgcaaggggagaaggtggatttcagcggtaagcatattcgcgtcgaaggcgccgaattgctgttcccgccggtgcaggaaaacggcccgccgctctatttcggcggctcatcgccggaagcgatcgacatcgccgctgggcagatcgacacctacctgacctggggcgagccgctggctcaggtggcagaaaagctggcggtggtgcgccagcgcgccgagcggcaggggcgtaaactcagctatggcattcgcctgcacgttatcgtgcgcgaaaccgaagacgaagcctgggcggcggccgagcgactgatcgcgcatctggatgacgacaccatcgcggcggcgcagcagatctttgcgcgcatggactccaccggccagcgccgcatgagcgaactgcacggcggctcgcgcgagagtctgcgcatcggccccaacctgtgggccggcgtcggcctggtgcgcggtggcgctggcaccgcattggtgggcaatccgcagcaggtggcggcgcgcatacgcgagtatcaggcgctgggcatcgacaatttcatcctttccggctatccgcatctggaagaggctcaccgcttcgccgagctggtgatgccgctgctgccgctggcgcagtcggctcatcagacggctcgcacgatcaataccggcccgtttggcgaaaccatcggcggcgatcgtcgtcccggcccggcgcagcgggagggctga

SEQ ID NO: 429575 - DNA, 1914 bp, Serratia marcescens
atgtacgatccccaaccgttcgccgccgacaagccggtgctgatcgatccggcgtcgctcgctctgcaaagcgtgctcgatcggctggctcccaccgacgccaccgtgctgatcgtcggtgaaaccggcaccggcaaagaagtggtggcgcgctatctgcaccaccacagcgcgcgccgccatcaacctttcctggcggtcaactgcggcgcgctgacggaaagcctggcggaggccgaactgttcggccatgagaaaggcgccttcaccggcgccgtcggcactcatcagggctggttcgaagcggcggaaggcggcaccctgctgctggacgagatcggcgagttgaacctgtcgctgcaggtcaagctgctgcgcgtgctgcaggaacgggagatcacccgcgtcggttcgcgcaaaccgctgaagatcgatgtgcgggtcatcgccgccacccacgtcgatctggccggcgcgattcgccaacggcggttccgtgaagatctctattaccgcctgaacgtggcggcggtgactttaccgcccttgcgccagcggccggaggatattccggtgctggccagacattttcttgcgctgtacgcccgccgtctggaacggccactgccgcggttgacggcggaagcgcagcaggcgctgctggactacccttggcctggcaacgtgcgcgagctggagaacacgctgcataatgcggtcttgctgagccaggagggagcgatcgcaccgcagcaactgcagctcacccatcgcctgacggataacgacggcggcagcgacgacgccatcgaccgctttgtgcagcggcagttgcaaggcgacagcgcacagctttaccaacgggtgctggatgcgctggtgcgcaacgccttcgaaagcagcggcggcaaccagctgcaagcggcgtcgttgcttggcgtcagccgcaataccctgcgcacccatttggcacatcttggtctgatcaaaccgcgccgtcgcagcgccggcgcacccgcacattcaccggccatcgccgcagcgtctctgcccgaacgcgaactgcgcatcggctatcaaaagttcggcaacctcggggtgctcaaggcgcggcaaagcctggaacagctcttcgccacacagcgcatcagcgtgttgtggagcgagtttcccgccgggccgcagctgctgcacgcgctcgacggcgatgagatagacttcggcaccaccggcgaagtgccgccgatcttcgcccaggcacagggcaatgcgctggtgtacgtcggttttgagccgcctgcgccgcagagcgtggcgatggtggtgccgcaagacagcccaatacgcagcgccgccgatctgcgcggcaaacgcatcgcgctcaacaaaggctccaacgtgcactatttattgctgcagatgctggacgaacagggattgacgttgaacgacgtgcgtatcgtctacgcgccgccgaagtatccgctgtcggcgaccgacctgcaggcggtggacgcctggatgatgtgggatccgctgctcagcgacgcgcagcgcaacggggaactgcgcgtgatcgccgacggcacccagcgggtgctcaatcagcaattctacctggcgcgccgcggcttcgccgagcgttcggacgatctgttgcggccgctgatgcaggcgctgcagcacaccggccgctacatcgccgcgcagccgagagaagccgctcgtcacctttccaacgaactggggctggcgagcgcctcactggaactcgcgctgtcgcgccgcagccacgaggttcgcgccatggatttacaggtgatccgccagcagcaaagcatcgccgaccgcttctacgccctcgggctgctgcccagagcgatcgccgtgcgcgaggcggtttggccgatgtga

SEQ ID NO: 429576 - DNA, 1113 bp, Serratia marcescens
atgacgacattttcgcaccaggtcgatctgctggccgaactggccgagattgcgccggattccacgctggcgcaggccagagccacccgtcaggcggcgaccgatgccgttcagtccagctatctggcgctgtttgcgcctgcggacgccggcgattttccgctggcgcagcggctgcgcttggctcagcgcatcagtgaatggcacggcgagccgcgcttggccgcgcactacgctgctctgctggaacgtcagggcgacgcgccggaagacgagcggctgccgctggcgttggcgcatgcagaacggttggcgtttcaaccggccaacgccaacgcccagcacttgcaggcgctgcggcaggccggctggtcgctggacgccatcgtcacattgtcgcagttaatcgcctttgtcagtttccaaagccgcttgctgcggggctaccggctgttgggtggcaagacggacgacgctgcggcgcatcagccggtaacggccggccgctggcgtacggagcgcacgacgcgaggcggccgtcacgcgccgccggcgtttacccggcaagaactggggtgggagccgtggatcgccgccaaaccgttggcggaattcgatgacgccggccgggcgttgctagagcggtttggccacgccgattccgattacttccgcctgttggcgcgcaaccatccggtgctggaacaacgcacgctggcggaccgggcgattttttatacctccggcgggttggcgcggcaggatcgcgagctggcggcaacggtcgccagcaaggtgaacggctgcatctactgtgcctcggtgcatgcgcgcaaggcggcgcagctgtcgaagcgcgaagccgagatagatcggttgctggcggtggcgccgggcggcgcgttgagccaggggcaggatgacgcctggcaagcgcagataacctttgccgccgcactatccgcaacgccgccgcaggccgacgccgggcagctggcggcgttgcgcgctcagggcctggatgagctggcgctgttggatttggtgcaggcgacggcgttttttgcctgggccaaccggttgatgttgacgctgggcgaaccttatctctga

SEQ ID NO: 429577 - DNA, 1044 bp, Serratia marcescens
atgagcggaaaaagactcggtttcttcacccgattgctggatcagggcagcgcgcaggagcgctaccggctggcgatcgaacagatcgtgcacgccgaacgagccgggttcgacaccgcttgggtggcgcagcaccactttcatgctgatgagggcggtctgccatcaccgctggtgtttttggcgcaggcggcggcacgcacccgccgtatccggctgggcaccggggtgatcacgttgccgatggagtcggcgctgcgggtggcggaagacactgcggtgctggatctgttgtccgacggcagactggaggtgggcgtggccggcggcggcacgccgtcttctttcgccgctttcggtctcgacgccggtcagcgcaacacggcattcgccgagaatttgcgcacgttgctgagtgcctggcgcgcagaggcgttgggcggcgaagacaaccggctgtacccggcggcgccgcagctggcgcaacgtgtctggcaggccacgttctcggtggaagggggggaacgggcaggccgcgccggtgacggcctgatgctgtcgcgcacgcagccgcgccccgcggacgcgcctgacctgccgctggacgaactgcagaatccgatcattgacgcttatctggcggcgctgccgccaggggtggcaccgcgcatcatggggtcgcgcaccgcgtttgtcagcgagaacggccagcaggcgcgcgacttcgccacggccgggttgagccgtgggctggagcgtatgcgcgccagcggccaccggttggccgatacgtcgctcgacggcctgatccgcgctttcgacgtgcacttgggcacgccagatcaggtgatagcctcgctgcaacgggacagcgcgctggcgcgcgtcaccgatctggcgtttcaggtgcactctatcgatccaccgcacgcccatattctgcgttctatcgatcttatcgcccgccacgtggcccctgaactgggctggcggcgcggcacgcctgccgctgcttatgaatatcacgttgaggaaaagctatga

SEQ ID NO: 429578 - DNA, 1659 bp, Serratia marcescens
atgagcatgcaagcggcatggcaacgggcggcgcggccgccggtactggcgctggacaaggtttccatcgcctatgagggcaacgaaggcaggcgaagggtggtgcatgaggtgtcgttcacgattgagccgggcgaggtggtggcgctggttggcgaatccggttccggcaaaaccaccacggcgcaggcgatcatcggcttgctggccaacaacggccaccttgaacagggcaccatccggctgcacggcaccgatatcgccggctggtcatcgcggcggctggatgcggtgagaggggcgcaaatcagcctgatcccgcaagatcccgccagctcgctcaacccggtaaaaaccatcggcgagcaggtggcggagatcgtcaatattcaccgccggttgccgcgcgcgcaggtacaacagcgggtgacggaactgttgacccgcgtcgggctgacgcacccggaactgcgggcgcgccagtttccgcatcaactttccggcggcatgaagcagcgggtattgatcgccatcgccattgcgctgcagccggcgttgatcattgccgacgaaccgagcagcgcgctggacgtgacggtgcaaaaacgcattctcgatctgatcgacgagctgcggcgcgaatttggcaccgcagtgttgctggtgacgcacgatttgggcgtggcggcggaacgcgccgatcgactgctggtgttccgccacggccgggtacaggaacagggggctaccgccgaggtgctgcgcgcgcctgccagcgcatacacccgcaaactgtttgccgatgtgccttcattgagcggcgccgttgcgccgccgccgaaacgcagcgggcagccgccggcgatcgtggttcaggcgctggtgaaggattttcggctgtccggcggccaggggttccgcgcgctggatagtgtgtcgtttagcgtgccgcgcggcaccacccatgcgttggtaggagagtccgggtcgggcaaaagcacgctggcgcgttgcctgctgggcttcgagcggccggatgccgggcagatcctgatcgacggcgtcaacgttatcggtctcaggggcgaagcgctgcgtcagtttcggcagcgcattcagctggtttatcagaatccgttcagctcgctcgatcccaaacagactctctatcgggtgattgaagaaccgctgctgaatttcgcgccgatcggcaaaccggagcgcgatcggcgggtgcgtgagttgttcgaacgggttgcgctgccgcccgatttgctgaaccgcaggccgcacgagttgtccggcggccagcgtcagcgggtggcgattgcccgcgcgctggtgctgcaaccgcgaatattggtattggatgaggccacgtcggcgctcgacgtcacggtgcaggcgcagatcctgcatttgttgcaagagttgcagcaggagcgggacctgacctacctgtttatttctcacgatctggcgacggtgcggcggatttcgcacagcgtttcggtattgcaccgcggtgaacgggtggacggcggcaccaccgccgagctgttcgccatgccggggagcgattacacccgtcaattgatcgccgccattcccggccgcgcatcgcatgccggacagccaaaattcgaggaggcgatatga

SEQ ID NO: 429579 - DNA, 891 bp, Serratia marcescens
atgagcagtatctcctttgaaaaagccacggttccggagcgcgatctgtccggcgctgaaagtgaaggcgcgctgcccgccagtcgtccgagccgccgccgtgtccccctgacgcttttgctggcctgggcggtcattgcgctggtggtgctgtgggcgttggcgccgcagctgtttaccgcctacagcggcaccgaaggcattgccggcgcgcagcggctggcgcccggcggtgaccattggcttggcaccgatcagctgggacgcgacctgtatgcgcgcatggtgtacggcgcgtcgcaaaccctggccggcgcggtagtggcggtggcgctggggttggtgttcggcaccgcgctcggcctgatcgccggtgcgttgggcggcgtggcggacgacgcggtgatgcgcgtcgtcgatgtgctgttgtcgatccccggcctgctgctgtcgctgagcattatcatcctgcttggtttcggtacggtcaacgccgccatcgcggtgggcgtcacttcagttgccaactttgcccgtctggcacgggcggaagtggtgcgagtgcggcacagcgattacgttgaagcggcctacggcagcggcggtagcttttgggcggtgctgtggcggcatatcctgccgaactcgctgacttcggtgatcgccttctcggcgctgcagttcggcagcgcgatcctggcgatcgccaccctgagtttcctcggttacggcactccgccgccaaccccggaatgggggctactgatcgccgaagggcgcaactacatttccaccgcctggtggctgaccaccttcccgggcattgtggtagtggcggtagtgttggcggctaaccacatcagccgttcgctgggaggaaaagcgcgatga

SEQ ID NO: 429580 - DNA, 945 bp, Serratia marcescens
atgaagcgatatctggcagggcgcatcgggcaggcggcattggtgctgtgggcggcctttaccctgtcgttcctcctactgcaggtgctgccgggcgatgcgatcctgatcaaattccagaacccggacatggggctgagcccggcgcagatcgccgacatgcgcgcggcctatggcgcggatgtccccctgtggcggcagtatctgcataccctgggcagcgtgctgcatggcgatttgggcttctcaatgcaggccggggtgccggttaccgcgctgctggcggctaatctgcccgccacgctgcagttggcggtactgggctttgcggtggcgttgctgctggcgctgactatcgcttttgcttccaacctgaccggcttcggctggctgcgttcggcgctgcagatgctgccgtcgctgttcgtttcagtgcccaccttctggctgggcattgtgctgattcagctcttttcgttccgcctgaagctgatcccgatcattaaccccggcgagtggcaggggttgattttgccgatcgcgacgctggcgctgccgatctctgcgccgctggcgcaaattctgatccgcagcatcgatgcggtgcaaacccagccgttcgtcgcggtggcgcgggccaagggcgccagccgcagcggggtgctatggcggcatgtggcgcgcaacgccatgctgccggcgctgaccatcgccggcatgctgttcggcgaactgatcgccggggcgctgatcaccgaaaccgtgtttggccgcagcggcctggggcaattgacccagcaagcggtggtcaaccaggacgtggcggtgctgcaggcgatagtgctgatctcggccaccgctttcgtcatcatcaatttgctggtggatctgctgttcccactgctggatccgcggctgaaaacccaggcaggagcatccctatga

SEQ ID NO: 429581 - DNA, 1560 bp, Serratia marcescens
atgagcccggcgttggcggcggtgcagggcggcgcgctgatctacctcgaacagcaggcgcacaccaatctttatccgccttccggtgggttttaccccaacggcggtattctcaatcagatcaccgataagctgacttaccagaaccccaagacgctggaaattgaaccctggatcgccgagtcctggagcagcaacgccgacaaaaccgaatataccttcaagctgcgccccggcgtgactttctccgacggcacgccactggacgccaacgcggtggcgaagaacttcgacacctacgggctgggcaacaaggagaaacgcctgccggtttccgaggtaatcaataactaccagcgcagcgaagtggtggatccgctgacggttaaattctacttcacgcggtcgtcgccgggtttcctgcagggcaccgccactattggctccgggctggtatcgctcggcacgttgaaccgcagctacgacgaactgggcgatgcgcgccatatcatcggttccggtccgtttgtggtcagcggcgaaacgctggggcgtgaggtcgagctcagcgcccgcaaggattatgactgggggccggccaaatcgccccaacaagggcgagccaatctggacggcatcaaggtgatcgtcaccggtgaggacagcgtgcgcatcggtgcgctgcaggccgggcaggcggattttatccgccagatccaggcctatgacgagaagcaaacgcaggatcagggctttatcatttatgccgcaccgacgcgcggcgtcaacgacagcatcgctttccggccggataacccgctggtggccgatctgcgcgtgcgtcaggcgctgctgcatgccaccgacagcaaacagatcgtcgatacgctgttctccgccaactacccgcaggccaaatcggtgatcgcctcctcggccgccggctttgtcgatctgtccgacaagctgaaatttgacccgcagcaggctaaccggctgttggatgaagcgggttggaaaaagggcggcgacgggctgcgggaaaaggacggcaagaagctggtgctgacggtgtatgaatcgttgccgcagccgcagaacaaggcggtgttgcagctggtttctcagcagtgggggaaggtcggcgcgcggctgaacattctggcgggcgacgccggcagccgggtggcggataatctcgacccacagaaaaccccggcgacggtggtggaggtggggcgcgccgatccggacgtgatcaaaagtcagttttatccaaccaatcgcgatgggctgctgcagaagggcggtaccagcagcaacagcaattttagcgatgacaagctgaacgccctgctgctcggcattgcctccgaggttgacgcgcaaaagcgcctgcagacagccggtgaggcgcaaaactacctgattgaccaggcctacgtgatcccgttttttgaggagccgcaggtgttcgccggcgcgccttatttgaagggggtgagcttcgaagcggtcggccgcccgagcttctacggcgcctggttagagaaacattaa

SEQ ID NO: 429582 - DNA, 288 bp, Serratia marcescens
atggcgaacgcgaccttgaggtatagagtactaacgtttttggtgaccgataccagcagcttagctatcaagcaacgcgcgcccttttgcagttcaccagccgcaaggaagtggaagaattgcataccctttgccgaggacggttgcgtctttatcaaagtacgcgccgccgataccgaatcgctggagaatttcctgatggagatccagagctttgagggtgtacgctctgtgcgcagcgacatctcgctttccacgtttctggcgcgcgggccttcgccggattaa

SEQ ID NO: 429583 - DNA, 885 bp, Serratia marcescens
atggcgaaaagggagaactacaacgagttgtacctatttatgcaggtggtacgggaaggcagttttaccgcggcggctcaacggctggggcttgctcaatcaggggtcagccgttccgttcgtgagcttgaggaaaggctgggtgtccagctactggtgcgcaccacgcgtaaactgtcgctgacgcaagcgggcgagcagctctaccagaagacggcatctggatttgatacgctagatctagggcttgccgcgctggcacattatcgcgagaccccttccggcacggttcgtatcaatgccagccagcacgcgattgataaatgcctgctgccaaagcttgcgatatttaaacagcgctatcctgatatcaggctggaactcataaacgagagcaggttcgtcgatattatcgaagaaagattcgatgcgggcgttcgcctggggcccgaagtaagcactggcatggttgctgtacgcattacgcccgatatggagatggccattgtgggtacccctgagcattttcgtcgctacggttttccgcaaaccccggcggatttaacaacgcatccctgtatcgcctatcagtttgccgacggcagcgtgtaccagtgggaactcaatcaggatgataaaaaaatcactcatcggcctgaaggacaatgggccttatctgacagttatatggaagcagaagccgcccggctgggcttggggctggcctatgttcctgtcgaactggtcacagatgatctggaacgcggggcgcttatcagagttttacagcgttacagcctgcgaatggaggggttgtttctctattaccctcatcgcaatgtatcccccgctctgcgaatggtcattgaaacattgaaaatctga

SEQ ID NO: 429584 - DNA, 645 bp, Serratia marcescens
atgtttgctgattttggtgtcgtgaatttctggacgtacctgcttggtgcgacgctgatagtccttgtgccaggccctgaaaccctgttcgtgattaaaacgagcattaccagcggcatcaagcgaggctttgctgcaatattttccatcctcctgagcgacgttatcctggttcttttggcctggtgcgggctggcggcagttatcagctcaacaccagccttgtttaacgccatcaaatacgcaggtgctgcttatctgttctatctcggagtccagacgatacgcgctatctttaagccagcggtcgaaacgagtgaggaaaagaaatcttcagctgatgctaaggggatcatcgggcgcggaatgctggttacgctattgaatccaaagacgctgctgttctatatctctttcttcgcccagttcatcaatgttcaggctgagcactcctggatggcgtttatcattcttgctgcagtgatgttcgcgattactctcgtttatttcggcttcctcgttttctgcggctcttatctgctcagtcgtctgaaaggcaaccgtaggttatctgccaccggaaacgcgctggtaggtatgttcttcattggatttgcagcacggcttgcaagcgcaacttcctaa

SEQ ID NO: 429585 - DNA, 768 bp, Serratia marcescens
atgatcacagttaaccagctgaccctgggtttcaaggggcgagaaccccttctcgacaacgtcagttttcatctggcgcggggcgagatcctcagcgtgctcgggccgaacggcgccggtaaaaccacgttgctgagacacatcgcgggcctgtgccggcccctgtctggcgggtgcaagatcggcctggtcgacaatcggcccgcccggttggcctatgtgccgcaggcgaaaacgccgcatttcgcttatggggtactcgattttgtcactttcggctgtgcccgccaggcggggtggttcgccaggccgcggcggcaagatgtcgccaaggcgcaggcggtgttgcatgcgctggagatcgcgccgctggcgcagaaaaatatcaaccagatcagcggcggggaactgcagatgtgttatttcgccaaggcgctggcagcggatcccgacgtcatgatcctcgacgaaccggaatcgaacctggatttttacaatcaggctaaaatgatcgagatgctctggcgcctcgccaaagagcggcagatgacgatcgtgctgaatacgcattttctgcattatgccgatcgtatctccgacaagtgcctgctgatgaataagcgacagtgcatgtttggcgataaaaacgccttgctgcaagaggatatcctggagcgttacttccaggtaccggtgagaaagtgccggtacgaatatgccggcgtcagcgaagaaacgttcattgtcgcgctaccgcaccccgcttga

SEQ ID NO: 429586 - DNA, 1077 bp, Serratia marcescens
atgtgcgtaacagtgaaatttatcgccaccgcgctgctggccctatttgccttgccgacggtgccttgcgccggcgccagcctgccggcggcggccgagccgttgcaaagcgcggcgacgcaaacgctgcccggcagctacccgcggatcgtcatcaccggcaactgccccttcggcgtgatcctggcgaacgaggcggcctatcggcatgtcgtcggcgtggggccctgggcgttcatgcatgccgataggcatgtgttgaaggacatgaagccggatatcggcaggatcacgtccgatttcatcaataaggactatcgggtcaacatggagtcgttaatgaatctgcggcccgacatcatttattactacggcaaaagccaggacgatcggctggaaagggcgggcgtgatgacggtcgatctggacgccggcgggaagaccaaataccagccgatggttacccaggtgtattgggaaaataccttcgccgacaccctcggcctgccgcgtacgcataaattcaaagacgcctgggaaaagaccctgaaacagatccgcccctatgccgccgccatccgcgcgcagcacgtcagggcgttatatctggaagaaagcgacggcaggcagctgaaggtgagcggcccacacacctacggcgacacctacctgaaaatggccggcatggacaacgtcgccggggatttgccggtaaaaggggatgccggcaggtacatcaacgtttcgatggagcaaatcatggcctgggacccggatgtgattttcgtggtgttcggcagcgccaaagcgctgctgcacggggggatccccggccaggcgtgggagacgctcagggcggtgaaaaacggcaaggttttctcgacgccggtgggcattcacaactgggggggcctgtcggcggaaacgtcactgctgccgctgtttatgatcaaccggtatgcccctgaagacattagcgacaaaacgctgcgggaggagacgcgtcgctattatcagacgatgttctcttatgcgatcccggaccggttgctggatgaggtgctggcgcaacgctag

SEQ ID NO: 429587 - DNA, 945 bp, Serratia marcescens
atgcaaacgatcctgggcgccagtggccagatcgcccaagagctggcgcgtgaactgaagcgcgcgtacaccgatgatttaagattggtcagccgcaacccgaagaaggtcaacgacagcgatacgctggtcgcggccgacctgctcgatgcacagcagaccctggcggcggtgaagggcagcgacgtggtgtatttcgccgccggcctgccgccggattcggcgctgtgggagcggcaatttccgaccatgctgcagaatgcgttggacgccagccgtaccgcgggcgtgccctttgtttatttcgacaatacctatatgtatccgcagaacggcgaactgcagacggaatcgacgccgttcgcgcctcgggggcgcaagggacgggtgcgcgccctgatgaccgagaaggtgctcaacgagatggagcgcaagcagatccccgtgctgatcggccgtgcgcccgagttttatgggccgggaaaaacgcagagcttcaccaatgcgctgatcgtcgacaggctgaaagcgggggaaaaaccgcgcgtgccggttcgcgacgacaggctgcgcacgctgatctggacgcccgacgccagccgtgggttagcccggctcggcaatacgcccgacgcgttcggccagacgtggcatctcccgtgctgcgacgaacggctcacctatgcgcagttcgccgccttggcctgcgaggtgtttgggaaggacatttcatattccgtcatcggcaaatgggcgttgatcgccgcagggctggtttcgtccggggcgcgtgagatgcgcgagctgctgccgcgctacgagcacgacaacctgttcgactcgaccaagttcaagcagcgctttcccgacttcgccgtcacgacgtatcgcgccgggctggaaacgatttggcgggagtggaagaacgcgcaagcgcggcgttaa

SEQ ID NO: 429588 - DNA, 1143 bp, Serratia marcescens
atggctgaacaaaagaaaaatgcccaggtacagagtggcgtcaacgacgacatcaccgaactaaagtcgctgactacactgcgcaaacgggtcgtcagcgacggtgaaatcgtctccaaatcggccaacggttttcggctggcaaatggcaataccggtgtgatgctgcgtaacgacggcgaggctttctacttactgacaactcaggctgggcaagctcaaaacggacaatggaacacctcgcgtcctttcgctttcagcctggcttccggcagggttgcactcggcaacggcgttgatatttccggtggtgcgatggtatcgcataatgccggcatctccaccgcgaccaccgggcccaccccgcttatcaacgggcaggtctatgatgcggccgccgtacataccgacttcaccagcggtaacgtcactacgaccatgctgatggggtcacgcgtggtcgccggcaaagaggattatggcctgctctcttaccgcgactggcagggaaactggaacgaactccaggtcaggccgaatgccgaattgtcagtaggacaactgattaagcgtaatgttaatggatggatttgggcggccggtaaccagaatgtaaacaataatgcagaccgcattaccaacgggatgcatatacagggtgctggcgacctgtcagccgatttgtaccattatgagcgcatcggcaaacatcacatgctcgcgttgcacgtggccaatggcggcgctgatggttggtatgaattccgcaatgatggccatgcctacaccaatggcgcctggaacagcagctcagatgtccgcatgaaaaccgatatcacaaaaattgacggcgccctggacaagctggcccatatcggcggttacacctacctcaaacagggggtgccagaagccggcgtgattgcacaggaagtggcagaaattctcccccaatccgtgacccagaccgagctgaaactcaatgacggcagcgtgctgaaagacgcccgcagcatcaatatcaatggcgtagttgcgttgctggttgaagcgcttaaggaagagcgctcactgcgcgaaacagagcgagaggcttttgaaagacgactggttgccttggaaaaaggcattgagcgcgcctga

SEQ ID NO: 429589 - DNA, 1998 bp, Serratia marcescens
atgacacgatatgaaaatacaacgcagtatgaacgcgatgtaatgacttcaatgggatacaactggaatggacatgggtggcaacgagggtttgacttatcagatagcaatatggttgtagaagcatgggttggcgagggtttacctgatagacagaaggaattgagtagtattacccatatctgggatcaaaaaatttccgatattaataaaccaataagtgcttttgatcctgacgatgatgatatcacgccattcagtaatgaagcaaaagagagttatcgtgaggattcggataaagccattcagttttacgctaataaagtcaatgaagctgacaacaaaattaaagaaattcaaaaggatattgatgcattaagcaagaaagctgaaaacagtcaacttagtgaattcgagaaagcaaacctaaaagcaattattagtaagttaaaggtaagcaaagaacgtcttaccattcttcgaaacgaagctaataaaagaaaagtacatcaggaatatttaaagctgaataatgaaagctggttcttctctagagaaaaacctacgccctgggttagggagcagcaatcattgaccagaaaagagatgggtaacaaactggaagaggagaagagaatacaattagaaattgacgcagctaaacaaaatattgaacatttagaaagtgaactgcgcgagaaggaagaagatgtccgcaaagccgaagaggcccgtaaggctgaagaagcccgcaagactgaagcagcacggaaagcgctgttcgccaaagccggcgtactggacgccccggtctatacacccggcatgataaaagcggccaataccgcgatggccaccgccggggtcatggtgctcaaccgtgcgggcggtatggtacaattatcgacatgggtcaacagcgtgatgaccaccgccagtgagctggccggctgggtatccagcgcagtgtggcgcggcgcggtggaagtttcccggattgccacggtcagtgctgcaggcccggcagtcggtgccttcgttgtcggattctggccggggaaagccggtgaggggagcgaccgggttccagggcgcgacattgagatgtttgctgcgcaggctcaactggttgccgcagggaaaacaccgattcagccggaaatgaccacggtcgatttaccggtgcgcgggtttattcgccgggggaataacggccagcaagaggtaatactggtcaaaacaggaacgggcggcgtctccgctaccgtgccggtgtatcggccggttcgcgatgaaacaaccggcctggaccggatcaccttgccggcggtggccggtgcgccggggcgaaccattttgataaacccgggcgccgccccttcaggtccgtggcataccggcaatcctgcgccagccgcgccggtaacgccggtgcataccggtacagagataaagcaggccgacagtatcgtcacgacgacctttccggcaggcgacctgccactgcaggattttatctactggcagcctgatgcaacgggggccggtgttgagccagtctatgtcatgctcagtggtatctatggtgaaaccaacgccaaagggcaatacagtgatcgcgactacaacacggacaaggccggtggcccaattcagaatctggactggaaaaccgccatcattgaccgcgccggcgtggataaagtgaagctgcataccgggcggtttggggcgtcagcggaaaatgcggtaatgatcgatcgtttggagaaaatcctgaagggtgaactacaggcgactgacaccgacaaacgttactacacccatgaagtcagggaacttgagcgttatcgtgctctggggatcgcagatagtacggttcccgaaaatgactacgaagtctggaacaacacccatacggcgacgttggaagactataggttgagttctgatgaaactcttttgtatacgcctgaagcgttgaatccgcagaaataa

SEQ ID NO: 429590 - DNA, 750 bp, Serratia marcescens
atggcaaagatagctgtttgtatactgacttttaactcctctcgtttattacacgaggtgctttctccactcatgggcattgcggatgagtggattgtggtggactccggaagtacggataaaacgctgtctatttgccaacgctttggcataagccctatttaccatcgtttcgaaacccatggacgacaaatgaactttgcgatttctcaatctcaccatgactgggtactgtgcctggacagcgacgaaatccttgatgccgaaaccatagcgtccattttaacattcaaatcgcaggcaaacccgccaccacagcaagcctatagaataaaaaggaattggtttgtactcgggcagccagtcagaacgatttatcccatctcctcaccggactaccccgttcgactgttcaatagaacacaggtcaggttcaatgatgctccggtagatgatgccgctgaaggctatattcacacgtcggtcattcccggcaatgttaagcacgatactttttattctctccatgaaatactcaataagctcaatagctatacgacaagggtagtcaaatacagagacattaggccctcgatatttcgtggcgtcgtaagcgcgatcggcgcgtttttcaaatggtacgtactgagcggcgcatggaaggaaggcaaagtcggcgccgttactgggttttatgccgtggcctacagtttcctaaagtattttaaatcctggtatggcaaagattga

SEQ ID NO: 429591 - DNA, 570 bp, Serratia marcescens
atgaacaaagccgagaaaaaagaattaaagaaaaaaatacagaacactctaaatttgaaaaagcataggcaaaatattttaaattttggtgaggatgcgtacaccatggatatttcaaggtgttataaatcagtaataccacacttaaaaaaagcaggctaccaaaaagtaacttggaaaagatgtccagacttgctgactaaatatgtagatctcatatttaaatgtcaagatagtagacctttttttcacatacatatagagaactgcctccctttctgctggaattccccagcaaaaaaaggatgggaccttaactatataaaatacgagtggggacatattaattctataaaccaaaataatgatttagctcacagtgcaaataatctctgtttacaatcggctagatgcaaccagcatatacaaagctcactcaacgtagatgaactaattcaatacggtggggaattggaagtcgttataaggaagaatttatctaacagggaaaaattgtttgcatcaaatgagtggcaagaactgctgaaatgccttgatttgttcagataa

SEQ ID NO: 429592 - DNA, 546 bp, Serratia marcescens
gtgactatcagcggcgatgcgatacgcgatgaactcggccactatctctcccgcctgtggcgctatgcgctggtgctttcgcaccggcgggatatcgccgacgatctggtgcaggcgacctgcctgcgtgcgctggagcgcgctgcgcaattcactcccggttcgcacctggatcgctggttgttttccatcctgcactccatctggctcaatgaagttcgcgcccaacatcttcgccaggggcaaggctgcatggcggcggaagagctgggcgatgcggacaacggtgaacagccggtctggctccatgaagtgatgcgacgcgtcagccggctgccggcggctcagcgcaacgcgctgtttctggtgtatatcgaagggctatcctatcgggaggccgcgaaagtgctggcggtgccaatcggcaccgtcatgagccgcctggcggccgcacgcttggcgttggccgatgaccgcccgttggcaaacgacggcccgcaccgcaaagagagccatcccgcccccttgcctcctgctcgtcgataa

SEQ ID NO: 429593 - DNA, 534 bp, Serratia marcescens
atgaacagcttcattaaacgcctgctggcatcggccattgccggctgcctgctgttttccggcacggcgctggcgatgggcggcgacggcagcagccaaaccccgccgacctgcccgaaaggccaggtctacgacagcaaaactcagacctgcatggtggataaaagcggcaaggtcgacgacgtcgaccgcactaactacgcctatgcgctggcgaaaagcggccgctatcaggaagcgctcgatatgctcaacacgctgaaagatcccaacaccgccgttgcgctgaactatcgcggctacgccacgcgcaaacttggccgcaccgatgagggtatcggctattatttaaaatcagtagctctcgatccgaaataccctaaagtgcgcgagtacctgggggaagcctacatgctgaaaggccgacccgatctggcgcgccagcagctgcaggtgatccagtcgctgtgcggcaccaaatgcgaggagtaccgcgatttggcggcggccatcgaccgccacccggaatcttga

SEQ ID NO: 429594 - DNA, 957 bp, Serratia marcescens
atgaaatcattgtatcgcctctccctcttgctgcctttgcttgccacagtgcctgcacaggccgcagagtccgccgctcagccgtcagactggtacccttctgtttacggtgcaaaagacgaaatcggcgccgccaacctgctcacgccggaaggggtactacagtccgtgcaactggtaaaacagggcaagacattgtcattggcggttcccgtcgataaagatttcccggcgttccgccaccgtagcttccgtttatataatattcagcctggtcagcaggacggcaaaacgcttggcccaaataaattcacctttaatgatgaattggtgaatgcctggaccggcgtcggcacccagttgaacggtataggccatatcggcatcgacaacgtttattataacggcaataaggcggcggacttcgtcaccgttgatggcgtgaaaaaattgggcgtggaaaaagtgccgcccatggtcacccgcggcgtggtgctcgatatgacggcttattatcataaagacatcgttccgggcggcaccgaattttccgttgcggatattcaagcggtgcttaagaagcagggcattagcttaagaaaaggcgacgttgttttatttaataccggttggctggagctgattggtaaggacaataaaaaattcctggaggtcgaaccgggtatcggcatggaagcggcgaagtggctggctgaccaaggcatcgtggcctttggcggtgatacctgggcctccgaagtgtaccctaacccgaaaaatgacgaagagttcccggtcaaccaatacctgctggccaagcgcggcgtctataacctggaactgatcgacagccgcccactggtgcgcacgaaaacctgggaattcctgttcgtgctggggcaaccgctgtatgtcggttcaacgcaggtcaacatcaacccggtagcaatttactga

SEQ ID NO: 429595 - DNA, 213 bp, Serratia marcescens
atgaaaaccatgaccaccgttatttcactcgctctgttttccatgttgtcgtttaacgccgcagcagaaagcgttaccgcaaccggtagaacgctggactccaccgaagctcttatcgctaaaaaagcgcaagaggccggtgcaagcggctacaaaatcaccagcgcctacatgggcaatttcgtcaccatgagtgcagagctgaaaaaataa

SEQ ID NO: 429596 - DNA, 17781 bp, Serratia marcescens
atgaacaaacaaactgatgtgaagagtggggaattccgtacgggtgctcatatttcgttggaaaaagtcgaactgcatgaaattaccaccgctcagcgcgagctttggctgagcgccagcatgtctgaaggcttgccattcaatatgtggggatacggcacgatacaagggccgttgcagatagccctgctgcgccaggcgatagacgcgatcattgaagaaacgccggcgatgcaggcccatttcaccgaacaagacggcgagctttatcaataccgtgcggcgcgcagtcatgacccgctttccgtgcatgacttcagcagccaggaataccctgagctggcggcgcagcgctggatgcggcaagatgccgatcgcgtgatctccgcgctggatcaggacctgttcggttttgccttactgacgttggcgccgggcaactatatcctctaccgacgttttcaccacatgctggtggatggccgcagcgccgaagagtttatgcgtcgtatcgcgctgtattacaacgcattggctgagaaaaaaaacattcctgaattcagtaattgcagttttacccggctctatgaacacgacctgcagtaccgcgattcttcccgcttcgccaccgataaacagttctggcaaggctatacgctcgccgcgcctcatagcctgacgcgtcaggagaaactcgtcccttattcgtccatgcaaatcagcaatcacacattaaaaataaatgagatagcggcgattgatcggggggcggaaaaagccggcgtacatcgcgctcatatattggcggcggccgtcgcattatgtttccatagtattactggtcagaccttattgaatttcagcctgccggtgaccggtacgcgagagcgaaacagtattggtatgactgcgaatgtggtgccactgattttagctattaaccctgaaagtcgtctggctgattttgcacaacaggtcgctgcggaaatagccaaagtggttcgtcggcaattatatcgcggtgaggatattcgtcgcgatcgcagcaccatgagttcatcctggtttggtcccgccatcaatatcgtttccttcgatcatggcgatccgttttggggatgtaagacacgttggtactacggtggcaacatcgccgtcagcgatatgcaaattctattttacgaagatcagcaggcgcaagagttggacgtcatgtttgccgatgcgccgcatgcccattcattaagccagcttgagagtttacaacggcgtttccaatttattctgcggctcctctctgaacaacctgaaggtagcattgcccaggtgatgcaacagatctctgcgcagcctgaagcggacgtcagcggcagtttctatgatctccgtcgactgccgccggccgccggcttcatccgctgggatcgccctgctgctgagctggtgcgcctcgcgacgtcacttggccatcctgcggggaattgcccgctgaaaatcctgttggccgaccgtgcgctgggcgttgggcacctggaaatgctgcctgacgccgacaatgcgccacccggtacgctgcttagcgtcgacgatgcgggttggaatatcgccacggcggaaggggcggtgcggatcgggggctggttcaccgccgaaggcgagctgacggcgggggaagcgctggcgcagctgcacggtttgacggtgggcgagccgttaccgttgcttgatccttcgcaggcgaaacgattggaggagcgacaggcggccggtgggcatcatgcggccttctggcaaccgcgattggcgcagtttgccccggcggcgttcccggtggcctggcagcgcgaagcccggccggcatggcaggctacggcctggcaacacgcgggcaagatcgaggttgaagcggtgttgaccgggctggcgctgtatctgggattgatgggcggcgaaagtgatttccaacttggctggctgaacgcgacggacgacgtcatcggcgaaccgggccaggtttggacactgccgctgcagatctcgctgaatccgacgctgggtttcgccgaggcgcaggtgcagatgcgacgcgaatggcagcaggcgcgcgcgcgtcgcgcctaccatccggcattgctcggcctggacacgcgttcgcgcgcctggtcaaccgtcgtgacgctattgcgccgcgacacctcgccgggattcgacgacagtcaggagggcgcagcggcggtgaaacgctccggcgctcgggcagtgctgcaaatctgtgaaagcaacgccgctttccgttgggtgtacgacagcgccgcggtgggggacgagcagatgctgcgtgccgcgcagcatctgctattgctgctccggcaggccgctgcggcgccgaatgcgccggtgcgaggcgatcgtttactgagccaggcggagcgagagctattgctcaacgtgcgcaaccgcacgcaccgggctttcccgcaggcgtcgagcgtgtcggccctgtttgaagcgcaggcgcggcgtacgccgacggtgccggcgctgtctcagggggcgatgtcgctgagctatgcggaattgaacgcgcgcgccaaccggctggcgcattacctgacggcacgcggcgtagggccggaaagccgcgtagcggtctgcgccgcgcgcagcccggagatgatcgtcgcactgctggcgatcctgaaagccggcggcgcctatgtgccgctggatccggcttatcccgctgagcgtctgcactatatcgtgcaggactgcgcgccggcgctgctgttggcggatagtaccggccgcgccgcgctgggggcggtagcagcgccgttgttggcgctggaagacgcgctgccagagcaggatcacgacctgccgccgcgcgcgcagccaggcagcctggcgtatgtggtttacacctcgggctcgaccggcaaaccgaaaggggtaatggtggagcaggcgcacctgatcaacctgatcatgtggcactgcgaagcgaccggtttgcaggctggtgagcgaacgaccagcatggcggggttgggttttgacgccagcgtttgggaaatctggccgacgttgacgcagggggcgacgctgctgctgccgccggcagaggcggcgggcaatggcgaagcgctgctgcaatggtggcgcggcagcggtgtgcaggtcgggtttatggtgacgccgctggctgagatcgcactgatgggcgagatgcctgccgatctgcggatgctgctgatcggcggcgacagcattcgccgctggccgctgccggcgccgcctggtgtaaccattgtgaataactatgggccgacggagacgaccgtggtagcgacttcgggcgagccggcggtcggtacggcgatgccgtctatcggccggcctatcgccaacggccgggcgtacttgctggatgacgatggccagccggtgccgctgggcgccgtgggtgaactgtatatcggcggcgcgcaggtggcgcgcggttacctgaaccagccggcgctgacggcggagcgtttcctggccgatcctttcgcgccgggcggccgcatgtaccgcaccggcgatctggcgcgctatatgccggatggcagcctggagtatctgggccgcaacgatctgcaggtaaaaattcgcggcttccgcattgaatgcggtgaaatcgagtcgcagctggctatgcatgccgccgtgcgcgacgcggtggtggatgcgctcacggatggcgaaggcgacaaacgtctggtggcctggatcgtgccgcagccggaggcggagcgtgaggcgctggcgcagacgttgcgccgggcactcgctacaacgttgccggattatatggtgccgacggcctttgtgtggctggaggcgctgccgctgtcgccgaacggcaaactggatcggcgcgcgttgccggtaccggcgccggacgccgccatgcgcgaagcctatgtcgagccacagggggaaaccgaaacgctgctggctcagatttggcaggggttgctgagcgttgaacgcgtggggcgtcacgacaacttcttcgagttgggcggccattcgctgctggcggtgaagctgatggcgcagctgcgccaggccgggctgtcggcgagcgttcaggcgctgttctccacgccaacgctgtcggctctggcgcaaacgctggtgtcgcagcagcggattcaggtgccggaaaacgtgattgcgccgggctgccgtgcaatcacgccgcagatgctgccgctggccgatctgactcaggcggagatcgatcagatcgtcgacggtgtggagggaggcatcgacaacgtacaggatatctacgccctttccccgttgcaggaagggatcttgttccaccacatgctggcggaagagggcgacccctacctgctgtcggcactgctgcgtttcgacagccgggcgcgtttcgatcgctggctggcggcgatgcagcaggtggtggagcgtcatgacattttgcgcacggcctttgtcggtgcggggctgtccgaaccggtacaggtcgtctggcgtcgggcgcgtttagcggtgatcgagctggcgctggatccggccgaggggccggtcggccgtcagctggaagcgcgcttcgatccccgacggatccggcaggatctgacgcgggcaccgctgctgtattacgttatcgccgaagagagcgacggcagctggtacgtcttgcagcagtggcaccacctgattggcgaccactcgacgctggcgatgatgggagaagaagtcaacgccattctggccgggcgcggcgatacgctgggctgcgcgcagccgttccgcaatgcggtggcgcaagcgcgtttggggctcagcgaacaggaacatgagcgtttcttccgcggcatgctggcggatatcgacgaaccggtgctgccgttcgggctcggcaacgtacacggcgacggacagtgcgccaataccggccgtctggcgctggcgcctgcgctgaatgccggcctgcgtcgacaggcgaagcgattgggcgtcagcctggccagcctgtgtcatctggcctgggcgcaggtgctggcgcgcaccagcgggcgtgatgccgtggtgttcggcacggtgctgctgggccgcatggaatcgggcgaaggcgccgaccgggcgctggggctattcatcaatacgctgccgctgcggctggatatggacgggcgcagcgttgaggcgtcggtgcggcaggcgcatgcgcgcctgagcggcttgctggcgcatgagcacgcctcgctggcgttggcgcagcgctgcagcggcgtgaaaagcggtgcgccgctgttcagtgcgctgctgaactaccgccacaacgacggggaagccttggcactgccggaaggggtcagcctgatcggcgcggacgaacgcaccaactacccgttcgtgctgtcggtggacgacggcatggattcgctggcgttgacggcgcaggtcatcgaccccattgaagcctcgcgggtgtgccgctatatgcaacaggcgttgaccgctctggtgaatgcgctggaacacacgccggaaatgccggtgcgtgaactgtcgattctgccggacgacgagtacgccttgctgatcaatggttggaacgcaacggcacagccttatccgcaggacgtttgcctgcatgggctatttgaagcgcaggtgcgccgcacgccggacgccgtggcgctggtttgcggcgacgccgaactgagctacgcccaactgaacgcgcaggccaatcgcctggcgcacgcgctgatgcagcgcggcgtcgggccggattgccgggtggcggtgtgcgccgagcgcagcctggcgatggtgacggcattgttcggcatcctcaaggccggcggcgcctatgtgcctctggatccggcttatccgggcgaacgtctgcaatatatcctgcaggacgccgatccggtgctgctgctggcggacgccgccggccgcgcggcgctgggcgaacacgcggtgccgctgctggcgctggatgaaccgttgccggacgatctgaacgccgataacccggcgccgcgcgcgcagcccaatcatttggcctacgtgatttatacctccggctcgaccggaaaaccgaaaggcgcgatgaatgagcatcgcggcatcgttaaccgcctgatctggatgcagcaggcttatgggttgacgccggcggatacggtgctgcagaaaacgccgttcggcttcgacgtctcggtgtgggaattcttctggccgttgatgtatggcgcgcgcctggtgatggcgcgcccggaaggccacaaggatccggagtacctgagccgcgccattgaacagtatggcgtgacaacgctgcactttgtgccgtcgatgctgcaaagcttcctgctgtatgaaggcgcgagccgccgctgtgggcaggtggtgcgcgtcatgtgcagcggcgaggcgctgcccgcctcgctggtggcggagttctaccgccagatgccgcatgtcgagttgcataacctctatggtccgaccgaagcggcggtggacgtgaccgcctggcactgcacccgccaacccgggctggtgtcggtgcccattgggcggccagtggccaatacgcggatctatctgcttgatgaacaagggcagccggtgccgctgggggcggttggcgagctgtatatcggcggcatccaggtagcgcgcggctatttcaaccggcctgaactgacggcggagcgcttcctggccgatccgttcgatgccggccacggcggccgcatgtaccgcaccggcgacgtggctcgctacctgccggacggcaatatcgagtatctgggccgcaacgatcagcaggtgaagatccgcggtttccgtatcgaatgcggcgagatagaggcggcgctggccgcgcatccgcaggtgcgcgaagccgtggtggatgcgcgcggcggcgacggcggtgagaaacgcctgatcgcctgggtggtgccgcagccaggtgccgatgaggcgtcgctggcggaggtgctgcgccggcatttggccgacaaactgccggattacatggtgccggccgcttgcgtgctgctggaggcgctgccgctgtcaccaaacggcaagctcgatcgccgcgcattgcccgacccgtcgggcgaggcctatcgtcgtgaagcctacgaggcgccgctgggggacgtcgagcagcgtctggctgcgctgtgggaagaactgctgggcgtggatcaggttggccgcaacgacagcttcttcgccctgggcggccattcgttgttggcggtgcgtttggccaaccgcctgcagcaaagcgggttgccgctgtcgctgcaggcgctgttcgccaacccggtcctgcaggcgctggcgcgccagatcacgcaggcggaaagcctgccgccgattctgcctgcgccgcgcgatgcggccttaccgctgtcgttcgctcagcagcgcctgtggttcctgacccaactggacggcatgagcgaaatttaccacatgccgctggcgctgcggttgcgtgggccgctgaatctggccgcctggcagagcagcctcgacgcgctttatgcgcgccacgacgcgttgcgcaccgtctttatcagccgcgacggccagccgcaggcgctcattttgccgatcgccggtttgccgctgacaatccacgatctgcgcggcgtcgcggatgcgcaggcgcgcgccgccatgctgatacgggaagaggctgcggcgccctttgatctggccgggggcccgctgttgcgcgccagccttatccggctgagcgacgaggaacagctgttcgcgttgacctgccaccacatcatttccgatggttggtcgaacggcatattgctgcgggagctgggtgcgttgtatggcgcgttgtgtcgcggcgaaccatcgccgctgccgccgctggcgttgcaatacgcggattacgcccactggcagcggcaatggctgcagccggcgcgcttgtcgaagcaggccgattattggcgccagacgttgggcgatgcgccagcgctgttgacgctgccgaccgaccgtccgcgcccggcggtgcagtcattcgccggggatcgggtggccgtctcgctcgatgccgaactgactgcagcgctgaggcaattcagcctgcgtcagggatgcacgctgttcatcacgctgttgacggcgtggagcgtcgtgctgtcccgtttgtcggggcagcgcgatctggtgatcggcacgccggaggccaaccgtcgccggctggaaacggaaccgatgattggcttcttcgtcagcaccttggcgctgcgcatcgatctgtccgacgatccggatttgtcgacgttggcgctgcgcgtgcgcgatacgctgctggcggcgcgcgatcatggcgatctgcctttcgagcaggtggttgaacaggtgaacccgccgcgtcatcgtggccatactccgttgttccaggtgatgctgagctggcaggacggttcggtgcacgacatcggcctgccggggctgcaggcggaagcgatcgatgccggctatgccgcggcgaaatatgacatgacgctggatctgaccgagatcggcgaagagatcgccggttcgctgtattacgccacggcgctgttcgatcgtgaaaccgccgagcgctacgggatctatctgcgccaggtgttgcagagcatcgcgttggcggcgccgcagccggtttcgcagcttgcgctgttgccgcagaacgaacggcagcggttgttgcatggctggaaccggacgccggacgaaccgcaggcggatctctgcccgcaccatcacctggagcggctggcgctgcgcacgccagaggcgatcgccgcggtgtgcggagaagaacgcctcagctatcgggcgctcaatgaacgagccaacgcgttggcgcaggtgttgatcgcgcgcggcgtcgggcccgatcgtctggtggcgctgtgtgcggagcgcagcacgccgatgctggtcgggttgctggcgatcctgaaagcgggcggcgcttatgtgccgctcgatccggcttataccggcgaacgcctggagtacattttacacgatgcccggccggtgttgctgctggccgacgccgcagggcgttcggcgctgagcggggccgatgtgccgacgatggcgctggaggaagactggggcaccgaggccgccaatccgcaggttgcggggctgacggcggccaatctggcctatgtgatctatacctccggatcgaccggtaagccgaaaggcgtgatggtggaacaccgtcaggttgagcgcctgtttaccgcgaccgacgccgggttcggctttgacgccggggatgtctggtgtctgttccactcgttcgccttcgatttctcggtatgggaaatctggggcgcgtggcgccacggcggccggttggtgatcgtgccgcaggaaacggcgcgctccgcccccgcgttctatcagctggtttgtcaccagggcgtgacggtgctgaatcagacgccaagcgcctttaaagcgttcattcaggctcaggacgacacgccgcatcggctgcgctacatcgtcttcggcggcgaaatgctgaatccggccgatctggcgccgtggtatgcccgtaatcggccggacgcgccgcggttaatcaatatgtacggcataacggaaacgacggtgcacgtcacctaccgggaaatgtctccggcggacatcaccggcagcggcagcccgatcggccggcgcatcccggatctgcgcctgtatctgcttgacgaacacggtcagccggtggcgcagggcgcagtgggtgagctgtatgtcggcgggctgggcgtggcgcgcggctacctgaatcggccggagctgaatgcgcaacgtttcctcgacgatcctttcgtggcgggagaacggatgtatcgcgccggcgatctggcgcgctatctgccgaacggtgagctggagtacctggggcgcaacgaccagcaggtgaaaattcgcggtttccgcattgagtgcggtgaggtggaggcggcgctgctggaccatcctgaggtccgcagcgtggcggttgacgcctggcaggacaacggcggcgacaaacgtttggtggcctgggcggtgccgggcgaagggggagatcgggaaacgctggcgctgcggctgcgccagcatctggccggccgtctgccggactatatggtgccgacggcctttgtgtggctggacgcgttgccgctgaccaccaacggcaaactggacaaacgcgcgctgccggcgcctgagctgggggccgccgcgcgcgctgtttatgaagcgccggccaatgaacgagaacgcctgctggcgtccatctggcgtcagttgctgaatgttgaacgcgtaggtcgtcatgatgatttcttcgctctgggcggacattcgctgctggcggtacagttggccaatcgggtacagcaggccggctggcggctgccgctgtcggcgctgttcgctgcgccggtgttgcaggcgctggcgcagtggctggaacgggagggggcggcgcagccgacggccatcgtgccgaccccacgtcacgacgcattgccgttgtcgtttgcccagcagcggctgtggttcctgagccaaatgggcgggatcggcgagacttaccatatccctctggcgttgcgccttgacggcgacctggatgcgccggcgttccaacgcagcctcgacgcgctgtatgcccgccacgaagccttgcgcagcgtgtttgtttgccaggatgggcaacctcaggtgcggatcttgccggaggcggccatgccgctggcgcatcacgacttgcgcggcgagcgtcatgcggagcaacgtttgcacgcgctagccgaaacggcgatgaaagcgccgttcgatctggaaagggggccgctggtgcgggcttgcttactgcaagtgagcgagcggcggcatctgttcctgctgacctgccaccatatcgtttccgacggctggtctaccgggatcctgatgcgggagttgagcgcattgtatggcgccttccaacgcggtgaaccgtctccgctgccgccgctggcggtgcactatgtcgattatgccgtttggcagcgccagtggctgacgcaggaacggttggccgagcaggcggcgttctggcgccagacgctgggcgatgcgccggcgctgctgacgctgccgaccgatcggccgcgtccggcgatgcagtcgttcgccggcggtgaggtgcctctggttatcgacgcggcgctcaccgacgcgctgcggcggttgagccgccaatacggcggcacgctgttcatgacggtgctggccgcctggagtttggtgttgtcccgcatggccggccaaccgcaggtggtgattggcaccccggaggccaaccgcagcaggctggaaatcgaaccgctggccggcttcttcgttagcacgctggcgatgcatgtcgatctgcgcggtgagccgacgctgaaaatcttgctcgaacgcgtgcgcgagacggtattggcggcgcgggaaaacggcgatctgccgtttgaacaggtggtggaggtggtcaatccgccgcgccagctggacgcgacgccgctgttccaggtgatgctggcctggcaggacggctcggtgcgcgatatcgcattgccgggcctgcaaacgacggatgccgggctgagctatgacgtcgcgaaattcgacatgacgctcgagttggcggaaagcggcagcggcattgtcggctcgttgaactacgccagcgccttgttcgatcgcgacacggcggtgcgcttcggcgcgtatctgcagcaggcgctgcgagcgatggcggcggatcttgaccagccggcggcgcgcgtcgatctgctgcctgcggccgaacgccagctgctgctgcacgagtggaaccgcaccgagcgggcgtatccggcccaggcgtgcgtgcatcaactgttcgacgagcaggcgcggcgcacgccgcaggcgacggcgttggtcgatggcgagcagcttatctgctacgcgcagttggcggagcacgccaatcggctggcctggcgcctgattaaggcgggcgtggagcccggccagcgcgtggcggtccggtttgagcgcagcgccgccctggtgatcgcccaattggcgatccttaaggccggtgctgcctatgtgccggttgatccgcagctgccggccggccgccagaactggatcatcgccgacagcggtgcagtactgttgctgaatggcggcgaggacgacgcgcagatcggcgtcggcgtcgctcgtctgcctcaaagcgatgacgcggacctgccgtccgatgcgccgatattggcgaacaacagtctggatctggcctacatcatgtacacctccggctcaaccggtaagccgaaaggcgtgatggtgccgcatcaggggatcaaccgactggtgatcaataatggttatgcggagttcagcgactcggatcgtatcgctttcgccatcaacccggcgttcgatccggcgacgctggaagtttggggagccttgctgaacggcgccgcgctggtggtagtgccgccggcggtcttgctggacgcctcggcgttcgccgatttgctgacgcgccaggcgattacggtgctggtgctaccaacctcgctgttcaatcagcatgcgcatagcattcccgcgacgttagcggggctgaaatacctgatcagcggcggcgaagcggcggatcctcatgcctatacccgggtgctgaaggaggggggccgggtgcagctgatcaacggatacggcccgacggaagccaccactgccgctacctcggcgcgcatcaccgtggcggcggggcggcaccgtttgccgattggccggccgatcggtaatacgcgggtgtatctgctggacgaacatcgccagccggtgccgctgggcgcgatcggcgagctgtatatcggcggcgtgggcgtggcgctgggttaccttaatcgcgaagacctcacggccgagcgtttcctggcggatccgtttaacgagggaggccgcatgtatcgcaccggcgatttagcgcgctatctgccggacggcaacctcgattactgcggacgcaacgatcagcaggtgaagatccgcggcttccgcatcgagtgcagcgagattgaagtcctgctggaaacgcacccggcggtgcgcgaagcggtggttgacgtgcgcggtgcgcatcctgcgttgatcgcctggatcgtgccgcaagccgaggccgagggccgcgatctgaccgacgagctgcggcggcatttggcggcgcagctgccggactacatggtgccggcggcctgtctgatgcttaccgacttgccgttgaccccgaatggtaaagtggatcgccgcgcgttgccgacgccacaggccggcgattttgcgcgcgtgggccatgaagcgcctcagggcgacacggaaaccctgttggcggcgatctggggcgaattgctcggtctgccgaatgtcggccgacatgacaatttcttcgagttgggcgggcattcgctgctggcggtgaaactgatcgcggagctgcgtcgctacggcctgacggcgaacgtgcaaacgctgtttaccgccccgacgctggcctcgctggcggaggcgctggaggcgcgctgcgaaatcgagatccccgagaacctgctgcggccggatagcgcgcgcatcacgcctgagttgctgccgctggcctcgctgaaccaggttgagatcgacagcatcgtggcgcgcgtgccgggcggggtggccaacgtgcaggatatctatgcgttgtcgccgttgcaggaggggattctgttccaccacctgttggcggaacggggcgatccgtacctgctgtctacgctgttgcgctttgagaaccgcgagcgtctggagcgttggcgggccgcgatgcaacaggtgatcgatcgccacgatattctgcgcacggcgttcatcagtgaggcgatccgcgagccggtacaggtcgtttggcgcgccgccgcgctgccgtggactgagctgacgctcgatccggcgcagggggcgattggcgatcaactgctggcgcgcttcgatccgcagcatgcgcgtctggatctcagccgtgcgccgctgctgaacgtcgtggtggcgcaagatagcgatggcagttggtggatgctgcaacaatggcatcatctggtgggggatcattccacggcggcattgatcgaagaagagatcgccacgatcctcgccggcaaaggcgccgagctgggcgccgcgccgccgttccgcaatgcggtggcgcaggcgcgtttgagcgtcagcgcgcaagaacatgaaaccttcttccgcgccatgctggcggacatcgaagagccggtgctgccgttcgggctcggcaacgtgcgcggcgatggcaagggcgtcaccacggcgcaccagcctatcgacaaggcgctgaacgaacgtctgcggcatcaggccaaacggttgggcgtgagcctggccagcctgtgccatttggcctgggcgcaggtcttggcccgcaccagcggccacgaccgcgtggtgttcggtaccgtgctgctgggacgcatgcaggcgggggaaggcgccgagcgagcgatggggctgtttatcaataccttgccgctgcgcctcgacatcggcgatgacgatgtggcgacggcggcgcgccaggcccacgcgcggctgagcgggttgctgcagcatgagcacgcgccgctggcgctggcgcagcgctgcagcggcgtggcggcggggatgccgctgttcagcgcgttgctcaactatcgccacaacaacggcagcgagctggtgttgccggaaggcatgacgctgttgagcgcgcaggagcgcaccaactatccgttcgtcctgtcggtggaagacggcggcgactctctggggctgacggcgcaggtcagcgaaccggtgccggcggcgaggatctgcggctatatgcaacaggcgctggcctcattggcgcaggcgttggaaagccagccgaccctgccggcgagcgagctggagatcctgccgccgtctgagcgccggctgctgctggaggaatggaatcagacgacggcgccttatccggcagagctttgcgtgcatcagctgtttgaacgccaggcgcagcgtgcgccgcaggctgtcgcgatcgtgcaaggcgaccgtcggatcggctatgcggcgttgaatgcccaggctaaccggctggcgcatgctctgatcgcccacggcattcaaccgggcgagcgcgtggcgacgcgtctgacgcgcagcatcgatctggtggcgacgcagctggcgatcttcaaggccggcgcggtgtatgtacctatcgacccgcagctgccggcggcgcgtcagcagtggatcctggaggacagcggcgcgcgccttatcgtcggtgaagcgacggacggggataccttgccgctgctgcggccggcaatctccggcggtgacgagaacgacccggcgctgtcgctgtcgagcgctgaggtggcatacatcatgtacacgtccggctccacagggctgcctaaaggtgtgatgacgccgcaccagggcatcactcggttggtgatcaacaaccgttatgcggcgttcgatgcgaccgaacgggtggcttatgccgctaacccggccttcgacgccgcgacgatggaggtgtgggcggcgttgttgaacggcggcgaactggtggtgatcccggcggaaaccgtgatggatgcggcgcgcttgagcgccgcattgacgcagcatcgcgtgacgacgctgttcctgacgaccgcgttgttcaatcagtatgtgtacagcatgggcgcgacgctcgcccagctgcgctatctgatctgcggtggggaaaaggaggagccgagcgccttcgaacgcctgctgcaggaagcggggccggtacagctgatccatgcctatgggccgacggaagcgacgaccttcgccacgacggcggcgattgccgaggtgcaaggcgccatgcgtttgccgatcggtaaaccgatcggcaacacccgcgcctatgtgctggatgcgcgcggccgaccggcgccgctgggcgtgattggcgagctgtatatcggcggcgtcggcgtggcgctggggtacctcaaccggccggaactgaccgcggaacgtttcctgaacgatccgtttaacccgggcgggcgcatgtatcgtaccggcgatctggtgcgttaccgggcggacggcaacctcgagtatcagcgacgcaacgatcgtcaggtgaaaattcgcggcttccgtatcgagatgggagagatagaggcgcgcctggcggcgcacccggcggtgaacgaagtggtggtcgatgtctgctgcgtcggtgcggatacgcggttgatcgcctggatcagcgtgcgtgagaatgtggcgagcgacgggttggccggtgaactgcgtcagcacctggcagcgcagctgccggactatatgctgcctgcggcctttgtctggctggcggcgatgccgctgacgccaaacggcaagattgatcggcgggctctgccggcgccggagatggccgccgccgcaggcgaagcctacgaagcgccgcgcggcgataccgagacgctgttggcgcaggcgtgggcggagttgctggggctgccgcagatcggcagacacgacaacttcttcgaactgggcggccattcgctgctggcggtccgtcaggccagcctggcgcagcagtgggggatctcactgcaggtacaggcgatctttgaccatccggtgctggcggatctggcggcgcatgtcgagcagcgcacgggcggacagccgctcaaggcattgccggcgcgccgcagcggccagcgcccgccggtcttcttcatgccgaccggttatggcgatcactcctatgtttatgagatagccaaagagatcgatgcggacttcccgatttatgccgtgccgtggccagagatgaccgacacgccgccggcaacgatggaggcgatggcggagatcgttgccggcgtcatccggcaggtgcaagccagcgggccgtatcacctgttcggttactcttcgggcgggatcttgacctacatggtggcggaacggctgcaggcggagggggaagaggtggcgctggtgggcctgctcgacaccatgcggccgcagcaggcgatgcgcgatgcgacacagctattcctcagttggctggaggtggaacatccgacgctggaggcgccgctgttctcccgcctgcagccgctgtcggtggaggaggcgttggccgtgctgcacggccagggcatcagcactttcctcgacgatccgctgaaggaagccgcgttatggcgcaagcgttatcactatgcgaccctggtcggcgccagcgtcatccggccgctcggccttaatctgcacctgtttaaagcggtggaggagatgcccggcttgctgaacgacgatctggaagcctactggcagcgcatcaagccggcgggttacaaccgccgcgacggctcggcactcggctgggaggggcatttgccggcgtcggcggtgacggtcaacctggttgatggcgatcatgtcactatgatgtcggaagccgtgaaccggcgcggcttaggggagcgcatcagcgccgtgctgaattcgctcgtccgacgctga

SEQ ID NO: 429597 - DNA, 390 bp, Serratia marcescens
atgaaaagggtttccaagttgttaatcgcattttccgtggcggtggccttagtgggatgcgcgcgtacagcacccgttgataatgttcattcgacggttagtgccgggcatagtgaggctcaagtcagaaacgcaatccttaaggctggcgcccaacgccaatggatcatgaatgatgtggggccaggtgtcatcaaggcgcgtcagcaaaaccgcaatcacagtgcggaggtgcgtattacctactcggcaacagcttattctatcgattatgacagcagccagaatctgctcgcttctcaaggtaagattcataagaattataatcgttgggtacgcaatctggataaagatattcaggtcagtctcgccacgaatgcactgccgtaa

SEQ ID NO: 429598 - DNA, 1059 bp, Serratia marcescens
atgtacgaacaagacacctttaatgcgcttgatgccataaccgaagcgcaacgcatagctttcgctcccatgctgtttcaaacggcgctttgtttgcgcaatgggggggtgttggcctatctggataagcaaggtgaacaaggcgcgtttctggatgaaatcgttgctaatagcagtctgaatgattatgccaccagcgtgctgttggatatgggattgagtggccgcatcattatctgtcgcgacgagcgctaccgcctgtccaaagtggggcacttcctgctgcatgacgcgatgacccgtgtgaatatggatttcacacaggatgtctgttaccaggggttgttctttctggcgcaagcgctgaaggagtccaagcctgcggggctccaggtgttcagtgacacggaaactatctatcctgtgctgtcccagttaccatccccagctcgcgaaagttggtttgcattcgatcattactactctgatgcggcctttagtgcggcattgccgcatattttcgccggcaaacccttaagcctgtacgatgttgggggaaatacgggaaaatgggcgctgcgttgctgccaatacgatgacgacgtcacgattacgatactggatttgccgcaacaaattgcacttgcccgccaaaatgtcgaaaatgccggtttttctcaccgcattggctttcatgcggttgatatgctcgaagaggccaccttgcctggcgaagcggatatctggtggatgagccagttcctcgactgtttcgctccgcagcagataattggcatgttggagcgtatcgctaaggtgatgaaacccggcgctcggttgtgcgttatggagctgttctgggatgcgcaaaaatttgaggcggcgtcattcagcctgaacgccacgtcgctttatttcacgtgcatggctaacggtaatagccgtttttacagcgtagagaaattttatcgctacctggaagcggcaggatttgaggtggaacaacgcgtcgatcatctcggagttggtcataccttactcatatgcaagaaaatttga

SEQ ID NO: 429599 - DNA, 726 bp, Serratia marcescens
atgaaatttgccttgaacattgtcgactggcaggcacgagcacccggcctgagcgccgcgtcccagtggcttgcatgggcgcaccagcctgatgccattgattcgagcgcgcctcaggcgttgcctgatgaattgccgatgatggccgcgcgtcgcttgagctccggcagtaagctggcggttgattgcgggctttctttgctgcgtcgtcatgccgttgatgcagtgctctataccagccgtcacggggagctggagcgcaactaccgtatcctccatgcattggcgaccggccagtctgtttcaccgacggattttaccatgtcggttcataattccgcggttggaaatctgacgatcgttgctaggcaaccgatagtatcttcttcgctttctgctggcatggatacgtttcagcaagggctttgtgaagtggtttgcttgctgcaggccggccatcagcgtgtattgatggtggattttgatggtgtgatcccagcgttttaccatccggggctgcctgcgcaaatgcccacctgggcgtatgccgtggcgctgctgtttgaggcgggggatacgttgcaatgctccacggagagtgattatgcaggcaatgaaatgtctttgccgcaaagcttgcggtttttaaggcactatctcgcgcagacgccccactttacgattgacggagaacgagtgcagtggcgttggagtctcatgaaatga

SEQ ID NO: 429600 - DNA, 819 bp, Serratia marcescens
atgaatgctgtaaccggattaaatcgcatctggcgcctggtaatgaccgggttttgcttcgcgttattcgggctcggcgggctgctgctttccctgacctggtttaatttgctgttgcttgttgtacgtgatgacaataagcgctgccgcatagcgcggcgcagtatttcagccagttttcgattgttcttgacggtggcgaggagcattggcgtattagattaccgtatccatggcgccgattgcctgcgtaatgaacgcggctgtctggtagtggcgaaccatcctacgttgattgattatgtgctgctggcttccgtgatgccggaaacggattgcctggtgaaaagtgcattactgaaaaatccgtttgtcagcggggtgattcgtgcagcggattatctggttaacagccaggctgagactttgttgccacagtgtcaggaaagattggggcgtggtgacacccttttaatttttcctgagggcacgcgtaccgaaccggggaaaaagatgtctctgcagcgcggggcggccaatattgccgtccgttgccgccgcgatctgcgtattgtggcgatttgctgcagtgaacatttattggataaacagagcaaatggtacgatgtcccccttacaaagccgctctttgagatcaaagtacgcggtcgagtgccgatcgagcatttttatgatggcaaaacaccagagccggcattggcggcaaggcagctgaaccggtacctttcgcaacaattacaattcgttgaaatacctttttcggaacttaatgatgcaagcgctttatctagaaattaa

SEQ ID NO: 429601 - DNA, 261 bp, Serratia marcescens
atgatgcaagcgctttatctagaaattaaaaatctcattattgatacattgaatttggaggagctgacggcggatgatattgaaacgcaggcggctctgttcggggaaggattaggactggactccatcgatgcgcttgaactcgggctggcggtaaaaaataagtacggcatcgtgctttccgccgaaagtgaagaaatgcgccagcacttttactctgtagcaacgctggcttcttttattcattcgcaacgagcctga

SEQ ID NO: 429602 - DNA, 252 bp, Serratia marcescens
atgacagaacaacacgctatttatgaagaagtctccgcgcttctgatcaaactctttgaaattgatcccgcgtcgattacaccggaagcccgcttgtatgaagatcttgagctcgacagcatcgatgcggtcgacatgattgtgcagttgcaaaagaaaaccggcaggaagatcaaaccggaagagtttaaagctgtgcgaaccgttcaagatgtcgtcgaagcggtagaacgtttgctgcgggaagcctga

SEQ ID NO: 429603 - DNA, 543 bp, Serratia marcescens
atggcgctaatattgttagcttggccgtttttggtttggtttggcctgctgcatgacggcctgcattggctgctgccatcgatggcactgatgctgtttctacgcttacgtcagctgcggcgaaaagccgggccgatgcatcgcattatgcagtacgtggcatttgctggggttgcgttatgcgttgccagcgcgctgttacgcgcccatcaactgctgctgtggtggcccctaattgtcaatttggtgatgctgtgcggctttgggggttcgctgtggagtgatatgccgttggttgagcgtttggctcggctgcgcgagccgcggctgccgcccgaaggcgttcgttatacgcgtcgagttacccaggtctggtgcatctttttcgtgttcaacggctccatggcctgtttaaccgccttgcatggagatatggcgctttggacaatgtggaacggcatgattgcttatctgctgataggcgcgctgatggccggcgaatggttggtgcgtcgtcgagtaatgcagcgagatgtgcgatga

SEQ ID NO: 429604 - DNA, 1362 bp, Serratia marcescens
atgactccccctctttcactgtcgcaatggttaagtgcatcgcgctccgatgaaacgcccattgcttggcttggcgaacagacctggacactcggccaattgcgctatgacgtatcgatattgctcgatcgtttgcgtcagcaagaagccgatcgctgggcgctgtgctttgaaaacagctatttgttcattgtggcgttgttggctgtcttgtacgccggcaaaacaccggtgatcccaggccatcgccggctctcactgcttgaggagcaacggtcgctgttcagcggcgtgttaagtgatgccgaactgtgctggagcgaggggctgctcgttgtggcgtcagcccaaaagtcggcgccgacgaagatatgtctaccggcgatcgccgatgacgccagcatcgaactgtttacttccggatccaccgggcaacccaaaagagtcgttaagcgggtcgcggttctggattatgaagccaggctgttggcaacccgcttttctgggcagttggacggttgccgtgtggtggcatcggttgctcccctgcatctctatggcctcacgtttcgcattttcttgcctatgtcgcagggattacctctgcatgcggcaatggttcattacgccgaacagctggccgcttttgatcgttcttatcgctatctattcgtcagcagccctgctttcctcaaacggctcgatccccggttggctgcgccatcggtcagcatgattttctccgcaggcggcatgttgccatggaaagacgttatggcgacgcaggcatggcttggcgtctggccggatgaaatttacggctgtactgaaaccggcattcttgcttggcgctaccgtgaacaagatgacattccgtggcaactgtttccgggggtgaggctcacggcggagggcgatgccttccgcgccgtatcaccgttgattgcgcaacctgacgggcaattattggatgatgagctgcagtttatcgggcatggccgtttccgtttgcaagggcgccgtggacgagtggtgaaaatagaagaaaaacgcatctcactgagtgaagttgaacgccggctgatggcgctggacggcattcaggacgcggcggcgttgccggttgttcgtcgaggacgccaaggtatcggcgcactgctggtgttagatcgtgaacggcaggatgcctggcgagaaaagcacggtaacgcgttggagttgtcgtggcgtcgtgcactgtccccgtggcttgagccgatggctattcctcgttattggcgggtggttaatgaaatcccggtaaacagcatgaataagcgcgttgatacgcaattacaggagtttttcaatgacgccccataa

SEQ ID NO: 429605 - DNA, 354 bp, Serratia marcescens
atgacgccccataaaatcgaatgccaccagccgcagcctggtcaagccgagatcaccttttctcttgagccggaactgttctggttcaaagggcatttcgccgtgcagccgctgttaccgggcgtagcgcaactcgactgggtaatgcatttttccgcgatgttgctcacgccgggtttttacttccacagtattcagaacgtcaaatttcaagcgccgttgttgccggaaaatcgagtgacgctgaggctcaattggcatgaggagcgaggcagccttactttcgcttacttgcggcatgatggcgcaacccttcataccgccagcagcgggaaaatccggttatgtcgttga

SEQ ID NO: 429606 - DNA, 1692 bp, Serratia marcescens
atgtcgttgagttattttccctgtgtcgtgatcccctgctacaaccacggcgcgatgatggcgcgcgtactgtcacgtcttgagccgttggccttgccttgcatcatcgtcgatgacggcagcgatgccaccacgcggcgggagcttgatgctctggctgagcaatatgaacgagtgactctggttcgtctggatgtcaacgctggtaaaggcgtggccgttattcgcggtttggaggcggcggcatgcgctggttttacccatgcggtgcaggtcgatgccgatgggcaacatgcgattgaagacatccctgcactgttagcgctcagcgaacggtatccggaagcgctgatttccgggttgccgatatacgatgattccgtgccgcgagcgcgcctctacggacgttgggtgacgcatgtttgggtatggattgaaacgctttctctgcagttgaaagatagtatgtgcggctttcgcgtttacccgttagccccgactttacggcttgccgggcgcgtttcactggggaggcggatggatttcgatacggaggtgatggtgcgcctttattggcagggtaacaccagctatttcgtcccgacgcgagtgacctatccccaggatggtgtatcgcatttcgatacattgaaggacaacgttcgtatttcgatgatgcacacccgcttatttttcggcatgttgccgcgcattccttcactgttatgtcgcagcacaaatgcgcattgggcgaaacaagcggaagtcaaaggaatgtggggcatgcgcttcatgttagcggtgtggcggttgctcggtcgccgcgcattttcgcttttgctgtggccggtggttggcgtctattggttgagcgcggcggcgccgagacgggcatcccggcagtggcttgcacgcgtacgtcaacagcttgttttgcgccggcaggcaattcccccgtatctgaatagctaccgccactttctgcgatttgggcacgccatgttggataaggtcgccggttggcggggtgagctgaaattggggcgagatatcgtttttgctccgggggcggaagaggcactaaacagcgccagtacgcaggggaagctgttattggcttcacacctgggggatgtggaagcgtgtcgggcgctggcgcagcggcaaggtgggaaagtggtgaacgccctggtcttcagcgaaaacgcccaacgctttaaacaggtgatggaagaaatggcgccgcaggcgggaataaacctgctcccggtgaatgacattggccctgaaacggcaatgttgctgaaggataaattggatcgcggtgagtgggtggctatcgttggcgatcgcattgcggtaaatccgcagcgtggtggcgattggcgcgtcagctggagttcgtttatggggcagcccgcgcctttcccgcaagggccgtttattctagccgcactgctgcgttgcccggtattgttgatctttgctttgcaacgggagggaaaactgcacatacattgtgaggctttcgccgatccgctgccattaccgcgagctgaacgtcaacaggcccttcagctggctatcgatcgctatgctgcccgtcttgaacatttcgcactgatgtccccgttggactggtttaactttttcgatttttggcggctgcctgacaccgccgataaggagtaa

SEQ ID NO: 429607 - DNA, 423 bp, Serratia marcescens
gtgcttaacgaccctcgctttacggctgacgttgaactcaccatcccgtttcatgatgtcgacatgatgggagtggtgtggcacggcaactattttcgttattttgagatcgctcgtgaggcgctgctgaaccagtttgattacggttaccggcaaatgcaggcgtccgggtatgtttggccggttgtcgatactcgggtgaaataccgcgacgtgctgacatttgagcagcgcatccgcgttcgcgcacagttggaagagtatgaaaaccgcttgcgcatcgcttaccagatattcgatgtcttgactgcgaaacggaccacaacgggttacaccattcaggttgcggtagaagagaaaagccgtgaaatgtgcttcgtgagtccagatattttgtttgaacgaatgggagtagcgccatga

SEQ ID NO: 429608 - DNA, 606 bp, Serratia marcescens
atgagacttttgcctttatgcctgcttttgctggcgccgtgggtgcatgccgtcacgctggatgagcttcagcaacgttttaccgggcagccggtgatccgggctcatttcgcacagacgcgtacgattaaggacatgccgcaaccgcttcgctcacagggggaaatgctgcttgcccgcgatcaagggttgttgtgggatcaaaagagtcctttccccatgctgctgatgctgaacgattttcgtatggttcaacaggtgaatggccagcctcaacaaacggttaccgccgaaaataatccgcagatgttccagtttaaccatctgttgcgcggactatttcaggccgatcgcaaggcgctggaacagaatttccgcgtaggttttcaggataagggagaggggcgttgggtacttcgcctgacgccgacgaccacgccattggataaaattttctcctcaatcgatttgtctggtgaaacttatctggagtctattcagctctatgataaacaaggcgatcgtacggaaattatactttctcaacatcgactgacccctgcgaccctgactgatgacgaacgccaacgctttgccgccgactaa

SEQ ID NO: 429609 - DNA, 2250 bp, Serratia marcescens
atgctgctcggcgtgttgttggcgttgctgccgggcgcacgtttgaacagcagcgtgttggcgatgctgcccaagcaggcgctgggttccgttccgctcgcgataagtgacggctttatgcagcgcctggataaacaggtggtgtggttggtcagccccggtaaacagccggatccgcgagtagcagaaacgtggttggcgcaacttcaacagtcacccgcgttgtctgaagttaaaggaaagatgaacgccgaaagccagaaagcctggggagcctttttctggcagcaccgcaacgggcttatcgatagcgccactcgcatgcgcttgcaaaatggcggtgaagcgcaagcgcaatgggttctgtcacagctctattccgctttttctggcgttagtggcaaagagttgcggaacgatccattgatgctgatgcgtggctcccagttggcgcttgcgcaaaacggtcagcgactgcggctgatggatggctggcttgtcactcaggacgagcagcaaaactactggtatttgttacacggggagctggtgggtgactccttcgatatgcaacaaacccatcgcttggtggcggagctcgcggtacaggaagcgtcactgaaggcgctctatccgcaggcgcagctgctttctcgggggacggtgttctacagcgactacgccagccagcaagcgaagcgggatatcgccaccctcggcgctgccacgatcctgggcgtggttctgttaattatcgtggtctttcgttcattgcgaccgttgctgttgtgtctactttctctcagcgtcggagcattggcggggacggtggccacgttggtgctgtatggcgaactgcacctgatgacgttggtgatgagcatgagcatcatcgggatttctgccgattatacgctctactatctgaccgaacgcatggtgcatggcgcggtcatgtcgccctggcaaagcctgacgaaggttggcaaagcgcttttgttggcattgttgacgacggtggcggcctatctaatcatgatgttggctcctttccccggcattcgccagatggccgtgtttgccgccatcggacttagcgcatcgtgcctgaccgtatttttttggcatccctggttgtgccgcggcttaccggtgcggccggttccggcgatgggggtgatgctgcgttggttggcggcctggcggcgcaataaagcagtgcgcgtaggggtgccgacggccttggctctgctgtcaatggctgggattgccacgttgcgtgtgaatgatgatatttcccaactgcaggcgttgccgtcttcactgctggcgcaggagaacaagattagccgattgatcgggcaaaacgtcgatcaaaaatggttcgtggtctatggcgctactccagaacagacgctgcggcggttggaaactttcctgccgcacctggagcgagcgcaacatgagggaatgattagccatttccgcgcgatcccccttaattcgctggcgcgccaagagcaggatttacgtctgctgcgtgacgcggcaccaaccgtgcttcttgcgctaaaaaatgcggggcttgatatggctaaccccgatctgaacgcaatgccggtttccgtacccacatggctggaaagcagcatcagcgaaggttggcgtttgttgtggctgactctgcccaacggccagagtggggcgctggttcccgtcgatggtgtaacgtcaggcaatcaattgggagagctggcggacaagcaggccggtgtggcatgggtggaccgcaaacagtcttttgattcgctcttcgcgctctaccgttccgtattgacggggttgttgggtatcgcgttggttgtgatcgcctgtggcgcgatggttcgccaagggtggcgtaaagggcttgtcagcctgataccgtccctgttgtcgctgggatgtgggttggctgtgctctcgttttgcgggtatagcgtaaacctattctcgctgttggcattagtgctggtattgggcattggcatcaattacacactgtttttcagtaacccgcaggggacgccgctgacttcgctgctagccattacgttggcgatgatgacgactttgctaacgcttggcatgttgttgttcagtgacacgcaggcaatcagctgtttcggaattgttttggtcagcggaattttcgtcgcctggctactttcaccactggcgatgccaaataaaaaaagagaaaaaagatga

SEQ ID NO: 429610 - DNA, 588 bp, Serratia marcescens
atgatggtacgtaattgctggcgattcgctgcgctgctcgttgtgatggggatagccggctgcagccattcgattgctccggggaatgacacgttcccacaggcctggctagaaccgggcacccgcgtggtgttgcctgcgcctggtttgtcacctgcgatcgataagcagcaactgctgactggtactttcaacggcaaaagccagtcgctgttggtcatgttgcatgctgatgagcagaaaatcaccctcgccgggctttcctccgtgggaattcggctgtttaagcttacctatgatgagaatgggttacacgccgagcaatctatcatcgttcctcaattaccaccggcaagccaggtgttggccgatgtcatgcttagcctttggccgcttgaaacttggcgggcgcggctgccgaatggctggacgatcgtcgataagggtaatcagcgcgagctgcgcaacgccagcggcaagctggtgaccgagatcgcctatcttcagcgtaatggcctgcgagagccgattagcattcaacaacatgcttttaaataccaaatcaccattcaatacctgggtgaataa

SEQ ID NO: 429611 - DNA, 1170 bp, Serratia marcescens
atgatttacatctctgccgtcggtatgattaatgcgcttgggaattctctggatgagatagccgcaaacctcgctcgcggctctgcgccgggtatgcgtccgagagcggggtggctacaggggaacccggaagccgtgctgggcggcgttgagggagagttacccgttatccctgcgtcgttttccgctcatcgttcccgtaataatcaactgttgctggccgcgctggagcagatccagccgcaggttgatgaagccatcgccaggtttggccgcgatcggattgccgtcgtgatgggcaccagcacctccgggttaaacgaaggcgatgagcatgtacagctgacgctcaacggcgaagttagcccgcgttggcggtatcctcagcaggagctcggcgatccgtcgcgatttctcagccgctggctacaggtcgatgggccagcatttacgctttcgacagcttgctcttccagcgcccgagccattatcagcgggcggcggctgatcgaagcggggcttgccgatgtcgccattgttggcggcgccgatacgttgagcagaatgccgattaacggttttcacagccttgagtcgctatcgtctgagctttgccagccgttcgcccaaaaccgttgcggcatcactatcggtgaaggcgctgcactcatggtgctgacccgcgagcctcagcctcttgttctattaggggtgggggaatccagcgatgcttggcatatatcagcaccgcatcctcagggagagggtgccattcgtgccattgaacaagccttggccgaagcggatatcgaggcgaaacaggttggttacattaatctgcacggcaccgcgacactgcttaacgaccaaatcgagtcccgcgtagtgcattcgctgtttggtgaacaggtaccatgcagttcgaccaagcatttaaccggccatactctgggggctgcggggatcacggaggcggctatcagcgcgctgattttactgcgcaatttacctttacccgcccaagatttcagcgcttcgccagcagaccccgcgctccccgcttgcggtgtcatgcataccagccaaccgttggctcgaccgataatcctctctaactctttcgcctttggcggaaataacgccagtattctattagggaaagatgtatga

SEQ ID NO: 429612 - DNA, 477 bp, Serratia marcescens
atgaacgaatatttgccgccgtccgagtacttgcctcatgctgagccgatgatgctactggatgaggtcgtcaacgtgactgaaaacgatgttcactgtcaggttagcgtgcatcttggcggagtgttgggaccctttctcgatgctcagggcaatctgccgggatggtttgcgctggagttgatggcgcaaacggtgggggtttggtccggctggcatcgccgccaagcggggttgcatgaaatttcattgggcatggtgcttggcgcccgcgagttaacctgtgcggccgggcatctaccaggcaatgcgacgttgaatgttcaagctaggttgctgatgcaagacgaacgtttcggcagctttgactgcaccattaccgtaggggaagagtgcctggcatctggccgtgtgaatactttccagccaacgtcagaagaattgacatcgctttttaatcagggagagaccgcatga

SEQ ID NO: 429613 - DNA, 732 bp, Serratia marcescens
atgagtcgttcagttctggtcaccggggctagtaagggaattgggggcgcgattgctcgtcagcttgccgctgatggttttatcgtcggcgtccattatcaccgagatcaggccggcgcccaggaaaccctcgcagccattgaacagtctggggggcaaggtcgcctgctgaactttgacgtaagtgaacgtgatcagtgccgtgaagtgctggaaaaggatatggctgcccacggcgcctggtacggtgtggtctgcaatgcaggcatcgcccgggatggggcgttccctgcgcttagcgagaacgattgggacagcgtgatccacaccaatctcgacggtttttataacgtcattcatccttgcatcatgccgatgatcggcgcacgtagaggtggtcgaatcattacgttgtcgtcggtatcgggaatgatgggcaatcgcggtcaggtcaattatagcgccgctaaagcggggatcatcggcgccaccaaagcattggccattgagcttgcgaagcgcaaaatcaccgttaactgcattgctccaggcctgatcgacacggggatgatcgaaatggaagaggccgcattgaaagaagcgatggcgatcattccaatgaagcgcatgggccagacggatgaagttgccggcctggcgagctatttaatgtccgatattgcgggctacatcacccgccaggtcatttccatcaacggaggaatgttatga

SEQ ID NO: 429614 - DNA, 1230 bp, Serratia marcescens
atgacttgtcgtgttgtcatcaccggcatgggcggcgtaaccgcctttggggaacggtggcaggatgtttcccggcgtctgttggcatatgaaaatgcggtgcggacaatgcccgagtggcagatttatgatggattgcataccttactgggcgcaccaatcgatgatttcgtcctgcctgagcattacacccgaaagcgcattcgcgcaatggggcgagtctcactcctttccactcgcgctactgaactggcattggaacaagcggggctgattgacgatccggtactgactaacggccaaaccggcatcgcctacggttcttcgacgggaagtaccggccccgtgagcgaatttgccactatgcttactgaaaaacataccaacaacatcactggcaccacttatgtgcagatgatgccacataccacagcggttaacaccggtctgtttttcggcctgcgcggccgagtgatcccgacctccagcgcatgcacctcagggagccaggcgattggctatgcctgggaggctattcgtcacggttatcagaaggttatggttgctggtggcgcagaagagctttgcccctcggaggccgcggtgttcgatacgctattcgcaacgagccagcgtaacgatagccctaaaagcacaccgtcccctttcgatcggcagcgtgatggcctggtgattggcgaaggtgccgggacgttggtcctggaagagttggaacatgcgaaagcgcgcggcgccgttatctacggtgaaattgtcggttttgccaccaattgcgatgcggcgcatatcactcaaccgcagcgtgaaacgatgcaaatatgcatggagcaggcgttgaagatagctggcttgaatgtgcgggacatcggctatatttccgctcatggcactgccaccgatcgaggggatatcgctgaaagccaggctacggcagctatttttggcggccaaacgccgatttcatcgctgaaaagctattttggccatacgctgggagcctgcggcgcgctggaggcctggatgagtttgcaaatgatgcgagaaggctggtttgccccaacgcttaaccttcatcagccggatgagcagtgtggtgagctggattatattatgggggaaagccggcgcatcgattgtgaatacttacagagcaataatttcgcgtttggcggcatcaatacctccatcatcattaaacgttgggtttaa

SEQ ID NO: 429615 - DNA, 1683 bp, Serratia marcescens
atggccgataaatctcccgctaacgcagcgaccatcgccgtgctgcccctgctgctgatctggatgacggtgatcctgccgatttattaccccaatatgggcggcgacggtctggcgctgccgcaaaacattctggcctgggccgtcatggcgctcaccacgctgatagtgacgttcaccgtttgccttggccgcacccgtctttcgctgacccccaccgcacgcctgttgctgctcggcatcgccgtgctggcgctgccgctgctgtatactcgctccgagtggcgcgaagacgccctgtggcgctgcgccggtctgctcggtggttggcttttctatgtcgcctgcctgcaactgcgcctaacccccaggcagcgcaacctgttgctgtacggtctgctgttcgccgtcggcgttcaggcactgctggcggctctgcaactgttcgcccccgcgctggcttgggtatcccctaacggcagccgggtctacggcgtctttcagcaaccgaacgtgctgggcagctttatcgccaccgggttggctttggcgctctggcagctgctggctcccctctctgcgccaacgcggcggcggcaaatcccgctgctcgcgctgctggccgctttctctgccctgctggtgctgatccagtcgcgcgccgcctgcttgggggccgcattggcggcgctgctactgctgtggcgctttgcccgccaacgcccggccgcaagccgctgggccggcggcgcgctgctgctgggcgccgcgatcggtctgacggtgctgttcaccggtttcggtctggatggccgcgctggcctgatcggacgggagctttccaacagcgcgcgcctgaccatgctgcacgacgtcggcgccatgatcctggccaagccgctgctgggctggggctatggcggctttgaatacagcttcgcgcacttccgcctgcagacaatgccctggcgagaagtgctggaagtcgccggacatccgcacaatgaaatcctgctgtggtgggttgagggcggcctgccggcgctggcaggtatcgctatcgtcatcgtcgccggcgcgctgctgctgaaacgcgcctggcaacgggatcgcgaagcgccggccggtgcgcgcgtcgggctgtttctggtgctgctgccaatgttgatacacacccaactggaataccctttctatctgtctgcgccgcattggctggcgtttctgctgctgctggcactgttggacggccaaaccggcgccccacgcccgctgcagttagccaaagccctaagtctgcctgtagcaatggcggcgctcggcgtgttagtgatggcggtcttcgcctggcaagggcgcatggcgctcacccaatcggagcgcacgatgctggcctccatcgacagcatcgagcagatgccgccgccggccgcctggatctaccgggagcgcaaaacgttcgacgagcaatctcacgcgctgctggtctataaccaaacgcgcgatgatgccctgttgaccggctatcggcagtgggccaatgcctatctgcagcgccgtatcgacgccaacgtctacgccacgctgatcatgatcttgcgctatcagggggatcaggcacaagccgaggctcgcctgcgggaagccgcttttctgttttctcgggatgcgcggtttaggtaa

SEQ ID NO: 429616 - DNA, 1326 bp, Serratia marcescens
atggcaacaaaaaaatatgacctaacgaaggagtattccttccatggagagttttggcagtttccagatgacaacaaggggagattctcggcgcgaatcgattactccccctatcatgggctaattttagattattgtatttctgatagtgatagtcctgataaatgcgatagattatatggaatattgaatactggcgagcgctgcactttaattggctcgttcaacttctctcaaggaaatttccattttggcaaaggaatggttcggacaggtcgtcatggattccagatcatactatttaatgatttttatgatagaaatacacagattctacattgtgatttatctctgcatgggctccaagagttcattcaccctcaaggcttcataactcaaataaaacactctgaacagccaattttcactgctacaggaagtgactggaaacttcaacttattaacaacgcgtcattctgcgcccttggcgacagcctaccaaacatcgtaaattgtcaaaatacacaagcacttaagaaatttcatgacgattttcaatctactaaaagtttatatcctgacgcttttttctctcttagaaaagctcttaccttttactttagatacactccaaataagaatctaacaataaaagattatgtttcaagagtttgggatatctcgggattactttcaattcttattgataaaccagtgctacctgaagaactatatttcaaatttgaaggtaaagatgtcagaaccccgagcctcttaacattgggtttcgaacaaagaactatcgaccttgctttgagagtgataaatcatcgactacttccaataaactggaaaagcattgatattaaggaagtattcttcaaatggtttgagatagcagagcggtatgcatcattaacggtgacttatcaatatgaaacaggtttcagaacattacatcaagcacatgcagatatcattttattcgcaactcaactagaagcaataaatacgacactgggtggtttaaaaaatgaaaaatacatgacaccaattaacgagtatgcttctcctctactcaaagaaaaacttgatgcatttttcaaaattatcaatactgacacattaggagcaaacattgctactcttaggaatgaacttgctcatgttgatcgcgagaaaaaacttatgaaagttatgacccttggtgattatattagaattggcatgtatctcaaacttatagtcacctcacatttactttcaaatttaggcattgagaaatctaaaattgaaaattatcaaaatcatgtagcacccgaataa

SEQ ID NO: 429617 - DNA, 519 bp, Serratia marcescens
atggattggttaactcaataccaagttgtgttacgagcaagagagtatgaacggcacgaccgtactgagctagaaaccgaggtaagaatctgtctcgccactggcgcaaggtggtctgaggccgagagtatgaaaaaaagccagctcgcgaaatacaaaatcacttacaccaacacaaaaggcagaaaaaaccgcacagttcccatcagcaaagaactctacgagtctttgcctgatgataaaaaaggtcggttgtttagtgattgttatggtgcattccggtctgcgctaggcagaacaggtatcgaattacccgccgggcaacttacacatgttttgcgccacacattcgccagtcactttatgatgaatggaggaaatattctggtcttgcaacgtgtgttcggtcataccgacatcaaaatgacgatgcgatatgcacattttgcccctgaccatctcgaagatgccgttaaattgaatcctctaacttatgaaaatactaatttaacattgtga

SEQ ID NO: 429618 - DNA, 648 bp, Serratia marcescens
atggatgctaagcaaatagcgaaagggattgcggaaggagtagaagcgttgccgacaagccttggttacagcatacggagaacgtgggaaggttctggcgttgtgggcagtagccttaaggagcggaattttagggaaactgagcggtttgtctctttgattcgctccgccgttgataagcaagagccaatacggaagttggtgatgattgtcatcaacgatttttatgcaaagctcgatgcgggcagtaagagcgctgttgcaggtgagattaaccgcgcagaagggtttatcgcgggccgtagtgtgacgcaatttttcattgccaataaaatagcctcaaacatcatacgcaaggcgagctacggccttgtctacaagcggtttatcaagtacagcacgaccgccatactgaacgtggttatgttccaagggatgattgaggaggccgcgctcgcttccagacgtatgcaggtgaaatttcccaaaacgttttacaagataagaggcatgaatctggatatggcgtattttctcgttgaggggttcctagagccatatctcatctacatcaataattattctaatcagttttgcgcaggtgttaaccatgaactggctaaaatcctttcttgtgaagttcgttaa

SEQ ID NO: 429619 - DNA, 243 bp, Serratia marcescens
atgtcgaatgtgatttttatgggtttagacccggcaaagcaaggtagcgatatttcacaggtggctgtgttgcttgaccacgcccgccttgatgagcgtaagaatcaagccgatctcgccgctgctcgtctggtgcgtttggctgcacatatctctaagaacggtttaacggctattgaagctgttgagctgctccgtcaagaggctgaagccatcgagcatcaagcgcaggagctgcactaa

SEQ ID NO: 429620 - DNA, 807 bp, Serratia marcescens
atgttccattatcacggtacgccagtttggggcggagcagggaaagttcatcgtgtagctgttgctggtgctggcgcttttgtctcctatgttagacctgatcagatacaagcgtcttttttgtacgcagctaaggttgctatagactgtggcgctttttcagcatggaagcgtggaattaatattgactgggatgcttattataattggatagggggtttctatgacaatgagaagttaagtttttttgttatacctgatgttattgagggtggagagtcagataatgatattttaatcaaatctttgcctagtggcctgagagataaagccgcccctgtatggcatcttcatgagagccttgaaaggctagttgaactatgtaatgaatggccgagggtatgttttggctcttcaggggaatttgctgtaatcagaacaaaagcttggcatcgtcgtatgaatgacgcttttgaagctattttttatcgtcgtagctttaaaactaaaattcatgggttaagaatgcttgacggtagagtgttaggtaattacccattatcttcggctgattcgacaagtttggcctgtaatgtgcctaaaacaaaacaaaaatacccggagttaacaagaaagctttttgagcttgggtgcagcgatgatgaaattaaagctgggcgctgcgcgattctaaaaggagccatagaaaaggtcgttcctccgagtcaggagaaatggatggctgaatattcaaggtctcgttctaaagttcatcctctgtatattcagggggagttgtttgcatga

SEQ ID NO: 429621 - DNA, 780 bp, Serratia marcescens
atggaaggtaaagattttttaacaacgtatatgcagcaatatgccgatgattatattctcatcggtggtaatgcgtgcgtattaaactttgaaagcattggcgctaacttcagagcaactgttgatctggatatagttcttataactgaaagtaccaatgaccaattttacgagcatttatggaattacatcatcgaacatggttatgaaggaaaagtataccggggaagcaatgcaggaggttcggcctatcgtttcatccaacctgaagacaatcgtgtgccaaacgtgcctgctcaaatagagcttttttctaggaagccggattacttcgatgcagcccttgccaaaaggtcccacattacccagataagaacaggtcaagggatctcaaatttctctgctattttacttgatgatgatgtgtataaatttataagatcatcaagaattcaattgaaaggaatttcaacagtaaatctcgagtgccttttcggacttaagtcagttgcatggcacagcaatcaagccctctttgatgaaaataaaatcaacgataggaatacagtacttaaacatccacaagacatgattagtattgcgaatgtgattgaagaagctaaagaaactttatttccagctcaaatatttgacagtttgcagcattcaagagagcgtctcttaagtcaggatgttcgtgcagaattacaagcagtaccgcgcgatattgatgttacgattgattacatagatactttcgtcagaaaacagcaagtttga

SEQ ID NO: 429622 - DNA, 1050 bp, Serratia marcescens
atgaagaatttgttagctgatgcgcttaaatacatcgagtcatcatttctgatcgatacgaaaattttgaaggaaatagatgaatatcttccatttcagctaagtaagagcgctactttgtgcatcgtaagtatcgataacagagagtttatggttttgactgtagaagatcctgagctgctggtatctaataattttgtacatctcaaacggctagaggcaaagtcaaaattatcgttaattatagtgacatcagaactaaaccttgaattaaaaaacatatccaaacaactaaaaaatggattaatcattcctggccgttatgtttcaatgccgtctctgatgcttcagagtgaatcgaaagacgttccttccggtctctgggtcgataccgaaaacagctatggaatcattccttcatacctattaacttactatctttcaggttattttgatgatggtttcaacagcttagatatcttggatctgctgggtgtatcaaaaatggcgttttctcgggctgttaaagagcttttatctcataaattaatatctgaaacttcatacggacgcagttcgcattttcgattcacagaatcgaggaaaagagtttggaaccattatcggcgcagagtttctcctctctcgacaggatttgtacctgtcagaaatgaaacacttaaagcagcggaagtttttctttcaggagaatctgctctgtcaaagtatactcttttaggttcaccatccagaccttttttgggaatgtgtttgacggataaagacagatatatgaggcctgtaacaccggcgactatgaaaggtgactatttctttaaaatacttaacgttttggatgatgctgagtactaccattctaatatcgaaaattttgcaatgcttcaagtttttccttatcaaccagctattcaaaatgatgcgttgaacaaagtatttcttctattttcgagattcaatacaactgatttgagggtgaagtcatcatataatgaacttgaagatcaggtgtactctaatctcaaagattaa

SEQ ID NO: 429623 - DNA, 687 bp, Serratia marcescens
atggctactctagtttttgactgcccgcgatgtggtgttaaaagagtaacgtttatagttcgtggtattatccttgatgcctcaaattcgaatgattatgattatttttgcgaatgtagagtttgtaaatctgcagttgttctaaatgttagcaaaaatttagacatgatttcacagagcatgggaaaggaagaaatactacagaaaactggaataattgatcacttcgtaaccgtgaatggttattcaacttttgtggattattcatttaaacgcccccctgagtttttacctccagaaataaacgatgcgtttattgaaggggctaagtgcatgagtattggttgttataatgctgcggcaacaatgttccgtttatgtttggactttgcaaccaaagaattattgccgaaaaatgatgaagacggattaaatcaaaaaataagaagaagtttaggttttagaatggaatggttgttcaaacgtaatattttacctgaatcattaaaagaactggctgagtgcgtaaaagatgatggtaatgatggtgctcatcaggggattttggatcagactgcggctttagatttgcaggattttgctgaaacgcttttagagcggctttatacagaaaaagaaagattgagattggcaaaggtaagaagagcagaaagacacaaaaagtga

SEQ ID NO: 429624 - DNA, 1809 bp, Serratia marcescens
atgcgagccgcccggcgctttcgtagccttggcggcatgaatacgacaccggcaacaaccatcatcagcgatccgcgccgccaagctgccttgctctactggcagggcttctctgtgcgccaaattgcggaaacgctgaacctcaaggggccgaccgtgcagagctggaaacttcgcgataaatgggacgacatcgcgcccatttcccgcgtggagcaaagcatggaagcgcggttgattcagctcatcatgaaagacgtcaaggaggggaaagacttcaaagaaatcgacctgttaggccgccagattgaacggctggcgcgggtcaatcgctattcggcaaccggcaacgaggcggatttaaacccgaacgtcgccaaccgcaacaaaggcgagcgcaagcccgccgagcgtaacgtgttcagcgaggccgccgtggagaagctgcaaagcatcttcacggaaaccaccttcgagtatcaaatggggtggtatcgcgccggactgcaacaccgtatccgcaacatcctgaaatcgcgtcagatcggtgccacattcttctttgcccgcgaggcgttgctcgatgcgctgaccaccggccgcaatcagattttcctgtcggccagtaaggcacaggcgcatgtattccgcaattacatcattgattttgcccggctggtcgaggttgacctgaaaggcgatccgatggtgctgccgaacggcgcccggttgatgttcctcggcaccaacgtgcgcaccgcgcagagctacaccggcaatctgtatctggatgagtatttctggataccgaagtttcaggagctgcgcaaagtcgccagcgggatgtcgctgcacaagcggtggcgcactacctacttttccacgccgtcgagtctggcgcactccgcttatccgttttggtcgggggaactgttcaacaaagggcgccgcagcaaagccgatcacgttcagctcgacctcagtcacagccacctgtcaaaaggcgtgctgtgcggtgatggacaatggcgccagattgtcacggttgaggatgcgctgaccggcggctgtaacctgttcgacctcgatcagctgtcgctcgaatacagcccggcagagtatcaaaacctgctgatgtgtgaatttgtggatgataccgcgtcggtattcccgttcgccgagctacaaggctgtatggtcgatacgctggaagagtgggaggacttcaacccatacgccttgcggccgttcggctatcgcccggtgtggatcggctacgacccatcggaagccaacggcggcgacagcgccgggtgcgcggtgatcgcgccgccaatggtggctgggggcaagttccgcgtgctcgagcgccaccagtggcagggcatgaactttgccgcgcaggctcagaagattaaagaccttaccgaaaaatattgcgtggagtacatcggcatcgatgcgaccaccgtcggccaaggcgttttccagctggtgcgcgagttcttcccggccgcgcgggaaatcaaatacaccccggaaatcaaaaccgccatggtgctgaaggcaaaagacaccatcgggcgcggctgtctggaatacgacaccagccacaccgacatcaccgccgcctttatggcgatccgcaaaaccatgactgccagcggcgcgcgctccacctacaccgccagccgcagcgaagaagccagccacgccgatgtcgcgtgggcaatcatgcacgccctcttaaacgaaccgctaaccgcaggtagcggccacagcagcccgaacattttggagttttactga

SEQ ID NO: 429625 - DNA, 138 bp, Serratia marcescens
atgatttttcggatgtggccgttaatccagatgtcgtctttagagcaagcattcccatccttagtttggttgaaagagcccaccgaagcgggcaaaaatttgtctctggtgtatcaagcgttacaaaggttgttataa

SEQ ID NO: 429626 - DNA, 1206 bp, Serratia marcescens
atgaatgctaacctttgctccctgttctgggaaggctttatcgtcaattccttctcgcatccttctgccaacaccctgcttatccagctccagcctgacgctgccgtcatgccccgttgtcgtcgttgtgagcggccggtacctgttgtgcatgatgtctccttccgtcgagtgcgtgaacgccagctactcgactgggtggtctggctcagcgtccccgtccggcgtctgtgttgcccgcattgtggggtcaccaccgaaaaaatcagctggttacctgaacgccggcgttataccgccacattggcaacctgggttgaatccctcacccggttattacctgtcaaacatgttgctcaactcaccggattacactggcatacggtcaagaatatcgactaccggcgtctgctacgggaacgaacagagccgcagcggcataccctccgccgtctggtgatggatgagttcgccctgttcaaaggacatcgctatgccaccgtagtgatggatgcggatacgcagcaggtgctgtgggtgggagaaggtcgcagcagggcggccttccgccccttcttcgcctggctggggccggaaggttgtgccgctatccagtctgtcgccatggatatgaatacggctttagacctggaagtcaggcatcactgcccgcaggcggaagtggtctatgacttgttccatgtggtggcaaagtatggccgggaggttatcgaccgggtgcgcgtcgaccaggctaatcagctacgcgctagcccaaaatcacgtcaggtcatcaaacgcagccgctggctgctgctgcgcaacccggaaaatctacccgaagggcatgaggtaaaactcacggagttgctggaagcgaatcagccgttgaatgtggtgtggctgatgaaaacagcgctgaaagagctgtggtatgccccgagtgaacaagaggcgcagagacgctggataagctggtacaggcagtctcaggaaagcggaataaaggcgttgcaacactttgccgagaaactgaaagggtatgccgggggtatcatcgcgagtgccagacacaggttgaataccagtgtactggaagggatgaacaataagataaaagtgatgaagcggatggcctatggataccgggataacgcttacttcttcctgaaaatcaaagcagcgttccccggtaaagcgcgatga

SEQ ID NO: 429627 - DNA, 453 bp, Serratia marcescens
atgacatcgatgatgaaaggttgtgtgatggcgctgttattggtgaccggcactgcacaggcggggcattcgccacaggaggcgcgcaacaagcagaacgtgctggagttttatcggcaggggctgaacaacaaggattttgcggcggcgcggccgtttttgggcgagcagtacaagcagcataaccccaacgctaaagacggcgtggcgggctttcgtcaatttgtcgagctgctgaaaacgcgttaccccaattcgcacagtgaggtgaaacaggcgtttgtcgacggcgacttcgtgattttgcatgtggaagtcagcgggcgcgaggccggcaagaccgcggcgatcgtcgatatcttccgtctcgacagcgccgggaagatcgtcgagcattgggatgtaacgcagccggtgccggagaagaccgccagcggcaacagcatgttctga

SEQ ID NO: 429628 - DNA, 897 bp, Serratia marcescens
atgaagatcacgctcgaagaattgctggcgttcacctcggtggtcgacagcggttccatcacctccgctgccgatcggctcggccagacgacatccggcatcagccgcgcgctcagccgcctggagaacaaactcgataccaccctgatgcgccgcactacgcgtcgcctggagctgaccgaagagggggaaagcttcctgagccatgcgcgtacgatcatcaactcggtggaaaatgccgaagaacaaatggcggtgcgtcggcagatgccggccgggcggttgcggataaatgcggctgcgccttttatggagcacgtcatcgtgccgctggtagcggggttcagggaacgttatccgcaaatttcgctcgagctgaacaccgacaacctggttatcgatctgctggaaaaacgcacggatatcgctattcgcatcggtgcgttgcgcgattcgaccattcatgcgcgcgcgctgggcgccagccggctgcgcatcctcgccagcccggcttatctgcagcagcacggcacgccgcagagtgtggaggcgttgcatcggcattgtctgctcggttttacccagccggaatcactgaaccagtggccgttgcgctatcgccaggcgccgcatttcaccatcacgccaacgatctcggcgtccagcggtgaaacgctgcggcaattggcgctgcggggcgaggggatcgtacagctggcagactttatgacccgacgcgatcgggaagccggcaagttggtgacgttgctggagcaggagacgctggacgtgcgccagccgattaatgcagtgtattaccgcaatacgcaattggcggcgcgcatcacctgttttcttgactacgtcagcgcgcacatcgacgcgcagacgttataa

SEQ ID NO: 429629 - DNA, 861 bp, Serratia marcescens
atggcatttcctaagtcacatgaaattttagctctgacatcgcaacacgaatcgaataatcgggtgtcggccaactttttgacccgcgagattttaaatgaggcgctgatcctcgtcaggtctctgtcaccagaagaagtctttcgattaacaaaaacggagaccggccagatcgcgtttacgctgggtgaactcaaagatgaaaacaaccgccggttgacagccaatactattgagtcaggacaacgaccaggcggaagaattaatcacctggataaccgaattaatgtctcttttcccggaacctcatggcaaatgggagcccgtgttcagcattttgagaatatcgcatcgagtaccgtaggcggggccggtctggttttgatcgcgggattatggacgggagccggttctggcgttggcagcattttaggccgaaatgccgcccagctcgctgtagtgacaggcacttatttgggtaaacgcttcgtgaccaataaaaccatggtcgtgaatcagatggcggcgcatatcaaaaaccttgccgatatgtttaactctacccacaatgcctttaatgatttcaagtttgaaagcgcagccaaacgcgcacaatacagccccgatcctcaagcagagtaccctattacatttgaacaaaaagtcacggataataatgcagttcctgctaactatgccgaggccattcaggccatcgtgcgccgttttgtaacgggaacctacgagcgtgtagatatcgtcggccagggcgatatgtttataaaagtttttttcagcgatggggaactggacatttcgaaagcccagtatgactatctcagcaatttgaagctcccgtga

SEQ ID NO: 429630 - DNA, 483 bp, Serratia marcescens
atggcaatggatatgtttttaaaagttgaaggcattaatggtgaatcgaaaaatgcgaatcacaagcaatggatcgatgtcttttcctttaactggggcgcgcgacagcctggcaatatggccgttggcggcggcggcggtgcgggtaaagtgaactttcgcgatctgaccgtacaggctctgatagataaagcgacacctgccttattgaaatactgctcggccggtaaacatctcgccaaggtgcagttgtctctttgcaaagccggtgggcaggaagtggaatatacccgcattaccctggaagatgtattggtgactcataccgacttcatcggtgtcgagcacggttccacgctaggcattgagtactcttttcaggccggtaaagtgtcgatggaatactgggagcaagcgaagcaaggtaataaaggggcttcggtgcagatgggctgggatattaagcaaaataaagaaagctaa

SEQ ID NO: 429631 - DNA, 483 bp, Serratia marcescens
atggccattgatatgtttatgaaagttgaaggaatgacgggcgagtcccaagacagcaatcataaaggatggaccgacgtactttcgtttaactggggcgcttcacagccaggaaatatggctgttggcggcgggggtggctctggaaaagtgaattatcaagacctccgtattcaagcccttatcgacaaatctacgcccgctattctcaaatattgttccagtggaaaacatgtcgcgaaaatcgagctttccgtatgcaaagcgggcggcaaccaggtggagtattccaaaatcgttctcgaagacgttctggtgacgcaaaccgattttaacggtgtaggccaaaatgatgcgatcgtggttgattacgccttccaggcgtcaaaagtcaccatgagttactgggaacaaggcagtagcggcactaaaggcgcggaaagcaaatctggttgggatatcaagcagaataaagagagctaa

SEQ ID NO: 429632 - DNA, 921 bp, Serratia marcescens
atgtcagttcatggcaaagaaaactttgaagctcatatttacttagatcatcattatccgccagcccaatggaatatcgtacgaggggttttctgttctcctagttgcctagaagaaagtaaaactcatgggttactttccatttcaatggcatcgatgctttcaaatgaaacatctgatcgtttggtcagtgagatgtggttagaagaagtaagaagagagcattatccagaaaatgtctctcgtctaaatggtatttttgttttcgatgacttagatagtcttgctcagctttgggaaaataatagctgggccgaacatttccaagatgagtatttagctgatgttggagtttcagctgataaatcaagtcgagtggactcaaattggatagcggacatcattggtaatgatgggaaactattacaggactgggaagaggccgctcataactattggcggggagtcccataccccaataagcatcctgtctgggagcgtattgtcgaagggtacataacggtgtggtctatggacagcaagcgagaagcattgaaggacatagaagccatctggcctcagtcgctgaatatcctaagatacgcagtactctgtgcctgttatggttctttggacgggcagacatttccaataatatttactaaagaagacagaatcgaattagtgtactgtcttaggttagtacaacgaggagatcaagagttcatcaattcgcttaacgcgtttattgagattaacccccaattcaattgcggaatccattgtgaaggtaaggagcagatgcctgatttaagaggatattcgagagttattacttctgaatcagccggaggcttcggagactttgttaagcacgttttgcaaattaaaaaggattaccttaaaagcacaggcatataa

SEQ ID NO: 429633 - DNA, 573 bp, Serratia marcescens
atgccacccgcgacgaaaaagggcagatcaccttgccgggcggtaaccagagttatgttcctgccgcagaatttaaagagcttgatggccagcgcttatccgcgaactcctcattcaagtttcgcgtgccgccgctttccaatcgcacctggatggcaccggaggcagccatcgtcgacattcgctatgaaatcgactcgtcaaaccctgtgcttgccgctattgaaagcgtatttaacgtcctgggtctccacacccgccagcacaccgttcgctacctggtcattgagaactactggacgccttcacgttcaaactctctcaacgaggcgattcgtatattctgccgcgacagcgacacggtggcaaagtcaggcagttgcgacaacttttgaatcccccacaggtaaagacaaaaaagcccgaacgcaaattcaggcttttttatccccactgcccaatcgttcagtggtgcgtgcatctcaccgccgtcggctgcgccaacgcacggcgccagtcacccggcgtttggccgaactggcgcttgaagctgcggttgaacgactgctgtga

SEQ ID NO: 429634 - DNA, 519 bp, Serratia marcescens
atgaaaaaattaactgccgtattgttattggcgggcgcgggcttgtgcggccaaacttatgccgcaagcagcgaggccgcatcgcaaagttacagggtttccgcagaggcgggcgtcgcggccgaacagaaggcggtgtatgagctgataaaccgctaccagacagcgcttaacgccggcgatacgcaaacgattttgtcactttttgcgccagaaagttactcacaatggaacgaaaaaccgacggcggacagcaatgaaaagcgccgccaacaatatgatgacttatttaaaaacgagaaatttgaaaccgagtttgcttatgacagcgtcagagtgagcggtaatatggcctatgtgcgcacgcaccatcatcgcggggcaacggttacccgaataagcgacggtgctaccctgatcgatttaaaccgtgaagtatttgtattggagaaacagcagggccaatggaagatcgtggtctacacctttaataccaacccgattcaaggggtgagctga

SEQ ID NO: 429635 - DNA, 924 bp, Serratia marcescens
atgaatgaactgcacgcgctgcgcgtattctgccaggtggtggaaatggaggggttcagccaggcggcaaccaaaatggggctctccccggccagcgtcacatacagcatcaatcagcttgaaaaacagttcgggcaacccctgttcaagcgttcaacccggcgcttctcgctgaccagcgccggggagcgttgctatcgcaccgcacaagacatcctgcagcagtttgaccggctgaaaaacgacatgtcgggcgattttgaacaaccgcgaggaccgctgcgggtcgagatagccacgatgctcagcagcatgcatatcgctccggcgctcccggcttttttggcgcaatacccgaaattgcagctcagcgtgtcggttagcgatcgcctggtcaatccggcggaagatcgcgccgacgtatttattcgcatcggcgccggccacatacccgagatggtcagccgtcaattgctgcaaccacgctatttgtgctgtgcgtctcccgattattttgcgcgccatggccggccggaacacccggaacagctgcaacagcatcagcggctgggatttatccgttcaggcgcggcggcggcggacgactggcagttcattcgtggtgacgagcactaccgtctggcgcccagcccgctgctgagtttcaaccattcacaatcgctgtgcgaggtggccaggaaccacctcggcctggtttacttgctggactgcactctggaaaactatctgaaggcaggcgaactggaaccgatactgcaggagtgggcgcccacaggggcaccgatcaatattctctatccgcgcctgcgggatcgcagccataaaattcgggttttcgtcgacttcatcagcgaactgttcgccaacaaattcgccaggccccgatcccgcgtctcaccctaa

SEQ ID NO: 429636 - DNA, 1005 bp, Serratia marcescens
atgccgccgttatttccccgattgagcttcaaccgcttcggcgatcccgcccaggtgctggaattgcagcagatgagcagaccgctgctgcgccccggacagcggttattgcagatgcgctatgccccgatcaacccttccgatctgatcccgatccacggccaatacgcgcaccgcatcgcccttcctcaggtgccgggatatgaaggcgtgggcgtcgtcgtcaacccgcagaatgggcattcaacgggccgccgcgtgctggcggtagcgggtaacggcagttggcaaacgttcgtcacgctgcctgaagatcgggtggtctgggtgccggacgacatcgacgacgcctgcgcagcgcaaatctatatcaacccgctcacctgctgggcgctgttgacgcaatggctgccgctcaacgccggcgacttactgctgctcaacggcggcggttccgccgttagcctgctgttggcgcagatgacggcgctgcgcggcattcgtctggcggtcgtagtgcggaacaccgctcatcgccaggcgttactggccgccggcgcctggcgcgttatcgaagcaccgcagctggtggaaatgacgaattttggcgcccgtgcggccatcgactgcatcggcggcgaaaacggattgcagttggcgcgggcggtccgcaccggcggcgattttgtggcgctgggcctgcttagcggccgccaggtagactggcggcgcgtggtggacgagttaaagctgcgggcttcgctgttccacttgcgcaaatggaacgcacaggcggcaccggcgcaatggcagacggcgttttatcagttattccagctgttgcgacgcggccagctggcgctgcgcccacccgccgcgatttatcctttgcgtcagtacgcagcggcgctgcaccacgccgcccagcccggcgtgaatggcaaaatattcctcactccggcgccgccggaggctggcgcggcgggcgaccgtcccccaggataa

SEQ ID NO: 429637 - DNA, 927 bp, Serratia marcescens
atgaatcagtttcaggagatggcgacctatatcgccgtggtcgaggccgccaacatcagcgccgccgcccgccgcttgggcaccaccaagtcggtggtcagcagacgcatccagcagttggagacgcgccttgggactgtgctgttcgaacgcgggaaaacgcttgggctgaccgacgccggccacctgttctatcagcgcgccgttctcatattaagcgaagtgagtgatgccgaagagtcggtgcgaacactgcacggccaactgcagggcccgctgcggttaaccgcgccgatggcgttcagcatccgctatctggcaccgctgttatccacctttatggcacagtacccgagcctcaatctggacgtggagtacagcgatcgcctggccaatctgaatcaggagaatttcgatgtcgccatccgtatcggccccttggcggattccgacctgatcgcgcagcgcatctgcgccaaccgccatttgatttgcgccagcccagcctatcttgcccagaaaggcacgccgatgcacccgcaacacctgcaacagcaccaggggttgctgtatattcagcgcgaaccgaccggcatgctgcagctccccatcgagggcgaaatccggtcgtttcgtatcggtaaacggctgcgcaccgataacgcttttcacctgttggcggcggctaaagccggtttgggcctcgccatcctgcccgcatttatcgccgccgacgcgatacgcgcgggggaactgcgcattgtgctggccgcctattcacccgacggcggcgacatttccgccgtctatcgccgttcaaaacgcgcatcccccaagatcaaggcgctggtggactttctgaatgaacacattggccatacgcccagttgggaaaccgcactctcctctttcctgacgtcaacctga

SEQ ID NO: 429638 - DNA, 1629 bp, Serratia marcescens
atgaaagacttatcacgccgtcagctgatatcaaaaacgcttgtcgcttcagccgccgccacgctcggcgcttccacatcggtttccgcattatcggcgcaatcacaaccggcccaacggaccagagagacatcccctactttcgacgtagtcatcgtcggcggcggttccgccggcgcggtgatggcggctcgcctcagcgaaaaccctgcgcgccgggtcctgctgttagaagccgggcacagttacgcgccctacgattatccgcgcctcatcgcggacagcgacgtcctcggcgccaatggcaacccggagttcgaatggggataccggacagaacccggctatgtcagccacgcgatcggcgctatccgaggtaaagtcttgggtggcagttcaggcgtcaacggtgccgtggcgatccgcgcccgtccggaagatttcaaccgctgggatctgccgggatggggctatcaggacctgctgcccgccttcaaaaaactggagactcgtcatggcctgcacgaccgcgcaatccatggcgatagcggcccttttcccgtcgtgcaactcacattggatgacatcacgccaatgcaacgcgctttcgtcgccgccacgcgcgccaacggctatgacgcgattgacgattttgatggcccttcagccaatggcgtcggcccctacccgatgaatatcgtcaacggcgtacgcgttaacaccggcatggcctatctggatgagaaaacccgcgccagagacaatcttaccctccgtgcagatacgctggtcgaccgcgtgatatttgacgggcagcacgcgatcggcgtccgcctggccagcggcgaagaaatccatgccgctgaagtgatcctgagcgcgggaacctacggtagcgccgccgttttgatgcgatccggcatcgcgcctgcgcaacagtcgaagcgtctggggatccccgtcgtcgccgatctccccgtcggcgaaaacctggtcgatcaccccttttattacaatgcctacgccgcccgccccgatgtcatcggcagccaatcgccggttatcggtgccaagctgtggacccacagcagccaggcggaaccgggagagctcgatctgcacattaccgcgacgcatctgtttcctcatgaccaaagccctaccggcgtcggttttgtcttggcggtggcgctgactcggccacaatccaccggacgagtctggctggaaagccgcgatccagcggcagcccctcacattgaccttaacttcctggcgcaagagagcgaccgcgttcgcttgctggagggggttaaactggcgcgaaaaatagggcaaaccgctccgctgtctacgcttatccacagcgagcttgcgcccgctgcagacagcgacgaggccattcttgcctcgatggcggcgacgttggatacctatcatcacccgacctcttccgcgccgatgggaaatgccggcgaaccgaaggcggtcgttgaccttcagggccgcgtacacggcgtatacgggcttcgggtcgtcgacgcatccatcttccccgacgttccctccgtcgccactaatgtgacgacgatcgccaccgccgagcatatcgcccgacactacgcctga

SEQ ID NO: 429639 - DNA, 1407 bp, Serratia marcescens
atgaagatatctggtgctttacctatgtgggtccctcaatacagcgatcatgagaaaccggtttacctgatgattgccgatgccctggagcaggacatcaattccgggcgcctgcagcctgacgagcggctgccaacgctcaaggatctcgctggaactttgaaagtcactcctgggaccattggccgtgcctatgacgaagcggccaaacgtgggctagtgattggtgaggtcggtcgcgggacctttgtcctgcctgcccaaaccaaggctgcgccacgcgcgataggcgagcgctcccccgaagacaatgcacagattgatctttcaataattaagcctagtgacgccgacatagacggttggttgcggcagtcaattattgaactcgcgcactcagcggatttgggccgtgtgatggactacaccagcgatggtgggtacgcagtacacaagcaagcgggggctcgttgggtgcaacgcagtctgccagatgcaacgtggcagcagatcgtcctcacttccggagcgcagcatggcttgctagtggcgatcagtagcctatcgaaaaccaatgatgtgattttgtgcgaagagcattgctatcctggaatcatctctcttgctcatagcctcgatcggcgactgcaaggcgtacagatagatgaattcgggctactccctgaggccttccgcgccgcttgcgttgagcaccgcccagcgttactaatttgcgtaaccacccaccaaaatccaactaattcaatcatgcccccggagcgtcgcgaggcaatcgcgcagattgcccgcgagcatgatgtattcattattgacgatgatatttacggttttctggaggtccagccagcgagtaaaccgatttcggcctatgcacctgagcgatccatctatttgacgagcctttcaaagagcattcttcccgcgttacgtattggctacctgtacgcgcctcctgagactctctcacgcttgtcatccatggtccgtagcagcgtatggatgccttcgccgatgatggcacagttggccagcaacgtgatctgcagcggtatgggtgagcgattagtcaaagcgcagcaagatgaggccgctgcacggcagagactggtcaaggaagttcttggcagttatcgaatttgcagccagcccaacagcttccacgtttggctggaattgcccgaaccatggacttgcgatgagtttgccaacttggcccgtgctcatggggtaatggtcgttagcggcagccagttcctagcacagcgtactatcgcctctaatggcgtgcgaattgccttgatgtcaccgagtcgcgccgaactgaagtttgcgttaaccacgctggccagcttgctagcctctcccgaaccacgcttgttttactaa

SEQ ID NO: 429640 - DNA, 1026 bp, Serratia marcescens
atggaatgcacacagcacaatcaggacaccgagtctgtgacaacgttggagatccgcctgccatgggtcacctccagcgcatggcaaacggtgttaagccagactccgctggattttgaatccaccaaggatatttattttcagcttaaggagcaggcccaggacataattggagccgaactaactcgccagatccgtacattcgttgaagacccgacgattactgcaatggtgataaggaattgcccacgagatcgtgatactccgccgacaccgtactctggcgtgttgagtccggagagcacccccattgcctgcctcgtgaacctctcgctgcaaagcctgttaggtattcaccccgtcgtatacgaaggtgaaaatgacggtcgtttatttcggcatgtgattccttcacgagcatcagctagtcagaaaagttctcacggttcccgtcttcggttttcctaccacgtagacaacccagatttgccgttgtcgtctgaggctgtcggcgatatttcgtgctgcccggaatacttgtcgttcgtcggcatacgctgcgacccacgaatcaacaccacactagtcaatcttgatgaagtcctcaacagccttccggattctattgtgcatgaactgagtttgccgaattttgaagtgcgacgcccggattctttcgccagtaatcgtcgctcgacgcctaacctggctgtgttggtccgagggttgggcaacgagtggttgtgtcgtttcgatagtgaaaacacgtacggcacaaatacccctgccgcacacgcgcttgatgtcctgcgaacgatgcttgaaacccgtaagttcgataagccgcatctcttgctacctggggacttcatgatcttcaagaaccagcgggtactccacgctcgggatgctttcgagccgcagaatgacggtgcagatcgttggctaattcgtttgttcgcggtcaatagcctgagccgagtgcgcttggcgcgtgcagatcatctttacgaagtcctttcctga

SEQ ID NO: 429641 - DNA, 786 bp, Serratia marcescens
atggaactactaggagcctattgggctgagcattggatatttgcgattattttgctgggtactattgcgtttatagctggctttgtcgacagcatcgcaggtggtggaggcttgttcttggtgccgggctttttgctcgttggcctgccgccgcaagtcgcactgggccaggaaaaattagtcagtaccttgggaactcttgcggcgataaggcattttctggtcaatagcaagatggtctggaaggtggctcttgtaggcgtcccattttcgctattgggcgcgtatctgggggcgaacctgattgtttcaattccacaggaaacagtcggtaagatcattcttgctttgatcccctttggtattctgatttttcttacaccaaaagatcggccagtacaggaacatgtcttgtctcatagaatgctgtttactgtggtgccactgacatgcttggttattggcttctatgatggtttcttcgggccaggcacaggaagcatgtttattattgcctttcactacctgctcaaaatggacctggtttccagctccgcaaactccaagacattcaactttgcctcaaacatcggggcgctggtggcatttgttattgccggcaaggtgatttatttgcttgctttgccgttggtggcctgcaacatccttggcaaccatctgggcagtgccttggcaattcgtaagggcaatgacgtcgtgcgtaaagctctagtattttcgatgctctgcttgttcgccagtcttggcgtgaagtatctggcctga

SEQ ID NO: 429642 - DNA, 753 bp, Serratia marcescens
atgcgaactgcattagtcaccggggcttcagccggctttggtaaagcaatctgtcatcggctgattgccgaaggctatcgggtcataggcgctgcacgccgcatggagaagctcttgctcctgcggcaggagcttggcgaacagttcatcccgctgccgctggatgtcactgatccgctgtccctcgacaaggcgttcgagcaggtgagtgaggccccgttctccattgatatactggtgaataatgctgggctggcgttgggcattgagcgtgcacagcagagcaatgtacaaaattgggagcgcatgatcgccactaacatcaccggtcttgccctcgtcactcatcgagttctgccagggatggttgaggctaacagcggactgatcatcaacattggatcgatcgccgggacctacccatatccgggaggtaatgtatatggagccagcaaggctttcgtcaaacaattcagtttgaatctgcgcgccgatttggctggtacccatgtgagagttaccaatatcgagcccggcctgtgttctgggactgaattctcggtggtacgactcaatggcaatatggaagcagtcgaagctctgtacaaagatgtaaaagctattgctcctgaggacatcgccaacactgtattctggatcatccagcagccggagcatctgaatatcaacacgatagaaataatgccggtggcccagagcagtgcggctctcaatgtcgtacgcaacctgtag

SEQ ID NO: 429643 - DNA, 213 bp, Serratia marcescens
atggttgtctctgggtactaccctggaatctccctcaaagaagcccgcactcgtcgcgacatcgcttgtgaattggttgcccgcggcatcaacccctgcaagcaaagaaaccaggaccgcagacacgcctttctcgctgagaatcacaccttccagaaggtgttcgagcaatggttcgagtttcgcaagaagagtctgaaggcgggccgttaa

SEQ ID NO: 429644 - DNA, 924 bp, Serratia marcescens
atgaatagtgacaatatcggtgagaaaaactcacgcaaaaccggcaggccgttgccgttgggcggactgcgctgcttcgaggccgccgcgcggctggaaagttttacgcaggcggcgcaggggctgaatttgacgcatggcgccgtcagccgggcggtgcgggcgctggaagaggaactgggcgtggcgttgtttgagcgccgccatcggcgggtactgctcacggcggcggggcgcaagctgtttcaggcgacgcagcaggccttcggcattctggatcataccgcgctggaactgcgtcagcaggcgctcgacgcgccgctggtcttgtcctgtgaaccgaccttattgatgcgttggctgatcccgcgtctgccggcttttcagcaggcgcatccggacatcaacttacagctggtggccggtggcgggccgttttcgttccatgacggcattacggcggcgatcaggcgcaatgacttcgattggggaaaggaggtgcatagcctggcgctgttcagtgaaaaggttgggccggtgtgccaacccggggcattggcaaggatgacgatcgctgagggcagcctgctgagtttgcggcccggcgcgaagctgctgcatgccgccacccggccggatgcctggtggcattgggcgcagcaacaggggatggccttggtggggcatccagagcagcgctttgatcatttctatttcagcctgcaggcggcggtcgccggtcttggcattgcgatgggcccgtggctgcaagtgcgagacgatctggccgccggcttgttgagcgcgccgttcggttttatgcccgacggcagcggctattacctgctgtcgccgcagccgatcgtgcccggcagcgcgctggctcggctggccgagtggttgaggctcacggcagacgcctga

SEQ ID NO: 429645 - DNA, 618 bp, Serratia marcescens
atgactgaactcatcgctgtcgtcaccattactttactcgccgtgataagcccagggccggacttcgccatggtctcgcgcaacagtctgctgctctcacgccgcgccggcatattgaccgcctgtggcatcggcgccggcgtactggttcatgtcagctatacgctgattggcgtcggcgtgttgattcaacaatcgccctggttgtttaacctgctcaaaggcatcggcgccgcttatctgatctatctcggctttacgctgctgcgcaacgcggcgcatcaggatgccacgcccagcaccgcgccggccgccatcagcgatttcggcgcgctgaaaaccggctttttcaccaacgcgttaaacccgaaaaccaccattttcatcgtcagcctattcatgcaggtcgtctctccgcacaccccgctcggtgtacaaattggctatggcctctttattgccgccgtccatgtgttctggttcgctgccgttgcgttgctgttttccgcgcctggcgtcaatgcgcgctttttgcgtttacgccgcggcatcgaccgcacctttggcgggctgctgattgtctttggcgccctgttggcgatcgccggcatcaggtaa

SEQ ID NO: 429646 - DNA, 399 bp, Serratia marcescens
atgtcttgtcatgcagaagtggtcatcgtctctttctcgtctatctgtcgggttatgaatttcttatcgcatattatcgacaggcctgacaatacgatcgtcttaaccggcgtggaaacgccgcgcctggcgaattttaactgtctgaaaaaaaacatcggtcttacgacgttcgttgaggcgataaaaatgttcaccgcgagctgcaaagggcagagcctgtcgccgcgcgagctttcggtgttggccatgctgctggcgggaaaaccgaataccggcgtcgctaaggcgttgggtatttccgagaaaaccgtcagccagcataaaatgaacgccatgcgtaagctggagattcaacgttttcatcagttcattttggcagcggatgagcgagtgtaa

SEQ ID NO: 429647 - DNA, 525 bp, Serratia marcescens
atgacggaacaaatccagatcggtgtcaaagtggaaaaatcgctaaaagatgaggttgatgtcattcttcgcggtttggatattaagccgacgacggcgataaatgggctttatcaatatatttcacagcatggagagctcccttttgtcatatcaaccagcgtgaaaacaccgaaggatatcgccggcgggttgttcaagagcctgttttccttacaaagcacgctcagcgttttcttggataaagtgcaaatgaagcggtgtgtcagcagggaggaagtattgattgtgctcgatatactgcgcgattttatcgttgcttttcgccaaagcgcgcaatatctcggcgcttcacctttcgggcggcgtgtagtttggaaggatgccgtatgcgccgtcgagagtattcatgaaattctagataataacgtaaaatacagtgaagatggcattatgaatttggatgaaaaatatctttcatcgctgtctgcattgctgatctcattatgttcttcacttaagtaa

SEQ ID NO: 429648 - DNA, 1065 bp, Serratia marcescens
atgctcaggatactcgcactgacgctgtccctattgttcagcggttacagttacgcttcatgctacggcaatggcatccaatatgcgccgccgatctacgtcgatttgtcggataagctcagcgataagacaccggtctgggaaggcagtttttatacgcaatacagcggttcatttagctgttcaacctcgagcagcgaattcggctatacgcgtatcctgtcaaccgacagcacgaaggcgaccattctgggattcaacagcggtaaatattggatacgcgcggaaataaccaacgacatcgccaacaaaaagcttagcggttggggatcgcactccgcttcggaattgaatcagccgatgaatatccgtttcagtctggtcagcaagacgggcacatcgatacccggcgacacggttagccttaaggacgtgatgttcgtgaccgatctgagcgggatgtctttgctggagatcattttgtggcccgccaagcagttggtgaagatcttgacctggctgctcaacggcttcaattggccttacgatcagcgcgacatgtacggacagccgatgaccatcaagtatgcgcccaagatgacgacctgcactttcgacaatgccggcctggcagtgaagttgccgacgttggggatatcgcagattactcagggggcgcaaaatggcctgacgccctttacactgaatttcagctgtcagaatcggcaaagcggcggcacggccgatcgggatatcaatatgtttttatccagcaataatctgttggcttcagataatacggttttgatagataaaagccctgaggcggcaaaaggcattggcatccggctggtcaagacggcttcgcctaataatcccgtcacgctgtcgctttccagcgtggcaccaggtgcggcgacttcattatttcatgtggtaaccggtaatgccttggatgcgcaattttccatcggcatggcggcctattattatccttacagccccaccacaatgagcagtgggggaattaatacatcggccacgcttaacattatatataaatga

SEQ ID NO: 429649 - DNA, 2496 bp, Serratia marcescens
atgaagcttaaactaaaattgctttcgatactgaccgcatctgtattcattccgttaaataaagcctcggcgatgaaattcgacacttctctattggccggcgcgtccagcgaatccgacctgtcgcgtttttacctcaataatgacatgccggcaggcacgcaaacggtcgacgtgtatgtcaaccagagttggaaagggcggttctcgttgcagttcggcgaacataaaggcgatattcgcatcgcccatcgtgacgccgccctgttgggcatcgatatgagtagtttgtccatcgggggggacaaggaaccgatccccgtccaaacgttggtgcaaggaggaagggccgacttcgacgtggggacgttgagccttaagctgacggtgcctcagtcgcgagtgattcgcgcagaggccggctatgttgacgccaaattttgggatcgcggcgtgcctgcgctgctgctggcctataacgccacctattaccacgtgcagtcgttgcagggcgacaaggcgtcaaacgacgatttctataccggtttggaatcggggatcaatctggcgggttggcaattcagagacagcagcaatttccgcagcagttcgcgacagggcagcgattggcaaaataatactcgctatgtgcagcgtggcttcgccgccatcaaatcgaacctgacgatgggcgatttctattcgccgggggacttgttcgactcgattcgggtgcggggcggcgctttagcctcggatatcaacatgcggcccaattcgcagcagggtttttcgccgatagtgcggggcgtggcgcagagcaatgccctggtgaaagtattgcaaaacggcaacctcatctatcaggagaacgtgccgccgggctcctttacgctggataacatattgccgaccggctctgcgggggatctgttggtcgtggtcaaggaagccgacgggcgggaacaatcctttaccgtaccgttttccgccgttcccaacatgttgaagcagggggtcagcaaatacggcctggtggccggtaaggtcaatcaggcggataccgactatgcgcccgctttcgcgcagggcacgctgcagtatggcttcaataacctggtcaccggttacgtcggtacgatcctcagcgaggactatcgcgcctggctgctgggcagtggctggaatctgccgttcggcgcggtatccgtcgatgtgactcaggcctcgacgcatttgcaggatcgcaatgaaaatgggcaaagttttcggatcgcctacagcaagtttttggacgctaccgcaacaaacttcacgctggcggcataccgttattcgaccaaaggttattacagctttaacgatgccatctacacccatcaaggttaccgcgagcgtgacaagcgttttcacgattattggaacgatcgggatgacgatgagcttgccccgttggatttgaatacctgggacgccgttcgcgccgctcgtccacgcaataccttcaatttgaacctgaaccagaggctcgcagacgggtggggcacgctctatttctccggcacccaacgcgattattggtcggatacgaataaaagccgggaataccagctcgggtattcaaacgccttctcgcgcgtcagttacaacatttccgcgagtcgcgtgagaaattccgatcgcaaagaagagacgcggttttatctctctctgagcgtgccgctgtcgatgttcgacaacaatgcctatctcagcaccagcttatccgccaccgattcgcactatcagcaaagctcgctgagcctgagcggcaatgcgctggaatcaaaccgtctgagttatgcgcttgccggcagcaatcaaagcggcggcaacagcatggcgagcgtgaatgccgcctatcgcgccaacgcgacgactgtcggcggctcctacagtgaatcatcagactatcgacaattgggcatgagcgcccgcggcagcctggtggcgatcccttggcatttgctagcgtccaacgaaatgggcaacaccatgatggtggtggacgcgcccaaggccaaagggctgatggtgaacggcgacgagagcatcgtcactaacgacgaagggctggctttggtgccttacgccacgccttaccggcaaaactccgtgacattgtcggataccggcaacagctccggcgccgagatcgtcggcaatatcgccaacagtgtgccctatgccggcgccgtcaactatttgagatttgaaaccgatcggcgtcggccttatacgctgcgcgcctttaagcgcggcaataaacccctgccatttggtgcggaggtggcggatcaaagtgggaatgccattggcttcgtcgggcaggccagcgtcctgtatctacgggttgaacagcagccaacgtcgctggaagtcaggctgaatgacggtgtctgcaagattgaacgcccgaaaatatcgatggacagcgcagccaacacatgtcgataa

SEQ ID NO: 429650 - DNA, 420 bp, Serratia marcescens
atgggcgcggcgctccccggcggtcgtgagtcggtattttatttgaatgtgctggatatcccgcctacgccgaaaaatttgcaaggggtcaatacgctgcaattagccatcaaatcgcgcatcaagctattttatcgcccggcagggttaaccggcagcgcaaataacatcaccgacttcattgaactccaggcggcagggaagggatttaaggttatcaacaaaggtccttacttttttacgttggccaatgttgatcagaaaggcaaaaagaatctgttgattgactcagtgatggtcgggccatattccagcctctttgttccgaccaaagttggtgtgagccggaacattccctacaccctgctctatatcgacgacctgggggcttataaatctaaagccattacagcccgctaa

SEQ ID NO: 429651 - DNA, 597 bp, Serratia marcescens
atggggtttattatgattaagcaaggcatctctttggcggtattggctgccgcgttaacatctgtgggcgcaacggcggcagataattccgccggtggcgttatttcgtttagcggtgccgttacggataccacttgtaccatcaatggcgggaaaagcgccgattttaccgttgcgctcagcccgatttccgtgacggatgcgggcaccgttgtcggccccatcaccaaaaacaagaaatctttctcgctgacgttctccggctgcacgccggcggcgggaacggccggtacgccgctgaagatctacttctcttcggcgaataatatctctaccgacggaaaatatctgctgaacagctccgtgaatgaaagcgacgccgccgtagcgaaaaacgtcggtttttctctggccgagccgggttcatccacgccgattccgttgaacgtgccttatgtcaccaagatcaaaggcgataaaacggcgccagatgccgaaacgctgacgctggatgcctattactacaagaccaatgcgttggaagcaaaagtgggggaattgagttccaacgtgacgtacaccatttcttacctgtaa

SEQ ID NO: 429652 - DNA, 963 bp, Serratia marcescens
atgcctaaagaaagaaacttatcgtttgattttttgaaagggttccttatcctgctggtgatcgtggggcatttattgcctggcagtgctgatgttggtttgcgtggggcagtatatttttttcatatgccgctttttctcggggtgacgggctactttgttcggcgtcattttattgatggcggcgtgattagcgtgctgaaaaagtatcagtggcgcatgattatcccttatttttttgcgttcattgtttacagtgtttattctctttactcctcagaagaagtaggtttaaagcaactcatcggtctgtttctctacccctactatcatctttggtatatcccagcagtggtcatatttgtgctatatactatggtcatttacaagagtaatttcttactcggtttctttctgttcacttccgccgtattgtctattgtctggtactgttacgccgacacgctggaaaaccaatatgcctggctgaaattcattggtgataagcgtttctattattactactccttctttttattaggtttcctggtcggggataagaatttttacggtaacccgctggcgttgttcgctatcgcgttatctgtaggcatattggggtactatgaaccgaacgggacactgctggatgccgcctcatggtttgtatttaatgctgcactattgttattgatggtgagtttgtgtaagcgtctgaagctgagagatgagggctttgtggtcaaagtggggcaggtatctctgcctatttatctttggcatgtgttgcccattttgcttgtcggagcaatggtcgctaaggattcgttaggtttttatctcggcgtaacggccattattttcgctcttgtcatcatatttatccgcttacgtggcaaaagcagatttatcgactctttcttttacggggaaagggccaattggccaccgactgaaaaatag

SEQ ID NO: 429653 - DNA, 417 bp, Serratia marcescens
atgagcctgaacgttttctggtttttacccacccatggcgacggccactatcttggcagcgcgcagggcgctcgcagcgtcgatcacggttacttgcagcagatcgcccaggcggcggagcggctgggattcggcggtgtgctgatccccaccggtcgctcttgcgaagactcttggctggtggccgcctcgctgatcccggtcacccagcggctgaaatttttggtcgcgttgcggccgggcatcatctcccctacgctggcggcgcgtcaggcggcgatccggaagagctggcggcggaggggttacatctcagtcatgaagagcgttacgaggcctcgaccgagttcacgcatatctggcgccgggtactggaaggcgaaaccgtcgatttcgacggcaagcatattcaggtga

SEQ ID NO: 429654 - DNA, 1515 bp, Serratia marcescens
atgttgacgccacgctatctgtcctggttgctctgtgccgccatgctgccgctcagcggctgcgatcggcaaaaagtcgctgacgcgatgggggcaagcgcaccgtccccggccgcgcccatcgcgagtgccagtacgccggcctatacgccgctgaccgccgaccagctgtaccagttggtcagcccggtggcgctgttccccgacaagctgctggcgcaggtgttggccggcgcgggttatcctgaccaaatcaacgccgcggatgcctggctggcgcaaaaccgcgggttgcaaccggcggcgctcagctcggcggccgacgctcagccctgggatcccagcgtgcgcggcctggtgcaattccccgacgtgctcgatcaaatggcgaaaaacatcccctggaccaccgccctgggcagcgcctacctgaacgatcccaccgacgtgatgaacgccattcaggtgatgcgtcaacgggcggccagccaaggcacgctgaaaaacaccccgcagcagcgcatcgtcgtggcccccaccacccgttacgttgagcagcagccctatcgccagcgcgtggtagcggcgccgggcgaaaccatcgtcatcgaacccagccagccggatacggtttacgtcccgcattatgatccctgggtggcctacggcacgccgatcccagcctatccgagctatcggtatcaaccttcgggctacagtggcggcgacatgttggcggccggcgtgatcagcttcggtgtcggcattgcggtcgcctcattgttcaatcagcacaacagcggctggcacaactgggatatgcgctgggacgatcgacgccaaccggtggtctaccgcgatgcgccctacgtatcgcattccaccaccgtggtgaatcgcgtcaccaacatcaaccaatataacaacgtgaacaatgtgaatcgcagcacccatacagtgaataactacaacaatacgaccgccgcaccgacgccgcatttcaacccgccgacgcctaacgcgcagccgcacgtcgcgcctgcggcccatgcgccgatgaccctgccaacctttgcacacacccagccggtagcggccgcgccccacgtgcaacagtcggtcaacgcgccccatgtgcaacaaccgaggagcatgccgacgttcacgcataccgcgccggcagcgccccacgcgcagcagccgatggccgtgcatgctgcgtcggtacggacgcctccgatgcagaccgccgcgccagtgcatcaatccgccgtgcggccacaggttcaggtcgcgccgcacgctgcgccgccgatagttcgtgaaccggcagcgccacagcatccgacgatagaacgcccgttggcagtgccgcaagcgcgcatcatgccgcatccagccccggcgccgcagatccatcagccgcccgttcagccgatgccgcatcgccaagcgccggcgccggtgaaaccgcaggaacaccgcccgatcgtcgagcagcacaaggtgggatga

SEQ ID NO: 429655 - DNA, 744 bp, Serratia marcescens
atgaaaaaaatcatactcattatcacgatggtagtgtctacgctcatcatgcaggggtgcaaacaaggtatggatttacaaccacaggattattttgaagggacgcagctggacatcgccaacatcatctacgagggtgacaggcaaaagctggataaggttttaccgacggtaagcaaagaaacgttaaatcgaccggccaaggcggagatgacgttgctattctgggctataaacaacgccatctttgacaagaatacgccagagcggctcaagatcattacggatttggtcaaggcgggggcagatccactgcagccaagaccggaagggcgaagtagcccggctgaatatgttatgaaagcggataaaggcgtctggatacaggctatgcttgaaggcggactatcgcctaatgcaagggatgaaataaacaatcaaccaataattttcaagagctttcaagcggttaatacagagacgctgagtactctaatagattacaaagttgatgttaatatcaaaggtgctatgaacagaacgccattaattaatgcgttgtataatagttgcccagaacacattgaggttcttttggctcatggcgctaacccattagccaaagatgattttaatgacagcttcctttctttgatttctgcggaaatagccaagggagacaaaaataattcttatataaagaaattaattaaaattaaagagaaaataaacattatgaattag

SEQ ID NO: 429656 - DNA, 2223 bp, Serratia marcescens
atgcaggggttgactctgggtgagttgctatcaaaacaggttaagcaagaaaatgaaaagcaggatgatatgcaacaaaaaattcgtgttgctgagcatcatctgatgatcgataacgaagaaaagcaggcaatgatttcttctatgcaagagcaattgctgttgcttcaggaaacgcttatacaacagcgagagcaacagctggttactcagcaattgttggagaatgcgcaaaaagaagttcttcttttaaataataattatgttgaagacgaacctcttaaattaaagattgaaacactgagtcaacaacttagtgaaagtcagtccgacatgaacaatatgcgaaaaagtctgtcgtggcgactaacggtacctgttcgtatgcttggtcgggccattcgcggtgagtttggggtaatcagggatatatccagacactacatgcgacagcgtaaagggacaaaatcgacctctttggttgggaaaggttggcaagcgtttcgtgcaagtccgcatccttataaggctttgcttcgcaaaactaaagtggcaggcaaactattgctaaccggccgtttcggtgagttgcgtagcagtcttctacgtgtggcgaaaaataccgctaatacgccgatgccgctagttaatatagataccgaccatattgttattctcactactaggcatacactgtttgtggcccatttgcttgagaaaacgcttgtagaggtggggcgcggcgttaccataattgaagcatactcagcgccggcggacagtgggcaactgcatattgttatttgccctcaaatttttgctgagctgccgcaaaactttgttgcgttccaaatggaacaatctattaacccacgttggtttacgccagagtattttgcgattctcgaacgtgcaatggctatatttgactattccctgactaacattaattacttattagaacatggtatcccttatcaaaaattgttctacctcccaattgcttcttttgcagactacagctcaaaattgacccagaaaggtcataagttgaacggcaatgaggagcaaattgacgttctcttctatggtgatacgaattgtgagcgtcgtcgtcattatcttgaacaattgggacaacgttttaatattcatattgcctctggtgtattcggcgatgagctgacccggctggtgaaaaatgccaaactggttattaacctgcattactatgagaatgcgttgcttgagaccacacgtatttacgaagtgctatcgttgggaacgccaattgttagtgaagaaagtgtggatatcgcggagcatacgtctctcattgatgttattgattttgctcctattggcgatattgacgcaatggcgaaaaaaattgatcgtctcttgaacgatcaagattatcatgctagccgtaagaaaaatattgcgttgtttactcatagcgacaacaactttgaaggctatttcaaacgctatcttttggcgaatgatttgattgatttcgaaacttataaaaatggcgttgattttatccctgcgatagaggcggatattccaaaactctgcctctcactgacggaaacaccggtacggaagcaagatttcctcagtaagcctacccatggtttcaaggtcattgagggggttagacaccgtattggctggatcggatgtggcatgagttataaatacatgctgtctgtgcttgccgatcgtaataccgaaatggctatgatctgcgaggacgatgcgttattccctgacgactttgacattaaacttgagaagattgttgcttatctggaacgcagcaattgggattggcacattttctcgggcattattgcgcatttgaatgaagatacggagattctggctgtcgaggaggtcgatggcattgagtatatttatatcaatcgcatgacaagcacggtgatgaatatttactcacgtcgtgggatagaggcagttagccactgggatgaacgtaacgttgatgctcaaaccaataccatagatcgctatttggagtcagtgccaaatctggttgtggtgaccactctacctttccaggttgggcatgctgaggatcaaacctccacgttgtgggggttcgtaaatactcaatatctggatatgatcagtgaaagtgagcgtttattgaaggaaaaagtagacgcgttcaaggcggcccaggtgcggtga

SEQ ID NO: 429657 - DNA, 843 bp, Serratia marcescens
atgttttcaaaacaaaaacaataccaaattgttgcttcaatcgtattgtataaccatagctatgcccaactagaagacacgttactttctttgcttagcgaaaaatgtgttcaaaaaatagttttggttgataacggtggttctgaatgggctgcaaaactagataatcatcgcattagttatatttgtgcggaagccaataacggttttggctacggccataatctggcaatgaagcgttatctgaatgaatgtgaatattttttgatttgtaacccagatatcagttttacctcgggggcgctcgagagtctctacaattttgcgcggaaccaaaaacaccgctttgtttctcctcgcattcaatatagcgatgggcgattccaatacagttgccgcttactgcctacacctgccaatttgtttcttcggcgctttttccctaaatggggagctaagctggatgccacttatgaaatccagcgtgctgattacactaaatccttcgcagttccttcagtttctggttgttttatgctggttgaatccacgttgttagcgaacttgggaggatttgatgaacggtattttatgtatttagaagatgtggatttgtgccgccgggctttgtcaatgagcgatattgtctacttccctggtgctactatcatccatgtttttggtaaaggttcttataaaaaccttaatttattcatttatcacatgaaatcagttgtcttatatttcaataaatggggatggtggcacgatccacagagatccaaggtgaatactacctgtttgaagactattcccatgacttctcctgaaatcaagcggtaa

SEQ ID NO: 429658 - DNA, 861 bp, Serratia marcescens
atgcgtgtacttttgacaggttctatggggcaactgggacgctgtttcagcgataggtttcctaccgattggagcctgctagcactggacagcaagcaacttgacatctgtgattctgatgcgattgagcaagcggtgacggaatttgagcccgatgttatcgtaaacgccgccgcttatactgctgttgataaggctgaatctgaaccagatgtagctaaagcaatcaatacctacgggcctggctacctggcagcagctgctgctgcacgaaatattccttttgtacacgtatcaaccgactatgtttttgatggccgttcggaagaaccctactgcgaagatgctccctgctcgccacaaaacatttatggtaaaaccaagcttgaaggtgagattgctgcgctgaaggctaatccaaaaactattgtaataagaacggcttgggtgtttagcgagtacggcaataattttgttaaaacgatgttgcgcgtcgggtcacaaaggggtgaacttggcgtggtaagcgatcagcaaggctgcccgacttatgccggtgatatcgctgatgccataatctccatgctgcaagaaccaggtgaatacggtgtctatcacttttgtggtgattcaatggtttcttggtatgagtttgcgcagataattttccaacaggctactgaaagtgggctatacccacatcaggtcatcgtgaatccgattactacgcaagagtatcctacacctgcgtcccggcctgtatactctgttcttaacactgataagatctgcgcgttgaatcttaaacctagcgcttggcgccagcagttacatgctgtgattcgcaaactgttgcagtag

SEQ ID NO: 429659 - DNA, 534 bp, Serratia marcescens
atgaaagtgattgagacaccagtcgcaggtgtgaagttgattgagccgaaagtgttcggtgatcatcgtggttttttcgtcgaaacgtttcaaaaaaaccgctatcaagaaatgttagatattgatgtggattttgttcaggacaaccattcgcgttcttctaaaggagtattgcgtggtttgcatttccagcgaatcaaaccccaaggcaagctagtccgagttgtacgtggggaggtctatgatgttgtagtggatatcagggtcgattcgccgacgtacaaaaaatgggttggtgttcacttgtcggaagataaccaccaccaactttgggttccgccaggtctcgcacatggtttcttagtgatttcagacattgctgatttcgaatacaagtgcacagagtactatgatcctgctagcgaagcatgcttgctttggaatgatcctgaaattggcattgattggccagtcgatcagccattgctatcgccaaaggatctacaaggtaaattacttagagagcttttttaa

SEQ ID NO: 429660 - DNA, 1374 bp, Serratia marcescens
atgcaaaaattgacgtgttttaaagcttatgacattcggggaaagctgggcgaagagctgaatgaggacatcgcgtatcgtattggacgcgcctatggcgagtttttaaagcccaaaaatatcgtgttgggcagcgatgtgcggttaaccagtgaaagcctgaagttggcgctggcgaagggtttacaggatgcgggtactgatgtgatagacatcggtttaaccggtaccgaagaaatctatttcgccacaacctatttaaaaactgatggtggcgtagaagtcaccgccagccataaccctattgattacaacggcatgaagttagtgcgtgagggctctcgcccgattagcggcgataccgggttacgggcgatccaagagctggcggagaaaaaccagtttcaggcgctagcagcgacagcaacgcgcggcagctacgtacgccaggacgtattaggggcttatgtagaacacattctgtcctatgtagacgtgaaaaatttcaaaccgttgaagctagtgatcaactcgggcaacggtgctgcggggcatgtgatcgatgctattgaagcgcaactgaaggcgcggggtgtgccgctggagtttatcaaggtgcatcaccagccggacggctctttccccaacggcattccaaatccactgctgcctgagtgtcgtgcggataccgccgatgcggtgcgagagcatggcgctgatatgggcattgcgttcgacggcgattttgatcgctgcttcctgttcgatgaaaaaggcgatttcattgagggctattatatcgtcggcttgctggcggaggccttcttgcagaaacagccgggcgcgaagataatccacgatccacgcctgagttggaacaccgtcgatgtggtcaccggtgccgggggcgtacccgtgatgtcgaaaaccggtcatgctttcattaaagaacgcatgcgtgcggaagacgccatttatggcggcgagatgagtgctcaccactatttccgtgattttgcttattgtgacagtggcatgatcccatggctgctggtcgctgagctggtcagtgtgaagggacaaactctggggcaactggtacaggatcgcattgccgcctacccgtcttccggtgagatcaatatcaagctggctcagcctgtcgtgtcaatcgaaagcgttaaacaacactatttaccgcatgccgatgaggtggactacaccgatggcatcagcatggcgttcgcaggctggcgtttcaatctgcgttcctccaatacggaaccggttgtgcgtcttaacgtcgaatctcgtgccgatgttgcgctgatgcaagagaaaaccgacgagattttggcgctgttgtcaaactga

SEQ ID NO: 429661 - DNA, 1830 bp, Serratia marcescens
atgaagaaaagtaaccctgatttttctaagagagaatcactcaagagcggtgtcgttatggcattggcttccattgttgctatttcaaggacagaaaatgcccttgctgatgattcaataaaaaatgcaagtgccggttcatcagctggtaattgccctgatattggaagcttaaagaaactgtctccaatcagtcctggtcaacgaataaatgtactcagctattattcatcgtcaggtactactgcagttaattccgtgatgaaaagcgtagtcgctaaccataagccgtccgtgcaatctcaacattcaggaggtggggagttctattacgatgcagatgacaacacttctcctgatgatggagggatggtaattgttacagatgatggtaaacgttggaaaagagtattttcaaacgatgagcctatcttaggcagttattttgggattagcgatatacaagatgataatggaccggcgattactcgcgctattaatttttccagcaatcgtagaatcgttttgccgagaggaaaattggtagttaaaacaccaattatctttcctttagactctggggccaagatagatgggtttggcaagaaagggggcacggtcattgatgttcgcatgaatgaaggctacgaaaatttcggtgtttttcattttcctgggaaatctgataaatctgttaaaagtcctggctttcgtgctgtgtccattagcaatattcaactcattggaaatttgagcaagtgtcatggtttttttctgcaatatcaatatgcaatgcgtctagagcaggttactctggaggggtttgatggtgcgggactatttatcgataaatgccaagattctgtttttgaacaagttgatgttttcaattgtggaagaacatctggcgatagagccaatttaaaagatggctttgatgagtctaaaacgctggttagtccaattgttataatgtcatcacttaaagatgattgcaattatcttcgttttaatgattgccaatgggaagataaccctgtttcacctatttgtgactttgccggcggtatagaaaactattttgttaacttgcatgctgaatataatgcacattgggatgtctctggtactgagggctgtactctatttatgcagagaaaagggacaattaaagttagtggcggaggaagtgatgaaattaaatatcttttgaagcatgtttatggtgaattttatattgattcgcataggtgcagcccggcgaaaaatatacaaataaaaacagggactaatagcaggttcactttcaaagatgtaactattgatacggttgatgcaatatccacctcagggtttaaaattttcaaagattgcatctttaattcaattaactggtcaaaccttgatggtgacgtttctcttgagaactgccgtatcaaaaagtcattttttgccaagtctggctcaaagaaattgaggctaagagttatttcttctattattgatggggatatttttattgattcaaaagcaccgaatgtgctaattgatgactgcatggttgcaggtgatgtcaaatttggttcaaaagatgggatgtggctaaataataacgtcttcggtagatttaccgttcttggcgtagagtcacgcgtaattatcccaccgataagacgcttattactgcctgggcctccaaagaacggccacttttctgttggtgatgttatcgataactccttaccacagagtggtagtttcatgggatgggtttgtgttgaagctggcagtccggggatttggaaaggttttggtaaaatagatgagtaa

SEQ ID NO: 429662 - DNA, 1167 bp, Serratia marcescens
atgagtattacaacacacgctatcgttgatagtagcgaaaaggaaagatttttcctaaatattctgaggtgggggattgccttctttttcatcgctacacctttcaacccttacgtgggcgatgtgactttgtatctttggattcctttggttttcatggattatgagtttataagaaaattgtctacagtatctttaaagattttattgtttttttgtgtgtggactgtcttgtgcttggcattttggcggtacgatttagtcatcaagacatttgctcttgtattgggtgttgcatatattcataaaataggaaagcctgtttttagtaaaatatatgtctgtatgctcatttccgttctctggtgtattttacaattttccttatatgaattcgctggtacaaactattctgctgcaataggaccaaaggcaatatcgattgcaatatggggtgactatgcaactaaaacttttactaaccaatatgaagtttttctgttgccaagaatgtcggggttatcacgagaggctgggttttttgtttccctattaatcatctcgtttatgataagactaagagattttaaattaaggacttgggagattgtattatttgcattaggatatattttcagcttgtctaaggcctcagttatactttttcttatagcagctgtttacccttttcggcgtatattggctaaaattcctgttgtgctcactttttcacttttcattgtcgttttcgtttcgatcgccaactatctcaatgtcggtgttcctgcctttttctacgaaaatcaatctatagcacatcgcttttctgcatcatatttagtcttgaatatgaatgtaccgagcttcttaattgggtgtggaaaagaatacgaatgttttaccaactatcagcctattgtggattatttgggggggttcggtttcaagccaaatgttggacttctaggtgttgccatggagatgggggttattggtctcatcgcaataatatttttctgtatgtatttgaagttagatagttatgatgttgttatcttggttctttttactgccactgtaacattctttactgttgatagttttataatactgacctattactatatatactcaaatcacacaaaaagtaggagtgatctcatttaa

SEQ ID NO: 429663 - DNA, 1419 bp, Serratia marcescens
atgttggttaataggcaaacagctatgaatggttttcgtcgtggtgcgctacaatctaatgcatctctaacttcaatgatacagcggttttcagatattatcattataagcctctgtctctatttagcatgcaagctgtcaggcaatgtatttaccatgcagcattgggttgtagtattgatatcaatcgttatatttcaaatggcaggtggtataaccgagttttatcgctcgtggcgtggggtccgtgttgccttagagattcaacttatcataaaaaactggtctttaagtgttttattgactattggtattatatcttttatcgatggtttttatagtgatttaacgctatatgctgaatggtacctcttagcatgttgtggtttgataatttctcgctcgattattcgtttattgcttggctatatgcgcaatatggggtttaacacccgtaatgttgcgatcatgggatcactccctgtaggtatcaagctagctgaaactttaaatgatgctcattggatgggcttcaaagttctcggaatatatgatgacgaatatgactctatagacacgaaagttgaaaaatgtggtgatttagaacagcttatcagggatgcaaaagatggccggattgatagaatttatattgcgatgccaatggagcaagaacgtttaatcaaggatactgtggctgaattatctgatacaacttgctcggttatgcttataccagatgtttttacttttaatattctacagtcgcgtagcgaagaaataaacggagtttctgtagtttccctttttgatacgccaatcagcggtgtcaataaaataataaaacgcgtcgaggatattttactttcgcttgcaatattaatctttatttctcccgttcttttattgattgcgatatttgttaagttcacgtctccaggaccgattatcttcaaacagagacgttatggcatggatgggaaatctataatggtttggaagtttagatccatgagtgttatggaaaatggagataaagttgtccaggcaaaaaaaggtgatgctagggttactgctgttggtggttttttacgtagaacatcacttgatgaacttccgcaatttataaatgtcttgatgggggacatgtctattgttggacctcgtccacatgcagtagtgcataatgaacaatacagaaagctaattaaaggttatatgctgcgtcataaagttaaaccaggaatcactggctgggcccagataaatggatggagaggtgaaacggacactctagacaaaatgcagagccgagttgaatatgatctcgattacattaggaattggagcgtttggttcgacattcgaattatttttcttacagtctttaaaggatttataaataaatcagcttattga

SEQ ID NO: 429664 - DNA, 1095 bp, Serratia marcescens
atgagagttcttcatgcagcagaaacaatcaaggggggagtggctacggtccttcgtcagttggcaaaaagtcagattgctgataaagggcaggaaaacatttgttgtttagttcctgctgaccaagcttcagaactatatggtgttgactctaggtcgataaaatcttttcctcgattagggcgtgggattcgcggttttctacagtttttctttatatttacgagagttgtattgaaacatcgaccaaaggtggttcatttgcatagtagttttgctggtgctttaggacgattgtcgttgattcttctctggccaatctatcgcccaaaagtaatatattgcccgcatgctttcgcatttatgatgacagtatctcgatttaaatcacgtatatatactgtcatcgaaaaactattgcttcctataactgatgtggtcatttgtgtcagtcattgtgaaaagaaaatagctgttgatgcggggcttaatgagaataaactggtcgtcgttcataatggcgttccgagtaatgaaaattacgctaaaaaagtcaattcctttgaaagtaatgagcttattcaacttctttttgttggtcgtttcgactaccaaaaaggttttgatattttatccaaagctatgcgccaattagaaggaaaagcattccatttgacagttgtcggcgattttgtgcttgaaaatgaaaatgataagattcaagatcttccgcagaccacatatgccggctggttatccgctgaacaattggcaccacatttctgtcgcgctgatgtattgctaataccaagccgatgggaaggttttgcaatggttccattggaagcaatgagctatggattacctattttagcgagtaactgtagttctttccccgaggtcgttgacgatcacataaatggtcggttattttctcctgagcaaacggaggagctatgtcatatactcgaaagtacatcaagagaggaatggcagagaatggggaatgcagcaagagatacgtttagtaagagatttacggcggacaagatgattgcagcaaccaaaaaagtgtaccttgatcttggtgcatga

SEQ ID NO: 429665 - DNA, 162 bp, Serratia marcescens
atgtccgattccagcagcgtcaaaggttttatcaaccgctccacccaaatcgtctgccctaaatgcggctatgttacccggcaaaaatgcgcagcaatgctgcaagatgtgatactgatttgccctaattgcgaaacccgcttcgagcccaggcaaggctga

SEQ ID NO: 429666 - DNA, 210 bp, Serratia marcescens
atgagagcgataacccggctttatccgttgcatcatcaacctgatcagcaaccggcggagcctaaacacgtaggggagacggtgttcgattcttcacggcatccggcgggcagtgcgcaactcaccgcgctgcatcagctcggccagcaccaggcagcgccgtcgtggcgggcgcgcctgagcgcgctgtggcggaagctgtgcgcatga

SEQ ID NO: 429667 - DNA, 459 bp, Serratia marcescens
atgatcgaactcaaagaaatgacggcgcaggaactggatcactaccgtaaatacggggtaaaggcttacgcagacgatttggcgcgttcgtttcagctcagccaggaacacgcgttgatcgaggccgaagccaatttcaaacgagggctggcgatgcccggccaacggttggtatgcgcgaggctgccgaatgtcgaggacagcatcgccaccgtctggtacgccattgagcaacgaaccttcggtaagcagctgtttatctatgattttgaagtgacgcacgcctggcgtggcaaaggctatggcgagcgggtactaaatgcggtgctggacgcggcgagagcacagggggcggaatatgccgaactgacggtgttcaacgataatccgacggccgcgcgcctgtattccaagttaggtttcgatgcggtcaccacccgtatgcgccgccgtttgtag

SEQ ID NO: 429668 - DNA, 1056 bp, Serratia marcescens
atgaaaaacgtaatcgacagcgccgatccgcgctggctggcgatcgtcagccgcgacaagcacgccgacggccgctttatctacgcggtgaaaaccaccggcgtgtattgctcgccttcttgcccgtcacgtcagccgaatcggcaaaacgtggagctgttcgacgatgccgaacaggcggaagcggcgggctatcggccctgcaaacgctgccggcaggggctgacgccgttgacggaacagcatgcgcggcagatagccgaggcctgccgctatatcgaacgggcggagaaagcgccgtcgctgcagacgctggcgcgccacgtcgggttgagccaataccatttccaccggctgttcaaagcgatcaccggcctgacgccgaaaggctacgccgacgcgcagcgcagccaacgcttgcgcaccggccttacgcagcaggaaacggtgaccgacgcgatcttcgacgccggctatggcgccaacggccgcttctaccaacaagccaacgccgcgctgggcatgacgccgaaggcctaccgagccggcggcaaaggcatgcgcattcatttcgccgtcgggcgctgttcgctgggcgagatcctggcggcgcagagcgaggtgggcatctgcgccattctgctgggggacgatgcgcagcagctggtgcaggatctgcaggacaaattccccaacgccgagctgatcggcggcgacgcgcagtatgaagcgctgatggcgcaggtggtgggcctgattgaagcgccggagaacgggttggcgctgccgctggatattcgcggcaccgcgtttcaacagcgggtctggcgggcgctgcaggcgataccggtcggcgaaaccgtcagctatgccgatatcgctcggcgcatcggggcgcccaaagcggtgcgcgcggtggccggcgcctgcgccgccaacgtgctggcggtggcgatcccctgtcaccgggtggtgcgcaacgacggcgccttgtccggctatcgctggggcgtcgagcgcaagaaagccttgctggaaaaagaggcgcagcgatga

SEQ ID NO: 429669 - DNA, 1176 bp, Serratia marcescens
atgccactcgcattacttgccttaaccatcagcgcttttgctatcggcacgaccgagttcgtgattgttgggttgatcccgactatcgcggagcagattggggtgaccgtaccgtccgctggattgctggtgactatctatgccctcggcgtggccattggcgcgccggtgctgacggccctgaccagccgtataccgcgcaagctgctgctggttggcctgatggtgctgttcactctcggtaacctgctggcctggcaatcacccagctatgaatcgctggtgattgcccggttgttgaccggcctggcgcacggcgtgttcttctctatcggctccactatcgcgacgagcctggtggcgaaagagaaggcggcttccgccatcgccatcatgtttggcggcctgacggtggcgctggtgaccggcgtaccgttagggacgttcatcggccagcagtttggctggcgtgaaaccttcctggccgtttctctgattggcgcggtcgctacggtggccagcattattctggtgccgaacaatatcaagaaccagggcagcgccggcgtgcgggaacagatgaaagtactgacccatcctcgtctgctgctgatttacgcaattaccgcattgggatacggtggggtcttcacgacctttaccttccttgcgccaatgatgcaggaactggcgggcttctctgctccgaccgtgagctggatactgttggcttatggtgtcgcggtggcggtgggtaacatctgggggggcaagctggccgatcgccatggggcggtgcgtgcgttgagctttatctttgccgcgctggctgttttgttactggtgtttcagtttaccgccagccacagtattgccgctttgctgacggtgattgcgatgggcgtgttcgctttcggcaacgtgccggggctgcaggtctatgtggtgcagaaagccgcgcaatacacgccaaatgcggtggatgtggcgtccggtctcaatatcgcggcgttcaacatcggtattgcgctcggttcggtgattggcggtcagaccgtcgcctcactggggctggcgcagaccccctggattggcgcgctgatcgtggtagttgcactgttgctggttagcctcagcggccgcctggataaaaagtctcagctgcaaacagcttga

SEQ ID NO: 429670 - DNA, 231 bp, Serratia marcescens
atgaaaaaacacccagacaagcacattcaggcggcattagcttacgccctttctcagggttggtattttcggcccagcaaggggcacgcatttggtcggctacattgcgcctttgtcgggcaccaagaacatatgatgagcatctggagcacgccaaaaaacccagaggtacatgccgaacagattcggcgcaaggtcgatcactgcctggcgctgtcgcagaaaaaataa

SEQ ID NO: 429671 - DNA, 267 bp, Serratia marcescens
atgagtgggtggatttatcccgatgtaattaaaaagcttagtttttcctgtgtggcctttttagaaggaaaactacctgtggctgaaattcaatcagaaataaataacgcaggtgacagtattgtagcgatagaggaaaaatggttacgacagatgctacttgatgcggaaagcgacattgagcttttaatcttcactattgacaatgaaaaattgacagcagctgtcaaacctatcgtgcagaatattatcaaggcaataagttag

SEQ ID NO: 429672 - DNA, 135 bp, Serratia marcescens
atgggaatcagcgaagagaacggcgtaatatacgcctatacaattaaactctatgaagaaagtttccttttatcctttgatattgacgaggtagtgccaacaggaaagcaaaggaaacaagaagattatttttag

SEQ ID NO: 429673 - DNA, 5829 bp, Serratia marcescens
atggataagctcaatcatccgctggcgcggggcgccagctatttgctgatctacctgacggctttccagccgttgcacccggcgttcgccgccggcattaccgccgctaacggcaatacgcaggtggttatcaagccgggcaacgtaccggtggtgaatatcgccacgccgaacggtgcgggcatctcccacaacacctataaagatttcaacgttgggccacagggtgccgtattgaataacgccacgcacggcggcaaaacgcagctgggcgtggagatctacagcgcgcagggcaacacctacctgaagggaaaaccggcggagttgatcatcaatgaggtgatcggcggcagtcgttccgagttgcagggtaaactcgaggtattcggcaacaaggccaacgtgatgatcgccaacccgaatggcatcacctgcgacggctgcggctttatcaacgcgccgggcgtgacgctgaccaccggcaaaccgcagttcgacaagcagggcgcgctggaagcgctggaggtgaaaaaaggcggcgtcaccatcggcggtaaagggctggacggcagcggcgccgactatgtcgatatcatcagccgcgccaccgagttgaacggcaaaatcaatgcacaaaatctgtcgctgactcagggcgccaaccgcatcagcttcaaggacggcagcatcaaaccgatcgccggtgaaggcgctaagccccaactggccgtggataccaaagcgctgggcggcatgtacgccaacaaaatccgcctggtggccaacgaggatggggtgggggtgaacctgaaagacctcaccagcaaacagcgggatattacgctgagcgttaacggtaacctggtgcttaacggcaccacgcacagcaagggtgacctcaatgtcagcgccaagggattgcacattacgcggggtgctgtcgtgcaggcggacggcaacgccacgctggcagcaacgacgctggtgaatgacgggcaaaccagcaccagcggcgatatgcgcatcttcggcgaccatatccgcaacgccggggaaaacgccaagttgcacgccaataaaaatatgtggatccaaaaggatgctcagggcaacaaggctaaatccgtcgagaaccgttcggcgaaaatcctgaccaacagcggcgatttagtgatacgcacggagagtttgaacaacgttcgccagcagttcgccatttcctccaacaacgcgccgaaggacaacaaggatatcgatcgttggttggctgatggtgtgtacgaggggcaattcgattaccaattttttgattatttggcggactttgaagataaaaatttcacctggttgggacacgtcgatttcaaaaaaacgccctgggttaacagtgaacgcgcgcgttttaccgtagtgaccgacagccgtcccgcagaaatcatttcagggaagaatgcctacattaatgcgtcggagctttggaaccacgtcagcacaataaaagcgactaacgatctgattttaactggtaataatctgggcgtgcgcagtgaaatgacgggggacatgaacgactatgcactgttcgaaccgaaggtgccgaatcctaacgttgttctgggacataaatggcaggatcagaaatcgtcgatcccggaatatgtcatttatgtcagaaaaggcgggcaaaagagctggtcggcttctggctatccggcctcagccatgttggcgggcggcaatttggttgcggattttaaaaatcagatagaaattaaaacttcgacgccggcgggaaatcagcttagtgaggtggtggcttcgggacggcctgactcactggtagctcacaacattgtgctgcatgcgggacgtgttatcagtaccgataaaataaacgcgcgtaacgacctgactgtggttgccgatgatgtgttttacaccgacggtgctgagctaactgcgggcaagagtctgaacgttgcagcagtgaatgagctggatgcccgtcaaagctatctgaagggacatcatgtcactttgaccagccgcaacggcaacgtcaaagtgcacactgtacctagcccacgctatttcggcgtcgatggtgcccgctggctgagccaattgaatgctgccggggacttaaccttaaatgccgggcaaggtatttatctacgtaacacgcacttcgcgccgcaaagccaaaatattgcaatgacggcgaacggcactgtttcgattgtcagaaatgacgaggcgttgaataacgatcgtttagcgcagaatttatctcctgaacaacgacaaacgcagttcaaccaactgctaaatgccggacagttgaacgccagtggttcagtgctgctcaacagcggcggttatctggcgttgcgcgggacgcacattaaagcaggtaaagatgtcacgctgttggccggccataatgccgatctgaactatcgcgaattgggggagcaatttagtcgcttgttcccctcttcccgcacgcctgaactgggtagccgggtacacgccggcggcaatttactgattaactcggcccgcgacataggcacccagggcggcgcgctttccgccaacggtaatatcacgctgctggccgggcagaatctatggttgtcgaacctggcctattccgccattgatgccgctaacgacaacaacaaagacgaccgccatgtggtcactaccctcagcgccgggaaaaacctgaccgcgtcggcgaataaccaactgctgacttacggcgccaggctgacttccggcgccaacatgacgttgacctccggcggcgatatgcgcttcgaggcggtgcaaaaccacacttaccgcgagagcggcaacgagttcaccgaaacccgtacccagcaaggtaccgagctgaatgccggtggcctgatgacggtgattgccggcggcagcattctattccaggcgaccaagctggtggttaaaggattaggagcgaactggaaatcgccggtggcggtgacggattgggggagtcgtattgcgtcggcggagcaggcggttagaaatgcagagcaaaatgtcaatcaaaaacagaatgtgctgaacaacgttagaaatacgcctgaaggcttgttactcgataatccagctcagcatcctatttcatacaagcacagtagttctgtaacgataccgggcacggggacttatcacctcgatatggggaatattgaaataaaaacccgttcagatctggatagattgcttaatgagggaggaaaggcatttgacccattcccttatggtgtcgatcctgcggaaacatccggtgatggttatgagattgcgctggcaattcgaaaaaagacgatagatgaatatgaaaatttgcgtcaacgcataatcaaaaaaaagaatgagatatacgcagcccaacaagcattgaattctgttgatagtgaaaaggtaaacgcaaataggaaattagttagcgttcgacaggaagcccaagctaaacatgcggaagaaacaaggctgaaagcctatgccgacgcccacaaccaggccgaagccatgcgtgtcggcaatatggatatagccgccaagggtggctatctctacgcccaggcgatggaggagtccagccactacgagaaaaaggaaaccaagcgcaaatggtggggtaagaaaaccgaggttaagcagacccgccatgacgtgaccaacaaggttaccgagtttaccgccgcaggcaatatcacgctgatgagccgcgacgacagcacctatgaagccagcaaaatcgccgccgggcaaaacgcgcgcctgaccagctcccgtggccaggttaacttccgtgcggtgaaaaacacctctttcgaacagaccgtcagcaattcgaaaggcttctttatcaagcaggccaataaaggctacgaagacaataagtgggtgctgccgagcattcataccggtggagccctgaccgtggaagccgccaagggcgtcagcgccgatgtgaaggtgaaaaacgggcaggcgctgcaaagcgccatcgacgccttgggcaatacgccgggcaccacctgggtcaaagatctgaacaagcgcaacgacgtgcagtggagcaaggtcaaagacgcttacgacagctgggattacaaaagccagcacctgaacccggcggtggcggcggtgatcgccattgcggccgcggcggtgaccgcgggcagttcattggcggctacggcggcttccagtgtttccggcgccgtaggcggcggggcgataaccagcggcgcagtcaccgctggtatgtcttctttggcctctcaggcggcggtggcgctggtggagaatcagggcaacctgtcgaaaaccctgcaggcgttgggccgaaatgaaaacgtcaaagcgaccgccacggcgatggcgatcggcggcgcgctcaatggcttcgacagcgcgatgggctggagcaaggacgcggcgggcaaaccgcttaacccgaacaacgtcaaactgccgcagctgagcaacggtgactggagcaaggtggcgcagcgggtggccgggcagtcggtcatcagctccagcctgaataccgccattaatggcggcagtttcaaagacaacctgaccaatgcgctgctggcgaacatcggcagtcaggttcaggccgagggcgccaacctgattggggataacggtcaggttctcgatataccgggccgggccgtaagccatgccgttctggcgggcgtggccgcagaaatcggcaagggcaatgccaaaggcgcggcggccggggcgctggcggcggagctggccggggtgatattgggcgacaatatcatcaagccggaggagtggcagaagaaatcggaacagcaggcgcagatggcacgagtgctgggcgcagccgcaggcgcagtcttcaccggcaagtctgatggtgcttacagcggtgccaccggtggtgagaatgcgttccgatacaactatctcagccacaaacagcaagaattgatggagaaagatttggcggccgcgaaatcgccgctggataaagcgttggtgttggctagttggggaataacgagccatacgcaggatggcgcctttgcggcgggtgtagtctccggcatcccggttgaaatcagcgatacggtggatggtttagtcgccgtggccagcaacccacgcgaggcagcggatgcattaatagctctgataaagaacgatgaacgcttctcgattattggcgagagtgtgaaacaggaatacctggggcgggtcgaggcgttcaagacgaagtatgaacacgcaggcatcgacggggcttacggcgctgggctggagtttggtaaactgacgatggccgggctggggctgtttgcaggggtcgccggcgcaggtaagttgggcgtcaagatcacaactaatgccattaaagcatcggaaaaagctgcgttaaaaggcccattagcttatgtagatgagccttttttcaacccttatgggacattgagttccggacaggtctggtcgattaagggtcgaatgaagcatgttcagttacctaatgaagggaaaattagattcgtacccgactctaattacaaaccaacaaacccattacccagaggcccaaacaaaggatatatagataaatttggtaatgaatggaccaaaggtccatcaagaacgaaaggccaagagtttgagtgggacgtccaactttcaccaactgggaaagctcagttggggtgggcgagccgagatggtaagcacttgaatgtatcgcttgacgggaaaatcacgcacaaatga

SEQ ID NO: 429674 - DNA, 3048 bp, Serratia marcescens
gtgaatgacaagacatcgcaccctttagcggttagtacaccgctttccaaactttacctcgctctattttctgcgccgctgttgatgctggcgcccgccgatatcgctcgcgcagacgatgccatttttgacggcgactcaaaaattaccgaatcattggcctacaccggggacgtttacgtcggccgcaatcaaagcggtaatctgctgatcgagaatggcaagatcagcgcctataacatcaatattggccggatgttcaacggccaaattcatgagagcgtagtcacggtccgcgggccgaacgccgagctgaacgcggtgaacgatcagttcgtgctgcgtggcggcctgaatctggggcggggcaccttgcgggttgaagacggtgcgctggccagcgcgaaagagatcgtggtcggcaccacccgtggctatgacagccaccttatcgccaccggcgccggttctcgcgtcaccagcaattttctcagcgtcggcaccgatttaggggcacgatccacgctggcgattgaagacggcgcggtgctgaataccgcctttgacgcacgcatcggcaatggcagcgggccgggcgagagcgatatgctgagcccgaaagccacggtcacgggggctaattcccaatggaacgtcggccgtgcgctcacgctttacggcgatctggacgtgctgaacggcggcgcggtcaacgtcggtaatattcaggtggcgggcgtctccggcgcgcgtaaaaccgccgagctgacgatcgccggcagcggctcacggtttaccagcggcagcagcgtcaacgtcggcgattacggcaatggcgtgttggcggtcatggacggcgggacattctccgccggcggcaacgaagtggtgctgggcaagaccggttccggttctaaccgcggcgcgctgattatcggcagccgcggcaacatggataccggcaccgggttgaccgagccgacgctcggcgcggcggtcgctgctggcactatcgatgcccagacggcgatcgccctgcggggcggattgttccgcagctatgtgtactttaaccataccgacggcaattacgttttcagcaacaagatgagcggcgaaggcgaggtgatcaacaccgccgggcacacgacgctgaacggcgatctcactggcctgcaggcaaacgtcaccgcgcgcggcggtaagctcatcatcgccagcgacatcaatacccagaaagaagacgacattttcgagatccaaaccctcagcgccgaaaacggcggcacgctgatcctcaatgcgacggcgggttccgacgtcaataacgggcagggctacagcagcgccgcgtcgatcaaggccggcggcacgctgggcggtaatggcacgctgggccagaccgagatcctgtccggcggccatatctcgcccggcgacggcaatatcggcacgctgacgctgaaacgctacctgaactttatcggcgaatccttctatgacgtcgatatcgccggcgacggccgcagcgatcaactgctggtggcgggcaaaaccaccatcagcgatcaggccaaggtgcaggttacggcgctggatccgcaaaccagctataaaaccggccaaagctaccgcattctgacctcggacggcggcattgacggccagttcgcgtcggcggtttccaagtccgccttcctcgatgtggcgttgaaccacagcgccaacgccgtggatctgaccatcgcgcagaaagacacgggcggtgaaaaccctggcggcgagaacccgggtggggaaaacccaggcggtgagaatccagggggcgagaatccgggcggggaaaacccagggggcgagaatccgggcggagaaaacccaggcggtgaaaatccggggggcgagaatccaggcagcggcaaaccgggcattttccaaacggtggccgagagcggcaaccagtggaataccgctggcgcgctctcgacgctggcgcagagcggcccttcgctggcgctgtataactcgctgctgctgctgagcgcgccggaagcgcgcgaggcgttcaatcagctgtccggtgaagtctatccgtcgatgcagtctaacctgatcgccggcagcacccagctgttcaacgtgctgaaccagcgcatgctgcgcctgttcgacaatgacagcctgccgataccgccgttggcgatgtcgctggtgcaaccggcgcaggcgcaaaacagcggcgtttgggggcaaaccttcagttcctggggcaaaaacagcggcaacggcaacgtgggcaagctggatggcaacaccaccggcttcctgttgggcgcggatcgcaagctggcggaccataacgtgcgcatcggcggctactttggttacagccgcggcgactacgacgtcgacagccgccgttccaaggccgataccgacaactaccacctcggcctgtatgcggcggggcagcaggatgcgttctcgctgcgcggcgcgctgggttacacctggcacaagattgaaggcaagcgcaacgtcgatttcagcggcttctcggatcggctgaagtcggattatgacgcgaactcgctgctggcgttcaccgaagcgggttaccgtttcggccagccggagatgaacgtcgaaccgttcatcaacctgagctacatccgcctgcataccgacagcttccaggagtcgggtggcgcggcggcgctgagcgtgcgcaatgaaacgatgaacaccttctactctacgctcggggtgcgcggcgtgaccgaactgccgaagaacgtcagcctttacggctcgctcggctggcagcacgcctacggcgataagaacacttcatcgcgcatggcgtttgccggaagcgacgcgttcgtcacgcagggccaggccgtggatgacaacgtgatggtgggcgatatcggtgtgagcgtgaaactgtcgcacgccgcgacgctggatgtcggctatcaggggcaatttggcgccgatactcgcgttaattcggtcaacgccaacctgcgctggtcgttctga

SEQ ID NO: 429675 - DNA, 825 bp, Serratia marcescens
atgtctacagctaaggaatcaattgagcgcgatggttttgtcgttatccgtaaccttttcaccccagaagaaatggctcggatgaactcttccatacacattttttttcaaaaaaagggcgtgacttaccgttacggactgactcagccaaacattgctgttgaagagcctgatttctcatgggtaattagtcatccaaaggtattagaagcctaccgttctgtatttggccaggatgaatttgtttttacatcccatgcagacattcatcacaacatgggattcggttggcataaagacgacgccaaaggcgcatatttttccgagccatatttcacgcccgattgccgagtatacaaaatgggaatttatatgaatgatcactcctctgatggaaacggtatgtcggtaagaataggctctcatcttaaaaacaacctaacagaaggagaggctatctcgttagccactaagcccggagatgtggtaatttttgatgtaagaattacgcatgctggtaaagaatatgatgttattgagaaaggattgctgaaaataggaaggatgcttggcgatatgaatggcaagtcagaaattggccgcaaagtacgtgacctttattgcagtttgaaatctggaaagccaaagcgcagcttcttctttacattcggtgcaccaaacactttcacttacgacttctcccgcacaaatatgcgtaggcagctagaacagtctggaggcaacgaatatattttatcagaaaagctgtctaatgaacttcatagcaatggcgttagaactctgaaatttgaagatggtttgtaa

SEQ ID NO: 429676 - DNA, 1116 bp, Serratia marcescens
atgaaaaacaaccgcgttgaatcacttgattatctccgtggattaatggctttatccgttgtaatctatcattatacttcatggtcaatgtctaccggttcgtcagttgacgttatcggcagtcagttcatgctagggaaactgggtatatacgcagtttctattttttatattcttagtggtgttagtctagcgtatatctacgaagggaaaataacatccacacgtcaagtttcagcattcgccataaagcgtgtgtttaggatattccctttattttggatagcagtaaccgggatgattatttttagctggcttttggcaacggtgaatggcttagcatatgacttcccatattacaaagcatttttaaattacacactattatttggatttattgaaccaacggcttacttatccactggcgcttggtcaatcggcaatgaacttgtattttatttcatattctgccttacttattttttatcttcatcgtacagatatatcttcccgactgtaatagtgctaagtatcatttctggattttacttcgcttttagcgttcttgattcctcatcaccgcttgccgaacagtgggctaactacataaatccttttaaccaattatttctctttatgtgtggtgctgcaattggaaaatacgcgccgatgttaacaatgagcaaagcttctctattatcgatttgcttattatcaactttggcatttattttctaccctgtttccggagataaaataaatctggtttctggcatcaatagagtttttatttccactttgtgcgtgacatttgttttctcactttacaaattaaacccaacttacaataacgtattgactaatgccctggggaaattaggtgaaatatcatactcaatttatttaatgcaccctatagtggcaatacccgttacgtttatcgcaaagaaaatgggaattccgatcggctttggatatgctacgtcgttcattattgtcattattattgggtttgcgacctatcaccttgtggaaaaacccatgatgcgcgtgggagcaaacatagcctcttggttaaaaaaggatgctgccattacgcaaaatctagtcaaataa

SEQ ID NO: 429677 - DNA, 2286 bp, Serratia marcescens
atgagttacgatttcaaaaatctatcatcggccgactttgaggatcttgttcgagacctcataggacgagaagaaggacttcgcttcgaagcattctgcgcagggccggatggcggcattgatggccggcacgcgcaggctaatggtaacgtcattctacaggcgaagcattatgaaggttcgccgttcggtaagttgatagccactatgaagcgtgagcgattttcaatcgataagctcgctccgattcgctacattttagcgacttcctgtaagttcaccccacttggaaagggtaagctcactccgcttatagggcccagcctgaggtcggaagcggatatttttggtccggaggacctcaacggtcttctccggaagtacccagatattctcaagtcgcacatcaaactgtggctttcaggtgcgggtgttctagaccgagtcgtacgcgcggcggcccatacctttgcagcgttcacgcgagaagatattgaacagaaggtccgtgtctacgcatcaaacccgagcttcgatcaatcactggctacgctggagaagcatcggcttcttatcatctcagggcccccgggtgttggtaaaacgacactggccgagatgctatgttacacattcctgagtgaggagtgggagctcgttcccatccgtagtctagaggacggcttcgcggccattagcgacagcaaaaagcaggtgttccttttcgacgacttcctaggaagggttgccctcgaccggcaagctctggcgcacaaggattctgatttagcgcggttcatgagccgagtacgtcgctccccaaatgctcgttttattctgacgacgcgggggtacatctttgaagaagcccggagggtttccgaacatcttggcgaccagcgcctcgatgtaacgaagtacgttctcgatgttggtgtttatacgcgccggattaaggcgaggattctttacaatcatctactcgtgtcagagacaccacagtcgcatatccgtgcgctattggaaagcaagaagcttgcggaaattgttgatcacaagaactataacccgcgtgtcatcgaggctatgaccgatgcatttcgcattggtgatatcgaacccgcagactatgctgtggcctttatcggtgctctgaataaccctagccagatttgggataccgcattccggacacacatcgatcatcggtgcagacacctcttgatggcgatgttttttctcacggagtatggggtgccccttggcacgcttcgcttgtctttcgagcccttacatacagcgatgagcacagcctatggcctaccgcacgggcctaaggacttcgaagaagcccttcgcatcctagaaggtagcttcgtcaacattgtcaacatcagcggaccaagggtttcttttctcaatccttcgctcaaggattatctctcatcctatctgttggacacagagctattaattcgtcttgtccctacagcagtctccatagactggttgtcgagtttgtgggattttgtgtatccgcgcggtcttagcgaagacgatcaaacaaagatcgccctagcctgcactggcatgctggatatgatcgaaacgcgtccgcactggcgcccgcgagctggcgatgcgcggtcgcttgaatacaacgatgctgcaaactccaaacggctggggatgttgatggactggtggcggctcacgaacgagcgggcatttgctgacagcattatggcgattgcccgcaatccacagcagggctttggtgcatggtcggatggagaggccttgatcgacatattttgtcggctaggtgacaagggatatgggcggccattcatatacgaaaccgaattattggagctccttgagaaggcgatcacggacactatacgctggtgttcgagtgacatgctctccacgctcgtggatgcagtggatgcagcgcaagggctgccgtccagcatcaaccatgccttgcaagccgctgtgctagaagagttcgaggagaataccagtcgcatcagcgaggatgatagcgagtcctccttatcggatcgtatcgatgccctcaaaaagttcgcgccccgtttcggcgtgccggaagatgttttgagtcgcgccgtctccgacatcgaggaccgaatcggcgagattgaagaccggagcagtcccgctccctccccgagtttcccaccgttgaacaagagagagcgggagaagtttgacgatagagctcttcaagaccttttcactcctctcctggatcggtag

SEQ ID NO: 429678 - DNA, 2253 bp, Serratia marcescens
atgctatctgatatttctataacaaacgaagcaagttacggggcaaatacgcaacgtctggcaggacttcgctcaatcaattttattttcggtaccaatggatcgggtaaaacgactatctcgcgtgtcattgcagaccccgcttcaaaacccgcctgcgctgttacgtggaccggtcagccactggagcgtcttgtctacaacagtgacttctgctctcggaatttcgctcaacagatgccgggcattttcacgctagggcaggcggaggctgaaacgcttgccaagatcgaagcggcgaacgcccaagtgcaatccctaacccgagacattgctcaactccaaaataccttgggtgacgtaagctccggcaagctcggggaactccagactttaaggactggcatagaacagaaatgctgggagatcaagacagtccacgatccttattttcaagaggcattcactggcttccgaagttcaaaggctaacttttgcgacaagatcctgatggagtgggcgcagaactctgctgagattgtcccgcttgacgagctcaaacaacgtgcgctgacaatttttgagaaagggctcgaacgtcttacacccatcgtagtgtttgacgccaacgaccttgtggtccttgaaggctcggcagttctctcgaaaaaaatcgtagggaaagaagacgttgacatcgctgcacttatacgtcgcctcggcaacagcgactgggtgcggcaaggccttggttatgtagacgaagcggggccgcagtgcccattctgccagcaggagatgaacgactctctaaaaacaaaactgaatgactactttgacgaaacctatcttgctgatatcgcagcaatcgaacgcataagggacgcatatgatgctcactccaaaacccttttgtctcggctcgagttgatccacagtgcgggaagcaagtatcttgatgtggtagcgtttcgcgccgatatcgatcgactctcggcacggttagagttgaatcttcggcaaatcgaccgcaaacggaaagaggcaagttcgcaagtcacgcttgagcccgttggtgaaatcgtcgcctcccttcaagatgctatctccaacgcaaatactgagataggtaagcacaatgcgacagttgacaatctggcgaccgagcgggccactcttatatcgcaaatctggagatgtttacttgaggagtcgaggctcgcatttactgaccacgataacgcgaaaagggggcttgatcgtgccgttactggcctgacggccgggcttgcttcaaagcgagcggcgcttgcagaggccagtaacgaacttgcagcgttggaacgcgaagtaacgagtgttcagccaaccgttacggaaattaacgccattctaagatcgttcggctttacgggtttccgcctcgcgaccgctggcccacatcaaaacctctatgaaattgtaagaggagatgggagcgaagctgctaccacccttagcgagggagagcgcaccttcatcactttcctctacttttaccacctcattagaggcagtatcaatgcaagcgggataaatgcggagcgagtcgtcgtgttcgacgatcctgtctctagccttgacagcgatgtgctctttatcgtcagtgctctgatcaaacgtgtgctcgatgaggcttgccgagggactgggcttattaagcaggtctttctattgacgcacaacatctacttccataaagaagtatctttcgatcccaagcgcggcacagaatgccgagcacacgagacgttttggatcgtgcggaaagtgaacgatgtatccgtaatcaccagctacaatcacaaccctatcagtacttcttatgagctcctttgggctgaggtcagatcgccgaaccgatcaaatatcgcgctccaaaacacgctaagacgcatcctcgagaactacttcaagattctcggaaacctcgataaggatgacatctgcgcgagattcgagggccgcgaccagcaaatatgtggttcgctatttacttgggtgaatgatggatcgcacagtttcaacgatgacctgtacatttctgtcgatgaagcgatggtcacccgttatctcgatatttttcgcagaatcttcgaagtcacaaatcacctcgcgcattatgagatgatgatggggccacaagcgctagctactctagcacttgcgaatgagaacacagccaccgacgcagtggacgaaacggcagcatga

SEQ ID NO: 429679 - DNA, 582 bp, Serratia marcescens
gtgtgttgtaccggtacgggcaagcccgcaccagtccaacaccgccccttactcacctgcggttcgacggcatcctgctctgcgaggctgacggtcgctgccgcgacaaaggagccacgggcaccaaaaaggaggcgcaagccgggcaagacaacgacaccaatccgcgccatcgggcgcgatggaaaaggggcactgatgagtgacgaagaacagaaaccgaaagggaagggccgaggaacccgaccccgaggccaacgaatagaggtatgggtgaacaacgacgaaaaggccgagctggccgaccgggctgctcagtccggtttgtcgttgtccgcctacatgaaagcggccggactgaacgcgcctattcgggcaagggttgacctgtcagccgtggccgatcttgtgcgcgtgaacggcgaccttggccgggtggccgggttgctgaagttgtggctcgcggagaagcgcggtcaaggtgcaaggcccgttgacgttgagcagatgatgatcgaatttcgcgaattacaggcgggaattcgagagaaaatgagcgctatagtcttttccagaaaatga

SEQ ID NO: 429680 - DNA, 210 bp, Serratia marcescens
atggcacgaaaaaccctcgcagagcgccgttctgatgccatttctgagcttgaaatggcgaaagcaaggctggcaaaacttgacaatgaagcagccgaaagaatcggaagaattgcaataaaatcaggattggttaatcttgaactgacggacgatcaagtccgggaagaattcgacagaatcgtggaaaggatcagcaaggggaattga

SEQ ID NO: 429681 - DNA, 225 bp, Serratia marcescens; identical to SEQ ID NO: 349576

SEQ ID NO: 429682 - DNA, 792 bp, Serratia marcescens
atggaaatggaatcgcaaaaaacgtcggcttatgccgcccgaaaattcggtcgaggcgcggcgctcgctctagcaatggcaagcgcaggccttggtgtaagtctctacatggcgccggctccggcctatgccatctactgctcgaactgctcgacgttctatcagcagatgtacgagtacgctgaagcggtgaatacgcaactgaacaccgcgcagcagttgcagacgcagatccagcagtacgacaacatgattaagcagggcatgtcgctgcccagccgcatgttcaacaccatcactggcgacctccagcgcgtggccagcgtctacaactcggcgcagtcactcggccgcaacatcagcaatctggacgaacagtttcgccagcaattcaagggctatgacagctatctgaactcgattggccaagggcaaaacaacatgccgcagcgctatcgggactgggcacaatccggcttcgataacgcccgcacggccatgcaggccgctggcgtaaataccagcacattcgaggatgagaacgcgatgctggatcagttggtgagccgttcgcagtcggccgttggccgtcagcaagccattcaagccgggaacgagattgcggcgcagaacgtgcagcagctccagaagctgcgcgatctggtagccacacaaatcaccctgcaaggcaactacatggcgcagcaaaacgaacgacagtccgttagcgatgcctccgaacagcaattccgcagccgtgaaaatacacgcggcccgtctgaggggttctaa

SEQ ID NO: 429683 - DNA, 183 bp, Serratia marcescens
atgatgatttctaaggcgctgattgccgccctctgtctcgtctcggcccttggtgggtcggcactgaccgccgtggtcgtcacgaacgccgccgcaccggaatgcgcagcggtcggcaatggccatcaggatgaccaattccgcagccgcctaaacactcgcggcccgtctgaggggttctga

SEQ ID NO: 429684 - DNA, 1644 bp, Serratia marcescens
atgcgacgttcaaccgttttcgcacttgtcggcgcggtgctcttgctatctgcaactagtgcgatggctgccggggtcgatttggcgcagagcaacacgtctatgaacagccttctgcggctgattcagaacgcttcaaaccaatgggcaccgcgcctgcatgactacgccttgtggctcttgggatgccttgccgtcatccagttagtttggacttttgctcctttggtcatgcgcggagctgaactgggcgacatcctccatgagctggtgaaattcatcctcgtgatagggttcttctatgcgatgctcgatcacgcgaccgagtggggcggggccatcgtcaacagcttccggcaggccggggcgcacgcggcagggttgggtagtgcggagctgatgccgggggatatgttctcaactgctgtggacttttcacggcaggtgctgacggccggtgtgtcgatgttcagcccaatcacatcggttgtagtggccgtatctgcattgatcgtcctgatgtgtttcacgtttatagcggctctggtgttcgtgacgctcgtagaggcctacgtcatcatcaatgccgccgtcctgttcatgggtttcggtggctctcaatggacgcgcgaatatgcactggctcccattcgctatgccgttgcggtaggtgccaagctgtttgtcctgactctgattgtgggtctgatcatgcaggtttccgcagaatggtcggcagcctacaccaacgacgaagcgtcgttgatgaccttggtcggcctgtctttggtgtgcgcctacctgaccaaaaccatccctgaactgatcggcggcatgattagcggcacgtcgatgggcggcggctctgcaattgggggcatggccgcagccggtgcagccggtgcggcggccgcaatcgctactgttgcaacagctggggcagcagccccggctgctggagcactaggggccgcgggaactggcggaggcgctgccagtgccgcaggtggtggactggcctccgcattgaacgccagcatggcaggcagcagtaccgcagggggcatcggcggtgcgacgggcgtcggcagcgctggaattggcgcaagcacaggagggggcagcggtgcgaccgcaaaggccgcaggttctcgcgtcgggggtggtgccgcgtcaggatcggcgaatccagtgtcggcggccgcttcgcctgctagccaagaatcaggcagcggcttgaagcaagccgccaaacaggccggaaaagctgcgaagggtggtgacgacgatatggatcagcaagccgtcgcgcagcaacggcagatgacaccaaaagaagggactgtcggcaacggcaaggctgttgcgcagggcgccgaggtggccacacgggcgcttggcgtgctgggcgctatcagcgtacccggcatggaaagctcccacgggctttcgctcgggggcaccggatctccccctccagtccccggcagtgacagtccagcgcctgatgacggcgctgagccgactgcacaagcggaatccaacattattcgtccggcatcggacaccactagcaccggagacgtcggcgcgctcaatgtgcccggcatggcttctagtgttaactctcaatcggagacgtaa

SEQ ID NO: 429685 - DNA, 327 bp, Serratia marcescens
atgatgaacgatatattttttggcctaatgatgctcggcggcttttttgttctcggaattggtatgtgggcgcttggccaatggctgcgacgcaaaggcttcggcccgcagctcgatgcactggataagcagtacacggcactacagcatcgtgtgaaccgattggctctgcctgccgctgcgcatttctacggtggcatgggtatgcttaatcgcatgccacttttcggcagcaagaatcaggtggtactggcagagcgtgtgagaatggccatccttcagatggaagaggaagaacggcagcgaggtaggggcatcaatcgctga

SEQ ID NO: 429686 - DNA, 855 bp, Serratia marcescens
gtgagcaagcatgacttgactcacgcccggcacgacccggtgcattgtctggcacccggcctgttccgtagcctcaaacgtggcgaacgcaagcgtagcaagctggacgttgtatatgactacggcaacggcaagcgtatcgagttcagtgggccggaaccgctgggggccgacgatctccgcattctgcaaggactggtagcaatggctggaccttctggccttgtgctttctcccgatcctcagacagaagccggtcggcagctgcggctatttctcgaacccaagtgggaagccgtccagcaggatgcgatggtggtcaagggtagctatcggtcgctggcccgtgaggttggctatgcagatatcgacaatactaggccagtacgcgattgcattgagaggctctggaaagtctctatcattgcgcaaaatggaaggaggcggcagggcttccgtttgctgtccgagtacgcaagtgatgagcaggacggcaagctgtatgtggcattgaaccctcttattgctcgcgcaatcatgggggggcagcacatccgcatagatatggccgaagttaggaagctacagaccgaccccgcccgcctgattcatcaacgactatgcggctggattgacctcggtaagtcggggcgggtagagctggacacgctatgcggctatgtttggccggatgaaccgacgaacccgaataccatcaaaaaacgccgccagacggcacgcaaggcgctggccgagcttgctgccgtgggttggaagctggacgagtatgctaagggcaaatgggaaatcgggcgaccaaaggcatccgactgtaacgctgctccccctgtttaa

SEQ ID NO: 429687 - DNA, 777 bp, Serratia marcescens
ttggtggctcccggagccacgggtaagagcttctgggcgctggaagcggcaatggccatcgcgtgtagcgttgccggtggcgatcttgtagggcttgcccccgcgtgtgctggccgcgtggtctatttcgctggagaagacccggaagtcgcactggtgcgccgtatccatgccatcggtcagcacctgaatcagcaggcacatgaagccatcgcggagaacctgaccatcaagccggtcatgggggcgctcatgaacgtgtcggatgacgctcaacgcgcaaacctaatcaaattctgttccggagctcgtctaatcgtattggatacactgagccggattcacgaccgcgacgagaacaataacggcgaaatggccaagctcgtagccaagctggagcacattgcgacgtgtaccggggcctcagttctgtacctgcaccacgttagcaaaggtagcgcccgcgatgggcagacggatcaacagcaggcagcacgaggcgcatccgctctaatcgacaatgcccgctggtgcggtttcgtcgcaaagatgaccgaggacgaggccaagagcctcagcgaccgcgcctatgaccgtcagcccatcggcaacgaccggcgcggcttctttgtccgttttggtgtcagcaaacagaattacgacgctactccgtacgaccaatggtatcaacgccgcaatggcggcgttttgctgccggtggagttgttggacgccaagcaggacagcggaaagggacgtcaacgtgagcaagcatga

SEQ ID NO: 429688 - DNA, 231 bp, Serratia marcescens
gtggaaagagaattaaggagagcgagtaaagttctcattagcaaaaagcagctgctggagatgattccactgtgcgagcgcacgatctacaacttcgaaaagcaggggaaattccctcagcgcatcgcacttagtagccgcaaggtcgtgtgggatttagccgaggtcgaggcatggattgatgcatgcaaacattccggctcggcccctcgtcccggaatgggggcttga

SEQ ID NO: 429689 - DNA, 1053 bp, Serratia marcescens
atgaaactcagtaaaaagaacgccgtcgtggtgcgcaaggcgctggacggctgggttggggaaggcgccttgacgcccgagcaacggcagcagttgctgctgcatgtggacgtacaacctttcgactggcgacggctggcgcgctatgcgtttctcgccgcgctggcctcgttgctgatcgccgtcaccagcctgttcgccgacagcgcactgcttgaatggctgagcgaactgttccgcttcgatgcgccggtgcgcatggcgatcgccggcgcactggcggcgctggcctacgtctgggcgctgcgccgccgccaacggcacccggaaaaacgctacggcaatgaggcggcgctgtttgtcgccgtgttgctcaccgcctgcgccttatggcagttgggggtctggctggataacggcagcggccgggtttccgtactgctgctggtcgccgcgctgctgtacggcgcgatcggctggttcagccgctccgggctggtgtggtggttcgccctgctgtcgctcggcaatgccttcggcgccgaaaccggctacctgtccggctggggcgcctactggctcggcatgagctacccgattcgctttatcgccttcggcgcggtgctgatcgccgccgcattgctgctgcggccgctgttggcgcagcgcggcctgcagcgggtgtcgctggcgatgggcctgctgtacctgttcatcgcgctgtggctgctatccatctttggcaactacggcgatctcgacagctggtaccgcgcgcgccagattgagctgttccactggagcctgctgttcgggctggccgccctcgccgccatctggctggggttgaagcatgacgacgccatgctgcgcggtttcgggctgacatccctcggcatcaacctctatacccgcctgttcgagtttttctgggacagcatgccgaaggcgattttcttcgcgctgctcggcctgagcctgtgggcgttggggcattatgcggagaagatttggcaactggggcgcaaaccgcacgacgtaaccgacgactga

SEQ ID NO: 429690 - DNA, 1545 bp, Serratia marcescens
atgaatacacacactgttattttagataagttgcggcattccgtgacgcatccgattctgcgtacctttttgctctatatcattactgcattgattctaatcaaggcgatgggatacagcggtggaaaaggtattgatattctttttattgcgcttactttgctattattatctattcattcgcttacccgatacggcctgattattccgtttattctgctgtgcgcgctgtatgcgccggtcggggccatttacggtaccccttccgctgccgtgatgtccgccctgttgcaaaccaacctcatagaagcgagggagtttttgcagaccctgccggccagttgttatctgctgcccgccgccattctggttatgctggccattctcggcctatttatttggcggcaagccatttcaaaaaaaactatacttcccttgctagccctgctgatggttatcattatcgccagagccttcaatggcggtgtggcgaatcttaaattgcctgacttctttttatccctctactcggcttaccatcaataccaacagcaggttgatgaattaagtgccggtgctacaacaccggatacttggtcaataaccgcaggcgcaccgacgaatgaaaactatgtcattatcgtcggcgaaagtatgcgcaaagatcatatgtccttatttggttatccggtgtccactacgccgtttctggataatgccaatggacgattttacagcaattatatttccactgcgccaaatacgttcgaatcgcttcctcgcacgctggctttgagcaacggccacaacattgccatcggagataatatcatcaccctggcaaaagccgccggtctcaaaacccactggctgtccaatcagggcatgttcggacaattcgatacgccggtatcaaaaatcgccatgttcagcgatagccattatttcctgaagaaaggcgacttccaatcgcgcaataccgatgacgatgcgctgctgccgatatttgacccattattgcgtcgccagggacaaggcaatctgtatgtgctgcatctgatgggctcgcacgccgacttttgcgagcggcttaacggcgaaccgccgagcgtcgagtcgccgaataaggaactggcctgctatctctctacctaccgcaagaccgaccgttttatcgagcaggtttatcacagcctgaaacagagtggcacaccgtttaaactgttctatttctccgatcacggcctttcccacaaggatatcggcggtgggcgttctttacgccacagcggcgatacccggcagaattaccaggtgccgttgctggtgctgagcgatcgcgaccaacagcaccagatcattgatgatcccttaagcgcgttcgattttatcgggttgtttgcccaagaggcgggaatacggattgcccatcccgaagtgatgcctacgatacgtatcgcagatgcagataaacgctgggtgtttgacgggcagagaatggttgatttcgatcagttggctgacgatccgcctgagttaccctaa

SEQ ID NO: 429691 - DNA, 1635 bp, Serratia marcescens
atggatcacaaatgggtagttaattacgacccctacaataaaaataatggcgtacctccagaaccgggattggtttggaaagacaataagtcctgggaatggccggaagaagaattgactgttactagcgtgccgatccccacattggatgatgaaataaagaaatgcattaccaataacatttgcttgatttgcgggaagaaaaattgcccgtacatcaagcaggacaagaattaccgtgcgcttctagaagcctgtcgtagaggtgattcgggcaatgcgcgaaaaatctatatgcaacggtttgcgcagttcaggaacgtgttcagtggtgagcgtagaaaggggttacaaagggaattagaagcgcaggccaaggctaaagccgaagcagaggccaaggcgaaagctgaagcagaagccaaggcgaaagccgaagcagaagccaaggcgaaagccgaagcagaagccaaggcgaaagccgaagcagaggccaaggcgaaagccgaagcaaaagcaaaggctgacagagatgcgctgttctcaaaagcaggcgtcaagccagcgcccgtgtatacgccagagatgctcaaagcagctaatggcgccttaaaagcaccgggggcgatggtgctgaatcaaacgccaggatctgcgcaaatggcgctggccggtgctggcgtctggacacccgccggtgaggtcgcgggaaacattacgaagtggctcagcaatgcactgtccaaactgtcagtaccagcggtaagcccggaacttcttaaagtttcgatggcgaccctttggttccattcgaaacccgcgggtcaggggagtgacaaagttcctgggcgtgatgtgcctgcgttatttgcgtttccggcccgagctctggctgatgccaaggcgatagaggccgggatgaaatcggtgaatatgccggcacgtggtagcctagtgaacagtaatggtcagttagcgttaaaactgctgaaaacaggtggaagtctgccggcagcggttcaggtgctgacgggggtgcgagatcctaaaactgggctagaccgcattaccgttccagcagtagcagggatgccagtgcgaactgtcttggttaacccggcggcagtgccttccagaccttcgagcaccgataatccgcccccgtcagttcctgtagcaccagtacatacgggcaccgaattgaaacccgtagataccatcacgctgacgaccacaccagcggcggagataaatggagttcaggactttatctactggcgaccagatgctgcagggacaggtgtggagccggtgtatgtgatgctgagcgatcctaaaggaaaatctcctaagcttaaaattgatgagaaaatcaaagatcagatggaagagcggggatggactgagcaagatatcaaagataccgtagctaaaggtgttacaggtaaatctattgacaagcgtagcccaaagaaaacaccacctgattatttgggtcgtaacgacacagcatcagtgtacggtgagccaggcaaatatgtggtggttaacgagcgtactggtgaggtagtccaagttagtggaaaaaacaaaccaggctggattgatgactcacgaattgaatgggggaaataa

SEQ ID NO: 429692 - DNA, 1656 bp, Serratia marcescens
atgaaaccgattaaacgtctgatgttgtccggggataccgtgcccctggttgattttaatctggtgttggagctgaacggctgcgggcacgggtttattaccgcgcagacggataccgattacaccggcaaactggtgcgcctcgatgccggctatacggataacattttgcgttggtttacggggtatgtggaacgcgcgcagccggcagaaacaggttctcagcggctttttgtgcgtgaattggctggcgtattcgaaaggctttggccgtgttccttccagcatccgacactgcgccaggtggccaagtggttagaggaaaacagcgggttaactatcgcgttgccggcgcaggcggattacctagataagccgatcccccatttcacccacagcgggacgggctaccaactgttggccaatctggggccggcgtttggggtgcctgattacgtttggcaaccgctgccggatggcggcgtgttcctgggcagttgggcgcattccatgtttgccggcaagccggtagatattcctgccgagtttagccaggcgcgtgccggtggtaacagcatgaccttgccaatggtgcaagccttgcggcctggtgtggtggtcaatggccaccggctttcgagtgttcgcctggagaatgacgacaccacgatcacctggttggccaaaaatccgttaacgggtaaatcagtggccatgacgccggcacagcgccagattgatgccgcttacccggagttgtctgcgggtttgcatctgcccaaattcgccagggtagaagcccacgcggagggcgtcagcagcggcgacctggccgatccattccggccacgttatgccgtcgatttgcagttgttggacgccgacggaaagccggcaataaacacgccgatttacccggcggtgccgctaccgttgccgatggcgggccaggattcgggcatgttccagtttccgccagtgggaacgctggtcgaggtggcgtttaccgatgggcggcccgataagccgtttatccgtcagacgctggcccagggcaacacgctgccggatgtgaaacccggcgagcagctacagcagcagcgggaggaagtttcccagcgtgttacccaggcaggggattgggaacggaaaaccgaccaggcgatccgtgaaagttccatgaccagggagatccaggccgacgaagaaacccgcaccttggtggccaggactacaacggtgcaggccacggacaaaaccacggtgctgggcacgtccaccttgctggccggtgcagtgcagcatattgccgaaggggattacagcgtagcgacccagggtaatttggtggccagtgtgggaggggatgccaccacggcagtggccggcagcctgatggagaaaataggtaaaatccgcagcagcattgcggcagtgcgccaggatgtgattgccccggtggtgtgggtaggtagccaacaaatcaacgtgatggcgctgatgctggaaaccctggaagtggtgcaggagctggcgcagcagaccgccgcccatacgcacagcaacaccggcgggccgcagaacgccgccgctatcagcgcagccggcgcgaagtctggccagttgaaaaccaagtacgcgccagtgattggatag

SEQ ID NO: 429693 - DNA, 561 bp, Serratia marcescens
atgacgatagtcacgctggcgcttaatggtgaagctatcccgttaaaaggcgtcatggtcacgccaatgatgcaatttcaggataaagaccagtctgggcagacgtccagcacggccaacgctgaacagggcataaaacccaaagaactgcgcatttccggcatgatcccctttagcgaagcccaggtgttaacgcgcctgtttgccctggcagaggcaaccgaaggcggtaagctgaaacgctaccgtgtggccaaccacaccgcccaggccattaactttaggctggcgacgttcacaggctcaattgatgcgccaaagcaggacggcaagcaagcctggctggtgacgttcaccctacgcgagcacctaagcgtaccggaaaagaaagatgcgcgggaaggtagcaagactaccgccaaaaagcagacaccaggcgcgaatggccaggttaacgggaacggcgcggcggctgaggatgaacaaaaattgagttggttcgagcgtaaagtattgaagccggcggatgatgcgcttgccggcgtagtggggggcgaatga

SEQ ID NO: 429694 - DNA, 723 bp, Serratia marcescens
atgtggcgtaaagcggtgttgcgtatgcctggcgatatgcagtctttgacatgttcaatggtgccggcgcatccgtgggtttatggcgtggggcggcaggagtcatcaggtagctaccttagcccagccaatgccgtggattacctggcgggcaagttggccggccagggagaagaaatcagcgctaccgtattcatgctttgcgctaactcacacggtgaatttatgccgcagattgcagcgttggcgggggtgttgcctttgccagcacttaaccaggtgcagcgcatggcgcagactgccgccacccaggcaattacccggatgcaattgcctgggaaaatgggggctggtttgccggcggcggtgccgctttcgaccggtgcccagcgtctggcgttaaatgcgcagcgtattgcggaagccaaggctagcgcggccataggggccagcgtggacggcttgcaagcggcgctggctggattttcccaggcccgccaatctgccctggaggggataagccaggcaatgaccgcgttacaagggaaaagcgcgccggcgtgggcctttacggcgaaaggggccggtgccagtgttggtgcagcgatgaaaaaagatattccccggcaggatgctgtttttaccctggcggtgttgttcgtgggcaaggatttggggcaactggaggcgatgatccatgacgatagtcacgctggcgcttaa

SEQ ID NO: 429695 - DNA, 429 bp, Serratia marcescens
atgagctatggatttagcgcaacgaccaaggctttctatgtgtatgaagaccaagaaagctatgaggaaaacggcaactggccagcggacgtaaagcccgttagtgatcaggtgtgggaaaaatattgcacgcaaggcccggcaggcaaagaacgcggggctaataagcgcggcttgccgtgctgggttgatattcccccgttggcgcgggaagcgcaggcagacgcagccacctggcaaaaagggcagttgctggaaaaggcaggcaaggcgatcgcgcccctccaggatgcagatgatttagggctggcgacgaaagaagaaagggcgcttttgttggcctggaaaaaataccgcattgccatcaatcgcatcgatgtggatcagggggatgctattacctggccggaggtgccaaatgtggcgtaa

SEQ ID NO: 429696 - DNA, 3150 bp, Serratia marcescens
atgtcacaaaccgcgatcacctttgcctttgagcaatggaaagcaaaagaagccgtgaacggctcccgcgtggtgctggatgaatttgtttttgccaacgtgccgggcctcgatgccagcaagcccatcgaccgcaaagaagggatgccggcggcagccaagattgtgcaccgccaggccgtcaacaaaaccggcgtcgtgaacaataacgccgtggtgtattcggtcaccctgggcaccgaggtgggcgatttcgactttaactggatcggcctggtgaataaggccagcaacacggtggcgatgattgttcatgcgccaatgcaacgaaaggtggccaaccgcgcaggccagcaggggaacgcgatcacccgttcctttgtgatggagtatgacggcgcggccaaagagacagcgatcaccacgccggcagaaacctggcagattgattttaccgcgcgcctgggcggcattgatgaaatgcagcgcctgattaaccgtgaccattacggtgccggcgcattctttggcaatgggttcctggtggccaaagctggcgcgcaatatttcgttacggcaggcacgggctatgtgggcggactgcgcgcagtgttggcggccaaccaaaacatcaccgtgacaaccaagcctatcaaggtctgggccgacgtgagtttacagggcaacgtggtaagccaatggactggcgccgttaaatttaccgttgcgtccaccgctgcggattacacggataacgccggttttaaacactacgtatttgcggtggcaagcatcgatgccgccggcaacattaccgacctgcgcccgcaaggttcgctgtccgaccaggccggcaatgatgcctatttgcgtaaggacgacaatttagcctcactcaaggacaaatcaaaaagccgcggtagtttgggcctgggtaacgccgccacgcgtaatgtgggtgtggctggcggccaactgatggaggtcggtgcctttggcctgggcatgggttcgcgtcatcgtgatgatgcctacagtaatcaggctgaaatctaccgggtaaataacctgtccaaaaatacccccggcgcagaagtttacggtgttctcagtttgccgtgtgatggtgggccgtccggtgcttacatcgcggtacaaaacaacggcaatgcattctttggccgctcaaatatcccggctaatggggtggagtggtgccaggcatataccacgaaatttaaaccaaaggcgcaggatgtggacgccgtatccgctagccagggcggggagtttcaaaaggaaatccaggcatctggcggggtgatggtggccaacagttggaaagccaaacccggcggccttttcccagggaacggggacggggccagttatgaaacctgcaacgtggatattaaaagctggtatggcctgggcttttacaacgcgagcaaagagggcatacagggccgcacggcatttttgaacgtgcgcaccgggtcattttcggccaagggccggatcaccggcgcatccgtatgggatggcaatgcccgcgtttactcccccgctaataagcccacggcggcggacgtcggggcgttaaccgatgcccaggcagcgcaaaaatatgccctgcgctctatccgtgtgaacggtaaagcgctgaccggtgatgtgaacttgctggcgtcggatgtgaatgcctggaacaaaacggaagcggacgcgcgctatgtaaaacagagcggcgacacgatgatcgggccgttggcattgccgcgcgtggtcttccctaatggcagcacggttaacgccgccaccgatgtagatcgccctaatggcttcaccgtggaaggtctgaccacaacgaataagggatacccggttgtgggttctctcggggtcttactgacagccaaagttaacgaatttcgtaatgtgcaattggctattgggtcgggtaccaccgagttctttattcgctccctgcgcaaggatgcgacgaccaatgataaatgggatcgggtttataccacgtcatacaagccgacgattgccgatgtgggagccgcagatcaccgaaataactttgccgccagattaggcattgcccgcgtgttatctgggaacggtgcgcccacgtcccctggtgtgtggagcgtggaaaacagtacctggacacccaacgcctggggaacattgttctatacaacaaatcagtcggatttgtcggcaagcgtcggcaatgggaagtatcaccactatcaatttattgggcatggtgaaggcggaaaagccagggtgttttatgccatcaacgtaaatggaacgtttagcggctggaatgaggggattttaagtgccggcggtaatctcactggcgtactgaaaaccagcgcggaaattcagtcaactaccgcagataactaccggttaatcggtggggattacggcacattttggcgtaatgatggcaacagcatgtatttgatgctgaccaaggcaaaagaccagtacgggacgtataacaattttcgtccgttcgcggtggatgtgaaaaccggcaatgtctcatttggccacaatgtaggggttaccggcgatcttaaaacattcaaaactttccgtgccgataaaagcgtgtcgattggcgaggatttgtgggttgatcgaaatgcctttgttgcgggcaactttaaggttggagacacgacttaccaaacagatgggaatattaacggaaaagcgtggaacgggtatctgagcaactggataaacgaccaaataaatggccgcgttgattggggaacgtttaatcgtgaagtcggtgcacgggccacggtggattttgttaacagccgttcaaacgtcgccggcggtcgtaatgcctggtggtacaaggacgaagtgacaggattcattgtccagggcggcgtggttaatcgcgctgattatgcaacacgcgtcaatttccctcgtggctatgcgcgggagtgtttcggtgtgcaactgacgttagccaataccaacgggaattggtttggtgatagccgagtcaatatccaggcgcgtgatctggataacaacgggtttaatgcaatgatggacggtcaggaacaggtcgtgttctggcagtcggtgggggtgtaa

SEQ ID NO: 429697 - DNA, 606 bp, Serratia marcescens
atgcctgattttaaagaacgcctggcggggatgcggttgccgtcctggatgaatcgaggggagccggccaagctgctgcgcgcctgccgcaatttctggttgtgggtgtatggctggctgacctggccattgaaacagcttgatgcggtcacctgtgccgtgccgttgctccaggtgctggcgtaccagcgcgatattacccggttcaacggggagccgctggagctattccgcaagcgggtgcagtacgcctttatcaatgcccgcgatgcgggatcggtggccgggtttatcgccatttttgaacgtctgggcgtgggctatgtggaaatcctggagcgccaaccgggcattgattgggacgtgataagcgtccgtgtgacagatggccaggttgccagtaatcccgacctgctgatgcagatcatccggcaatatggccgcacctgtcgccgctatcgatttgaagtcattaacaattccgtcctgcaattacgcgctggctgggtgggatgtgagtatgtgtgttacagcgccgccagtgcagtggccagcaccaataaccaatattccgccaccgtggcgagcgcatcacttaaggggtag

SEQ ID NO: 429698 - DNA, 1185 bp, Serratia marcescens
atgacgacgaaaccgcaagttgattatgaaaaagccttaacagaaagcggaatgccgattacccaggacgaagttaataccaaatttaacgaattggtgaccgcagaagggttaattaccaacacatctaaaatgtcaccgttttggcgacttatccaggcgattattaccgccccggtgatgtggttaaaggatgtattggtgtctgtggtgatgggcaacatgtatttggccaccgccggcggcacttggctggaaatgttcgcctggggtgtcaatgtgaagcgcaagccggcgacggcggcggagggggtttttcgtttcgacaaggaaaacgccggcgcgatggtcacgatccccgccggcacggtggtgcaaaccgaacgcctgaacggccatgtgtacagcgtggccgtggtgaaggaaaccacgttagccgccggcactgccggcggactggtgccggtgaaggcgaccgcgccgggtggcgcgcataacctggcccctgggtattaccggattttaccgcaggcggtgccaggcatcgtgcgggtggaaaaccaggaagggtggttatcggtgcctggtgctgaccaggaatccgacgacgatttacgggacagggcgcgcaaccaatacaacctggcgggcaactatcacacggatgcggtttaccgcagcatgatcgccagcgtggccgggctgagtattgaccgcattttctttcagcacgatgcgccgcgcgggccgggaacggcgaatgcctatctgttgttggattcaggcattgcctcgcagccgtttattaacgcggtcaatgattacatcaccaacaaagggaaccacggccacggcgatgatatgcagtgttttgccatgccggaaacccaacacgatttgaccgtgacgctctatctggaaaacacggccaactttacggcggacgcgctggccacgcttaagcgcaacagcgaaaccctgatccgctgtgcgttccggcaaaacgccgaatacgacgtaaagaaaacatggccgtatgcgcgtttctcgttttccaacctggccagggagttacaccgggctttccctgagctggaatccatcacgttttccaaaggggacattgtgagcgaattgaacgtgccgcgattgaaagccttaaaactgggggtagccgatgcctga

SEQ ID NO: 429699 - DNA, 348 bp, Serratia marcescens
atgaatgaacccctttatattgacctgctaatagaaaatggcgatttctcgctaaatacaggccgggagccggtgttatgtcataacaaggtgagcattggccaagattgcgttcacgctattttggaaagtgggttagtgacgcaattagtggcggaaagaagcccgacactgcgcgccgatgtgattatgcaaatcgtattgctgttagaagatgatgaacgaattgttccaggcaccgtcgttattagcgaggaaacgttaaaacgattatgggtgacggcagaaacgtatgatttcggcaaggtggaggccagcgttaattatgacgacgaaaccgcaagttga

SEQ ID NO: 429700 - DNA, 2532 bp, Serratia marcescens
atgaaacagctagattttaccctgagcctgatcgacaaactgacgcggcccctgaaacaggcccaggcatcggttaccggctttgcggaaaaatcgcaagcggcctttggcaaaattgccgtgggcggggccgggttggtgggggttggcttgtcaatcaagggcgcattaggcccggcgattgagataaccgacgccctgaacgcggcggccacaaaaggcatcgatgaaaccaccttgcagaaggtggccggggatgcgctggctttcagcgcgaaatacggcaaatcgtcggtggatttcatcaactccaccgaagcgatccgcagccaggtggggttgctgaccaaccaggagttgccggcgtttgtggtggcaaccaacaccctggcagcagccacaaaggccagcggcaccgaggcagccgagtacatgggcagtatgtacaacaaattcagcacctacgccgagaaaatcgggcgtgttgagtttgccgagcaggtcgccagtaaaacggcctacatggttaaagcctttggcaccaacatgcaagccatgtctgacctgatggaaggggccaggggcgtgggggctaactacggtgtgggcatcgatgagcagtttgccgtaatggggcaactggaacgcacattgggatcggaagccagtagcgtttacgagtcgttttatcagacggcccaggacggggccaaaaagctggggatgagctttgttaatgccacgggcggcatggtcagtttgccggaaatgctggaaaaattacaaacgcgttacggcgccagcattgagggcaatctcaaggcccaggccgcgttggacgatgcctttggtgattcgtcggtactgattaaacagctttacggcaatgtggatctgctgaaacgccatattaacgagctgggcagcagtgacgggatgaagcgcgccacggaaatggcggagcgcatgactaacccttgggaacgtctaaccgctatctggtattccatccgggcggcgatggggttaacgctgctgccggtgctctatccgctgattaacaaaatggcggacgcggggcagaccctggtgcgcaggttgaagttattccccaacctggcgcgggctattggcctggcggtgctggcgttcttaagcctggcggctgcgggggcgatagcgaacctggcgatcggcgttcacatgtttttgatgttgggccttaaaaaggtgttggggccggtggccaagctgttgggcctgaaccgcctggccatgctggccggtggtacggctacggcggtgtttaaccgtggcctggtgatgctgcgcgctggcctgttggccgcctcgattgccgcccgtaccggtgcggtgtcgttcctgctgatgagctggccgatcgcgctgttggtggccgccattggtgccgtggtggcagcggtgtgggcattttgggggccgattaaagcgtttgtgtccgggtttattgcgggctttaaagaggccgccggcgcgttgtccccctttgccggtgcgtttgacctggtgaaacgggccgcggctggggtgtggggcgcgattcaggcggtgtttaactggtttgtccgattgctaaccccagtccagagcacggcggcggagctgcaaggcgtcaccagtgccggccaggcgtgcggccagattgttgccggcgcaataggtttactgctgtcgccgattgaactggtgattaccaccgtgggccatttgtttgacgcattcggcatcgtaaaacaaggctggctggacgtggtggccgcgtttgatccgtcatcgcctatcgcgtcgtttatgaagattggcagtgtggtagcgggcgtatttaccaagctgtggggcgtgttccggtctgcgtttgccgatacctacaactggatcatcgacaaaatcaacatgctgccgggcgtcagtattgaccccatgcatgtggatgtggtgccgacggtgaccgaaccccagggaatggtaaacatgccgccggtgacggtgccggcgattgatgcgggcgcgttgcccaccggcctggccacgctggagggtagcaacgcattaccggcagcggcccaggctgcggcagtggccccggtggctgtgccacaacctgcgccggcgctgatgccggcaggaagcgcacggaaaaccctgctccaggatgtgagcgatcctatcgtggtgcccagggcaatgcagggaacggcagcaacacccgcgcccgctgtgccggcggtcaaggtgccgcagccaccgccgcaacaggtgcaggtgctggcccaggtgcagggcgagagaagcgcgccacctccgcccgcgccgagtatgttactgagcggcggcaagctaaaaggaattggccccggtgggattaataaagaaattaataacaacagtcgaaccgttacggataatcgtaaaaatattgagaacgtccatattaatgttaagcagggcatgacgcctgaacagctaatggaatggcaggaattaagttaa

SEQ ID NO: 429701 - DNA, 270 bp, Serratia marcescens
atgagcaaagaagaaaccaaagttatcttgactgtccagggcaaagacttggcctttgagccaaacactacggcctataacagcctgattaatgatatggcgatggataataaagttgcgccgcacgtcacctatttgcgccgtattgtggttgcagaaagtaaagccgcactggacgaactgcttaaactgccaggcgcagcattgcaaatcgcggaagcagtaaatgcgaaatatgcgccgaaactggaaattgaagtaaaaaactaa

SEQ ID NO: 429702 - DNA, 345 bp, Serratia marcescens
atgggtaagggggcgtggttggggctgctggccctggctgccagctttgccggcggttggcaggctagcgagtggcaccgggatagcctggcgctggccattgaccaggccgcccagcgggccggtgaagtctcccgccaggcgtcggaagcggtggccagtcattccgccaggcagttggaaaacaaaatagaggcgttgcgtgatgctcaaccgaaagagatccgcaccgaagtggttaagccggtatttactaacgtgtgcgtgtctgacgaatttatccggctgtataacgacgccgccgataaagccgaacgtgccatttcaggaaagtttactcgttaa

SEQ ID NO: 429703 - DNA, 342 bp, Serratia marcescens
atgacgttaagtgaaaaacagcagttatttaccgcctggattggccaactgatcacctgggccggcgatcacggttaccggctgacgttcggcgaagcttaccgcacgccagagcaggccgccagcaacgccaaaaccggcgcaggtatcgccaacagcctgcacacgcagcgcctggcggtggattttaacctgttcattaacggcgtgtaccaaaccaacaccgaggcgtatttgccgctgggtgagtattgggaaagcctgggcggttcctggggtggacgctttaaaagtcgcccggacggtaaccactttagcctggagcataacggggtgcgctga

SEQ ID NO: 429704 - DNA, 303 bp, Serratia marcescens
atgcaagagcatgaaaaaacgttctggagcctgttgttattgggcgcgctgattgctgttggtaaggtgttaagcagcgatgagccgatcactccgcgcttgtttatcggtcgggtgatcctgggaacgggcacggcgatggtggcgggggcggcactgatttgggtgccaggcttgcccaccattggtgtggtgggactgggggccgccctgggcatcattggccaccaggttgttgagttgtggcttaagcgcaagggcagcagcttattagcggggaagatgaaagatgacgttaagtga

SEQ ID NO: 429705 - DNA, 456 bp, Serratia marcescens
atgaccaaaaggatttctggccagtcggttgatttcaatatggacggtgatttagtccatgcggaaaaagtgagcctgagcattaccgacaacaccgccgcagcgcaaacccagggtgtgccagatgggtgggttgccggtgacgtggccgctgagggggaaatggagctaagcaccaaatccctggcccaggttaccgccaaggcgcgggccgccggcagttggcgcggtatcccgccgattgatctgatgtggtacgccaaggccggcggggaggagctgaaagtggaggcattcggctgcaagttgattctgagtgacattcttgatgttgatccgaagggcggcagcatcatgacgcacaagattaagtttgtagtgaccgacgccgactttgtacgcctgggcggcattccttacctggaatctgaattaacgcagaacctgatcgggtaa

SEQ ID NO: 429706 - DNA, 1125 bp, Serratia marcescens
atgagttggccaattattcaggttaaccaggtaaaccggcaccagggcgaaaccaaagacattgagcgcgtattgctgtttgtcggtgccggcaaaaccagcattggcaaaacggtgccggtgaatacgcaaaccgatttggatgtgctgttgggggcgggggattcggtgctgaaaagcaacctcaaagccgccatgttgaacgcggggcaaaactggtttgcttatgtgcatgtgctggcggaagccgatgccgccaagaactggccggcggcggtgttgtccgcgcagcgtgtggcgagctttgagggcatcgttaacctggtgccggccacgctcgatgtggtgaaacaggcacaaagcctgcgggcggaaattatcgccaagtttggccgctggcagtggttcattctgtcggtggaggcgctgcaaaagggggaagtgtgggcggagtatgtgggccgcatcaatgacctgcaaaagggcgtagcggagccggcgatccaattggtgccgcgcctgtggggtaatgagccgggtgtgttggccggtcgtctgtgtaaccgcgctgtgacgattgccgatagtccggcccgtgtggccaccggggcattagtcgaaatgggcagtacggccacgccggtggacggttccggtgaggtgctggagctggcgacgctccaggcgttggaggcaaatcgttttagtgtgccgatgtggtatcccgattatgacggcctgtattggtcggacgggcgcaccctggatgtagagggcggcgacttccaagcggtggaaagcctgcgcgtggtggataaggcggcccggcgagtgcgactgctggcgatccctaaaattgccgatcgggcattgaacagcaccccgaccagcatcgcggcgcatcagcagtattttgccaagacgctgcgggaaatggcacgcagtacgcagattaacggcgtgacgttccctggtgaagtcaaagcgccgctggagggggatgtgcaaattacctggcgcacctccaccaaagtggaaatttacctagtgatccgtacctatgaatgcccgaaaggcatcacggtaagcctgatgttggataactcgctggagggcgcagcatga

SEQ ID NO: 429707 - DNA, 711 bp, Serratia marcescens
gtgatcatcaatggcgaactgagccgcacccagttgcgggaaatgcgcaaagagctggccaagctggagttacccaaagccaagcgccagcgcctgttatggcgtatggccaagtacggcgtaattgtcgcggctaaacgcaatgtgcgtaatcagcaacagccggatggcaccccctgggaagggcgtaaaacccggcgacggggcaagatgctgcgcaatatgcccaatctgctgcacatccgtgaaatgccagagcaggaggccgtgaggctttatctccagggaggcggataccgcaacggcaacaaagaggtgccggcgggcgtggtggggtttgcgcaatcggcaggcatgaatgtttccgttaagcgggaacaggtggccggcaagaaaagcaccaccgagcggcaagccacgctgcgccaggctaaaaagctgcgcgcgttgggttaccaggtgaaacggggcaagcgctggcgtaagccaccgctcaaggaaattgtaggaaatatgtcattcgcgcaggccggcttgctgatccgcaagttgagtggcaaggcggccaaaacggcctggacggtggatttaccgtcccgcccgttcctgggcatgagtgacgcggattttaacaaagcgttagcgcgtcaactccaggccattgggtttggctggaatgtgaaagcgcaggatatgaaggggaaactatga

SEQ ID NO: 429708 - DNA, 504 bp, Serratia marcescens
atgagcaagttagagatgctgaccgcgtttctccaggccaatttgccgccgcgtgtagccaacctggaatttaacagcgacatggaagaagtgagctttatcaatgcgcagaaggatttggggctgaaccagtaccaaatggcggtgatgcagtatgaagcggtgttgtcctggggacgtttcccttaccgccaatttgacccgcgcaacctgtgcgcgctgttgttggcctggttgattgagaacgccgatgaagggttgattgagcaagggtttgagcagtcgtggccggagctggcgatcgtggtcacggacgataaaaccgcgttggttgaggtggttatcaagatggcggagccgctgacgctgatccagaacgatcagggggtaatcccctttgacgggaagcgctggcagttggcagaccccgaaatctggtgggcgttggaagggcatgtttatggggtgggcagcaccggcgcgccaatcggtaaaacaccgtga

SEQ ID NO: 429709 - DNA, 453 bp, Serratia marcescens
atgtttaacggcaaggccacggattaccaggacgccacgttaaccaataacggattttggccggatttgagcctggcggatttccaggaacggcgcagcattccgcccgatattgacgcggacaccctgggcgcggccctggtggccagcgtagcggaaattaatctcgacctggccaagctggcgggccagctacaggcgaaaggttatacccaggccagcgccgtgccaggggtgaagattggcgacaaaaccgcgctgatcgcgcagtacgaaaaagcggtattcgccagggcaaaggcggatttgttgggggagtattcgacgcagtttagccgggcacccagcgccggccaggaaaacccggaaacacgcagccggctgctggcagaagccgccacggtgctgcgcaatatgaagggggcgcggcgttcatcggcgcggctggtatga

SEQ ID NO: 429710 - DNA, 705 bp, Serratia marcescens
atgtcactttcccccgcacaacgccacacggcccgcattcaggccgagcgcaaactcgaacaccggcaggcgttggccggttgggacagcctgcacctccaggtacaggcaatggagcgggatatccgccgactgcgggagttgccgcgtaccgctgaccgcatcgccatgaaacgcgatgagttgttgccgcgctggttgccaacggtggaaacgtacctggctgagggggaggtttacgccaatcccatttttgcctggtgtgttatctggctgtttgatgtgggggattttgacaaggcacttgattgggctgacctggcgatcgcccagcgccagcaaacaccggacaggctaaagcgcagctttgccgcgttcgtggcggatacggtgctggcctggtcagaggaagaggccagccggggtaatagcctggagccgtatttttcccgcacctttgccaacgtgcgggacaactggcggctgcatgaggaaatcagcgccaagtggttcaagtttgccgggttgatgctgctactcgatgacaacggccagccgctggccagcgccgtgaatgacgtggcgacgctgaaccaggcggatgaattattagcccaggcgcaggcatttaaccccaaaggggccggcgtcaaaacgcagcggcagaaaattgcggccaggctgcgggcgctggaaaaagaataa

SEQ ID NO: 429711 - DNA, 1017 bp, Serratia marcescens
atgtttttaaatcaacgtgcgcgtgagttattgcagaaatacagcgcaggtttggcagaagcctacggccaggaaaataccgagcgttatttttcactgaccgatccaaaagaaacggcgttacgcgccgcgctgctggagtccgtggatttcctgtccatgatcacctgcgccgatgttgaccaactgaccggtcaggtggtgaacgtgggcaatccgggcatctttaccgggcgtaaagaaggcgggcgttttatccgcaaaaccggtgtagacggtctggaatacaagctatcggaaactgattccggcgcggcgctgacctgggccatgttgtccgtctgggcgaacgccggcgatgagaacgagtttttccagcgcatgcaggaatttaccaaccaatcctttgccctggacatgttgcgcatcggctttaacggtaagtccattgcgaaaagcaccgatccggaagagaacccgaacggtgaggacgtcaatattggttggcaggagtttgtgcgcgcctatgacaaaaaccagatcatcaccgatgcggtgactctgggggcgggcggtgactatgtgtcactggatgcgatggcgtctgacctgatcaacagcaaaatcccggcgcagttccgcaatgacccgcgtttgaccgtgttggtgggcgctgacctggtggcggcagaacaacatcgcttgtaccaggcagccgatcgcccaacggaaaaaatcgcggcgcagatgctgggcacgtccctggccggccgtccggcgattgtcccgccatttatgccaggcaaacgcatgatcgtaacaccgcttagcaacctgcactgttacacccaacgtggcacccgccagcgcaaggcggagtttgtggaagaccgtaagcagtacgagaacaaatatctgcgcaacgaaggttacgccgtggaatacccggaaatgtatgccgccttcgacgagtcagccgtaactatcggcaaggtggaagcaccaaaaggggagtaa

SEQ ID NO: 429712 - DNA, 843 bp, Serratia marcescens
atgtcagattcgcagttaatgacgaattggatttgtgtttgcgcagaaggtaagacagtagacgggcgtgatattaaaagaaaatggatcacggacgccgccgaactttacgaccctcatttatacacggcgctgttatggccggagcactcccgtaattacggtaaccgggggcgggttttagagttgatgtgtcaggagggggatgatggggtgatgcggctgtatgccaagctttgcccaaacctctcattgatgcaggccaacgtggacgggcagttaatcttttgctccgctgaatttacaaccgatggcaattttcgaggtacaggtaaaagttacctggaagggctgggcgttactgatgaaccggctagcgtttacaccgaacggatgcgctttagtaagcgcaacaaaaataaacgttatggcgcattaaagccgctggcttttgatgaagtcaaagaaattaacgaggaagtaaaaatgtcaggaaataaaaagaaaggctggcgcagcatgttttccattgaagaggaacaacagcagccggaaaccccagcggatggcgataaattgcaggcactggcggaagcccttgcggcctttgaatcgcgccttgccgcattggaaggtaaaaccgaagaaacggccaccgccgtggaagaagtgcaggaagatgtggaaaccgtaaaagaagtggtggacacccaggaatttaaaaccctgcgcgataacatcaccggtatcgtgaaaaacttcaacaagctggataagaaaatcaccaacttgccaaaccgtaatccaaaaggtgacgggcgtaagccgtttaactatctgtaa

SEQ ID NO: 429713 - DNA, 1638 bp, Serratia marcescens
atgctcagccatgaaagcattgaggagacaattaatcgccgtattcaggtattaacccaccgcgacggcaaaacagacctggaacaaaaagaactcgataacctgatcgcacaccattgcaaactgcgtattcagcaagccaaacatgcggaaaaacttgctgccgttgtttcccagggaaatggcgaatattccgctgccggcgacggtgaccaggacgggggcaagaaaaagcgcaaataccgcaaaaatgatatttccgcgttaacccaggaagattttgatgctttcgccgatgaacaccttttcggctaccaaaaacacctgcgtctaaacctgacccagcaaatccgcaatatcctgaaaagccggcagattggggcaacctggtatttcgcgtttgaggcactggaaaacgccgtaatgaccggcgatccgcaaatcttcctatcagcatcacgcccacaggcggaggtgttccgttcgtacatcgtcaacatcgcagagcagtattttggcgtaacactgaccggcaaccctatccgcttgagcaacggcgcggagctgcgctttctttccaccaactccaacacggcgcaatcctacagcggccacctgtatgtggatgagtatttttggatccagaactttgcgcggcttaatgaggtggccagcgcaatggccacgcatgaccggtggcgcacaacttacttttccacgcccagcagtaaaacgcaccaggcttacccgttctggacgggggaagaatggaaacgcggcgacgccaagcgcaaaaaggtggagtttccgtcgttcaaagaactgcgcgacggcgggcggctgtgcccagatgaacaatggcgctacatcatcacgatggaggatgcgatcgccggcgggttcaacctggccagcatcgacaaactgcgcaacaagtacaaccgcgacacattcagcatgctctatatgtgcgtgtttgtggacagcggagacagcgttttccgcttcaacgagctggaacgctgcggcgttgaggtatcgctctggcaagaccatgaccccaccgcctcacgcccattcggtaatcgtgaagtgtgggccggcttcgacccggcgcgcagcggcgacacctccacctttgtgattatcgcgccgccgctctatgacggtgaacgcttccgcgtcctggcaacgttctactggcaggggatgaactggaaacaccaggccaaccagattaaggcactgtttgaacgctacaacatgacgcacatcgggatcgacattaccggcattggcagcggcgtgtatgaaatggtgcagggttttgccatgcgccaggccgtggccatccattatggcctggagagcaaaacgcgcctggtgttgaaaatggtggatgtggtggaaagccagcgcatcgaatgggacaacgaacaaaaagaaatcccggccagcttcctggccatccggcgcaccagtaccgccaaaggcaacagcatgacctttgttgcggatcgcacccaggaaacaggccacgcagacgtattttttgccatcgcccacgccgtggataacgagccgctcaattttgagaaccaacgcaaatcaacatggaaaacgagaaaggccgcatga

SEQ ID NO: 429714 - DNA, 1071 bp, Serratia marcescens
atggaaaacgagaaaggccgcatgaaaaagaataaacaacgccagcgccgtgcagcggcaaaccaccaacgcgccgccgctacaggcccggcgcgcaaaatgagcattgccaccctgggcaagccggaaccggtactcaccaccggcaccgattaccgggagatttggtatgacaacgactttgaccactacacgctgccgattgaccgcctggcgctggcgcagttggttaacctcaacggccagcacggcggcgtgctgtacgcccggcataacatggtggcggcggattaccagggcggcggtttgacacatcaggaactcaaaggcggggtattcgactattttacctttggtgatctggccattgcgaaagtgcgtaacggttggggcgacgtctgcgccctggccccactgccctcactttatacccgccgccgcaaggatgattccctggttgtcctgcagaacggggaacccctggtgtttgcgccggaggatgtgatttttttgaagcaatacgacccacaacaacaggtttacggcctgccggactacatcggcggtatccactccgcgttgctcaacagtgaagccaccatctttcgccgccgctactaccacaacggcgcacacacgggcggcatcatctacaccaatgaccccaacttgagcactgaggtggaggatgaaatcgtgcaaagcctagagcagagcaaggggatcggcaatttcagcaccttgtttgtaaatatcccgaaaggtgacccggagggcattaaattcatcccgatcggcgacatcagcgcaaaggatgaatttgccaacgtgaaaaacatcagcgcccaggatattttggccgcgcaccggttcccggcaggcctggcggggattattccagggaatacggcaggcctgggcgacccggaaaaggcccgcgaaacctaccgcaaagatgaggtgatcccggttcaacgcatgatagcggatgccgtcaacagtgatcccgatgtgccagcccccttacatctgaaattcaacgatgaaacgtcacaatcgggtgcgttatga

SEQ ID NO: 429715 - DNA, 273 bp, Serratia marcescens
atgcgcgtgatgaaagtcttatgcacggaatgcggcgctaacgcgattatcagaaaaacggcccgtaaacaccggcagatttcagatctctattgcgcctgtagtgacgtggagtgtggccatacctttgtaatgaatgtgaccttttcgcatacccttagccctagcgccaaaaccggggataagctgctgaaaaccgttgttgaaagcatgaaccctcaacaacggcaaatgatgctggatttattgcagggcgctgcctccgccgcctaa

SEQ ID NO: 429716 - DNA, 2010 bp, Serratia marcescens
atgctgaatccggtcgcatctgctaccgaatgggcgttctcgtggaacgccccacgcccggcgatcgccagcccatttccgacttatgacgaaattcaccaaagggatagggaaaacgaggcgttagcgtgtgcccaggcagtgttgcaaaagcaaccggcgattgttcgcctggatgtgacgcgccgcgccaatcaacttgagaaagaacagggcattcagcgtgctaatgcgtttctggccaaaacctttatagagcgtattttgccgcgcgttaacctggtttcagcccgctatcacatcccggaaatgaccgccgacaccgcccaactgatgtggcggttcaatagcttgccggatatggcacggtcagatgttgaattgttggcgcaggatattgccagctttatctgccttgagctgggcacaattagccaggaaatggcagattgtggcgatctcaaggtagcgcacgcgttgtttgttcgcgcaggcacgatcacccaggcattccgccagaacgcaccccattgggaaaaattgattaaccgctttttctgtgaagatgaggcggtttctgccgtgtctcgcatgatgtccgataagtggtggttaggccgcctgcgccgtcatgctggcgaatggcgcgaacacctacagattgcgttgaacaacgtcagcaagcgcgccagcacctacgccagcagaatggccattcttgaatggaaggaacaaaagcgccgcacgcgtgagtttctcaagtcgatggagctggaggatgaagacggcaaccgcataagccttatcgataagtattggggcagtgtggccaacccggccattcgccgtaccgaaatgatggtgcgtatccgtggctttgaaaatatctgcaatggcttgggctatatggcggagttttacacgttaactgccccttccaaattccacgccaccacgatccacggccaccgtaaccgcaagtggaacggcagcagcccggcagacacccagcgatatttacgccgcgtatgggaaaaagtgcgtgccaagttgcaccgcgaagacctgcgcatttttggcatccgggtggctgaaccgcaccacgatggcacccctcattggcacatgttgtttttcatgcgtccagaccaggccgaccaggtgcgcgaaatcctgcgggattacgcctttgatgaagatagcgccgagctgggcacagccaaagcccgcaaagccagattccacgcggaagccatcgacccggaaaaaggctctgctactggctatgtggctaaatacatttccaaaaatattgacgggtacgccctggacgatgagctagacgacgaaagcggcaagccgatgaaagaagcggctgccgctgctgctgcctggtcagcgcgctggcgcatccgtcagtttcaatttgttggcggtgcgccggtgacggtttatcgcgaactgcgccgcatggccgatcatgatacggcgatggggttaagcgtggaatttgcagcggtgcatgatgcggccgacgtgggggattgggcaggatatatcaacgcccagggcgggccattcgtccgccgggatgagctggttgcccgaacctggtacgaggtcagcaatgacgtaaacccatttggggaggaggtgatcagggttaagggggtgttttccccgtcagtgggcatggatacacccattttaacgcgagtgacgcagtggaagattgtgccgaagttggccgccgataaggcggctggggttagcgacgcgaacgcgtcgcctaggagttctgtcaataactgtacgccagaggattggcgacgattatcgagggagttacagcggcgtggttttgccggcgatcagtttgaaatggatatattggccaggggcagcgccctgcggatatacggcgatcgggtgttaaaaatgcgtaatggacgcctggaggaaatgggcggcaatccgtcgtgtgagttatggccaggctggaatggatga

SEQ ID NO: 429717 - DNA, 270 bp, Serratia marcescens
atgagaaagcatgatttaaaaatacgtcctgagcatttcgcagaagtggtaaatggtcagaaaaaggccgagtttcgtctcaatgatagaggttactccgtcggcgatctcctttgcttacatgagtttaggcaatatccagagtttgagcacttggaagggttccttggtaatcacatctgggtgcgcattactcacattactaacctgggggaatggctgtcggggtatgtgatgctgagcattgagcgggagctgttctcatgctga

SEQ ID NO: 429718 - DNA, 129 bp, Serratia marcescens
atggaaaaacgagggtttggcatgtcctgggtactgctgatcggcggcttttgtgccgtctgggtgtggatggggcgtgcggcagacaaagcagcggcgcatcgccctgaaaatcaaaattacgattag

SEQ ID NO: 429719 - DNA, 240 bp, Serratia marcescens
atgccaactatcggccaagacattagcaaccgagccgcccgcgcctcccttaaacatgctctcgacctggcgcgccgtgaagcccaagcggatgccgccgtgaagttttccggtcatttagaccgtatggccaccgctgtggccaaccaggaattatccgccgttgagattgtggagctactgcgccaggacgccgagaaatggaaaaacgagggtttggcatgtcctgggtactgctga

SEQ ID NO: 429720 - DNA, 408 bp, Serratia marcescens
atgaaaaccatcacagttgagaagcatgggttattggctgattttgtcacttggggcgtagcgccaaattatgcccgctttttcctgggcaagtgtcatgaggccaacggccagattgcattggaaccatttgtttttaatgactcaatgcatttgaccaacccacaccagtggtttgcggccaatactgcattttggtgccgagcttaccgcgaagctgagagcagcaaagagcaggctgaaacactggcttccattcgcgccatattctttgtggccggtatgttgggacagggcagcattaccgcgttgatcctccagtggtggcgggtaacgtttgagttgcacggcctgccggcacctaacatttccggcgctgcaaaatcgcaatctaaccgcattcactaa

SEQ ID NO: 429721 - DNA, 420 bp, Serratia marcescens
atggcaaataacagctattggctggccaagatccgtgcccaggtctgcccggagcattcagaggccgcagatttctggaacgccttaacaccggaatggcgcggcgttgtgatccacgctgcggcgctagaaggaaaggaagagttaaaagccagcttgtgtaactgcctctggcgcgagttattcgaccgtttaaccccgcaggcaatcatgcaaattcgtgccggcattcagaaggcccgaaacgtgttcggcgggtttggttctttgcgtgagtcggattttcaacgaaagggaacgcgccgaaagattaccccgcgtcaccctattgataagcaagtggagatggtggcagcgccgcacattctcagaattatagagcaacaaaatagcctgcaaaaccaggctgaggaacggtaa

SEQ ID NO: 429722 - DNA, 216 bp, Serratia marcescens
atgaaagcttttgcgcaatacctgaaacgacaatcaccggccccgcagttggccgactttggccacggttggattgaattaccgaacggccagcgctggcaaccaagcgccagccgagtggtgtttttagggggttccgttacaccaggtaaacaggccaagcgccgcccctggtggttccgtttgatggggttaagggggccgaatggcaaataa

SEQ ID NO: 429723 - DNA, 510 bp, Serratia marcescens
atgtttgatttcgaaagctccatacataagcaacttgattgcgcttgccgccgttttgccttggagcacaacctggcggagttggccccagcgctcaacatttccgcccaggtgctgcgcaataagctgaacccagagcagccgcacgagctgacactttcccaactggttacgctcactgcgatcactgacgacgcagcaatccttgatggactgttagcgcaacttaattgcctgccggcagtaccaaccaatgaggtcaagcccagtagcttgccgactcacacgttaaacgccactgcggcgatcggcgctatcgccggcgaaaccgcatccactgcgcctatgacgcaatcccgtaaaaacgccattctcgaccgcgccaaccaggcaatccgtgatttgtcgctgatcgttgtatcggtagaagcgcgtttccaatctacgccagtgctggccgctgctgttgacgtgttcaacacctgcgcgcctgcgttcggcatgagctga

SEQ ID NO: 429724 - DNA, 261 bp, Serratia marcescens
atggctgcaaccatttcaatcaacattacccgcgattgggtatatccagaggagttcgccaagcttgaggggatgtctatccacacggtctacaagtggaaagagcacggcaagctggagattcttccaaagactatcgcccccggtaaaaagcgcgctggcggacgtattcgcattaagtatgcgaaatataaagagcaacaagctcgtgaaatcctgggacattctaatttctcaattaacgtcgtcggcgttcactag

SEQ ID NO: 429725 - DNA, 564 bp, Serratia marcescens
atggattttaaaactggcgggactgaagccattaacaggatgctggaagcctatggctttcgctttagacaagaactttgtgaccacttaggtatatcaaaaagcaccctagcgacctggtataacaatgatacattcccaggaaatcagatagttagatgtgctttagaaactggcgtttctcttcagtggttagccaaaggggaaggggtgaaatatgaacactcgcaatctgacattagcaccctagacagctatcggctgatgggaagccagcttaagcagtcgggcaagatgatgtttgacaaagtatttctccctaacaatttaaaagagccttacgtaattcgcaccgaagcggaaacttacttcgtggataaaggcgaaaaggatcacactgacgggctatggcttgtagaaattgaaggtaagcacagcataagagagctagcctttataccaataagaaaagtaagggttatcggcggtggcgttccatttgattgcaacgtagatgagataaaaatgatagcccgcgtggtaggtgtttttaggaaggaatga

SEQ ID NO: 429726 - DNA, 1092 bp, Serratia marcescens
gtgacgatcagaaagttacctaacgggaaatggatttgtgaatgctacccatccgggcgcacagggaaacgagtgcgaaagcaatttgccaccaaaggggaagctgttgcttttgaaaatttcactatggaagaggtggacaacaaaccttggctgggtgaaaaagttgatcgacgcaaactatctgagctagttgccctttggcattcgctatatggacaaacattagctgacccacgtcgcatgtccgccaaactcaaaataatatgtgaaggtcttggcgatccgatagccagcgaatttagtgcggccgatttcacatcttaccgtgaaaaacgattaaacggattggttcgcctccaagatggccaagtgttgcccaaagtgaaaccccgaacagtgaacctggaacaaagcaacttgtccgcagtttttggaaccctaaaaaagatggggcattggaatgcaccaaatcccctttctggtttgcctgcctttaagattgcggaaagtgaactgtcattccttgcaccaaatgaaataaagcgcctacttgattcctgtgaagagtccttgaatcctgacctgataactgttgcaagaatttgcctagccactggtgcgcgatggagcgaggccgaaggcttgagcgggcaccaggttacaaagtaccgaatcacatacacaaaaaccaaaggcaaaaaaaacagaacagttcctgtttcccaagcgttatatgaagaaatccccaaaaaaagggggcgcttatttagcccatgccgtaaagcctttgaaagagcgcttaaaagagcaggaatagaattgcccgagggccagtgcacccacgtactacgccacacttttgcaagccactttatgatgaacggcggcaacatcttggtgttgagaaatatcctcggccatgcggacataaaaatgaccatggtttacgcacactttgcgccagatcatttagaagatgccgcaacaaaaaacccactggccggcctaaactggcaacctaaatttggcggcaaaatggcgacacacaatacaaaccaatacgaacgccaacaaacagaaacaaactaa

SEQ ID NO: 429727 - DNA, 1254 bp, Serratia marcescens
atgtatgccataaacgtataccaattatggaagaacccttgcatagcgcggactacacgccccctcacacataccgaagtacaaaaagccaaagccctcgagaaagacctcaccctgcatgacggtgacggactgttcctgttagtcaaaaccactggcaagaaattgtggcgtttccgctaccttcgccctggcaccagttcacggactatggttagcctcggtgcctaccctgccctgtcacttgccgacgcccgacaaatacgcgccgaaaagctcgcgatactggcaagaggcattgacccacaggccaaagaagcagaagaagcagaacaaaagcaggtagcccaagaaagcattttcctgaacgtggcaaagcattggttcgcattgaaacaggccagcgtcagcgctaaacatgctgaagacatctggcgttctcttgaaaaggacatactgccatctatcgagaatgtcccggttcaggacattaaagcacgtttgctaattcaagtgctggaacctatcaaagcccgtggtgcattagagacagtccggcgtttggtgcaacgcatcaacgaaatcatgatttacgccgtcaacaccggtttgattgatgctaatccggcttctggcatcggcaatgcgttcgagcgccctaagaagcagcatatgccgactatacggcccgaagaattacccaaactgatgcgcactatatccatgagcaatctatcgataccaacccgctgcttgcttgaatggcagttgctgacgctgatacgccctgcagaagcttctgcaaccgcatgggccgagatcgatatagaaaaccgtgagtggcgcatcccggcggaacgcatgaaagcaaagcgtgatcacattgttccactttcagatcaggcattatcaatacttaggataatggaaccaataagtggtagacgggagcacgtgttccctagtcgtaatgacccacgcaaaccgatgaatagccaaacagctaatgcagcactaaaacgtatcggatatggtgggaaattggtcgcacatggtttacggtctatagcaagtacagcgatgaatgaagctggttttaacccggatgtcattgaagcagcattagcacatagcgataaaaatgaagttagaaaagcgtataaccgctcaacttatattgcacaacgaaaagaattgatgatttggtggggaatactcactattaataacaaaaaggagtttacgtatgactaa

SEQ ID NO: 429728 - DNA, 1650 bp, Serratia marcescens
atgactaagaccacaaaacctacctttaaattcaaacaggagagtattgaaagttgtttcaaactcgccataaagaatatagttaagtatggtgacactgatatattcccattcccatatgaaactagaatgtttgatgatatggaagaggaaatggtggcatcattaaaagacacttatgataattttgataaaaaaagagatatagctccgccacttaatataagtagttgctctactgttggatatacaggatacagatgggcaactcaaatagatccatattggaacgcatttttcttgggtctagtaattaaactaagtaaagaaatcgaaaatgacaggctcgacgaaaacacagtttactcttacagatacaatccagatatctctgatttctcattgtttgataaaaatgttaactggcgaaaataccaactagatagtctaaaactttgtgaggataacgaggagataaactttatcctcacctgtgatattgcagacttttatcctagaatatatcatcaccgcttagaaaatgcattagatcgcctagatgaacataaaaacacatcaagcaaaataaaaaaacttttgcaattattttccggaaccaattcctacggagttcctgttggttgcccagcgtcacgcatacttgctgaactatctctaagttcaatagatcatatcctcagtgtgcacggatttaaattcaaacgatatgtagatgatttttatatattctgcgaaaataaagaatcagcacactcggcgttaacttttttaagtagaaagttaatggaaaacgagggacttacacttcagaaacacaaaacgaacatcatgtcgaaagaggagtttgtcacattaaccagatcaaaggtaaatggattagaagaagatgaaaagtcccctatgaaagccagctttatgtcgcttcctataagatatgatccatactctgcaaacgcagcagaacaatataaagaaataaaagaatccctcaaaaattttgatctgttagggatgctaagtgatgaattacagaaatcaaaaattaaccaaccatttagtaaacaattaattcgttcttttgctgcagtcgacgacagcacactctccagcgcttataatgttatttgcttaagctttaatgatctataccctatttttacaactatcatacaggtagccacatcaaattgggatagatttgattctcgcactaaagaatatatattcgaatctataaaagatctaattgataaagactcatttatccttaagacagaattaaatttagcatatatttgcaagctattgtccaggcaaaatagtacgacaagccaaatattgctaactgagatttacaataaaaacattaacagcatactaataacaaatattgttactcaagcaatgcttaaatggaatgtccatttctggttatcagatttaaaacgcagtttccctacaatgaatgcattacaaagaagaacttttattatttcaacataccaattaggtgatgaaggtgaacattggagaaatcataacaagagaaatttaaatttcatagaaaccatttataaggattggggcgcaaaaagaaaagcaaccaaggatattggagatgcattatga

SEQ ID NO: 429729 - DNA, 741 bp, Serratia marcescens
atgatttccgagctgacatttgcaaaaagattcacgtctttttggaatcaattactgccaaacgaaaaacattatgtacgccttattaatgatggtctttttgaagttgttgacgcaccgactggagaggataatagaaaggagaacattgtcttaataaatgagcttgcctttgaaatatacaagaaagtcttattaaaagaagtgaagatggccgaacttaattcaatccagttttataaaggtgataagtttttagaaatatataccaatgcaaaaacaaggctatccaaattcgcttatggttctaatttctcattacctttgacatcaagcgagttaagaactacccgagaattaacattaagattatacactcggtattatgaaaatatagacagcatgaaattatctccctttttttcaggatgcggttatataaatcattcaaatggagatttatacaccacaaataaattgatagagataaaatcaggcgctaggaactttggagttgtagacttcagacaagtattaatttattgcactttgaatttctactctaaagaaaaattaattattgaggatattgaattatttaatccaagaatgggtatattatactcatgtaaaaccgatgaattatgcgataaccttggttcacttaatcaagaagatctttattttgaaataaagcaatgtattactgaaaatagttatattgagggtgcaattttataa

SEQ ID NO: 429730 - DNA, 222 bp, Serratia marcescens
atgcaaaatcatgcaccctatgcatgcacgctcgatttaaggcaggctagccagagaaaaggctgtttttggacttggagaacggtaaaagccccgcagcaaaatcagcattgcagcgggggcagttcaatcagtgaagtgtttgatttcggctataacggcggtaacgatttaatgtccttttttccggcgtgtagtggcacagtgaatttggccacctga

SEQ ID NO: 429731 - DNA, 1191 bp, Serratia marcescens
atgcgacagcgaatcatcattatcggcggtggaaccggcggcaccatcctggccaatttattggccgcaaaattacaccaagagattattaataataaagtcgagttattaatgatatcggattcgccgctgcattattacaagccggcgtttatgtatgtggcgttcaatgcttttttcaagcaagagctcacgcgttcacagcggagtttattgcggcctgaaatacagtttattgttgataaagcgcaatctttcgatttaaaacagcgaagtatagctacgcaaagcggtaaaatttattcctatgactttctggtctttgctaccggctgtgtcccttggccagaacgcatcgaaggattggcgcaggcgggcgatcatttttatcagtatcaggccgccaggcggctggcgcataagctggcgacgatcgaaaaaggccgaattttcatcaccgtgtccttccccgaaacgcccaacgtgccccatcagtgcggcattgcgccgatcgaaaccaccttgatgctggacgactacctgcggcggcgcggcgtgcgcaaggcggtagagattgtgtacacctacccgaccatttcccaactgctgcgcaactgcctgtttttgcagcggccgaccggcgaagcgctgcccgccatttttgccgcgcgcgacattcgccaccagcgtgggtttaccctcagccgggtagacgcccagcgtaacatcgcctattccgccgaaggggaagaacagccgttcgacattctgatggcaacgccgccgattcgcgcagtcgaggcggtgcgcaataccgggttgagcgagagtcaaaacggcgaaggctggctgccaaccgatcatcaaacgctgcaggtctacggccagcagggcgtatatgtgatcggcgataccgtggatttgccggtcagcaaggccggcggctcttgccataatcaggcgccggtcattgccgacaacatcgtggcggaaatgcggctgggccagcccgtgagccattacgatggcaaggtgcaggcggtcgcgcaaatggggctgaatgccggcatgccgctggtctacgactatcggcatgacgtactgccgacgcccgccaccaaggtaggcggcatgctgcgtaatgggtttaaccgcggcctttactgggccacggtaagggggctgatatga

SEQ ID NO: 429732 - DNA, 405 bp, Serratia marcescens
atgacggaaagcacggtgcatgcggcggacctgcaatcattggcggcgttgctcgagaaattgcagccgctgctggcgggcgggcggttggataacgtggtcgatctgttgtcgctgttgtcggacgtggtggatatcgccgacaacgcgctggtggagaaactggccggcgtgtttgaagggctggttacggtcggttgggagggggggactgcgttgcagatggcgcacagcgagctgcaattgaatcctccgccggccagttttcgcgcgctgtacgccttgctgaagcagccggataccctgctggggttgacgctgctgctgcgtactttacaaatcatcggccagcgcacgcgagacagcgcattgccgccggccctttcggatgaatcaacgaattaa

SEQ ID NO: 429733 - DNA, 510 bp, Serratia marcescens
gtgaaaattgtatcgcgtgcattcgaggcggtgacggaagcggaattgcggtcgattcgctcgctgttgtccgacacttttcccgagataaccgacggattttatcggcggcaggtgccggtttgcctggtgaccgccgcggaaggcgaggtgatcgtcggccaactggcggtgcataagcggccggtgttgattgacggtgagaccgaggtgatcggcatcatcgggctggtggccgtggcacaaacgcatcggcgccgcggcgtggccgcaaacatgctggtgaaggcgcatgactatttgcgcagtaaagggatcgcgtattccatactgtttgcggtaagcgaaaagtactataccggcgccggctatcgggcgatggaaaacgagacggcgttcattgaggatggcgagagcaaaacgtttgtctatcgcgggggaatggtgctgagcctgtcggaaaggccctgggtggcgcggcgcctggatctgcaaggcgaggtagtgtga

SEQ ID NO: 429734 - DNA, 1131 bp, Serratia marcescens
atgaaaattgtcatgatcaatacactttatgctccttataaagtaggtggtgctgaagtttctgttcaactgctggcagaggagttaatccgtaatggtcacgatgtgactatcttttgtttgcacgaccacagtgatatattgaaagatactctaaatggtgttcgtgttttttattttcctctaaaaaatatttactggccattttccaatggtaggaaagggcgattaataaaactcgcatggcatatcattgacatgtacaacccttggatgatgtcacttgttggtaaagaattggccaggataaaacctgatgttgtacatacaaacaacttaagtggcttttcagtttctgtttggaaagcagctaaaaaagaaaaaataaaaatagtccacaccacgcgagattactatctttttcatccgaacagtacattgtttaagtcgggtaataatgttgatgttaatagtattggagtgaaactactttctgctgtgaaaaaaatatgcagcagaaatgttgattgttttgtgggtatcagtgagtatatttctaagcttcataggtcaaataaatttggcattaactctactcatgcatatatctataatcctatttcatgtattgattttaaaagcgataaaaagaatcatgaaaatgtgcgggtgggcttcattggacgattgactagagacaaagggtttgatgattattgttcgttagctgcaaaatatagaaataccaaaggtattgatttctatgccgcagggcgcttcggtaatgatactgaaggtaatgaattagaaatattagcatctgccagcaatataaaaacgatgggttttattaaggtagaggattttatggcgtcgattgatgttgtggttctgcctaataaatggaacgaaccatttggacgggcagttgctgaatccgccaatgcagggaaagttgtttatactaattttacgggaggggtggctgaaatagcaaaactttatgataatatattccccatccaagactttaatattagctaccttatgactcatcctacatttaatgtaaatccggttctggattttgatataaaatatattgcagggaaatatatcgaactatattga

SEQ ID NO: 429735 - DNA, 1017 bp, Serratia marcescens
atggatgcttatattgcgtatatcgaatcgccattgcaggcgtttaatttaatagagtttttggatgctaaaaatataagtctggagatcttgattatcaataaaaaaaccgaaaactctgcacttaattataatcagatcatgaatatagtggatatgattaagtacaaaaaattggttactattgatgtggaaggaactctaaaaaactcatttaagatcaaaagtgttcttaaaggaattggtgaaaattcaataaataaaaacagagtcactcttattgcaggagaataccgtgcgcgtgttttctggatgctagccggaaaatttaaaaaaagaaacattgttcttcttgatgatgggacggcgacgctaagaataaatcgagaggagggaattagtccgcgaaaaattatcaagtctttcttcttgaaatccattggtatggttaacaatgagttcgaaaaaatcacattcttttccgtatataacattgaagaaaaagtcaagaagagtgatgttgtcataaggcactgttacgaaaattataaaagaaagctagcaagcttacccagtaacgataataaagtgtttattattgggtcaccgctttttgaggccggagtaacatcggttgatgatattcaattaacattaaatatgataaaagacttattgaattcaaagcctgaatctgttttttattatgtcccacatcgtagagaaagagctgaaaaaataaaaaggatatcggagcttgtcaaagtgaaaagatttgactttcctttcgaagtgtatcctttaatggaaaaagagaatgtgtcttcgattgctgggttttattcttctttatacgacaatttgatcatgatctacggggataagataaaaataacgtcttacgttatcaatgaggctaatttgtccccagagtggaagtcttttgtcggctgtatatacgataattattctcgatataataatgccaacattgaactgattaacaaggtgctttga

SEQ ID NO: 429736 - DNA, 243 bp, Serratia marcescens
atgctcaacatctcgttgagaaaacacttttgccggatgtcctcctgcaatagcaaacgcaggaacatgcttagttacgacactgcctgcctgtatgatcgcaccttcaccaattgtaacacctggaagtataatcacattgactccaagccaaacattatcaccgataataacatccttgataatataagtactatcgtatgggatagcattgccgtggtgattatgattttccgtaattaa

SEQ ID NO: 429737 - DNA, 1224 bp, Serratia marcescens
atgggggctgcggccttgtcggtaggggatattctcggcaaggtcatcggcttcatcatattgccttatttgacagcacaccttggcgcgtcggggtacggcgcgctgactctttatttgtccgttattcagatcttgatcattttcatttcgttcagtggtcaaggtctgttgccggtcaaatacattcaggagggggaagggagctccctggtgtttcgtagagataacatcaccttagctttcgcttcgagcgtgctattgatggctatattctacattgtcacactggtcgccaagatatcagtttctttcagcgatggttttctggttgttttagcctctctggcacaggcgctgaactttatcaatttatcgcatttgcgcattagtcagacctataaagttgctgctatcggacaatttttgctttccgcattcaacgttttattcacgatcgctctttttgagatgatagcggcgacgccaggacaacgtttgatagcgatagcggcatcatttttcagtattcagttggcctatgagttctttgtttacagaaaaatagcggttgagcgcagtgtgttccaaccggtgcgcaagcgttataaggaaatcattagctacggggtatccctattgccgcatcacggcagttattggattaaatcctctgtagatcggttcttcatagcccactacatgagtacagcggtagtcggggtttatggtttggcgtttcagctaacctctatcgttatgctctttttcggcgtaatcaaccaggctttccaacctttcatttatcgcaagcttaaagcgaatgattttaaaggcgtggaattaattcagtatggctatacaggcttggtgattatcgcttgtgtagcgtattttgtcattttgccgtttgtttttccttacctatttgaaactgagtttaacagcgcgatttattactttaatattcttcttccgggaactgcattcttatctatctattatgtttttactcattctttattttattaccgcaaaaataaaatcatttcaattatcactatggggtcgatgattacacatttgattggtatcttcatcataactgtgacagagataagagtagagtatttttgcttggtatacacgttatcaagtcttttcgcctgcgttgtcactattgtttgtggaaggcgagagttacggaggtctcagataaaatga

SEQ ID NO: 429738 - DNA, 2241 bp, Serratia marcescens
atgttaattcagaaaaaaatatctgactttttagtgtttgaaaccgaatcaatcattaaagccttagaaaaaatcaactcgaataaaaaacgcattatttttgtcgtcaccgaagacggcaagctgtgcggctctttctcggacggcgatttccgccgttggataactaacggcgatttcgacctgagccgcgaaatttcggaagtgatgaatcagaatgtccgctataaaaaagtggatgcgccacgtaatgagattgaatcgctgttttcgaatggcgttgacgttctgccgctggttgacgattatcgtcgtttggtcgccgttgctctgcaaagcgaaaaaggtctgacgattggcagacacactatcacggagacctcgccgacttacattattgctgaaattggcaacaaccataatggcgacattaagctggctaagcatcttgttgacctggcggttgacgcgggcgccgattgcgtcaaattccaaatgcgcgatctgagttctttgtataagggcggcaacgataaagacaaatccgccgatcttggcgcgcagtacacgctggatctgctgagaaaattccagcttagcaatgaagaattgattgaagtgttcgattattgcaaggagaaggggctgaccccgctgtgtactccttgggatctgaagagcttgcaagtgttggaagactatggcatggaaggttataaggttgcttccgcagacttcactaaccacgaaatgttggccgcgttggccgctacgggcaaaccgctgatttgttctaccggcatgtgcagcgaagctgaaattaaaagctcggtggacttcttgaaatcgaaaggtgccgagtttgtgatcctgcattgcaactctacttatccgaccccgtttaaagacgtcaacctggcctatatcaagcgtctgcagcaggtgacgggctgtctggtcggttattctggtcatgagcgaggcatttcagtgccgatcgccgtgaccgcattgggcgccagagtgatcgaaaaacacttcactatcgacaaatccatggaaggcaacgaccacaaggtgtcgttgttacctcctgagttcaaagagatggtcgtacgtatccgcgaagttgaagagtccatgggcaacgccggcgaacgtactattacccaaggggaaatgatcaaccgcgaaactctggcaaaaagtttgattatcaatcgcgatctgaaaaaaggtgaaatcatcactcgcgagatggttgaagtgaagagtccgggccagggcctgcagcctctatatctggagcaattggtcggtaagaaagccaatcgtgaccacgaaaaaggagggtatttctacgagtcggatctgaatgacgtggcgatagaagccaaggactatgatttcaatcgtccgttcggcattcctgtgcgctatcacgattacggcaagttgaagaataaatccaatctggatttcgtcgagttccatttgagctatcaggacatggagctggatttgactgaattcttctccggcgctgaaaatatcggttttgcggtacatagccctgagctgttcgccaacgatcacattttagacttggcgacggatgatccagtttatcttgctcattcgatcaaacagttgcagcgtgtctgtgatgtgactcgcgcgttgaagcaatatttcccgaaaactgagcgtcctgtcatcgtggttaatgcgggcggtttcaataccaccggattcttgccaaaagagtcacgccaggcgatgtacgaccgcattggcgcggctttgggtgaaatcaatcaagaaggcgttgaaatcatcatccagacgatgcctccgttcccatggcactttggtggtcagagctatcataacctgtttgttgatccggacgagattaaagcgttctgtgaaaaatacggttatcgcatctgctatgacacgtcgcattctatgatggcttgcaattactaccaatgggatctgcatgactttacccagaaggtcggtccttacaccgcacatatgcatattgttgatgctttgggagtggacggtgaaggggtacagatcggtaaaggcgatgtgaactttgacgagctggctgatgatctgcgttgtcatgcgccgggagcgcagtttattcctgaagtgtggcaggggcacaaaaaccaaggagaagggttttggcatgcgcttaacttcctggaaaagtatctgtaa

SEQ ID NO: 429739 - DNA, 2154 bp, Serratia marcescens
atgactaacaacagtaaagctggccagcttccagctagccaaagcaatgatgagatagatttagccagattgattagtatcctttttgatcatcgctggttgattttagggttcacaactttgttttgtgtattgggaatcctgtatagtctttttgccactccaatatatagagccgacgcattaattcaggtggaaaggagtgatggtaattcgcttgttaatgacctgactcaaatgcttcctgatgcacaacctgcgtcgtcaacggaaatcgagctgataacttcacggatgattttgggtaaaacggtaagtgatctgcatctagatacgatcgcgaatcagaaatatttccctatattcggacgcggttgggctaggctgatgggggaagaaccagggcaaatcgcattatcgcggttaagtgtaccacctgaactatctgatgctgacatcgaattgacagtagtcgataaagaaaattataccatttcaaagaatggtgattttttatttaaaggccgagtagggcagttggcgtcaggtggtaatatatctctacttgtcagtgggatagaatccgctccgggagttgtttttgaaattgaaaaactgtcaaaactttctgcaacattaaaccttttagacaatctgacagttgaagataaagggaaagacacaggtgttctgtcaataagttataatggtgatgatcctgttcaaattaaaaaaattgtagatagcataagtcgtaattatcttgaacaaaacgtagaaagaaaatcagaagaagccgctcgtagtttggcatttctgaaagatcaattaccattagtcagagagtcgttaaattctgcagaggataaacttaatagttttcgccaaaagaatgattctgtcgatttgtctttagaggcaaaatctgttctggatacaattgttggtgtggaagctcaattgaatgagcttactttcaaagaggctgaaatatccaagctttatacgaaagagcacccagcatatcgagcgttgatggagaagcgctcgacattgcagcaagaaaaagataagttgaataaacgtgttagcaagatgcctcaaacccagcaggaaatacttcgtttaacacgagatgttgatgctgggaaagaaatctatatgcaattgctgaataaacagcaagagctctcgatcactaaagccagtaccgttggtaacgtccgcattattgactctgcggaggctgcccctaaaccggtaaaaccaagaaaagtgctaatcatcattattgctactttatttggcggtgtgctttcagttgttgtagtagtcttgaaaaatatgcttcacagagggatagaaagtcctgaggaacttgaacagcaaggcattaatgtgtacgcgagtattcctctttctgaatggcaacagaagaaagatagctctatcctcaataaaggacaaagaaagaatcaagctaatgttgactcgttgcttgctgtaggcaacccagcagaccttgcgattgaggctgtacgtagtctacgtactagcctgcattttgcgatgattgaagctaaaaataatgtgttgatgatatgtggtgctagcccgaatatcggtaagacgtttgtaagtttaaacttagctgctgttgtttcacaggctgggcaaaaagtcctccttatagatgctgatatgcgtaaaggttatgcacatagcctgttaggttgtgagttaggtatggggctctcagatttcttatcaggtcaaacgtctgtcgaaagcgtaattaaaaagacagagttatctagtctagactttatttctcggggtaaagtcccaccaaacccatctgagctattaatgcataaacggttaaccgaactcttaacatgggcaagcgaacactatgacatagtgcttgttgatacgccgcctatccttgcggttacggatgcagctattgttgggcgaaacataggcacaacattgcttgttgcgcgtcatggtataaattcactgaaagaaattgaagtgagtattcgtcgtttcgaacagaatggtaccgagattaaaggtgttattcttaatgccgttgaaaataaatccggtgacgcttacggctattacgcttacgagtataagtaa

SEQ ID NO: 429740 - DNA, 1182 bp, Serratia marcescens
ttgtcagctttgttgaaacacatacttgaaagtgatgataactcgatggcaaaaagaaaattgaaaattatatcgatacttgtatccgtcggtatcctcagtggttgtactatccttcccggacagcatttacacacatcaggaaaagacacggtaaaacaagaggatagtgattttaatatcgatgaactggtgaatgtatatccggttacgccaaagttaattgacaagcttcgtcccccacgagtagtcgctcagccgaacgcgttgcttgaacaagcacttcgtagctacgaatatcatatcggtattggtgatgtccttaatgtgactgtgtgggatcacccggagttgactacaccagcaggccaataccgaagcgctagcgatacggggaactgggtccaatcggatggtacaattttttatccttatattggtaaagttcgtgtagcgggaaaaactgcgacccaggttcgttctgaaatagcaagtcggctttctcaatatattgaaagccctcaggtcgatgtcaatatagctgcgtttcgttcgcagaaagcttacattactggtgaggtatcgaagtcagggcaacaagctatcactaatgttcccttgacggtacttgatgcaattaacgtcgcgggtggcctgacggaaaatgctgattggcgtaatattgtgctcactcacaatggtaaagaagagcgcctgtctttgcagaaaatgatgcaaaacggcgatcttacgcagaacagattattgtacccgggtgatattctttatattcctcgaaatgacgatcttaagatatttgttatgggtgaagtcaaaacaccagcgacactgaaaatggatcggagtggtatgacactcacagaggccttaggtaataccaatgggataagccaaacgactgcagatgcaaccggtgtgtttgtcatccgacctctccatggtacacagggtagcaaattagctgatatctatcagttgaacatggctgatgcgacagccatggttatgggggcggaattccaacttcagccttatgatatcgtctatgttactgcagcaccgattgtccgttggaaccgtgttatcagtcagctggcacctacaatatcgagcttcaatgacctgactgaaggtacattgcgcattcgtaattggccatag

SEQ ID NO: 429741 - DNA, 393 bp, Serratia marcescens
atgcctgtatttaccattacgctgaaaagtcgtaatacgcttgataagaaaagaatttcatcagctattcacgcggcggtagtaaaaaccggctatcctgcgaacgatcaattccagcgctttatccgtcttggggaagacgatttatatgtggaccccacttatcccgatctggaatccccccgcagcgctaacttcgtgttgattgaagccatgctttcctctggttcccctgatgcccgcaaacaattgctcttgcaatcactggtacaggaactcgccctgattggactggacagcaatgatctgatggtccttttcattgaactggatcgtttgaatagttcattcggcggcggcagaagggcatcgccgctttctatgtcgcaataa

SEQ ID NO: 429742 - DNA, 1011 bp, Serratia marcescens
atgaacgcgctaaataaaaaaaccttatttacctatttcaaggaaggcggcatttacgtggtgttgctggtgctgttggccatcatcatcattcaggatcctaccttccttagcctgatgaacctgagcaacatcctgacgcagtcttcggtgcgcatcatcatcgcgctgggcgtggcgggattgatcgtgactcagggcaccgacctgtccgccgggcggcaggtggggctggcggcggtggtggcggccacgctgctgcagtcgatggataacgtcaacaaggtattcccgcacatggaaacctggtcgattcccctggtcatcttgctggtgtgtgcggtcggcgcggtgatcggcctggttaacggcctgattatcgcctatctcaacgtgacgccgttcatcaccaccttgggcaccatgatcatcgtctacggcatcaactcgctgtattacgattcggtcggcgcgtcgccggtcgcgggtttcgatccgaagttttccacctttgcccagggcttcttgcgcttcggcgactttaagctgtcgtacattaccttttacgcgctgatcgccatcatattcgtctggatcctgtggaccaagacccgcttcggcaagaacatcttcgccatcggcggcaacccggaagcggctaaggtgtccggcgtcaacgtgccgttgaacctgatcatgatctatgcgctgtccggcgtgttctacgccttcggcggcttgctggaagcggggcgcatcggcagcgccaccaataacctcggctttatgtatgagctggatgccatcgccgcctgcgtggtggggggcgtctcatttgccggcggggtgggtacggtgtggggcgtggtgaccggggtgatcatctttaccgtcatcaactacggcctgacctatatcggcatcaacccgtactggcagtacatcatcaagggcagcatcatcatcttcgccgtggcgttggactcgttgaaatacgccaagaagaagtag

SEQ ID NO: 429743 - DNA, 309 bp, Serratia marcescens
atgcaatttaccgtatatgacaatacgtatccggcatcagcttatccctacttactggacgttcaaagcgatcttattgatgtcctctcgacccggttaatgatccccctttatgctttggataacgtcagggttaaaatttctgcacgtttatgcccggagattgaggtcaacggcgaaaagtttcttgttatgacgcatgagatggctgccgtacgtatttcgcagattgggaaggccgttggtaatgtcaatgagcacaggaatcaaattaaagccgctatcgattttctgattgatggcttttga

SEQ ID NO: 429744 - DNA, 237 bp, Serratia marcescens
atggcaaatagcaatgtgacgaaaaagacagtcaacgtaaccatcgatcgcgatcttttccagcgcgcaaaatccctgggcgtcaatgtgtcatccgtattgacggacgcattgagcgtccgcgtcagggatattgagattcaacagtggcgcgagcaaaatcgcgcggcgttagaagagcttaatcgtatcactgaagaaaatggtttgttgtctgatgaatatcggacattttaa

SEQ ID NO: 429745 - DNA, 195 bp, Serratia marcescens
atgtcatcgaaatcccgcctgttaacggcagaatcccacccaatccctatgagcatgaaggaacggcaccaaaaagagatgcaagccttccacgaagaatgggctgaacaaaggcgccgcgaatggcgtgaacgcggcggcgttgaagccagtgaaccgcccgcacgtagcatcgataccgaactttcatcctga

SEQ ID NO: 429746 - DNA, 309 bp, Serratia marcescens
atggttgtgcaccacaatgaggcaccgaaatggtgcgtaagaattatcttggtgcacggggctatcattaaccaaattttggctgtgaaacaaccgttctttaacgtttttgcttcaatattgataactaactctaactttcatgatgcaccgacggtgcaagcgggggccgcgagaggagaaaaaggggagcagataatgctaacgcaactggctgtctttgctgccgcgccggttgtacaggctattggccgcgtgttttttgtcttgttctgcctggcaggcgagacaaaaacgcacgcctgttaa

SEQ ID NO: 429747 - DNA, 1131 bp, Serratia marcescens
atgaaacaggtacgcgttgggttaatcggcaccggctatatcgggcgttgtcacgctatcgcctatgcgcaggcccccacggtatttccccttaaaggggatctggtgctggagatgctggcggaggtgacgcccgagctggcggcgcagcgcgcggccgagttcggctttgcgcgttcgaccggcgactggcggcagctggtggccgatccggcgatcgacgtggtagacatctgcgcccctaatttcttgcacaaagagatggcgctggcggcgatccgccacggcaagcacgtatattcggaaaaaccgctggcgctggacgccgccgacgcggcggagatggtgcaggccgcccgcgccaagggggtgaaaacgctggtcggtttcaactacatgaagaacccgaccagccagctggcgcgcgagatcatcgccaacggcgaaatcggcgaggtggtgcatttttacggcacccacaatgaggattacctggccgacccgcgcacgccgatcgactggcactgccgccgcgccagcgccgggctgggcgcgttgggggatctggcggcgcatatcgtcaatatggcgcactacctggtgggcgatatcgtggcggtctctggcgatatgcagaccgtgatcaagcagcgcccggacccgcaagacccggcgcgcctgctgccggtggaaaacgaagatcaggccagtgcactgctgcgtttcgccggcggggcgatgggcacgatcgaaacgtcgcgcatcgcctgcgggcgcaagatggggctgacctatgtggtcaccggcactaaaggcacgctgagctatacccaggaacggatggcggagctgaagctgtatcggcacgatgaaccggtggagcggcaggggttcaagacgctgctggtggggccgaagcacccggactatgcggcgttttgcatcagcgccgggcacggcattggttttaacgatcagaagacggtggagatccgcgatctggtcaacggcatcgccgcgggcgatcgcatgtggccggactttgaagaaggctggaaggtgtcttgcgtgctggatgcgatagccgcctccgccgagcagcggtgctggctggagatcaaccgcgattga

SEQ ID NO: 429748 - DNA, 1026 bp, Serratia marcescens
atgagcagcgatcaaattccggtttccaacgcgttggcggtgcgcctcgcggcgcaaggcgtcgatctcgaacgggtcggtcagttagccggcttgcccgccgggctgctcagcgagcggcgcgtaaaagtgcggttgaccacccaccagttcttcgccgtctggcgcgccctcgcccaactgagcgacgatcccgcctttggtctgcggctgggcggcgacgtcgcgccggagcattacgatatcgcgtcagtcgccgcactgcactccgccacgatgggcgaagcgctgcgtaaagtcgcgcgctacaaacggttggtgtgcccggaagaactgatgctggaggaagatggcgacagcgttcggctgcatacgcgttggacgatgatcgaggaccatacgccggaattgctgatagacaccatgttcgcctctatcaccaccctgtgccgccgtggcaccggtttacctctgcagcccaaggcgcttgaggtgacccgccgtcgcgatccccactcaccgctgctgcgccacttcggctgcccggtgcgattcgacgcgccgctggacgtgctggtatttgaccgtgcgctgatgcagcagccgctcatcacccacgaccaggacatgctggcgctgctgctgccggagctggaggccgagttggccgaagcgcgcgccgagcaagacttgcccacacaggtgatgacgatcctcggccgcagcatgcgcggccagcgtcccagcgtcaacagcgtggccgcggagctctatctcagcccgcgcacgctgcagcgccgtctgcaacggcacggctacagctaccagcagctgctggacaaaacccgccaccgcaccgcctgccgcttgttggcggataccgatcttgagcctggggaaattgcctttgtgctgggattcgaagagctgaattcgttcagccgcgcctttattcagtgggaagcgctgacgcccagccgctggcgcactcagcgtgcagccgaccatcgggaggacagagcatga

SEQ ID NO: 429749 - DNA, 666 bp, Serratia marcescens
atgaaagtgattatcttcggcgccagcggcatggtgggccagggcgcgctgcgagaatgcctgcgcgatccgcgggtcagcgaagtgctcagcatcggccggcgcccgttggcgcagagccacgccaaactgcgccagctctccctgcccgacctgcgtgacctgtcggcgctggagccgcagctcgccggctacgacgcctgtttcttctgtctggggatttcgtccgccggcctgagcgaagccgagtatcgctcggtaacttacgacctgacgctggccgcggctcgcccgttggcgacgctgaacccgacgatggtcttcatctacgtttccggcgtcggcaccgacagcagcgaacgcggccgcagcatgtgggccagggtcaagggcgccaccgaaaacgcgctgctggcgctgccgttccacgcggtgatgttccgccccggcgccattgtgccgctgcacggcattcgctccaaagtccgtacatacgatctgatttatcggctgttcaaaccgctgtggctcggcgcattgcggctgtttccctcgcaggtgagcagcaccgaacgaatcgggctggcgatgctggcggtggcgcgccgggaaaccgccttgcgcatcctggagccgccgcagatcaatcaactggcgacgcgctga

SEQ ID NO: 429750 - DNA, 234 bp, Serratia marcescens
atgcagactgaaggtttcccgaacgcgggcgcctcgcggcggctgatgtatgtaggcgtggcgacgctgctcgttctgttgctgttgtcttttcgcggcgatgcgcagagccatagccacggcggccatcatgcttccgctttgcagcgggtgcatcaggcggcggcgacggatgcttacggctgcgccaagtcgcgcattaaaaagcagctgcgccgcctggctcagctttga

SEQ ID NO: 429751 - DNA, 345 bp, Serratia marcescens
atgactgataatcgcctgctcagactgcaaaaaatggcacagcgttttaatgagatcggtgcggtgtcagacgataccgtacgcaacatcgccacacgagtacaggcgcaggaacaacatgcccagcgtgagcagcatgatcaaatggacggcgcacgcatcaaaatgctgcgcagacggctcggcttgagccaggccgatttagcggccgtggtcaacatgtcgaccaccagcgtacaaaaatgggaacgtaacgcggtaaaaccccagggagccgcactcagaatgctggaaattatcgaacagaaaggggtcgccagcctgatcatctcaccacgaaactga

SEQ ID NO: 429752 - DNA, 387 bp, Serratia marcescens
atggacattttcgtcacggatgatttcgacaaatttatgaagaaaaatcgcatcgtcgatcaaaagatttgcaccgcggctcacgaactcgcacacggtaaccatgacggcgatctgggcggcggcgtctacaagaaacgtatttcgctcaatcggggtaaacggggtggagctcgatccatcgtggcgtttaaacgcggtcgtcatcagtattttattgatggatggctgaaaaacaccgtaaaacagaacggtgcaaaagaaatcaacgatgatgaattggcaacctatcgcgagctcgccagagattttcttgccatgccgccggaaattatcaaacgagccatcgatagcggctacttgcgagaggtgaaatgcgatgactga
